United States Patent Application Publication US 2023/0026259 A1 - sequence listing, part 31

SEQ ID NO: 115077 - DNA, 2634 bp, Homo sapiens
  Payload ID: 2470
  Gene Symbol: CATSPERG
  Gene Name: catsper channel auxiliary subunit gamma
  ENST ID: ENST00000409410
  CDS Start-End: 653-2634
ggaagagtcgtgggagctgggagaggagggaaagaggggaagagtcgtgggagctggcagaggagggaaagggggagccgaacgtgaagggcgaagggcggggcggggcaggagagtcggggtatagagcaggcaggtgttaatggcatgggaaggaagagtaagaagtggggcaagaaggtgtcgcggtacgaggggaaggtgagactcaagaaggtgccggctaagaagctggtgccggcgtggaaggagaaggtgtggggcgaggaaacaacgaagggcgaggaaagatcccgaggcgaagagacagttttcatcgagaaggggcagggcgaggaggaggggcgttaccagagggcgggacggggcgacgggcccgcgcgggaagaaccaatcgccgagaacccggggaaggaacgggtccataaagaccaagtggaggagtaggggcgcggtcaggagcggaagcagagtgaggagcaagccccgggcgagaaacgggggcccggccgggagcaagagcaggggcggggccgggagcaagagcaggggcggggcccggagacgggcgagaccaggtacagtacccagcccctgggcagaccccgagcgaggagaaagcggcgataccaagagaagttctagccacgttatgtgcggcccagccatgttccctgccggtcctccgtggcccagagtccgagtcgtgcaggtgctgtgggccctgctggcagtgctcctggcgtcgtggaggctgtgggcgatcaaggatttccaggaatgcacctggcaggttgtcctgaacgagtttaagagggtaggcgagagtggtgtgagcgacagcttctttgagcaagagcccgtggacacagtgagcagcttgtttcacatgctggtggactcacccatcgacccgagcgagaaatacctgggcttcccttactacctgaagatcaactactcctgcgaggaaaagccctctgaggacctggtgcgcatgggccacctgacggggctaaagcccctggtgctggtcaccttccagtccccagtcaacttctaccgctggaagatagagcagctgcagatccagatggaggctgcccccttccgcagcaaagagccatgcatggcagaagaagtgtgtagcatgagctggtacacgcccatgcccatcaagaaaggcagtgtggtcatgcgtgtggacatcagcagcaatggcctggggaccttcattccagataaaaggttccagatgaatatcaacggcttcctgaagagagaccgggacaataacatccaattcactgtgggagaggagctcttcaacctgatgccccagtactttgtgggtgtctcatcgaggcccttgtggcacactgtggaccagtcacctgtgcttatcctgggaggcattcccaatgagaagtacgtcctgatgactgacaccagcttcaaggacttctctctcgtggagctgagcattgacagttgctgggtgggctccttctactgcccccattctggcttcacagccaccatctatgacactattgccaccgagagcaccctcttcattcggcagaaccagctggtctactattttacaggcacctataccacactctatgagagaaaccgcggcagtggcagttggattcgtgtcctggccagcgagtgcatcaagaagctgtgccctgtgtatttccatagcaatggctctgagtacataatggccctcaccacgggcaagcatgagggttatgtacacttcgggaccatcagagatggccaggtgtcctttgagatgctgcccaggcagtggtctgtgtgcgagcagataggagttaccacctgctccataatttggtctgaatacatcgcgggtgagtatactctactgctgctggtggagagtggatatggtaatgcaagtaaacgtttccaggtggtcagctacaacacagctagtgatgacctggaacttctctaccacatcccagaattcatccctgaagctcgaggattggagttcctgatgatcctagggacagagtcctacaccagcactgcaatggcccccaagggcatcttctgtaacccgtacaacaatctgatcttcatctggggcaacttcctcctgcagagctctaacaaggaaaacttcatctacctggcagacttccccaaggaactgtccatcaaatacatggccagatcgttccgtggggctgtggctattgtcacagagacggaggagatctggtacctcctggagggcagctaccgggtctaccagctgttcccttccaagggctggcaggtgcacatcagcttaaagctgatgcaacagtcctctctctacgcatccaatgagaccatgctgaccctcttctacgaagacagcaaactgtaccagctggtgtaccttatgaacaaccagaagggccagctggtcaagaggctcgtgcccgtggagcagcttctgatgtatcaacagcacaccagccactatgacttggagcggaaagggggctacttgatgctctccttcatcgacttctgccccttctcggtgatgcgcctgcggagcctgcccagtccgcagagatacacgcgccaggagcgctaccg

SEQ ID NO: 115078 - DNA, 3746 bp, Homo sapiens
  Payload ID: 2470
  Gene Symbol: CATSPERG
  Gene Name: catsper channel auxiliary subunit gamma
  Uniprot ID: Q6ZRH7
  ENST ID: ENST00000409235
  CDS Start-End: 116-3595
gaagtcggctgtggaagtgtgggcggccattttgagaccgggcaagaggggcgggactggtgcggccgagtgacagttgaccggttttaaccaagtgactggttctagccacgttatgtgcggcccagccatgttccctgccggtcctccgtggcccagagtccgagtcgtgcaggtgctgtgggccctgctggcagtgctcctggcgtcgtggaggctgtgggcgatcaaggatttccaggaatgcacctggcaggttgtcctgaacgagtttaagagggtaggcgagagtggtgtgagcgacagcttctttgagcaagagcccgtggacacagtgagcagcttgtttcacatgctggtggactcacccatcgacccgagcgagaaatacctgggcttcccttactacctgaagatcaactactcctgcgaggaaaagccctctgaggacctggtgcgcatgggccacctgacggggctaaagcccctggtgctggtcaccttccagtccccagtcaacttctaccgctggaagatagagcagctgcagatccagatggaggctgcccccttccgcagcaaagagccatgcatggcagaagaagtgtgtagcatgagctggtacacgcccatgcccatcaagaaaggcagtgtggtcatgcgtgtggacatcagcagcaatggcctggggaccttcattccagataaaaggttccagatgaatatcaacggcttcctgaagagagaccgggacaataacatccaattcactgtgggagaggagctcttcaacctgatgccccagtactttgtgggtgtctcatcgaggcccttgtggcacactgtggaccagtcacctgtgcttatcctgggaggcattcccaatgagaagtacgtcctgatgactgacaccagcttcaaggacttctctctcgtggagctgagcattgacagttgctgggtgggctccttctactgcccccattctggcttcacagccaccatctatgacactattgccaccgagagcaccctcttcattcggcagaaccagctggtctactattttacaggcacctataccacactctatgagagaaaccgcggcagtggcagttggattcgtgtcctggccagcgagtgcatcaagaagctgtgccctgtgtatttccatagcaatggctctgagtacataatggccctcaccacgggcaagcatgagggttatgtacacttcgggaccatcagagatggccaggtgtcctttgagatgctgcccaggcagtggtctgtgtgcgagcagataggagttaccacctgctccataatttggtctgaatacatcgcgggtgagtatactctactgctgctggtggagagtggatatggtaatgcaagtaaacgtttccaggtggtcagctacaacacagctagtgatgacctggaacttctctaccacatcccagaattcatccctgaagctcgaggattggagttcctgatgatcctagggacagagtcctacaccagcactgcaatggcccccaagggcatcttctgtaacccgtacaacaatctgatcttcatctggggcaacttcctcctgcagagctctaacaaggaaaacttcatctacctggcagacttccccaaggaactgtccatcaaatacatggccagatcgttccgtggggctgtggctattgtcacagagacggaggagatctggtacctcctggagggcagctaccgggtctaccagctgttcccttccaagggctggcaggtgcacatcagcttaaagctgatgcaacagtcctctctctacgcatccaatgagaccatgctgaccctcttctacgaagacagcaaactgtaccagctggtgtaccttatgaacaaccagaagggccagctggtcaagaggctcgtgcccgtggagcagcttctgatgtatcaacagcacaccagccactatgacttggagcggaaagggggctacttgatgctctccttcatcgacttctgccccttctcggtgatgcgcctgcggagcctgcccagtccgcagagatacacgcgccaggagcgctaccgggcgcggccgccgcgcgtcctggagcgctcgggcttccacaacgagaactcgctcgccatctaccagggcctggtctactacctgctgtggctgcactccgtgtacgacaagccgtacgcggacccggtgcacgaccccacctggcgctggtgggcgaacaacaaacaagaccaggattactacttcttcttggcgagcaattggcgaagcgcgggcggcgtgtccatagaaatggacagctacgaaaagatctacaacctcgagtccgcgtacgagctgccggagcgcattttcctggacaagggcactgagtacagcttcgccatcttcctgtcggcgcagggccactcgttccggacgcagtcagaactcggcaccgccttccagctgcatagccaggtggacgtgggcgtggtgctggccgaccccggctgcatcgaggcctcggtgaagcaggaggtcctgattaatcgcaactcggtgctattttcgattacgctcaaggataaaaagctttgctatgaccaaggcattagtggacatcaccttatggagacttccatgacggtcaatgtggtgggttcatccgggctctgcttccaggaaacacacctggggccccatatgcaaggcaacctgatggtgccagtgttcattggctgccccccaggcaagcgcctggccttcgacatcacctacacgctggaatacagccgcctgaagaacaaacactactttgactgcgttaacgtgaacccggagatgccctgctttctcttccgggacattttctaccccttcttcttgattcaagatttggtgacaggagactccggcagtttccagggcagctatgttctgctggtggtgggtggcgggcccacactggacagcctcaaggactacagtgaggacgaaatctaccgcttcaacagccccctggacaagaccaacagccttatctggaccacgaggaccacaaggaccaccaaagactcagcctttcacatcatgtcccacgagagcccaggcatcgagtggctctgtctggagaatgccccatgctatgacaatgttccccaaggcatctttgcccctgaattcttcttcaaggtgttggtgagcaatagaggagtggacacgagcacctactgcaactaccagctcaccttcctgctgcacatccacgggctgccactcagtcccaagcgggcccttttcatcatcatggtgtcagctagcgtgtttgtgggcctggtgatcttctacatcgccttctgcctcctgtggcccctcgtggtgaagggctgcacgatgatccggtggaagataaacaacctcattgcctcagaatcctactacacctacgcctccatttccggaatctcgagcatgccgtctctgagacattccaggatgggctccatgttcagctccaggatgacagaggacagggctgaacccaaggaagccgtggagagacagttgatgacctgagtgtcccacctgccccagcccccagttactgtcacgcctctcttatgaggcccatcttgaagatgcaacctgtcacccagcccaggcctctctttctgttttgcttgatgtttacttctcgttcagactcaaataaagccttttttcagga

SEQ ID NO: 115079 - DNA, 3626 bp, Homo sapiens
  Payload ID: 2470
  Gene Symbol: CATSPERG
  Gene Name: catsper channel auxiliary subunit gamma
  ENST ID: ENST00000410018
  CDS Start-End: 116-3475
gaagtcggctgtggaagtgtgggcggccattttgagaccgggcaagaggggcgggactggtgcggccgagtgacagttgaccggttttaaccaagtgactggttctagccacgttatgtgcggcccagccatgttccctgccggtcctccgtggcccagagtccgagtcgtgcaggtgctgtgggccctgctggcagtgctcctggcgtcgtggaggctgtgggcgatcaaggatttccaggaatgcacctggcaggttgtcctgaacgagtttaagagggtaggcgagagtggtgtgagcgacagcttctttgagcaagagcccgtggacacagtgagcagcttgtttcacatgctggtggactcacccatcgacccgagcgagaaatacctgggcttcccttactacctgaagatcaactactcctgcgaggaaaagccctctgaggacctggtgcgcatgggccacctgacggggctaaagcccctggtgctggtcaccttccagtccccagtcaacttctaccgctggaagatagagcagctgcagatccagatggaggctgcccccttccgcagcaaagagccatgcatggcagaagaagtgtgtagcatgagctggtacacgcccatgcccatcaagaaaggcagtgtggtcatgcgtgtggacatcagcagcaatggcctggggaccttcattccagataaaaggttccagatgaatatcaacggcttcctgaagagagaccgggacaataacatccaattcactgtgggagaggagctcttcaacctgatgccccagtactttgtgggtgtctcatcgaggcccttgtggcacactgtggaccagtcacctgtgcttatcctgggaggcattcccaatgagaagtacgtcctgatgactgacaccagcttcaaggacttctctctcgtggagctgagcattgacagttgctgggtgggctccttctactgcccccattctggcttcacagccaccatctatgacactattgccaccgagagcaccctcttcattcggcagaaccagctggtctactattttacaggcacctataccacactctatgagagaaaccgcggcagtggcagttggattcgtgtcctggccagcgagtgcatcaagaagctgtgccctgtgtatttccatagcaatggctctgagtacataatggccctcaccacgggcaagcatgagggttatgtacacttcgggaccatcagagatggccaggtgtcctttgagatgctgcccaggcagtggtctgtgtgcgagcagataggagctagtgatgacctggaacttctctaccacatcccagaattcatccctgaagctcgaggattggagttcctgatgatcctagggacagagtcctacaccagcactgcaatggcccccaagggcatcttctgtaacccgtacaacaatctgatcttcatctggggcaacttcctcctgcagagctctaacaaggaaaacttcatctacctggcagacttccccaaggaactgtccatcaaatacatggccagatcgttccgtggggctgtggctattgtcacagagacggaggagatctggtacctcctggagggcagctaccgggtctaccagctgttcccttccaagggctggcaggtgcacatcagcttaaagctgatgcaacagtcctctctctacgcatccaatgagaccatgctgaccctcttctacgaagacagcaaactgtaccagctggtgtaccttatgaacaaccagaagggccagctggtcaagaggctcgtgcccgtggagcagcttctgatgtatcaacagcacaccagccactatgacttggagcggaaagggggctacttgatgctctccttcatcgacttctgccccttctcggtgatgcgcctgcggagcctgcccagtccgcagagatacacgcgccaggagcgctaccgggcgcggccgccgcgcgtcctggagcgctcgggcttccacaacgagaactcgctcgccatctaccagggcctggtctactacctgctgtggctgcactccgtgtacgacaagccgtacgcggacccggtgcacgaccccacctggcgctggtgggcgaacaacaaacaagaccaggattactacttcttcttggcgagcaattggcgaagcgcgggcggcgtgtccatagaaatggacagctacgaaaagatctacaacctcgagtccgcgtacgagctgccggagcgcattttcctggacaagggcactgagtacagcttcgccatcttcctgtcggcgcagggccactcgttccggacgcagtcagaactcggcaccgccttccagctgcatagccaggtggacgtgggcgtggtgctggccgaccccggctgcatcgaggcctcggtgaagcaggaggtcctgattaatcgcaactcggtgctattttcgattacgctcaaggataaaaagctttgctatgaccaaggcattagtggacatcaccttatggagacttccatgacggtcaatgtggtgggttcatccgggctctgcttccaggaaacacacctggggccccatatgcaaggcaacctgatggtgccagtgttcattggctgccccccaggcaagcgcctggccttcgacatcacctacacgctggaatacagccgcctgaagaacaaacactactttgactgcgttaacgtgaacccggagatgccctgctttctcttccgggacattttctaccccttcttcttgattcaagatttggtgacaggagactccggcagtttccagggcagctatgttctgctggtggtgggtggcgggcccacactggacagcctcaaggactacagtgaggacgaaatctaccgcttcaacagccccctggacaagaccaacagccttatctggaccacgaggaccacaaggaccaccaaagactcagcctttcacatcatgtcccacgagagcccaggcatcgagtggctctgtctggagaatgccccatgctatgacaatgttccccaaggcatctttgcccctgaattcttcttcaaggtgttggtgagcaatagaggagtggacacgagcacctactgcaactaccagctcaccttcctgctgcacatccacgggctgccactcagtcccaagcgggcccttttcatcatcatggtgtcagctagcgtgtttgtgggcctggtgatcttctacatcgccttctgcctcctgtggcccctcgtggtgaagggctgcacgatgatccggtggaagataaacaacctcattgcctcagaatcctactacacctacgcctccatttccggaatctcgagcatgccgtctctgagacattccaggatgggctccatgttcagctccaggatgacagaggacagggctgaacccaaggaagccgtggagagacagttgatgacctgagtgtcccacctgccccagcccccagttactgtcacgcctctcttatgaggcccatcttgaagatgcaacctgtcacccagcccaggcctctctttctgttttgcttgatgtttacttctcgttcagactcaaataaagccttttttcagga

SEQ ID NO: 115080 - DNA, 2899 bp, Homo sapiens
  Payload ID: 2470
  Gene Symbol: CATSPERG
  Gene Name: catsper channel auxiliary subunit gamma
  ENST ID: ENST00000412458
  CDS Start-End: 1-498
cgctggaagatagagcagctgcagatccagatggaggctgcccccttccgcagcaaagagccatgcatggcagaagaagtgtgtagcatgagctggtacacgcccatgcccatcaagaaaggcagtgtggtcatgcgtgtggacatcagcagcaatggcctggggaccttcattccagataaaaggttccagatgaatatcaacggcttcctgaagagagaccgggacaataacatccaattcactgtgggagaggagctcttcaacctgatgccccagtactttgtgggtgtctcatcgaggcccttgtggcacactgtggaccagtcacctgtgcttatcctgggaggcattcccaatgagaagtacgtcctgatgactgacaccagcttcaaggacttctctctcgtggaggcagttggattcgtgtcctggccagcgagtgcatcaagaagctgtgccctgtgtatttccatagcaatggctctgagtacataatggccctcaccacgggcaagcatgagggttatgtacacttcgggaccatcagagatggccaggtgtcctttgagatgctgcccaggcagtggtctgtgtgcgagcagataggagttaccacctgctccataatttggtctgaatacatcgcgggtgagtatactctactgctgctggtggagagtggatatggtaatgcaagtaaacgtttccaggtggtcagctacaacacagctagtgatgacctggaacttctctaccacatcccagaattcatccctgaagctcgaggattggagttcctgatgatcctagggacagagtcctacaccagcactgcaatggcccccaagggcatcttctgtaacccgtacaacaatctgatcttcatctggggcaacttcctcctgcagagctctaacaaggaaaacttcatctacctggcagacttccccaaggaactgtccatcaaatacatggccagatcgttccgtggggctgtggctattgtcacagagacggaggagatctggtacctcctggagggcagctaccgggtctaccagctgttcccttccaagggctggcaggtgcacatcagcttaaagctgatgcaacagtcctctctctacgcatccaatgagaccatgctgaccctcttctacgaagacagcaaactgtaccagctggtgtaccttatgaacaaccagaagggccagctggtcaagaggctcgtgcccgtggagcagcttctgatgtatcaacagcacaccagccactatgacttggagcggaaagggggctacttgatgctctccttcatcgacttctgccccttctcggtgatgcgcctgcggagcctgcccagtccgcagagatacacgcgccaggagcgctaccgggcgcggccgccgcgcgtcctggagcgctcgggcttccacaacgagaactcgctcgccatctaccagggcctggtctactacctgctgtggctgcactccgtgtacgacaagccgtacgcggacccggtgcacgaccccacctggcgctggtgggcgaacaacaaacaagaccaggattactacttcttcttggcgagcaattggcgaagcgcgggcggcgtgtccatagaaatggacagctacgaaaagatctacaacctcgagtccgcgtacgagctgccggagcgcattttcctggacaagggcactgagtacagcttcgccatcttcctgtcggcgcagggccactcgttccggacgcagtcagaactcggcaccgccttccagctgcatagccaggtggacgtgggcgtggtgctggccgaccccggctgcatcgaggcctcggtgaagcaggaggtcctgattaatcgcaactcggtgctattttcgattacgctcaaggataaaaagctttgctatgaccaaggcattagtggacatcaccttatggagacttccatgacggtcaatgtggtgggttcatccgggctctgcttccaggaaacacacctggggccccatatgcaaggcaacctgatggtgccagtgttcattggctgccccccaggcaagcgcctggccttcgacatcacctacacgctggaatacagccgcctgaagaacaaacactactttgactgcgttaacgtgaacccggagatgccctgctttctcttccgggacattttctaccccttcttcttgattcaagatttggtgacaggagactccggcagtttccagggcagctatgttctgctggtggtgggtggcgggcccacactggacagcctcaaggactacagtgaggacgaaatctaccgcttcaacagccccctggacaagaccaacagccttatctggaccacgaggaccacaaggaccaccaaagactcagcctttcacatcatgtcccacgagagcccaggcatcgaagacggggtttcaccatattggtcagtctggtcttgaactcctgacctcaagtgatccacctgcctcggcctcccaaagtgctggtattataggtgtgaaccactatgcctggcctaacctgcatttattggataatgaataaagaagggaataaatgaaagatgtgactttgtacctagtggctctgtctggagaatgccccatgctatgacaatgttccccaaggcatctttgcccctgaattcttcttcaaggtgttggtgagcaatagaggagtggacacgagcacctactgcaactaccagctcaccttcctgctgcacatccacgggctgccactcagtcccaagcgggcccttttcatcatcatggtgtcagctagcgtgtttgtgggcctggtgatcttctacatcgccttctgcctcctgtggcccctcgtggtgaagggctgcacgatgatc

SEQ ID NO: 115081 - DNA, 668 bp, Homo sapiens
  Payload ID: 2470
  Gene Symbol: CATSPERG
  Gene Name: catsper channel auxiliary subunit gamma
  ENST ID: ENST00000475343
  CDS Start-End: 42-452
agttgaccggttttaaccaagtgactggttctagccacgttatgtgcggcccagccatgttccctgccggtcctccgtggcccagagtccgagtcgtgcaggtgctgtgggccctgctggcagtgctcctggcgtcgtggaggctgtgggcgatcaaggatttccaggaatgcacctggcaggttgtcctgaacgagtttaagagggtaggcgagagtggtgtgagcgacagcttctttgagcaagagcccgtggacacagtgagcagcttgtttcacatgctggtggactcacccatcgacccgagcgagaaatacctgggcttcccttactacctgaagatcaactactcctgcgaggaaaagtccccagtcaacttctaccgctggaagatagagcagctgcagatccagatggaggctgcccccttccgcagcaaaggttccagatgaatatcaacggcttcctgaagagagaccgggacaataacatccaattcactgtgggagaggagctcttcaacctgatgccccagtactttgtgggtgtctcatcgaggcccttgtggcacactgtggaccagtcacctgtgcttatcctgggaggcattcccaatgagaagtacgtcctgatgactgacaccagcttcaaggacttctctctcgtgg

SEQ ID NO: 115082 - DNA, 3785 bp, Homo sapiens
  Payload ID: 2470
  Gene Symbol: CATSPERG
  Gene Name: catsper channel auxiliary subunit gamma
  ENST ID: ENST00000471517
  CDS Start-End: 58-537
ggtgcggccgagtgacagttgaccggttttaaccaagtgactggttctagccacgttatgtgcggcccagccatgttccctgccggtcctccgtggcccagagtccgagtcgtgcaggtgctgtgggccctgctggcagtgctcctggcgtcgtggaggctgtgggcgatcaaggatttccaggaatgcacctggcaggttgtcctgaacgagtttaagagggtaggcgagagtggtgtgagcgacagcttctttgagcaagagcccgtggacacagtgagcagcttgtttcacatgctggtggactcacccatcgacccgagcgagaaatacctgggcttcccttactacctgaagatcaactactcctgcgaggaaaagacggagtcttgcgctgttgcccagactggagtgcagtggcgcgatctcggctcactgcaacctccgcctcccgtgttcaagcgatgctcctgcctcggcctcccaagtagctggaactacagccctctgaggacctggtgcgcatgggccacctgacggggctaaagcccctggtgctggtcaccttccagtccccagtcaacttctaccgctggaagatagagcagctgcagatccagatggaggctgcccccttccgcagcaaagagccatgcatggcagaagaagtgtgtagcatgagctggtacacgcccatgcccatcaagaaaggcagtgtggtcatgcgtgtggacatcagcagcaatggcctggggaccttcattccagataaaaggttccagatgaatatcaacggcttcctgaagagagaccgggacaataacatccaattcactgtgggagaggagctcttcaacctgatgccccagtactttgtgggtgtctcatcgaggcccttgtggcacactgtggaccagtcacctgtgcttatcctgggaggcattcccaatgagaagtacgtcctgatgactgacaccagcttcaaggacttctctctcgtggaggcagttggattcgtgtcctggccagcgagtgcatcaagaagctgtgccctgtgtatttccatagcaatggctctgagtacataatggccctcaccacgggcaagcatgagggttatgtacacttcgggaccatcagagatggccaggtgtcctttgagatgctgcccaggcagtggtctgtgtgcgagcagataggagttaccacctgctccataatttggtctgaatacatcgcgggtgagtatactctactgctgctggtggagagtggatatggtaatgcaagtaaacgtttccaggtggtcagctacaacacagctagtgatgacctggaacttctctaccacatcccagaattcatccctgaagctcgaggattggagttcctgatgatcctagggacagagtcctacaccagcactgcaatggcccccaagggcatcttctgtaacccgtacaacaatctgatcttcatctggggcaacttcctcctgcagagctctaacaaggaaaacttcatctacctggcagacttccccaaggaactgtccatcaaatacatggccagatcgttccgtggggctgtggctattgtcacagagacggaggagatctggtacctcctggagggcagctaccgggtctaccagctgttcccttccaagggctggcaggtgcacatcagcttaaagctgatgcaacagtcctctctctacgcatccaatgagaccatgctgaccctcttctacgaagacagcaaactgtaccagctggtgtaccttatgaacaaccagaagggccagctggtcaagaggctcgtgcccgtggagcagcttctgatgtatcaacagcacaccagccactatgacttggagcggaaagggggctacttgatgctctccttcatcgacttctgccccttctcggtgatgcgcctgcggagcctgcccagtccgcagagatacacgcgccaggagcgctaccgggcgcggccgccgcgcgtcctggagcgctcgggcttccacaacgagaactcgctcgccatctaccagggcctggtctactacctgctgtggctgcactccgtgtacgacaagccgtacgcggacccggtgcacgaccccacctggcgctggtgggcgaacaacaaacaagaccaggattactacttcttcttggcgagcaattggcgaagcgcgggcggcgtgtccatagaaatggacagctacgaaaagatctacaacctcgagtccgcgtacgagctgccggagcgcattttcctggacaagggcactgagtacagcttcgccatcttcctgtcggcgcagggccactcgttccggacgcagtcagaactcggtctgcgcgggaccagagtggagcccgaagggcggggcgagggctaccagaatctgggagcctggggggcggggacaccatcggaggggcggggcctgtctgtgagggaggccttaaccccgtttactgcccggagcaggcaccgccttccagctgcatagccaggtggacgtgggcgtggtgctggccgaccccggctgcatcgaggcctcggtgaagcaggaggtcctgattaatcgcaactcggtgctattttcgattacgctcaaggataaaaagctttgctatgaccaaggcattagtggacatcaccttatggagacttccatgacggtcaatgtggtgggttcatccgggctctgcttccaggaaacacacctggggccccatatgcaaggcaacctgatggtgccagtgttcattggctgccccccaggcaagcgcctggccttcgacatcacctacacgctggaatacagccgcctgaagaacaaacactactttgactgcgttaacgtgaacccggagatgccctgctttctcttccgggacattttctaccccttcttcttgattcaagatttggtgacaggagactccggcagtttccagggcagctatgttctgctggtggtgggtggcgggcccacactggacagcctcaaggactacagtgaggacgaaatctaccgcttcaacagccccctggacaagaccaacagccttatctggaccacgaggaccacaaggaccaccaaagactcagcctttcacatcatgtcccacgagagcccaggcatcgagtggctctgtctggagaatgccccatgctatgacaatgttccccaaggcatctttgcccctgaattcttcttcaaggtgttggtgagcaataggtgagccagaggagtggacacgagcacctactgcaactaccagctcaccttcctgctgcacatccacgggctgccactcagtcccaagcgggcccttttcatcatcatggtgtcagctagcgtgtttgtgggcctggtgatcttctacatcgccttctgcctcctgtggcccctcgtggtgaagggctgcacgatgatccggtggaagataaacaacctcattgcctcagaatcctactacacctacgcctccatttccggaatctcgagcatgccgtctctgagacattccaggatgggctccatgttcagctccaggatgacagaggacagggctgaacccaaggaagccgtggagagacagttgatgacctgagtgtcccacctgccccagcccccagttactgtcacgcctctcttatgaggcccatcttgaagatgcaacctgtcacccagcccaggcctctctttctgttttgcttgatgtttacttctcgttcagactcaaataaagccttttttcagg

SEQ ID NO: 115083 - DNA, 541 bp, Homo sapiens
  Payload ID: 2470
  Gene Symbol: CATSPERG
  Gene Name: catsper channel auxiliary subunit gamma
  ENST ID: ENST00000489693
  CDS Start-End: 1-541
agagaaaccgcggcagtggcagttggattcgtgtcctggccagcgagtgcatcaagaagctgtgccctgtgtatttccatagcaatggctctgagtacataatggccctcaccacgggcaagcatgagggttatgtacacttcgggaccatcagagctagtgatgacctggaacttctctaccacatcccagaattcatccctgaagctcgaggattggagttcctgatgatcctagggacagagtcctacaccagcactgcaatggcccccaagggcatcttctgtaacccgtacaacaatctgatcttcatctggggcaacttcctcctgcagagctctaacaaggaaaacttcatctacctggcagacttccccaaggaactgtccatcaaatacatggccagatcgttccgtggggctgtggctattgtcacagagacggaggagatctggtacctcctggagggcagctaccgggtctaccagctgttcccttccaagggctggcaggtgcacatcagcttaaagctgatgcaaca

SEQ ID NO: 115084 - DNA, 1758 bp, Homo sapiens
  Payload ID: 2471
  Gene Symbol: CDX1
  Gene Name: caudal type homeobox 1
  Uniprot ID: P47902
  ENST ID: ENST00000231656
  CDS Start-End: 83-880
caggtgagcggttgctcgtcgtcggggcggccggcagcggcggctccagggcccagcatgcgcgggggaccccgcggccaccatgtatgtgggctatgtgctggacaaggattcgcccgtgtaccccggcccagccaggccagccagcctcggcctgggcccgcaagcctacggccccccggccccgcccccggcgcccccgcagtaccccgacttctccagctactctcacgtggagccggcccccgcgcccccgacggcctggggggcgcccttccctgcgcccaaggacgactgggccgccgcctacggcccgggccccgcggcccctgccgccagcccagcttcgctggcattcgggccccctccagactttagcccggtgccggcgccccctgggcccggcccgggcctcctggcgcagcccctcgggggcccgggcacaccgtcctcgcccggagcgcagaggccgacgccctacgagtggatgcggcgcagcgtggcggccggaggcggcggtggcagcggtaagactcggaccaaggacaagtaccgcgtggtctacaccgaccaccaacgcctggagctggagaaggagtttcattacagccgttacatcacaatccggcggaaatcagagctggctgccaatctggggctcactgaacggcaggtgaagatctggttccaaaaccggcgggcaaaggagcgcaaagtgaacaagaagaaacagcagcagcaacagcccccacagccgccgatggcccacgacatcacggccaccccagccgggccatccctggggggcctgtgtcccagcaacaccagcctcctggccacctcctctccaatgcctgtgaaagaggagtttctgccatagccccatgcccagcctgtgcgccgggggacctggggactcgggtgctgggagtgtggctcctgtgggcccaggaggtctggtccgagtctcagccctgaccttctgggacatggtggacagtcacctatccaccctctgcatccccttggcccatctgtgcagtaagcctgttggataaagaccttccagctcctgtgttctagacctctgggggataagggagtccagggtggatgatctcaatctcccgtgggcatctcaagccccaaatggttgggggaggggcctagacaaggctccaggccccacctcctcctccatacgttcagaggtgcagctggaggctgctgtggggaccacactgatcctggagaaaagggatggagctgaaaaagatggaatgcttgcagagcatgacctgaggagggaggaacgtggtcaactcacacctgcctcttcctgcagcctcacttctacctgcccccatcataagggcactgagcccttcccaggctggatactaagcacaaagcccatagcactgggctctgatggctgctccactgggttacagaatcacagccctcatgatcattctcagtgagggctctggattgagagggaggccctgggaggagagaagggggcagagtcttccctaccaggtttctacacccccgccaggctgcccatcagggcccagggagcccccagaggactttattcggaccaagcagagctcacagctggacaggtgttgtatatagagtggaatctcttggatgcagcttcaagaataaatttttcttctcttttcaaaaatgtataaaaatcattatacatagcattaaagaaacatttttgagaagtacaaatca

SEQ ID NO: 115085 - DNA, 1343 bp, Homo sapiens
  Payload ID: 2471
  Gene Symbol: CDX1
  Gene Name: caudal type homeobox 1
  ENST ID: ENST00000616154
  CDS Start-End: 1-465
atgtgctggacaaggattcgcccgggcacaccgtcctcgcccggagcgcagaggccgacgccctacgagtggatgcggcgcagcgtggcggccggaggcggcggtggcagcggtaagactcggaccaaggacaagtaccgcgtggtctacaccgaccaccaacgcctggagctggagaaggagtttcattacagccgttacatcacaatccggcggaaatcagagctggctgccaatctggggctcactgaacggcaggtgaagatctggttccaaaaccggcgggcaaaggagcgcaaagtgaacaagaagaaacagcagcagcaacagcccccacagccgccgatggcccacgacatcacggccaccccagccgggccatccctggggggcctgtgtcccagcaacaccagcctcctggccacctcctctccaatgcctgtgaaagaggagtttctgccatagccccatgcccagcctgtgcgccgggggacctggggactcgggtgctgggagtgtggctcctgtgggcccaggaggtctggtccgagtctcagccctgaccttctgggacatggtggacagtcacctatccaccctctgcatccccttggcccatctgtgcagtaagcctgttggataaagaccttccagctcctgtgttctagacctctgggggataagggagtccagggtggatgatctcaatctcccgtgggcatctcaagccccaaatggttgggggaggggcctagacaaggctccaggccccacctcctcctccatacgttcagaggtgcagctggaggctgctgtggggaccacactgatcctggagaaaagggatggagctgaaaaagatggaatgcttgcagagcatgacctgaggagggaggaacgtggtcaactcacacctgcctcttcctgcagcctcacttctacctgcccccatcataagggcactgagcccttcccaggctggatactaagcacaaagcccatagcactgggctctgatggctgctccactgggttacagaatcacagccctcatgatcattctcagtgagggctctggattgagagggaggccctgggaggagagaagggggcagagtcttccctaccaggtttctacacccccgccaggctgcccatcagggcccagggagcccccagaggactttattcggaccaagcagagctcacagctggacaggtgttgtatatagagtggaatctcttggatgcagcttcaagaataaatttttcttctcttttcaaaaatgtataaaaatcattatacatagcattaaagaaacatttttgagaagtacaaatca

SEQ ID NO: 115086 - DNA, 4053 bp, Homo sapiens
  Payload ID: 2472
  Gene Symbol: CDX2
  Gene Name: caudal type homeobox 2
  Uniprot ID: Q99626
  ENST ID: ENST00000381020
  CDS Start-End: 2134-3075
gcaatttgcttccggttgtatttctcaggaagtccgatgacactcggctgtccaggccaggcgctggaagtcccccaggaggaccagctcggtctcccacctcttgagtgcacagctccttggcccctgagtaccccaccacccccatttccagccttcttccttacaaacacgaagggtgggaggaaccagaaaacaggggatcccgcagccctaggctagttctgatcgctttcaggtgtctgcagaggcaagttgctggttgtcacctgtaaaatggggaggataaaaacacctcccagattttgttctagatcctagggggatgtgaggctcaagggagataaaggacactggagagcaccctagaaatgacaggatgaaggcgatggtgacaaatatccgagcgaaacgcttgacaatgagaacagacaagtgcaggtctccaggagtgccgcgagcgcccgcgggttctgagagcgctcaaagccgccgagtcaggctgcccagcccgccgggcctcgccgcagtgatcctcattcccgaatctggcagcgctgtcaaaggcttgtattaggaggtgaacggcggccgcaggcccactccacgcggttgctgaaaccgagctgggcgcgcgcgggggccgaatctcgccgcctccgcgctcctgtcggggcagctcccgatcccgggctgcgcggcttcggtccccaagacggccacttccagccctaggccccttggccgcagcgcttcccaaaccaagagagatcctttctcaactcagagcttttcattagcagtcgttaataatggccctgagttgccttatcatctcctggaaatgagaaataaatttcttcggagaacgtttccctttgtaaaggacagagagttttaaagatacaggtatgatgtaagacacataaatacctaggtaagcattagcagaaattctcttttccttatatttaagtataataaacatacaagtgtagctcaatgaattttcacaaactgacattctgtgtaaccagcagcctaagaaactgctttaccaacgatcccctagctcgcctccagttatgcacgccaataaccactagcctaacttctaccacatgcccattacttctgtagtttaaaacttctgattcttgaatgtaaacgtttaacaataaatcgcttgaatttaactcaaatttcaaatgtaagatgaagtcagagatgcagcctgaatctaggatcataatttgtcttgtgcggagggcgagtaatttccttgggcaagaaaataactggaggtgacagttgtttggggctgcagtcgtccgggccaggagcacagggcgggaaggaatggcccatctcttagggctctctgcttgtcacctaccaggttggtcagaaacgttctcatcaaagcaatggttctcttttcttttctctttgggacagaaggagtttcttgaccgccctcttccctgcaaatgcataaacaaccactgctcctgtctccaagctcagattcctaccaagatagccttttctcttcccctctcttttgtaagtctcttgatttcattctttgaacctgtgattggaggttaaagtgcaccaggttggaaggaggaagctcttaacaataaaggtttgaatatttagctgtgtcaggtcgctgccctctcacgagcctccctcccctttatcttttaaaatgcaaattatgtttcgaggggttgtgcgtagagtgcgcgctgcgcctcgacgtctccaaccattggtgtctgtgtcattactaatagagtcttgtaaacactcgttaatcacggaaggccgccggcctggggctccgcacgccagcctgtggcgggtcttccccgcctctgcagcctagtgggaaggaggtgggaggaaagaaggaagaaagggagggagggaggaggcaggccagagggagggaccgcctcggaggcagaagagccgcgaggagccagcggagcaccgcgggctggggcgcagccacccgccgctcctcgagtcccctcgcccctttcccttcgtgccccccggcagcctccagcgtcggtccccaggcagcatggtgaggtctgctcccggaccctcgccaccatgtacgtgagctacctcctggacaaggacgtgagcatgtaccctagctccgtgcgccactctggcggcctcaacctggcgccgcagaacttcgtcagccccccgcagtacccggactacggcggttaccacgtggcggccgcagctgcagcggcagcgaacttggacagcgcgcagtccccggggccatcctggccggcagcgtatggcgccccactccgggaggactggaatggctacgcgcccggaggcgccgcggccgccgccaacgccgtggctcacggcctcaacggtggctccccggccgcagccatgggctacagcagccccgcagactaccatccgcaccaccacccgcatcaccacccgcaccacccggccgccgcgccttcctgcgcttctgggctgctgcaaacgctcaaccccggccctcctgggcccgccgccaccgctgccgccgagcagctgtctcccggcggccagcggcggaacctgtgcgagtggatgcggaagccggcgcagcagtccctcggcagccaagtgaaaaccaggacgaaagacaaatatcgagtggtgtacacggaccaccagcggctggagctggagaaggagtttcactacagtcgctacatcaccatccggaggaaagccgagctagccgccacgctggggctctctgagaggcaggttaaaatctggtttcagaaccgcagagcaaaggagaggaaaatcaacaagaagaagttgcagcagcaacagcagcagcagccaccacagccgcctccgccgccaccacagcctccccagcctcagccaggtcctctgagaagtgtcccagagcccttgagtccggtgtcttccctgcaagcctcagtgcctggctctgtccctggggttctggggccaactgggggggtgctaaaccccaccgtcacccagtgacccaccgggttctgcagcggcagagcaattccaggctgagccatgaggagcgtggactctgctagactcctcaggagagacccctcccctcccacccacagccatagacctacagacctggctctcagaggaaaaatgggagccaggagtaagacaagtgggatttggggcctcaagaaatatactctcccagatttttactttttcccatctggctttttctgccactgaggagacagaaagcctccgctgggcttcattccggactggcagaagcattgcctggactgaccacaccaaccaggccttcatcctcctccccagctcttctcttcctagatctgcaggctgcacctctggctagagccgaggggagagagggactcaagggaaaggcaagcttgaggccaagatggctgctgcctgctcatggccctcggaggtccagctgggcctcctgcctccgggcaggcaaggtttacactgcggaagccaaaggcagctaagatagaaagctggactgaccaaagactgcagaacccccaggtggcctgcgtcttttttctcttcccttcccagaccaggaaaggcttggctggtgtatgcacagggtgtggtatgagggggtggttattggactccaggcctgaccagggggcccgaacagggacttgtttagagagcctgtcaccagagcttctctgggctgaatgtatgtcagtgctataaatgccagagccaacctggacttcctgtcattttcacaatcttggggctgatgaagaagggggtggggggagtttgtgttgttgttgctgctgtttgggttgttggtctgtgtaacatccaagccagagtttttaaagccttctggatccatggggggagaagtgatatggtgaagggaagtggggagtatttgaacacagttgaattttttctaaaaagaaaaagagataaatgagctttccagatttc

SEQ ID NO: 115087 - DNA, 1515 bp, Homo sapiens
  Payload ID: 2473
  Gene Symbol: CDX4
  Gene Name: caudal type homeobox 4
  Uniprot ID: O14627
  ENST ID: ENST00000373514
  CDS Start-End: 1-855
atgtacggaagctgtcttttggagaaagaagcaggcatgtacccgggcactctcatgagccctgggggcgacggcacagctgggacaggcggcacagggggcggtgggagtccgatgccagcctccaatttcgctgcggcaccggctttctcgcactatatggggtatcctcatatgcccagcatggatcctcactggccgtctctgggagtctggggctcaccctacagtcccccgcgagaagactggagcgtgtatcctgggccgtctagtacaatgggcacagtgccggtgaacgacgtgacctctagccccgccgctttctgctcgaccgactacagcaacttgggccctgtgggcggtggaactagcggcagcagcctaccaggccaggctggcgggtcgcttgtcccgacggacgcaggcgccgccaaggccagttcccccagcaggagccgccacagcccctatgcatggatgcgcaagacggtgcaggtgacggggaaaaccaggacaaaagaaaagtatcgtgtagtttacactgatcatcaaagattggagctggaaaaggaattccattgcaatagatatatcaccatccagagaaaatcagagctggcagttaacctgggcctttccgagagacaggtgaaaatctggtttcagaatcgcagagccaaggagagaaagatgatcaaaaagaaaatctcccagtttgagaatagtggaggctcggtgcaaagtgactctgactccatcagccctggggaactacctaacacttttttcaccacaccatctgctgttcgtggatttcaacctattgagatacagcaggttatagtctccgaatgaaagaaagcaaagagaaatttaaagtgccctttttttagtgatgtcttttgggtctctaagctatctacaggggagttggagcagggtgtaattccctgtaaggcagtatttggaacagatggatgcacaatgggttgaagataatttaggggactcttacttttagaaactatccccagaaaactcctgtcacgtgctgtgctatatgtcagtcactcaggaatcttagtggtaaggtatataattaaaagctagaatcacaggcccttccaactctgttcacaatttcagaaacttgcttatgaatagactgtaaaatacaattttgccagaaagcacatttgtgtatgtgtacttctgtttgttatttgatgctaggtgttttcttttatgctatctttaaggagtgagaagaaggtaaaccgaagtttatctatctttagctacctttccaagtgtttaattcaaaagctaacagaatttttataataagataaatgttttaaaaatcatcagaaggtgattctgattccattgtcactgcttaacaagaataaccaataaaaaagacaattttggccctcaatcatacttgtctggcatcaattatctcagaactttcaacttgcagtgtcattttaaaatcttgtcaaaacaatg

SEQ ID NO: 115088 - DNA, 2704 bp, Homo sapiens
  Payload ID: 2474
  Gene Symbol: CAV1
  Gene Name: caveolin 1, caveolae protein, 22kDa
  Uniprot ID: Q03135
  ENST ID: ENST00000341049
  CDS Start-End: 279-815
gggagaaacgttctcactcgctctctgctcgctgcgggcgctccccgccctctgctgccagaaccttggggatgtgcctagacccggcgcagcacacgtccgggccaaccgcgagcagaacaaacctttggcgggcggccaggaggctccctcccagccaccgcccccctccagcgcctttttttccccccatacaatacaagatcttccttcctcagttcccttaaagcacagcccagggaaacctcctcacagttttcatccagccacgggccagcatgtctgggggcaaatacgtagactcggagggacatctctacaccgttcccatccgggaacagggcaacatctacaagcccaacaacaaggccatggcagacgagctgagcgagaagcaagtgtacgacgcgcacaccaaggagatcgacctggtcaaccgcgaccctaaacacctcaacgatgacgtggtcaagattgactttgaagatgtgattgcagaaccagaagggacacacagttttgacggcatttggaaggccagcttcaccaccttcactgtgacgaaatactggttttaccgcttgctgtctgccctctttggcatcccgatggcactcatctggggcatttacttcgccattctctctttcctgcacatctgggcagttgtaccatgcattaagagcttcctgattgagattcagtgcatcagccgtgtctattccatctacgtccacaccgtctgtgacccactctttgaagctgttgggaaaatattcagcaatgtccgcatcaacttgcagaaagaaatataaatgacatttcaaggatagaagtatacctgattttttttccttttaattttcctggtgccaatttcaagttccaagttgctaatacagcaacaatttatgaattgaattatcttggttgaaaataaaaagatcactttctcagttttcataagtattatgtctcttctgagctatttcatctatttttggcagtctgaatttttaaaacccatttaaatttttttccttacctttttatttgcatgtggatcaaccatcgctttattggctgagatatgaacatattgttgaaaggtaatttgagagaaatatgaagaactgaggaggaaaaaaaaaaaaaagaaaagaaccaacaacctcaactgcctactccaaaatgttggtcattttatgttaagggaagaattccagggtatggccatggagtgtacaagtatgtgggcagattttcagcaaactcttttcccactgtttaaggagttagtggattactgccattcacttcataatccagtaggatccagtgatccttacaagttagaaaacataatcttctgccttctcatgatccaactaatgccttactcttcttgaaattttaacctatgatattttctgtgcctgaatatttgttatgtagataacaagacctcagtgccttcctgtttttcacattttccttttcaaatagggtctaactcagcaactcgctttaggtcagcagcctccctgaagaccaaaattagaatatccatgacctagttttccatgcgtgtttctgactctgagctacagagtctggtgaagctcacttctgggcttcatctggcaacatctttatccgtagtgggtatggttgacactagcccaatgaaatgaattaaagtggaccaatagggctgagctctctgtgggctggcagtcctggaagccagctttccctgcctctcatcaactgaatgaggtcagcatgtctattcagcttcgtttattttcaagaataatcacgctttcctgaatccaaactaatccatcaccggggtggtttagtggctcaacattgtgttcccatttcagctgatcagtgggcctccaaggaggggctgtaaaatggaggccattgtgtgagcctatcagagttgctgcaaacctgacccctgctcagtaaagcacttgcaaccgtctgttatgctgtgacacatggcccctccccctgccaggagctttggacctaatccaagcatccctttgcccagaaagaagatgggggaggaggcagtaataaaaagattgaagtattttgctggaataagttcaaattcttctgaactcaaactgaggaatttcacctgtaaacctgagtcgtacagaaagctgcctggtatatccaaaagctttttattcctcctgctcatattgtgattctgcctttggggacttttcttaaaccttcagttatgatttttttttcatacacttattggaactctgcttgatttttgcctcttccagtcttcctgacactttaattaccaacctgttacctactttgactttttgcatttaaaacagacactggcatggatatagttttacttttaaactgtgtacataactgaaaatgtgctatactgcatactttttaaatgtaaagatatttttatctttatatgaagaaaatcacttaggaaatggctttgtgattcaatctgtaaactgtgtattccaagacatgtctgttctacatagatgcttagtccctcatgcaaatcaattactggtccaaaagattgctgaaattttatatgcttactgatatattttacaattttttatcatgcatgtcctgtaaaggttacaagcctgcacaataaaaatgtttaacggtt

SEQ ID NO: 115089 - DNA, 2628 bp, Homo sapiens
  Payload ID: 2474
  Gene Symbol: CAV1
  Gene Name: caveolin 1, caveolae protein, 22kDa
  Uniprot ID: Q03135
  ENST ID: ENST00000393467
  CDS Start-End: 296-739
agagtacagaggggtgtggtgtcctctgcgagatcctcttaaaaagctggctacgcgcaggcggtttctgtgcacggagccgtagctgtcggagcggttagttcgatttcgagctcgaggtttcccccgccgccaggctgacttctcatcgcttgtttttctttttgcatttttcctcccaccgccgttgccgccctccccgtcctggccgtccgccctccgccctctgcagggacatctctacaccgttcccatccgggaacagggcaacatctacaagcccaacaacaaggccatggcagacgagctgagcgagaagcaagtgtacgacgcgcacaccaaggagatcgacctggtcaaccgcgaccctaaacacctcaacgatgacgtggtcaagattgactttgaagatgtgattgcagaaccagaagggacacacagttttgacggcatttggaaggccagcttcaccaccttcactgtgacgaaatactggttttaccgcttgctgtctgccctctttggcatcccgatggcactcatctggggcatttacttcgccattctctctttcctgcacatctgggcagttgtaccatgcattaagagcttcctgattgagattcagtgcatcagccgtgtctattccatctacgtccacaccgtctgtgacccactctttgaagctgttgggaaaatattcagcaatgtccgcatcaacttgcagaaagaaatataaatgacatttcaaggatagaagtatacctgattttttttccttttaattttcctggtgccaatttcaagttccaagttgctaatacagcaacaatttatgaattgaattatcttggttgaaaataaaaagatcactttctcagttttcataagtattatgtctcttctgagctatttcatctatttttggcagtctgaatttttaaaacccatttaaatttttttccttacctttttatttgcatgtggatcaaccatcgctttattggctgagatatgaacatattgttgaaaggtaatttgagagaaatatgaagaactgaggaggaaaaaaaaaaaaaagaaaagaaccaacaacctcaactgcctactccaaaatgttggtcattttatgttaagggaagaattccagggtatggccatggagtgtacaagtatgtgggcagattttcagcaaactcttttcccactgtttaaggagttagtggattactgccattcacttcataatccagtaggatccagtgatccttacaagttagaaaacataatcttctgccttctcatgatccaactaatgccttactcttcttgaaattttaacctatgatattttctgtgcctgaatatttgttatgtagataacaagacctcagtgccttcctgtttttcacattttccttttcaaatagggtctaactcagcaactcgctttaggtcagcagcctccctgaagaccaaaattagaatatccatgacctagttttccatgcgtgtttctgactctgagctacagagtctggtgaagctcacttctgggcttcatctggcaacatctttatccgtagtgggtatggttgacactagcccaatgaaatgaattaaagtggaccaatagggctgagctctctgtgggctggcagtcctggaagccagctttccctgcctctcatcaactgaatgaggtcagcatgtctattcagcttcgtttattttcaagaataatcacgctttcctgaatccaaactaatccatcaccggggtggtttagtggctcaacattgtgttcccatttcagctgatcagtgggcctccaaggaggggctgtaaaatggaggccattgtgtgagcctatcagagttgctgcaaacctgacccctgctcagtaaagcacttgcaaccgtctgttatgctgtgacacatggcccctccccctgccaggagctttggacctaatccaagcatccctttgcccagaaagaagatgggggaggaggcagtaataaaaagattgaagtattttgctggaataagttcaaattcttctgaactcaaactgaggaatttcacctgtaaacctgagtcgtacagaaagctgcctggtatatccaaaagctttttattcctcctgctcatattgtgattctgcctttggggacttttcttaaaccttcagttatgatttttttttcatacacttattggaactctgcttgatttttgcctcttccagtcttcctgacactttaattaccaacctgttacctactttgactttttgcatttaaaacagacactggcatggatatagttttacttttaaactgtgtacataactgaaaatgtgctatactgcatactttttaaatgtaaagatatttttatctttatatgaagaaaatcacttaggaaatggctttgtgattcaatctgtaaactgtgtattccaagacatgtctgttctacatagatgcttagtccctcatgcaaatcaattactggtccaaaagattgctgaaattttatatgcttactgatatattttacaattttttatcatgcatgtcctgtaaaggttacaagcctgcacaataaaaatgtttaacggtt

SEQ ID NO: 115090 - DNA, 845 bp, Homo sapiens
  Payload ID: 2474
  Gene Symbol: CAV1
  Gene Name: caveolin 1, caveolae protein, 22kDa
  Uniprot ID: Q03135
  ENST ID: ENST00000393468
  CDS Start-End: 176-619
ggcaggcgcgccctgcagagtacagaggggtgtggtgtcctctgcgagatcctcttaaaaagctggctacgcgcaggcggtttctgtgcacggagccgtagctgtcggagcgggacatctctacaccgttcccatccgggaacagggcaacatctacaagcccaacaacaaggccatggcagacgagctgagcgagaagcaagtgtacgacgcgcacaccaaggagatcgacctggtcaaccgcgaccctaaacacctcaacgatgacgtggtcaagattgactttgaagatgtgattgcagaaccagaagggacacacagttttgacggcatttggaaggccagcttcaccaccttcactgtgacgaaatactggttttaccgcttgctgtctgccctctttggcatcccgatggcactcatctggggcatttacttcgccattctctctttcctgcacatctgggcagttgtaccatgcattaagagcttcctgattgagattcagtgcatcagccgtgtctattccatctacgtccacaccgtctgtgacccactctttgaagctgttgggaaaatattcagcaatgtccgcatcaacttgcagaaagaaatataaatgacatttcaaggatagaagtatacctgattttttttccttttaattttcctggtgccaatttcaagttccaagttgctaatacagcaacaatttatgaattgaattatcttggttgaaaataaaaagatcactttctcagttttcataagtattatgtctcttctgagctatttcatctatttttggcagtctgaatttttaaaacccatttaaatttttttcc

SEQ ID NO: 115091 - DNA, 598 bp, Homo sapiens
  Payload ID: 2474
  Gene Symbol: CAV1
  Gene Name: caveolin 1, caveolae protein, 22kDa
  ENST ID: ENST00000393470
  CDS Start-End: 63-566
agttcccttaaagcacagcccagggaaacctcctcacagttttcatccagccacgggccagcatgtctgggggcaaatacgtagactcggagggcaacatctacaagcccaacaacaaggccatggcagacgagctgagcgagaagcaagtgtacgacgcgcacaccaaggagatcgacctggtcaaccgcgaccctaaacacctcaacgatgacgtggtcaagattgactttgaagatgtgattgcagaaccagaagggacacacagttttgacggcatttggaaggccagcttcaccaccttcactgtgacgaaatactggttttaccgcttgctgtctgccctctttggcatcccgatggcactcatctggggcatttacttcgccattctctctttcctgcacatctgggcagttgtaccatgcattaagagcttcctgattgagattcagtgcatcagccgtgtctattccatctacgtccacaccgtctgtgacccactctttgaagctgttgggaaaatattcagcaatgtccgcatcaacttgcagaaagaaatataaatgacatttcaaggatagaagtatacctgatt

SEQ ID NO: 115092 - DNA, 2443 bp, Homo sapiens
  Payload ID: 2474
  Gene Symbol: CAV1
  Gene Name: caveolin 1, caveolae protein, 22kDa
  Uniprot ID: Q03135
  ENST ID: ENST00000405348
  CDS Start-End: 108-551
gctgcccttcagccacccgcccgcagcctgggagtgccctgaggggacatctctacaccgttcccatccgggaacagggcaacatctacaagcccaacaacaaggccatggcagacgagctgagcgagaagcaagtgtacgacgcgcacaccaaggagatcgacctggtcaaccgcgaccctaaacacctcaacgatgacgtggtcaagattgactttgaagatgtgattgcagaaccagaagggacacacagttttgacggcatttggaaggccagcttcaccaccttcactgtgacgaaatactggttttaccgcttgctgtctgccctctttggcatcccgatggcactcatctggggcatttacttcgccattctctctttcctgcacatctgggcagttgtaccatgcattaagagcttcctgattgagattcagtgcatcagccgtgtctattccatctacgtccacaccgtctgtgacccactctttgaagctgttgggaaaatattcagcaatgtccgcatcaacttgcagaaagaaatataaatgacatttcaaggatagaagtatacctgattttttttccttttaattttcctggtgccaatttcaagttccaagttgctaatacagcaacaatttatgaattgaattatcttggttgaaaataaaaagatcactttctcagttttcataagtattatgtctcttctgagctatttcatctatttttggcagtctgaatttttaaaacccatttaaatttttttccttacctttttatttgcatgtggatcaaccatcgctttattggctgagatatgaacatattgttgaaaggtaatttgagagaaatatgaagaactgaggaggaaaaaaaaaaaaaagaaaagaaccaacaacctcaactgcctactccaaaatgttggtcattttatgttaagggaagaattccagggtatggccatggagtgtacaagtatgtgggcagattttcagcaaactcttttcccactgtttaaggagttagtggattactgccattcacttcataatccagtaggatccagtgatccttacaagttagaaaacataatcttctgccttctcatgatccaactaatgccttactcttcttgaaattttaacctatgatattttctgtgcctgaatatttgttatgtagataacaagacctcagtgccttcctgtttttcacattttccttttcaaatagggtctaactcagcaactcgctttaggtcagcagcctccctgaagaccaaaattagaatatccatgacctagttttccatgcgtgtttctgactctgagctacagagtctggtgaagctcacttctgggcttcatctggcaacatctttatccgtagtgggtatggttgacactagcccaatgaaatgaattaaagtggaccaatagggctgagctctctgtgggctggcagtcctggaagccagctttccctgcctctcatcaactgaatgaggtcagcatgtctattcagcttcgtttattttcaagaataatcacgctttcctgaatccaaactaatccatcaccggggtggtttagtggctcaacattgtgttcccatttcagctgatcagtgggcctccaaggaggggctgtaaaatggaggccattgtgtgagcctatcagagttgctgcaaacctgacccctgctcagtaaagcacttgcaaccgtctgttatgctgtgacacatggcccctccccctgccaggagctttggacctaatccaagcatccctttgcccagaaagaagatgggggaggaggcagtaataaaaagattgaagtattttgctggaataagttcaaattcttctgaactcaaactgaggaatttcacctgtaaacctgagtcgtacagaaagctgcctggtatatccaaaagctttttattcctcctgctcatattgtgattctgcctttggggacttttcttaaaccttcagttatgatttttttttcatacacttattggaactctgcttgatttttgcctcttccagtcttcctgacactttaattaccaacctgttacctactttgactttttgcatttaaaacagacactggcatggatatagttttacttttaaactgtgtacataactgaaaatgtgctatactgcatactttttaaatgtaaagatatttttatctttatatgaagaaaatcacttaggaaatggctttgtgattcaatctgtaaactgtgtattccaagacatgtctgttctacatagatgcttagtccctcatgcaaatcaattactggtccaaaagattgctgaaattttatatgcttactgatatattttacaattttttatcatgcatgtcctgtaaaggttacaagcctgcacaataaaaatgtttaacggttaaa

SEQ ID NO: 115093 - DNA, 557 bp, Homo sapiens
  Payload ID: 2474
  Gene Symbol: CAV1
  Gene Name: caveolin 1, caveolae protein, 22kDa
  ENST ID: ENST00000456473
  CDS Start-End: 144-557
agcgataaagggaacattccacgggtcgggcggctgctgttggatcttagataaagctggaagggattaccggggcagggggacatctctacaccgttcccatccgggaacagggcaacatctacaagcccaacaacaaggccatggcagacgagctgagcgagaagcaagtgtacgacgcgcacaccaaggagatcgacctggtcaaccgcgaccctaaacacctcaacgatgacgtggtcaagattgactttgaagatgtgattgcagaaccagaagggacacacagttttgacggcatttggaaggccagcttcaccaccttcactgtgacgaaatactggttttaccgcttgctgtctgccctctttggcatcccgatggcactcatctggggcatttacttcgccattctctctttcctgcacatctgggcagttgtaccatgcattaagagcttcctgattgagattcagtgcatcagccgtgtctattccatctacgtccacaccgtctgtgacccactctttgaagctgttgggaaaatattcagcaat

SEQ ID NO: 115094 - DNA, 1653 bp, Homo sapiens
  Payload ID: 2474
  Gene Symbol: CAV1
  Gene Name: caveolin 1, caveolae protein, 22kDa
  ENST ID: ENST00000451122
  CDS Start-End: 55-315
taaagcacagcccagggaaacctcctcacagttttcatccagccacgggccagcatgtctgggggcaaatacgtagactcggaggtaggcatccgtgggggggcgccggctcgggcgtgcggggagtgtccgcttctgctatctgcctctccaaatatcccgactgctgccctggccccagccctctctccacttcggagcactcctctggcgttggcaccgctgaggaatgggcctgggcggggaggtgaagagaagccaggaatgttttatgttttcctaatggagagggggcctagggagcccctgagctaggaggacacggaaaaggggattggggtcctgagattgggtctgttgggcccaggacgcgttttctggatgggtctaggatgctcccttgtcgcgggacccccgcggtccggccctgcctgctgggggttcgaagaggtggagtgcagggtggaggtgttatttacccgagtcctggggacagtccccgggactctccgccaggcgcccagaccggcaggtcccgcaggcggcgcgcggtgtgtttgcactttccaaagttcttgaaccatctcaagaactccttctgcatcttggcgtctggcaggggtgttccgagagaggtagacctcccctccccaaactgccaccatcacttccaacgccctccacgcgctggagctctgcccgggtgtggaaacctcgtcttccaacacgtagctgcccttcagccacccgcccgcagcctgggagtgccctgagggtgggtcgggggagctgcgcagggacatctctacaccgttcccatccgggaacagggcaacatctacaagcccaacaacaaggccatggcagacgagctgagcgagaagcaagtgtacgacgcgcacaccaaggagatcgacctggtcaaccgcgaccctaaacacctcaacgatgacgtggtcaagattgactttgaagatgtgattgcagaaccagaagggacacacagttttgacggcatttggaaggccagcttcaccaccttcactgtgacgaaatactggttttaccgcttgctgtctgccctctttggcatcccgatggcactcatctggggcatttacttcgccattctctctttcctgcacatctgggcagttgtaccatgcattaagagcttcctgattgagattcagtgcatcagccgtgtctattccatctacgtccacaccgtctgtgacccactctttgaagctgttgggaaaatattcagcaatgtccgcatcaacttgcagaaagaaatataaatgacatttcaaggatagaagtatacctgattttttttccttttaattttcctggtgccaatttcaagttccaagttgctaatacagcaacaatttatgaattgaattatcttggttgaaaataaaaagatcactttctcagttttcataagtattatgtctcttctgagctatttcatctatttttggcagtctgaatttttaaaacccatttaaatttttttccttacctttttatttgcatgtggatcaaccatcgctttattggctgagatatgaacatattgttgaaaggtaatttgagagaaatatgaagaactgaggaggaaaaaaaaaaaaaagaaaagaa

SEQ ID NO: 115095 - DNA, 3201 bp, Homo sapiens
  Payload ID: 2474
  Gene Symbol: CAV1
  Gene Name: caveolin 1, caveolae protein, 22kDa
  Uniprot ID: Q03135
  ENST ID: ENST00000614113
  CDS Start-End: 861-1304
taaagcacagcccagggaaacctcctcacagttttcatccagccacgggccagcatgtctgggggcaaatacgtagactcggaggtaggcatccgtgggggggcgccggctcgggcgtgcggggagtgtccgcttctgctatctgcctctccaaatatcccgactgctgccctggccccagccctctctccacttcggagcactcctctggcgttggcaccgctgaggaatgggcctgggcggggaggtgaagagaagccaggaatgttttatgttttcctaatggagagggggcctagggagcccctgagctaggaggacacggaaaaggggattggggtcctgagattgggtctgttgggcccaggacgcgttttctggatgggtctaggatgctcccttgtcgcgggacccccgcggtccggccctgcctgctgggggttcgaagaggtggagtgcagggtggaggtgttatttacccgagtcctggggacagtccccgggactctccgccaggcgcccagaccggcaggtcccgcaggcggcgcgcggtgtgtttgcactttccaaagttcttgaaccatctcaagaactccttctgcatcttggcgtctggcaggggtgttccgagagaggtagacctcccctccccaaactgccaccatcacttccaacgccctccacgcgctggagctctgcccgggtgtggaaacctcgtcttccaacacgtagctgcccttcagccacccgcccgcagcctgggagtgccctgagggtgggtcgggggagctgcgcagggacatctctacaccgttcccatccgggaacagggcaacatctacaagcccaacaacaaggccatggcagacgagctgagcgagaagcaagtgtacgacgcgcacaccaaggagatcgacctggtcaaccgcgaccctaaacacctcaacgatgacgtggtcaagattgactttgaagatgtgattgcagaaccagaagggacacacagttttgacggcatttggaaggccagcttcaccaccttcactgtgacgaaatactggttttaccgcttgctgtctgccctctttggcatcccgatggcactcatctggggcatttacttcgccattctctctttcctgcacatctgggcagttgtaccatgcattaagagcttcctgattgagattcagtgcatcagccgtgtctattccatctacgtccacaccgtctgtgacccactctttgaagctgttgggaaaatattcagcaatgtccgcatcaacttgcagaaagaaatataaatgacatttcaaggatagaagtatacctgattttttttccttttaattttcctggtgccaatttcaagttccaagttgctaatacagcaacaatttatgaattgaattatcttggttgaaaataaaaagatcactttctcagttttcataagtattatgtctcttctgagctatttcatctatttttggcagtctgaatttttaaaacccatttaaatttttttccttacctttttatttgcatgtggatcaaccatcgctttattggctgagatatgaacatattgttgaaaggtaatttgagagaaatatgaagaactgaggaggaaaaaaaaaaaaaagaaaagaaccaacaacctcaactgcctactccaaaatgttggtcattttatgttaagggaagaattccagggtatggccatggagtgtacaagtatgtgggcagattttcagcaaactcttttcccactgtttaaggagttagtggattactgccattcacttcataatccagtaggatccagtgatccttacaagttagaaaacataatcttctgccttctcatgatccaactaatgccttactcttcttgaaattttaacctatgatattttctgtgcctgaatatttgttatgtagataacaagacctcagtgccttcctgtttttcacattttccttttcaaatagggtctaactcagcaactcgctttaggtcagcagcctccctgaagaccaaaattagaatatccatgacctagttttccatgcgtgtttctgactctgagctacagagtctggtgaagctcacttctgggcttcatctggcaacatctttatccgtagtgggtatggttgacactagcccaatgaaatgaattaaagtggaccaatagggctgagctctctgtgggctggcagtcctggaagccagctttccctgcctctcatcaactgaatgaggtcagcatgtctattcagcttcgtttattttcaagaataatcacgctttcctgaatccaaactaatccatcaccggggtggtttagtggctcaacattgtgttcccatttcagctgatcagtgggcctccaaggaggggctgtaaaatggaggccattgtgtgagcctatcagagttgctgcaaacctgacccctgctcagtaaagcacttgcaaccgtctgttatgctgtgacacatggcccctccccctgccaggagctttggacctaatccaagcatccctttgcccagaaagaagatgggggaggaggcagtaataaaaagattgaagtattttgctggaataagttcaaattcttctgaactcaaactgaggaatttcacctgtaaacctgagtcgtacagaaagctgcctggtatatccaaaagctttttattcctcctgctcatattgtgattctgcctttggggacttttcttaaaccttcagttatgatttttttttcatacacttattggaactctgcttgatttttgcctcttccagtcttcctgacactttaattaccaacctgttacctactttgactttttgcatttaaaacagacactggcatggatatagttttacttttaaactgtgtacataactgaaaatgtgctatactgcatactttttaaatgtaaagatatttttatctttatatgaagaaaatcacttaggaaatggctttgtgattcaatctgtaaactgtgtattccaagacatgtctgttctacatagatgcttagtccctcatgcaaatcaattactggtccaaaagattgctgaaattttatatgcttactgatatattttacaattttttatcatgcatgtcctgtaaaggttacaagcctgcacaataaaaatgtttaacggttaaacagtc

SEQ ID NO: 115096 - DNA, 3301 bp, Homo sapiens
  Payload ID: 2475
  Gene Symbol: CAV2
  Gene Name: caveolin 2
  Uniprot ID: P51636
  ENST ID: ENST00000222693
  CDS Start-End: 393-881
ctccctccaggaaggccgttgtcttccctgggacgacttgccagctctgaggcatgacagtacgggcccccagaagggtgaccaggaggccctcctcgtcccagctgccggcgtcgccgcccactgcagggcccgggctgtgactcgtggggacggttccctgcgccccggcgggggaggtgggcggggaggggcggcggggcgccggggcggggctcgggacggccgggctgggagctggagcccacagcgggaagcggccgccgcccgggcctcgcagggctaggcgaggcgagggggggcggggccgggcgctacgggaaggggaggccgcgcggaccgggagccgcaccgcgccagccgggctgcagcggccgcgcaccaaggctgcgatggggctggagacggagaaggcggacgtacagctcttcatggacgacgactcctacagccaccacagcggcctcgagtacgccgaccccgagaagttcgcggactcggaccaggaccgggatccccaccggctcaactcgcatctcaagctgggcttcgaggatgtgatcgcagagccggtgactacgcactcctttgacaaagtgtggatctgcagccatgccctctttgaaatcagcaaatacgtaatgtacaagttcctgacggtgttcctggccattcccctggccttcattgcgggaattctctttgccaccctcagctgtctgcacatctggattttaatgccttttgtaaagacctgcctaatggttctgccttcagtgcagacaatatggaagagtgtgacagatgttatcattgctccattgtgtacgagcgtaggacgatgcttctcttctgtcagcctgcaactgagccaggattgaatacttggaccccaggtctggagattgggatactgtaatacttctttgttattataacataaaagcaccactgttctgttcatttcctagctgttctaattaagaaaactattaagatgagcaaccacatttagaaatgtttattgacaggtcttttcaaataatgcttttctaattaatagccaaagatttcatatctaactttgtaaccagaattatacagtaagttgacaccacttagatttaaaggcagacagttttgctttagtacaatagtatacattttataatgatgaacttataatgattaagggacatttctataaaaatactacaatagttttatgcacaacttcccattaaaaatgagatttcttatttgtttgtctgtttttactctgggagtaatactttttaaattacctttacatatatagtcactggcatactgagaatatacaatgatcctggaaattgcagtaacaaaagcacacaacgattatagtaactataagatacaataaaacaaataaatatgaaagtagattcatgaaaatgtattcctttaaaatattgttttcctacaggcctatttaacaagatgtttcattttactgtatattttgtagttaatataaatgttgctctaatcagattgcttaaaagcatttttattatatttatgttgttgaactaatatatgaaataagtaaatgtagctcccacaaggtaaacttcattggtaagattgcactgttctgattatgtaagcatttgtacatcttctttggaaataaaagataaaagagcgatacacaaagctttcttttctaacttttccaagcaaaatctaaaatgttttatgacatttttctggctgtgatcttaaaataattcatatctaaatagtattttgtctaggagatgctttctctctagtagttagaaattaaatctgtgtcagcattcctattaatgtctcactttactttcaagtaatattggtgctatttaacattttacagtaaatgttacttctgatactttagtacaatttcaactacagtgattcatgtagagagacaggggagttgtcaacttgggctactgaactacatgcataaactaaaaactaacagctacaaacttttaagatttctctaatattggtatgtaacacaggataaagttattcttgtcattttgaactgtagagtcctatttcagtgtgatgaatcactgttgctttgaaaaatctcattatttctgggccgggcatggtggctcacccctgtaatcccagcactttgggaggccaaggcgggtggatcatgaggtcaggagatcaagaccatcctggccaacatggtgataccccgtctctactaaaaatacaaaaaaattagttgggcatggtggcatgcacctgtagtcccagctacctgggaggctgaggcaggagaattgcttgaacctgggaggcagaggttgcagtgagccaaaatcatgccactgcactcccgcctggcaacagagcaagagtctgtctcaaaaaaaaaaagaaaaaaagaaaaaaagaaaaaagaaaaatctcattatttcaaaatgatagacatataccaaaaacaagtctataatgtgagtagttactaaaatttacacatcttaaaagtgtgtaaatgcttaaatttcagaattaccatcagaacctcaattgacattcctttgaatacgctaataagtgacaaataagattaataagatttttcaaaatcgccaggactggtgaatataaatgatgattgaactggaataatattggggaccaaatcaaatgaatgattaaattatgaagctcatatccttttgaaggtagttgcaaagagacatttcaaaactgccctaggccattgcagcatccttagatgggacgcataatcattaccttaaagcatcaccactcattttgaccatatagattttattatgttagtttaaaaggtcaatcagcctcatgactttatagttatgtcttgtatttaaaaacattttttatacatttggttatgttgataaaccaaaaacatttgattaataaaatatctatttgaataaattatgagctatcctttcaaacagctattggcaagttttaaacccaaaatatatacacatagttctgtaataaaactgtttgacttctcaagtaacatgacttccttatttctgaacagtactggttactttcaaaatgaatttttattgagattttccattaactatttttttcaaagactcaaattttgtaccaagtaaatccaggctttatgtacaaacatgttgtttgttttatttggggctgggggaggtatatgatgagcagacttctcggaattcataataaattttctaaaagccta

SEQ ID NO: 115097 - DNA, 776 bp, Homo sapiens
  Payload ID: 2475
  Gene Symbol: CAV2
  Gene Name: caveolin 2
  Uniprot ID: P51636
  ENST ID: ENST00000343213
  CDS Start-End: 43-381
accgcgccagccgggctgcagcggccgcgcaccaaggctgcgatggggctggagacggagaaggcggacgtacagctcttcatggacgacgactcctacagccaccacagcggcctcgagtacgccgaccccgagaagttcgcggactcggaccaggaccgggatccccaccggctcaactcgcatctcaaggattttaatgccttttgtaaagacctgcctaatggttctgccttcagtgcagacaatatggaagagtgtgacagatgttatcattgctccattgtgtacgagcgtaggacgatgcttctcttctgtcagcctgcaactgagccaggattgaatacttggaccccaggtctggagattgggatactgtaatacttctttgttattataacataaaagcaccactgttctgttcatttcctagctgttctaattaagaaaactattaagatgagcaaccacatttagaaatgtttattgacaggtcttttcaaataatgcttttctaattaatagccaaagatttcatatctaactttgtaaccagaattatacagtaagttgacaccacttagatttaaaggcagacagttttgctttagtacaatagtatacattttataatgatgaacttataatgattaagggacatttctataaaaatactacaatagttttatgcacaacttcccattaaaaatgagatttcttatttgtttgtctgtttttactctgggagtaatactttttaaattacctttacatat

SEQ ID NO: 115098 - DNA, 1179 bp, Homo sapiens
  Payload ID: 2475
  Gene Symbol: CAV2
  Gene Name: caveolin 2
  ENST ID: ENST00000393480
  CDS Start-End: 3-344
cgatggggctggagacggagaaggcggacgtacagctcttcatggacgacgactcctacagccaccacagcggcctcgagtacgccgaccccgagaagttcgcggactcggaccaggaccgggatccccaccggctcaactcgcatctcaagctgggcttcgaggatgtgatcgcagagccggtgactacgcactcctttgacaaagtgtggatctgcagccatgccctctttgaaatcagcaaatacgtaatgtacaagttcctgacggtgttcctggccattcccctggccttcattgcgggaattctctttgccaccctcagctgtctgcacatctggtgagacggggcacaccgggtggaccggctttctgaaacatgggcatattctccgccacctgccccctactctcctcttatcccaggccggcgtcaggaggaggaacgcgcatcagttcccaagcagtaggaagaactggaaggccttgaaaggcaatgcgcttcctttagaataacagtttgggcttggagtttcaacaggagaaagaatgtcggtctttcctggggtgtgattttccttgcatacataaggctgggctgagtgtggaggcgggtacctggaagccacacttcttaccacaggctgctctcggggccctgttgtgactcgtacctgcggttctgggcaggactcttctttctttcattgccttttattcagtcactgcctgtgcttggggtaaaacaaaagtgatctctgagcagaatgccgctgacagtagaattggatgaggatgtcagacctggttaagcagtagtgtggaggggctgcttcaactttgcccctggcagatggcaaggatgggacccagaggaaagggaggtgtgtgcagttaaggcgagggtcccccccagtacaaacgaatgaaaactccagctgcgggataatgaatgagaaggcctccaaattactttttcactgatgaaacacaaatggaagtggcatataattaaaggggaaagaaatatggaagcccactgtatattgataggatattttgagtaactctattcatactcaaaatgtgtcctaaactgtagagaactttcttaagcatcttttaaattttttatggaaaatgtcatattttaccaataaatgttgttgtgttagaaaa

SEQ ID NO: 115099 - DNA, 1431 bp, Homo sapiens
  Payload ID: 2476
  Gene Symbol: CAV3
  Gene Name: caveolin 3
  Uniprot ID: P56539
  ENST ID: ENST00000343849
  CDS Start-End: 78-533
ctctctgccccaagtattttcagccccagccggccacacagctcggatctcctcctgtggatccccccagctctgcgatgatggcagaagagcacacagatctcgaggcccagatcgtcaaggatatccactgcaaggagattgacctggtgaaccgagaccccaagaacattaacgaggacatagtcaaggtggattttgaagacgtgatcgcagagcctgtgggcacctacagctttgacggcgtgtggaaggtgagctacaccaccttcactgtctccaagtactggtgctaccgtctgttgtccacgctgctgggcgtcccactggccctgctctggggcttcctgttcgcctgcatctccttctgccacatctgggcggtggtgccatgcattaagagctacctgatcgagatccagtgcatcagccacatctactcactctgcatccgcaccttctgcaacccactcttcgcggccctgggccaggtctgcagcagcatcaaggtggtgctgcggaaggaggtctaaagccaggtggggcaacagcggtggcagggcagggggtggtgggccagactggtccccgggggacttcttcacaggggctgctggcgagctctttctctttagggactgctccataccccatgatggagcacacggtgtagggaagccagaaagaaaagacggcccagccacagaagcacaatggcccttcgctctcccccagccccaccatgatgcccccatgcctgggcgtgggggaagatcatttgccaagaggcagctactgcaagtctttgcgttcacttgtactgtaacaacataaaccagcacgcggttcccacccggggccaacctctccacgcgcactcaggaaagtgaccagtgaccactggcgttaggaaggtggctccagtaaagggttttggctgcatttggggaatgctgcattttgttcgtgcctgtaagattggtttgtgtcctgaccagctccaaaaatatacttcactgccctgaaaaacagacacagggagagttggttgtctcttcacttggccaaatgtaagtgaagaacagagtctttttcttcttcggattctattgtttgctggaaccgtacacgttccttggaagatcatgtttaagtgactcctgttgcctgagcacaaaaatgggcaccaatggaggaaaatgacccttgggctggcaggggcagtgacccttccagggtaccactgagggaagggcctgggttcaagcctcccggaacctcccctttggctaaccgagcccctgaaatgcccagtactgccatttgacatgagggtaccttcgccctcaggagatgtgacgaaggaacaaggtctaatttgtgcgtgtgtggactcactatggaaataaaatgcagtagaaagagcatgta

SEQ ID NO: 115100 - DNA, 1260 bp, Homo sapiens
  Payload ID: 2476
  Gene Symbol: CAV3
  Gene Name: caveolin 3
  Uniprot ID: P56539
  ENST ID: ENST00000397368
  CDS Start-End: 12-467
ccagctctgcgatgatggcagaagagcacacagatctcgaggcccagatcgtcaaggatatccactgcaaggagattgacctggtgaaccgagaccccaagaacattaacgaggacatagtcaaggtggattttgaagacgtgatcgcagagcctgtgggcacctacagctttgacggcgtgtggaaggtgagctacaccaccttcactgtctccaagtactggtgctaccgtctgttgtccacgctgctgggcgtcccactggccctgctctggggcttcctgttcgcctgcatctccttctgccacatctgggcggtggtgccatgcattaagagctacctgatcgagatccagtgcatcagccacatctactcactctgcatccgcaccttctgcaacccactcttcgcggccctgggccaggtctgcagcagcatcaaggtggtgctgcggaaggaggtctaaagccagggactgctccataccccatgatggagcacacggtgtagggaagccagaaagaaaagacggcccagccacagaagcacaatggcccttcgctctcccccagccccaccatgatgcccccatgcctgggcgtgggggaagatcatttgccaagaggcagctactgcaagtctttgcgttcacttgtactgtaacaacataaaccagcacgcggttcccacccggggccaacctctccacgcgcactcaggaaagtgaccagtgaccactggcgttaggaaggtggctccagtaaagggttttggctgcatttggggaatgctgcattttgttcgtgcctgtaagattggtttgtgtcctgaccagctccaaaaatatacttcactgccctgaaaaacagacacagggagagttggttgtctcttcacttggccaaatgtaagtgaagaacagagtctttttcttcttcggattctattgtttgctggaaccgtacacgttccttggaagatcatgtttaagtgactcctgttgcctgagcacaaaaatgggcaccaatggaggaaaatgacccttgggctggcaggggcagtgacccttccagggtaccactgagggaagggcctgggttcaagcctcccggaacctcccctttggctaaccgagcccctgaaatgcccagtactgccatttgacatgagggtaccttcgccctcaggagatgtgacgaaggaacaaggtctaatttgtgcgtgtgtggactcactatggaaataaaatgcagtagaaa

SEQ ID NO: 115101 - DNA, 6780 bp, Homo sapiens
  Payload ID: 2477
  Gene Symbol: CBLB
  Gene Name: Cbl proto-oncogene B, E3 ubiquitin protein ligase
  Uniprot ID: Q13191
  ENST ID: ENST00000264122
  CDS Start-End: 323-3271
ctgggtcctgtgtgtgccacaggggtggggtgtccagcgagcggtctcctcctcctgctagtgctgctgcggcgtcccgcggcctccccgagtcgggcgggaggggagagcgggtgtggatttgtcttgacggtaattgttgcgtttccacgtctcggaggcctgcgcgctgggttgctccttcttcgggagcgagctgttctcagcgatcccactcccagccggggctccccacacacactgggctgcgtgcgtgtggagtgggacccgcgcacacgcgtgtctctggacagctacggcgccgaaagaactaaaattccagatggcaaactcaatgaatggcagaaaccctggtggtcgaggaggaaatccccgaaaaggtcgaattttgggtattattgatgctattcaggatgcagttggaccccctaagcaagctgccgcagatcgcaggaccgtggagaagacttggaagctcatggacaaagtggtaagactgtgccaaaatcccaaacttcagttgaaaaatagcccaccatatatacttgatattttgcctgatacatatcagcatttacgacttatattgagtaaatatgatgacaaccagaaacttgcccaactcagtgagaatgagtactttaaaatctacattgatagccttatgaaaaagtcaaaacgggcaataagactctttaaagaaggcaaggagagaatgtatgaagaacagtcacaggacagacgaaatctcacaaaactgtcccttatcttcagtcacatgctggcagaaatcaaagcaatctttcccaatggtcaattccagggagataactttcgtatcacaaaagcagatgctgctgaattctggagaaagttttttggagacaaaactatcgtaccatggaaagtattcagacagtgccttcatgaggtccaccagattagctctggcctggaagcaatggctctaaaatcaacaattgatttaacttgcaatgattacatttcagtttttgaatttgatatttttaccaggctgtttcagccttggggctctattttgcggaattggaatttcttagctgtgacacatccaggttacatggcatttctcacatatgatgaagttaaagcacgactacagaaatatagcaccaaacccggaagctatattttccggttaagttgcactcgattgggacagtgggccattggctatgtgactggggatgggaatatcttacagaccatacctcataacaagcccttatttcaagccctgattgatggcagcagggaaggattttatctttatcctgatgggaggagttataatcctgatttaactggattatgtgaacctacacctcatgaccatataaaagttacacaggaacaatatgaattatattgtgaaatgggctccacttttcagctctgtaagatttgtgcagagaatgacaaagatgtcaagattgagccttgtgggcatttgatgtgcacctcttgccttacggcatggcaggagtcggatggtcagggctgccctttctgtcgttgtgaaataaaaggaactgagcccataatcgtggacccctttgatccaagagatgaaggctccaggtgttgcagcatcattgacccctttggcatgccgatgctagacttggacgacgatgatgatcgtgaggagtccttgatgatgaatcggttggcaaacgtccgaaagtgcactgacaggcagaactcaccagtcacatcaccaggatcctctccccttgcccagagaagaaagccacagcctgacccactccagatcccacatctaagcctgccacccgtgcctcctcgcctggatctaattcagaaaggcatagttagatctccctgtggcagcccaacgggttcaccaaagtcttctccttgcatggtgagaaaacaagataaaccactcccagcaccacctcctcccttaagagatcctcctccaccgccacctgaaagacctccaccaatcccaccagacaatagactgagtagacacatccatcatgtggaaagcgtgccttccagagacccgccaatgcctcttgaagcatggtgccctcgggatgtgtttgggactaatcagcttgtgggatgtcgactcctaggggagggctctccaaaacctggaatcacagcgagttcaaatgtcaatggaaggcacagtagagtgggctctgacccagtgcttatgcggaaacacagacgccatgatttgcctttagaaggagctaaggtcttttccaatggtcaccttggaagtgaagaatatgatgttcctccccggctttctcctcctcctccagttaccaccctcctccctagcataaagtgtactggtccgttagcaaattctctttcagagaaaacaagagacccagtagaggaagatgatgatgaatacaagattccttcatcccaccctgtttccctgaattcacaaccatctcattgtcataatgtaaaacctcctgttcggtcttgtgataatggtcactgtatgctgaatggaacacatggtccatcttcagagaagaaatcaaacatccctgacttaagcatatatttaaagggagatgtttttgattcagcctctgatcccgtgccattaccacctgccaggcctccaactcgggacaatccaaagcatggttcttcactcaacaggacgccctctgattatgatcttctcatccctccattaggtgaagatgcttttgatgccctccctccatctctcccacctcccccacctcctgcaaggcatagtctcattgaacattcaaaacctcctggctccagtagccggccatcctcaggacaggatctttttcttcttccttcagatccctttgttgatctagcaagtggccaagttcctttgcctcctgctagaaggttaccaggtgaaaatgtcaaaactaacagaacatcacaggactatgatcagcttccttcatgttcagatggttcacaggcaccagccagaccccctaaaccacgaccgcgcaggactgcaccagaaattcaccacagaaaaccccatgggcctgaggcggcattggaaaatgtcgatgcaaaaattgcaaaactcatgggagagggttatgcctttgaagaggtgaagagagccttagagatagcccagaataatgtcgaagttgcccggagcatcctccgagaatttgccttccctcctccagtatccccacgtctaaatctatagcagccagaactgtagacaccaaaatggaaagcaatcgatgtattccaagagtgtggaaataaagagaactgagatggaattcaagagagaagtgtctcctcctcgtgtagcagcttgagaagaggcttgggagtgcagcttctcaaaggagaccgatgcttgctcaggatgtcgacagctgtggcttccttgtttttgctagccatatttttaaatcagggttgaactgacaaaaataatttaaagacgtttacttcccttgaactttgaacctgtgaaatgctttaccttgtttacagtttggcaaagttgcagtttgttcttgtttttagtttagttttgttttggtgttttgatacctgtactgtgttcttcacagaccctttgtagcgtggtcaggtctgctgtaacatttcccaccaactctcttgctgtccacatcaacagctaaatcatttattcatatggatctctaccatccccatgccttgcccaggtccagttccatttctctcattcacaagatgctttgaaggttctgattttcaactgatcaaactaatgcaaaaaaaaaaaagtatgtattcttcactactgagtttcttctttggaaaccatcactattgagagatgggaaaaacctgaatgtataaagcatttatttgtcaataaactgccttttgtaaggggttttcacataacatagaggagcttcccttttttgtttaagttttgtaacctttaatcctccatattctcatgtctgtcatcccaggggtgtcacaactgtaaaaatctacaatattagaaagcagctactacagatgtggaagagagaacacttgtataagacaatgctgtactgaagttatataacaaggtcccctgatacttatgcctgcattactttgagggatgctgaatgagaggaccatctccctgaaatatattaataattttcagataaaattatgaacataacataccttttctcaagtggaattagagttcatttcccatttaagtgattacactctatctcctaagagctgtgggaaccagttcatattgcagtggaaacattaactcttcgttgcactgttgagtgtcaaggctactgtggcaatgttttttgcaaagttctcagtaattttctctctgcaatcaaattagagttcatatttaatttgcagattctctcattcattgctccacactgctttatcaaatcaggtgaaagaaattaatgtagttttgcctattttacaaaatggtggttggttctttaaacaccatgttattactcttaataaatctacaaatatttattgagcatctatgatatgcttggtgctgttaggcactgtgtttttaaagcacaaactctcaaaagctgattccagcgtaatgttttatttttgtttttctgtgttttttatgacaaagtctgtctgatagacaaagcctggaaggtttcccccagggctttagaatttagaattagctggttttcatttcaaatgggaaattaatggagaaatgagataaaatcatctctgtgtaaatgcttgaacccacagaaagttttctaaatatggactaattgtgggtttgtgcatatttctgtgtctcctcttttcacttcacacccaccatgatataaaaagatgcatcagagagtgagcctgccttcaggacctgaaaggacatgactgaacatctagtagatctggtggaaattaatgttatacaaaagacacgtagactaagttgaccctgggagaggagttaatacattcctttgcaaagtgacatgtgccctttttttgacagtctggctttcatggtatgagatgaggactcacaggccttgggtaatttctgcttttgtatgaattttttcagatggttctgagctggttatgtccctggaggggaatttttcatttgccttagatgttcttcccatgagtaggtacatgagtgaagtttcttacacttttaaaattgcattggcaaattttcttttgctttatgaacccctgttttgtcattatgatttttcacttgttttaacagtttcagatgtcaccttggaatagcactgtttattttggcctttttatgattgctgatgataggtacagtctaaaggccaaaagttgccacttcattgtgataacattgttgcaacattcctaatatattagagaatgatgtaaaataagaatgttagagaacatagcacattctcattcagtttataaacaatatttgaaaatttccagtgagaattaaaaaaggactagtgatgatatagcaaacctggacctgaaatttgggggtggggggtggggggatatctgttttgcagagaaaatttaccagcctccagcaaaatctctgcatcttgtactcaatagcaaccattagtattgtcatttaaaaagaatgaatcaaaaattcatacgtaatggaatgaaaagaggaaaactttctattaaacactgtcaagaaagacccattgctatctatcacctatgaaattaaacctaaaaaaatttttttttattgtaaaagcgactgctcgttgatgtctggaagtgatccagactttgtttcactgtgatccaaaaagttagacattccttccatttctcaagatttggtaacaatttttttttaagtcagcatttcatataatacataaaattaagacaaattaacttactgatatgtggccaatatcaacccttctcacccaacccaaacatgttctggagatagaaggacttatcctcaattatattccagtaaatttatctccataatctgttttatcccctaatgtatgatatatctcaccaaatttttctagaattgaataaaagcagtttttgcttaacttgaatttccttccacaaatacaaccttcagctcttccctctctgtttcccttttgcccacattgcaaatagtcttcataatagaaccctcactgcaacttaaaagggtcccatttcttaactcagcatttcatataccaagaacacttgcaaagatttcttcataatgtgattttttaatttttcagttccagaagcatttcctacagttcgaacgttattttttctctcagattttcaacttgaagctttgatttgcactgaattaacttggataaaattttagtttctctcttcagctaacagatttggaagcaaattacagtatacttgaataattcaggtactacctgttgacctggaattttagtgattctgggaaagttttccagacaaagacaccaatagagtgaagggttttttccccaattactattttattgttttttaaaatgcctttttaaaacttgtgtgatgtggcaaaatagtcatatgttcaattaatttatattttattcattccttttcaattctggttattatgtaacctcaagtactttatctgttcttttaaagtattttataaaatgaacgttaactaaa

SEQ ID NO: 115102 - DNA, 4475 bp, Homo sapiens
  Payload ID: 2477
  Gene Symbol: CBLB
  Gene Name: Cbl proto-oncogene B, E3 ubiquitin protein ligase
  ENST ID: ENST00000394030
  CDS Start-End: 1-966
ggaatcacagcgagttcaaatgtcaatggaaggcacagtagagtgggctctgacccagtgcttatgcggaaacacagacgccatgatttgcctttagaaggagctaaggtcttttccaatggtcaccttggaagtgaagaatatgatgttcctccccggctttctcctcctcctccagttaccaccctcctccctagcataaagtgtactggtccgttagcaaattctctttcagagaaaacaagagacccagtagaggaagatgatgatgaatacaagattccttcatcccaccctgtttccctgaattcacaaccatctcattgtcataatgtaaaacctcctgttcggtcttgtgataatggtcactgtatgctgaatggaacacatggtccatcttcagagaagaaatcaaacatccctgacttaagcatatatttaaagggtgaagatgcttttgatgccctccctccatctctcccacctcccccacctcctgcaaggcatagtctcattgaacattcaaaacctcctggctccagtagccggccatcctcaggacaggatctttttcttcttccttcagatccctttgttgatctagcaagtggccaagttcctttgcctcctgctagaaggttaccaggtgaaaatgtcaaaactaacagaacatcacaggactatgatcagcttccttcatgttcagatggttcacaggcaccagccagaccccctaaaccacgaccgcgcaggactgcaccagaaattcaccacagaaaaccccatgggcctgaggcggcattggaaaatgtcgatgcaaaaattgcaaaactcatgggagagggttatgcctttgaagaggtgaagagagccttagagatagcccagaataatgtcgaagttgcccggagcatcctccgagaatttgccttccctcctccagtatccccacgtctaaatctatagcagccagaactgtagacaccaaaatggaaagcaatcgatgtattccaagagtgtggaaataaagagaactgagatggaattcaagagagaagtgtctcctcctcgtgtagcagcttgagaagaggcttgggagtgcagcttctcaaaggagaccgatgcttgctcaggatgtcgacagctgtggcttccttgtttttgctagccatatttttaaatcagggttgaactgacaaaaataatttaaagacgtttacttcccttgaactttgaacctgtgaaatgctttaccttgtttacagtttggcaaagttgcagtttgttcttgtttttagtttagttttgttttggtgttttgatacctgtactgtgttcttcacagaccctttgtagcgtggtcaggtctgctgtaacatttcccaccaactctcttgctgtccacatcaacagctaaatcatttattcatatggatctctaccatccccatgccttgcccaggtccagttccatttctctcattcacaagatgctttgaaggttctgattttcaactgatcaaactaatgcaaaaaaaaaaaagtatgtattcttcactactgagtttcttctttggaaaccatcactattgagagatgggaaaaacctgaatgtataaagcatttatttgtcaataaactgccttttgtaaggggttttcacataacatagaggagcttcccttttttgtttaagttttgtaacctttaatcctccatattctcatgtctgtcatcccaggggtgtcacaactgtaaaaatctacaatattagaaagcagctactacagatgtggaagagagaacacttgtataagacaatgctgtactgaagttatataacaaggtcccctgatacttatgcctgcattactttgagggatgctgaatgagaggaccatctccctgaaatatattaataattttcagataaaattatgaacataacataccttttctcaagtggaattagagttcatttcccatttaagtgattacactctatctcctaagagctgtgggaaccagttcatattgcagtggaaacattaactcttcgttgcactgttgagtgtcaaggctactgtggcaatgttttttgcaaagttctcagtaattttctctctgcaatcaaattagagttcatatttaatttgcagattctctcattcattgctccacactgctttatcaaatcaggtgaaagaaattaatgtagttttgcctattttacaaaatggtggttggttctttaaacaccatgttattactcttaataaatctacaaatatttattgagcatctatgatatgcttggtgctgttaggcactgtgtttttaaagcacaaactctcaaaagctgattccagcgtaatgttttatttttgtttttctgtgttttttatgacaaagtctgtctgatagacaaagcctggaaggtttcccccagggctttagaatttagaattagctggttttcatttcaaatgggaaattaatggagaaatgagataaaatcatctctgtgtaaatgcttgaacccacagaaagttttctaaatatggactaattgtgggtttgtgcatatttctgtgtctcctcttttcacttcacacccaccatgatataaaaagatgcatcagagagtgagcctgccttcaggacctgaaaggacatgactgaacatctagtagatctggtggaaattaatgttatacaaaagacacgtagactaagttgaccctgggagaggagttaatacattcctttgcaaagtgacatgtgccctttttttgacagtctggctttcatggtatgagatgaggactcacaggccttgggtaatttctgcttttgtatgaattttttcagatggttctgagctggttatgtccctggaggggaatttttcatttgccttagatgttcttcccatgagtaggtacatgagtgaagtttcttacacttttaaaattgcattggcaaattttcttttgctttatgaacccctgttttgtcattatgatttttcacttgttttaacagtttcagatgtcaccttggaatagcactgtttattttggcctttttatgattgctgatgataggtacagtctaaaggccaaaagttgccacttcattgtgataacattgttgcaacattcctaatatattagagaatgatgtaaaataagaatgttagagaacatagcacattctcattcagtttataaacaatatttgaaaatttccagtgagaattaaaaaaggactagtgatgatatagcaaacctggacctgaaatttgggggtggggggtggggggatatctgttttgcagagaaaatttaccagcctccagcaaaatctctgcatcttgtactcaatagcaaccattagtattgtcatttaaaaagaatgaatcaaaaattcatacgtaatggaatgaaaagaggaaaactttctattaaacactgtcaagaaagacccattgctatctatcacctatgaaattaaacctaaaaaaatttttttttattgtaaaagcgactgctcgttgatgtctggaagtgatccagactttgtttcactgtgatccaaaaagttagacattccttccatttctcaagatttggtaacaatttttttttaagtcagcatttcatataatacataaaattaagacaaattaacttactgatatgtggccaatatcaacccttctcacccaacccaaacatgttctggagatagaaggacttatcctcaattatattccagtaaatttatctccataatctgttttatcccctaatgtatgatatatctcaccaaatttttctagaattgaataaaagcagtttttgcttaacttgaatttccttccacaaatacaaccttcagctcttccctctctgtttcccttttgcccacattgcaaatagtcttcataatagaaccctcactgcaacttaaaagggtcccatttcttaactcagcatttcatataccaagaacacttgcaaagatttcttcataatgtgattttttaatttttcagttccagaagcatttcctacagttcgaacgttattttttctctcagattttcaacttgaagctttgatttgcactgaattaacttggataaaattttagtttctctcttcagctaacagatttggaagcaaattacagtatacttgaataattcaggtactacctgttgacctggaattttagtgattctgggaaagttttccagacaaagacaccaatagagtgaagggttttttccccaattactattttattgttttttaaaatgcctttttaaaacttgtgtgatgtggcaaaatagtcatatgttcaattaatttatattttattcattccttttcaattctggttattatgtaacctcaagtactttatctgttcttttaaagtattttataaaatgaacgttaactaaa

SEQ ID NO: 115103 - DNA, 1493 bp, Homo sapiens
  Payload ID: 2477
  Gene Symbol: CBLB
  Gene Name: Cbl proto-oncogene B, E3 ubiquitin protein ligase
  ENST ID: ENST00000407712
  CDS Start-End: 335-928
caggttctattgaattcttccacagagataagttaattttacatagtgtttaggatatcaacaatttttgtggcccttgtaattcttggttatagtttaaaaaaagagagactgtgttacttgagatatttacttctacattttaaaataagggatgagtatcttgatgttattactggtaattttgagaaaagaaaaatatatgttcaaactttattaaataaacaggaatactagttccctctacctctcaagttacttttaattggaaagtattctccttatataattttactctgaactgtcctttaggtcttgtgataatggtcactgtatgctgaatggaacacatggtccatcttcagagaagaaatcaaacatccctgacttaagcatatatttaaagggtgaagatgcttttgatgccctccctccatctctcccacctcccccacctcctgcaaggcatagtctcattgaacattcaaaacctcctggctccagtagccggccatcctcaggacaggatctttttcttcttccttcagatccctttgttgatctagcaagtggccaagttcctttgcctcctgctagaaggttaccaggtgaaaatgtcaaaactaacagaacatcacaggactatgatcagcttccttcatgttcagatggttcacaggcaccagccagaccccctaaaccacgaccgcgcaggactgcaccagaaattcaccacagaaaaccccatgggcctgaggcggcattggaaaatgtcgatgcaaaaattgcaaaactcatgggagagggttatgcctttgaagaggtgaagagagccttagagatagcccagaataatgtcgaagttgcccggagcatcctccgagaatttgccttccctcctccagtatccccacgtctaaatctatagcagccagaactgtagacaccaaaatggaaagcaatcgatgtattccaagagtgtggaaataaagagaactgagatggaattcaagagagaagtgtctcctcctcgtgtagcagcttgagaagaggcttgggagtgcagcttctcaaaggagaccgatgcttgctcaggatgtcgacagctgtggcttccttgtttttgctagccatatttttaaatcagggttgaactgacaaaaataatttaaagacgtttacttcccttgaactttgaacctgtgaaatgctttaccttgtttacagtttggcaaagttgcagtttgttcttgtttttagtttagttttgttttggtgttttgatacctgtactgtgttcttcacagaccctttgtagcgtggtcaggtctgctgtaacatttcccaccaactctcttgctgtccacatcaacagctaaatcatttattcatatggatctctaccatccccatgccttgcccaggtccagttccatttctctcattcacaagatgctttgaaggttctgattttcaactgatcaaactaatgc

SEQ ID NO: 115104 - DNA, 3350 bp, Homo sapiens
  Payload ID: 2477
  Gene Symbol: CBLB
  Gene Name: Cbl proto-oncogene B, E3 ubiquitin protein ligase
  Uniprot ID: Q13191
  ENST ID: ENST00000403724
  CDS Start-End: 323-2635
ctgggtcctgtgtgtgccacaggggtggggtgtccagcgagcggtctcctcctcctgctagtgctgctgcggcgtcccgcggcctccccgagtcgggcgggaggggagagcgggtgtggatttgtcttgacggtaattgttgcgtttccacgtctcggaggcctgcgcgctgggttgctccttcttcgggagcgagctgttctcagcgatcccactcccagccggggctccccacacacactgggctgcgtgcgtgtggagtgggacccgcgcacacgcgtgtctctggacagctacggcgccgaaagaactaaaattccagatggcaaactcaatgaatggcagaaaccctggtggtcgaggaggaaatccccgaaaaggtcgaattttgggtattattgatgctattcaggatgcagttggaccccctaagcaagctgccgcagatcgcaggaccgtggagaagacttggaagctcatggacaaagtggtaagactgtgccaaaatcccaaacttcagttgaaaaatagcccaccatatatacttgatattttgcctgatacatatcagcatttacgacttatattgagtaaatatgatgacaaccagaaacttgcccaactcagtgagaatgagtactttaaaatctacattgatagccttatgaaaaagtcaaaacgggcaataagactctttaaagaaggcaaggagagaatgtatgaagaacagtcacaggacagacgaaatctcacaaaactgtcccttatcttcagtcacatgctggcagaaatcaaagcaatctttcccaatggtcaattccagggagataactttcgtatcacaaaagcagatgctgctgaattctggagaaagttttttggagacaaaactatcgtaccatggaaagtattcagacagtgccttcatgaggtccaccagattagctctggcctggaagcaatggctctaaaatcaacaattgatttaacttgcaatgattacatttcagtttttgaatttgatatttttaccaggctgtttcagccttggggctctattttgcggaattggaatttcttagctgtgacacatccaggttacatggcatttctcacatatgatgaagttaaagcacgactacagaaatatagcaccaaacccggaagctatattttccggttaagttgcactcgattgggacagtgggccattggctatgtgactggggatgggaatatcttacagaccatacctcataacaagcccttatttcaagccctgattgatggcagcagggaaggattttatctttatcctgatgggaggagttataatcctgatttaactggattatgtgaacctacacctcatgaccatataaaagttacacaggaacaatatgaattatattgtgaaatgggctccacttttcagctctgtaagatttgtgcagagaatgacaaagatgtcaagattgagccttgtgggcatttgatgtgcacctcttgccttacggcatggcaggagtcggatggtcagggctgccctttctgtcgttgtgaaataaaaggaactgagcccataatcgtggacccctttgatccaagagatgaaggctccaggtgttgcagcatcattgacccctttggcatgccgatgctagacttggacgacgatgatgatcgtgaggagtccttgatgatgaatcggttggcaaacgtccgaaagtgcactgacaggcagaactcaccagtcacatcaccaggatcctctccccttgcccagagaagaaagccacagcctgacccactccagatcccacatctaagcctgccacccgtgcctcctcgcctggatctaattcagaaaggcatagttagatctccctgtggcagcccaacgggttcaccaaagtcttctccttgcatggtgagaaaacaagataaaccactcccagcaccacctcctcccttaagagatcctcctccaccgccacctgaaagacctccaccaatcccaccagacaatagactgagtagacacatccatcatgtggaaagcgtgccttccagagacccgccaatgcctcttgaagcatggtgccctcgggatgtgtttgggactaatcagcttgtgggatgtcgactcctaggggagggctctccaaaacctggaatcacagcgagttcaaatgtcaatggaaggcacagtagagtgggctctgacccagtgcttatgcggaaacacagacgccatgatttgcctttagaaggagctaaggtcttttccaatggtcaccttggaagtgaagaatatgatgttcctccccggctttctcctcctcctccagttaccaccctcctccctagcataaagtgtactggtccgttagcaaattctctttcagagaaaacaagagacccagtagaggaagatgatgatgaatacaagattccttcatcccaccctgtttccctgaattcacaaccatctcattgtcataatgtaaaacctcctgttcggtcttgtgataatggtcactgtatgctgaatggaacacatggtccatcttcagagaagaaatcaaacatccctgacttaagcatatatttaaagggtacgtatagaatataatttcctttgtgatgtacatcttaatggtcagaatttaaaggcaaaatttcatgccattgtactgaaaatacattaaggttttgtgttatcctctaggagatgtttttgattcagcctctgatcccgtgccattaccacctgccaggcctccaactcgggacaatccaaagcatggttcttcactcaacaggacgccctctgattatgatcttctcatccctccattaggttgaaacctttaaaaaagttttgaacaacccacccctccttcttttaatttcagaattttcagaattcagagttcagtataacacagactcactgggttgtgaatttgcctgaaatttgaatgggttctccaggtgccggtgactcccaagttcacgagaccattactccatgtagatgattaaggtagtagtgtagtagttgggcatcagtcaggttttaagcaagttgttttgtccatactaaatgtagtctaaaaacacatgagagctttgtgctctagtagttttgaagtgatgacttgaagtgttgagattttctttaagtataataattcttaataaatatgaacttgcttttcttgcagcatgagcaccagttccacttacgctaattaaattatgcaaaattaaatagttgtatgtagagaactgataataaattctgttttattctaatcattacaactgtaacacattcaaaaaaa

SEQ ID NO: 115105 - DNA, 3237 bp, Homo sapiens
  Payload ID: 2477
  Gene Symbol: CBLB
  Gene Name: Cbl proto-oncogene B, E3 ubiquitin protein ligase
  ENST ID: ENST00000405772
  CDS Start-End: 323-2755
ctgggtcctgtgtgtgccacaggggtggggtgtccagcgagcggtctcctcctcctgctagtgctgctgcggcgtcccgcggcctccccgagtcgggcgggaggggagagcgggtgtggatttgtcttgacggtaattgttgcgtttccacgtctcggaggcctgcgcgctgggttgctccttcttcgggagcgagctgttctcagcgatcccactcccagccggggctccccacacacactgggctgcgtgcgtgtggagtgggacccgcgcacacgcgtgtctctggacagctacggcgccgaaagaactaaaattccagatggcaaactcaatgaatggcagaaaccctggtggtcgaggaggaaatccccgaaaaggtcgaattttgggtattattgatgctattcaggatgcagttggaccccctaagcaagctgccgcagatcgcaggaccgtggagaagacttggaagctcatggacaaagtggtaagactgtgccaaaatcccaaacttcagttgaaaaatagcccaccatatatacttgatattttgcctgatacatatcagcatttacgacttatattgagtaaatatgatgacaaccagaaacttgcccaactcagtgagaatgagtactttaaaatctacattgatagccttatgaaaaagtcaaaacgggcaataagactctttaaagaaggcaaggagagaatgtatgaagaacagtcacaggacagacgaaatctcacaaaactgtcccttatcttcagtcacatgctggcagaaatcaaagcaatctttcccaatggtcaattccagggagataactttcgtatcacaaaagcagatgctgctgaattctggagaaagttttttggagacaaaactatcgtaccatggaaagtattcagacagtgccttcatgaggtccaccagattagctctggcctggaagcaatggctctaaaatcaacaattgatttaacttgcaatgattacatttcagtttttgaatttgatatttttaccaggctgtttcagccttggggctctattttgcggaattggaatttcttagctgtgacacatccaggttacatggcatttctcacatatgatgaagttaaagcacgactacagaaatatagcaccaaacccggaagctatattttccggttaagttgcactcgattgggacagtgggccattggctatgtgactggggatgggaatatcttacagaccatacctcataacaagcccttatttcaagccctgattgatggcagcagggaaggattttatctttatcctgatgggaggagttataatcctgatttaactggattatgtgaacctacacctcatgaccatataaaagttacacaggaacaatatgaattatattgtgaaatgggctccacttttcagctctgtaagatttgtgcagagaatgacaaagatgtcaagattgagccttgtgggcatttgatgtgcacctcttgccttacggcatggcaggagtcggatggtcagggctgccctttctgtcgttgtgaaataaaaggaactgagcccataatcgtggacccctttgatccaagagatgaaggctccaggtgttgcagcatcattgacccctttggcatgccgatgctagacttggacgacgatgatgatcgtgaggagtccttgatgatgaatcggttggcaaacgtccgaaagtgcactgacaggcagaactcaccagtcacatcaccaggatcctctccccttgcccagagaagaaagccacagcctgacccactccagatcccacatctaagcctgccacccgtgcctcctcgcctggatctaattcagaaaggcatagttagatctccctgtggcagcccaacgggttcaccaaagtcttctccttgcatggtgagaaaacaagataaaccactcccagcaccacctcctcccttaagagatcctcctccaccgccacctgaaagacctccaccaatcccaccagacaatagactgagtagacacatccatcatgtggaaagcgtgccttccagagacccgccaatgcctcttgaagcatggtgccctcgggatgtgtttgggactaatcagcttgtgggatgtcgactcctaggggagggctctccaaaacctggaatcacagcgagttcaaatgtcaatggaaggcacagtagagtgggctctgacccagtgcttatgcggaaacacagacgccatgatttgcctttagaaggagctaaggtcttttccaatggtcaccttggaagtgaagaatatgatgttcctccccggctttctcctcctcctccagttaccaccctcctccctagcataaagtgtactggtccgttagcaaattctctttcagagaaaacaagagacccagtagaggaagatgatgatgaatacaagattccttcatcccaccctgtttccctgaattcacaaccatctcattgtcataatgtaaaacctcctgttcggtcttgtgataatggtcactgtatgctgaatggaacacatggtccatcttcagagaagaaatcaaacatccctgacttaagcatatatttaaagggagatgtttttgattcagcctctgatcccgtgccattaccacctgccaggcctccaactcgggacaatccaaagcatggttcttcactcaacaggacgccctctgattatgatcttctcatccctccattaggttgaaacctttaaaaaagttttgaacaacccacccctccttcttttaatttcagaattttcagaattcagagttcagtataacacagactcactgggttgtgaatttgcctgaaatttgaatgggttctccaggtgccggtgactcccaagttcacgagaccattactccatgtagatgattaaggtagtagtgtagtagttgggcatcagtcaggttttaagcaagttgttttgtccatactaaatgtagtctaaaaacacatgagagctttgtgctctagtagttttgaagtgatgacttgaagtgttgagattttctttaagtataataattcttaataaatatgaacttgcttttcttgcagcatgagcaccagttccacttacgctaattaaattatgcaaaattaaatagttgtatgtagagaactgataataaattctgttttattctaatcattacaactgtaacacattcaaaaaaa

SEQ ID NO: 115106 - DNA, 561 bp, Homo sapiens
  Payload ID: 2477
  Gene Symbol: CBLB
  Gene Name: Cbl proto-oncogene B, E3 ubiquitin protein ligase
  ENST ID: ENST00000443752
  CDS Start-End: 143-561
gctgtcctgggtagaagggtttggcagccctagggagatgaatttctccagcgttggacccgcccagagcggagaagcaacacccttccagccactactctgttgctatgaaacaaaagactaggaagaactaaaattccagatggcaaactcaatgaatggcagaaaccctggtggtcgaggaggaaatccccgaaaaggtcgaattttgggtattattgatgctattcaggatgcagttggaccccctaagcaagctgccgcagatcgcaggaccgtggagaagacttggaagctcatggacaaagtggtaagactgtgccaaaatcccaaacttcagttgaaaaatagcccaccatatatacttgatattttgcctgatacatatcagcatttacgacttatattgagtaaatatgatgacaaccagaaacttgcccaactcagtgagaatgagtactttaaaatctacattgatagccttatgaaaaagtcaaaacgggcaataagactctttaaagaaggcaaggagagaatgtatgaagaacagtcacaggacag

SEQ ID NO: 115107 - DNA, 944 bp, Homo sapiens
  Payload ID: 2477
  Gene Symbol: CBLB
  Gene Name: Cbl proto-oncogene B, E3 ubiquitin protein ligase
  ENST ID: ENST00000447441
  CDS Start-End: 526-944
aagcgaagcaggaagtcccgcctttcagccccagatggctttggctcccggtcccgacgctcacgcccacctgccaccccttattggttagctccttcgtgccttgcatcccttcgtccatttcctttcccgtttccactttcgttcccgggagagtccaggcccctcatttctctccgagtccaattcctttctgacgtgctgcgagcgggccttcctctggggccattgtgtactgtggaggacgtggacggggcggcagcgcgaggaggacgggcgcctcccgtccattggctgcacccgctgtcgggcagtgcgcggttgcgcggcattggctcagcggcgcccggccccgcccccgccccgccccgccccgagcctgggtcctgtgtgtgccacaggggtggggtgtccagcgagcggtctcctcctcctgctagtgctgctgcggcgtcccgcggcctccccgagtcgggcgggaggggagagcgggtgtggatttgtcttgacgaactaaaattccagatggcaaactcaatgaatggcagaaaccctggtggtcgaggaggaaatccccgaaaaggtcgaattttgggtattattgatgctattcaggatgcagttggaccccctaagcaagctgccgcagatcgcaggaccgtggagaagacttggaagctcatggacaaagtggtaagactgtgccaaaatcccaaacttcagttgaaaaatagcccaccatatatacttgatattttgcctgatacatatcagcatttacgacttatattgagtaaatatgatgacaaccagaaacttgcccaactcagtgagaatgagtactttaaaatctacattgatagccttatgaaaaagtcaaaacgggcaataagactctttaaagaaggcaaggagagaatgtatgaagaacagtcacaggacag

SEQ ID NO: 115108 - DNA, 519 bp, Homo sapiens
  Payload ID: 2477
  Gene Symbol: CBLB
  Gene Name: Cbl proto-oncogene B, E3 ubiquitin protein ligase
  ENST ID: ENST00000438603
  CDS Start-End: 35-519
aagcgaagcaggaagtcccgcctttcagccccagatggctttggctcccggtcccgacgctcacgcccacctgccaccccttattgaactaaaattccagatggcaaactcaatgaatggcagaaaccctggtggtcgaggaggaaatccccgaaaaggtcgaattttgggtattattgatgctattcaggatgcagttggaccccctaagcaagctgccgcagatcgcaggaccgtggagaagacttggaagctcatggacaaagtggtaagactgtgccaaaatcccaaacttcagttgaaaaatagcccaccatatatacttgatattttgcctgatacatatcagcatttacgacttatattgagtaaatatgatgacaaccagaaacttgcccaactcagtgagaatgagtactttaaaatctacattgatagccttatgaaaaagtcaaaacgggcaataagactctttaaagaaggcaaggagagaatgtatgaagaacagtcacaggacag

SEQ ID NO: 115109 - DNA, 1579 bp, Homo sapiens
  Payload ID: 2478
  Gene Symbol: CBLC
  Gene Name: Cbl proto-oncogene C, E3 ubiquitin protein ligase
  Uniprot ID: Q9ULV8
  ENST ID: ENST00000270279
  CDS Start-End: 64-1488
actctgggcgaggccgcccctatcccagccgcaccggtccttcccggcacacgcgaggctcccatggctctggcggtggccccgtgggggcgacagtgggaagaggcccgcgccctgggccgggcagtcaggatgctgcagcgcctagaagagcaatgcgtcgacccccggctgtccgtgagtcccccttcgctgcgggacctgctgccccgcacagcgcagctgcttcgagaggtggcccattctcggcgggcggccggcggaggcggccccgggggtcccggcggctctggggactttctactcatctacctggccaatctggaggccaagagcaggcaggtggccgcgctgctgcctccccggggccgaaggagtgccaacgacgagctcttccgggcgggctccagactcaggcgacagctggccaagctggccatcatcttcagccacatgcacgcagagctgcacgcactcttccccgggggaaagtactgtggacacatgtaccagctcaccaaggcccccgcccacaccttctggagggaaagttgcggagcccggtgtgtgctgccctgggctgagtttgagtccctcctgggcacctgccaccctgtggaaccaggctgcacagccctggccttgcgcaccaccattgacctcacctgcagcgggcacgtgtccatcttcgagttcgacgtcttcaccaggctctttcagccatggccaacactcctcaagaactggcagctcctggcagtcaaccacccaggctacatggccttcctcacctatgatgaggtccaagagcgtctgcaggcctgcagggacaagccaggcagttacatcttccggcccagctgtactcgcctggggcagtgggccatcggctatgtgagctcagatggcagcatcctgcagaccatccctgccaacaaacccctgtcccaggtgctcctggagggacagaaggacggcttctacctctacccagatggaaagacccacaacccagacctgactgagctcggccaggcagaaccccagcagcgcatccacgtgtcagaggagcagctgcagctctactgggccatggactccacatttgagctctgcaagatctgtgctgagagcaacaaggatgtgaagattgagccgtgcgggcacctgctctgcagctgctgcctggctgcctggcagcactcggacagccagacctgccccttctgccgctgcgagatcaagggctgggaggccgtgagtatctaccagttccacggtcaggctactgctgaggactcagggaacagcagtgaccaggaaggcagggagttggagctggggcaggtgcccctttcggctcctccattgcccccacggccagatctgccccccaggaagcccagaaatgcccagccgaaagtgagactcctaaaggggaactcccctccagctgcgctgggaccccaggaccctgccccggcctgaaggccagggcacccagatgtgctgctcaagggagccccaagggctggaagggggttgtgaaaccgaaataaactgccaagcctggtctgtc

SEQ ID NO: 115110 - DNA, 1441 bp, Homo sapiens
  Payload ID: 2478
  Gene Symbol: CBLC
  Gene Name: Cbl proto-oncogene C, E3 ubiquitin protein ligase
  Uniprot ID: Q9ULV8
  ENST ID: ENST00000341505
  CDS Start-End: 64-1350
actctgggcgaggccgcccctatcccagccgcaccggtccttcccggcacacgcgaggctcccatggctctggcggtggccccgtgggggcgacagtgggaagaggcccgcgccctgggccgggcagtcaggatgctgcagcgcctagaagagcaatgcgtcgacccccggctgtccgtgagtcccccttcgctgcgggacctgctgccccgcacagcgcagctgcttcgagaggtggcccattctcggcgggcggccggcggaggcggccccgggggtcccggcggctctggggactttctactcatctacctggccaatctggaggccaagagcaggcaggtggccgcgctgctgcctccccggggccgaaggagtgccaacgacgagctcttccgggcgggctccagactcaggcgacagctggccaagctggccatcatcttcagccacatgcacgcagagctgcacgcactcttccccgggggaaagtactgtggacacatgtaccagctcaccaaggcccccgcccacaccttctggagggaaagttgcggagcccggtgtgtgctgccctgggctgagtttgagtccctcctgggcacctgccaccctgtggaaccaggctgcacagccctggccttgcgcaccaccattgacctcacctgcagcgggcacgtgtccatcttcgagttcgacgtcttcaccaggctctttcagccatggccaacactcctcaagaactggcagctcctggcagtcaaccacccaggctacatggccttcctcacctatgatgaggtccaagagcgtctgcaggcctgcagggacaagccaggcagctacctctacccagatggaaagacccacaacccagacctgactgagctcggccaggcagaaccccagcagcgcatccacgtgtcagaggagcagctgcagctctactgggccatggactccacatttgagctctgcaagatctgtgctgagagcaacaaggatgtgaagattgagccgtgcgggcacctgctctgcagctgctgcctggctgcctggcagcactcggacagccagacctgccccttctgccgctgcgagatcaagggctgggaggccgtgagtatctaccagttccacggtcaggctactgctgaggactcagggaacagcagtgaccaggaaggcagggagttggagctggggcaggtgcccctttcggctcctccattgcccccacggccagatctgccccccaggaagcccagaaatgcccagccgaaagtgagactcctaaaggggaactcccctccagctgcgctgggaccccaggaccctgccccggcctgaaggccagggcacccagatgtgctgctcaagggagccccaagggctggaagggggttgtgaaaccgaaataaactgccaagcctggtctgtc

SEQ ID NO: 115111 - DNA, 11231 bp, Homo sapiens
  Payload ID: 2479
  Gene Symbol: CBL
  Gene Name: Cbl proto-oncogene, E3 ubiquitin protein ligase
  Uniprot ID: P22681
  ENST ID: ENST00000264033
  CDS Start-End: 143-2863
tccgcccggatagccggcggcggcggcggcggcggcggcggcggcggccgggagaggcccctccttcacgccctgcttctctccctcgctcgcagtcgagccgagccggcggacccgcctgggctccgaccctgcccaggccatggccggcaacgtgaagaagagctctggggccgggggcggcagcggctccgggggctcgggttcgggtggcctgattgggctcatgaaggacgccttccagccgcaccaccaccaccaccaccacctcagcccccacccgccggggacggtggacaagaagatggtggagaagtgctggaagctcatggacaaggtggtgcggttgtgtcagaacccaaagctggcgctaaagaatagcccaccttatatcttagacctgctaccagatacctaccagcatctccgtactatcttgtcaagatatgaggggaagatggagacacttggagaaaatgagtattttagggtgtttatggagaatttgatgaagaaaactaagcaaaccataagcctcttcaaggagggaaaagaaagaatgtatgaggagaattctcagcctaggcgaaacctaaccaaactgtccctcatcttcagccacatgctggcagaactaaaaggaatctttccaagtggactctttcagggagacacatttcggattactaaagcagatgctgcggaattttggagaaaagcttttggggaaaagacaatagtcccttggaagagctttcgacaggctctacatgaagtgcatcccatcagttctgggctggaggccatggctctgaaatccactattgatctgacctgcaatgattatatttcggtttttgaatttgacatctttacccgactctttcagccctggtcctctttgctcaggaattggaacagccttgctgtaactcatcctggctacatggcttttttgacgtatgacgaagtgaaagctcggctccagaaattcattcacaaacctggcagttatatcttccggctgagctgtactcgtctgggtcagtgggctattgggtatgttactgctgatgggaacattctccagacaatccctcacaataaacctctcttccaagcactgattgatggcttcagggaaggcttctatttgtttcctgatggacgaaatcagaatcctgatctgactggcttatgtgaaccaactccccaagaccatatcaaagtgacccaggaacaatatgaattatactgtgagatgggctccacattccaactatgtaaaatatgtgctgaaaatgataaggatgtaaagattgagccctgtggacacctcatgtgcacatcctgtcttacatcctggcaggaatcagaaggtcagggctgtcctttctgccgatgtgaaattaaaggtactgaacccatcgtggtagatccgtttgatcctagagggagtggcagcctgttgaggcaaggagcagagggagctccctccccaaattatgatgatgatgatgatgaacgagctgatgatactctcttcatgatgaaggaattggctggtgccaaggtggaacggccgccttctccattctccatggccccacaagcttcccttcccccggtgccaccacgacttgaccttctgccgcagcgagtatgtgttccctcaagtgcttctgctcttggaactgcttctaaggctgcttctggctcccttcataaagacaaaccattgccagtacctcccacacttcgagatcttccaccaccaccgcctccagaccggccatattctgttggagcagaatcccgacctcaaagacgccccttgccttgtacaccaggcgactgtccctccagagacaaactgccccctgtcccctctagccgccttggagactcatggctgccccggccaatccccaaagtaccagtatctgccccaagttccagtgatccctggacaggaagagaattaaccaaccggcactcacttccattttcattgccctcacaaatggagcccagaccagatgtgcctaggctcggaagcacgttcagtctggatacctccatgagtatgaatagcagcccattagtaggtccagagtgtgaccaccccaaaatcaaaccttcctcatctgccaatgccatttattctctggctgccagacctcttcctgtgccaaaactgccacctggggagcaatgtgagggtgaagaggacacagagtacatgactccctcttccaggcctctacggcctttggatacatcccagagttcacgagcatgtgattgcgaccagcagattgatagctgtacgtatgaagcaatgtataatattcagtcccaggcgccatctatcaccgagagcagcacctttggtgaagggaatttggccgcagcccatgccaacactggtcccgaggagtcagaaaatgaggatgatgggtatgatgtcccaaagccacctgtgccggccgtgctggcccgccgaactctctcagatatctctaatgccagctcctcctttggctggttgtctctggatggtgatcctacaacaaatgtcactgaaggttcccaagttcccgagaggcctccaaaaccattcccgcggagaatcaactctgaacggaaagctggcagctgtcagcaaggtagtggtcctgccgcctctgctgccaccgcctcacctcagctctccagtgagatcgagaacctcatgagtcaggggtactcctaccaggacatccagaaagctttggtcattgcccagaacaacatcgagatggccaaaaacatcctccgggaatttgtttccatttcttctcctgcccatgtagctacctagcacaccatctccctgctgcaggtttagaggaccagtgagttgggagttattactcaagtggcacctagaagggcaggagttcctttggtgacttcacagtgaagtcttgccctctctgtgggatatcacatcagtggttccaagatttcaaagtggtgaaatgaaaatggagcagctagtatgttttattattttatgggtcttgagtgcatttgaaggtgtccttcagttcccacgtagagagagtgtggattatattacatgataacctacctggggaacagtccagaaagctatagaacaagtattttgctggaaatcctaattgaggacttaagacttcctgggttaaggatgtggccgtgtgtgtgtgtgtctgcctgtggttgtatgtgtccttgtgattataagattaacctgctgtgtgtgttaattccaggcagggaattagcacaaaaggtttaggaaggaatctttttttaaagacttccatctactgtggtattatacccaagcctagtgtgtattacaacttcaacactcccctttggcttatattaccatgtgcatagctaaagtcttctatttttagaacaccttctgtctgttctttccccatcaactccttcctcatccttcttggtgttctgtcatgggccatgggcttgctatggccagccttactgaggccaagcagcttatgggatgttctttattgtgtgtgatggtattggtttgtttggtagataagtgggaggaaaagtactgttgctacactattataggcatgtttgatactagcagctaacactggtcactccaaagcactgtttctataggaacattgaagctattaagatgttttgattatcctaattacataatgaccgatttgagatagaggcctttaaatacattccatgccctccccagaaaatagtctgtgggagtcagttgccttggtgccaggtatgtgttctgatgtaggtcatgagtctttctacttaatgggaagggaagaacatttgtttccaggatgactttctggccagaataccggaaagcttttaggaagcttcgttcacatgctatttaaatgcacaaaatagacagtaaggatttatctgttcagtttttcttcccagtgaattaatttcagcttatatgggtgtcttcatttgaacatgaggaatattaggttatattttcagcagtggttttttcctttgccctttaaggagtggggataatgtccacggtggcccagcctcttgctgatggcaccttccctgcattgctgcctcccgatgatgtggttcttttcttgtgcctgtggctttgggaatgtaacatctctttcctcctttccttcccttttcctcttcacctgaggtcctaaatactctctgtaattactgtgttcttcacggtaattagacatcattcagtgaataaattactgtagtcaaagacagtatgggctggcagtttgtgtaattgcaagttcataaagagaattgagggtccagttgggagaactattagtcagttcttttatatgctgataaatgatccctcgagttcagttagtattctgtccagagtgtttagctcactttcttagcagtgtgtaagctttctccatgtcagaagcaagcctgctctttgataaatctgtcttcctgaaaatctaaatcatgcttttgtctttagatctacacagaaatgaccctccttggatcagttttctttccagtctaatcatctttggaactaaaacttgttctaactcgtctcttggcattcagctactcctagatcttttggttttatcccctggcctcagagccatttatattcccagagtaggcagtacaggatctcgtgttgatttgctgtggttacccagtgtcttctctacatggcataaagcggcaaagcccaccattaggtgaggcggtcccgagttgaggtagagtggggcagaggaagatggcagtgaatatcaaacagtagaccgccatcaacttctaacagccagtacacacactgtttcattttgaggtaacgttcagttttgcattttgtttaaatattgaaggcctagacaaagaactagaaaaaaaaaagcagtttccaggcccatccatattgtaatttttctttatctgcagatattgcctgtagtctaaagatctctttggaagacaaagcattggctatatatcttttgccttttccatgcatctaaatcttctctggagattatctccctactgtgtaggttaagggcagtctcgacttttccttttttgagtcctgtgtggctctttgaatcagcgtgaaactgaggctccagctccctgtgttgtgtgtgtgtgccatccatgggcttgggtgtcagtttgtcacaggtatctgccagcattcaaggttttggatcatttcatgaggatctttcctttgactgggtgctgtgaggacacacctgggtctgtgcctgagattgccaggcaagattaaggaaagttttcatgtggcttttgttttgaggttattctcaaaaccttaatttcttatattttctgttgactaaggcaccagtaacccattcttcaccctccatttgtatggcaatttaaaagtctttggctttgctctgaatttaattaaaactgccttttatgaacagacttcgagttttgccattttgggcaagcccttccgcttgtcccttcctagtggctaataaagtaaaaaaacccacactactttgttctctttttctcatattcattgggctgttgtattcagccagtctcatgctttccctgggtcttcacggattgctttccaagctgccttgttgcggggttgctgcagagcagcaactggacctttccagctgtcgccatgttccttccactaaagtagagggttcttaaaatggaaaaacctgtgggctcttcatatacctccctttagttaagtaatagaccaggcagcttctcatctcagcatttacctgttaatatttttgtgaatagtgctctctacctgtgggtggccgttctcttccacttgctcgtctccccccagccccattctgcataatctaccattcttctcctctctttctcttcttatacagaccctcattactggggcccaagatgtgggatactactgttagtattatttaactattttgtagatttaaaagatttctggttaagggaggtgggggtcactgttcatcactcttaaaatatgtgttttctctatagaaaagtaaaatgtgtttatggtcccaaacagtcaactcacaaatttttataacaaaatttccttgtaaaaactagggaccatctatatattccctttaagatctagttctttttgtaggtgttcagcaatggtgataaagcagaatattctcctacctcacgtcattaaagtcagaagattatagaccttctcaaactataagtccctcttcttgccgttggcctttctgactctggaatgaccactgttcattgaaaaatagttttctgactattggtctggctctaacagtttgtttgttcatccagcaaatgtttatgagtgatgaccatgtgccagaaatgtcaggtatgtgtccttcccttggcgccacatagtagtttactaatgtttgggggattgtacttggactgtcatagcctctgcgtttgaccttaaaatagctcttcccagtaagattgtgcaatttttattcacagctcttccatgtagacttacctttcctcatagagctatcctggttaataacaggccaagattctcccattatcccctgttgtctcctgtagctttgataatgcctgggagattccttggtgtaagtgtcatggataccgactgtttttatgttggaatttgttccaacataattagaatctgtttggtgagttgaaaggtaagttggctcagagttgcacagtagggcattaaatgtttaagcaaagcatctgcccacactcccctttccaatctagtgccttccttgaactttttcctgagctgctacgtccctaatcccccttgttgggaggattttcgtatcacccttatgggacctgtcaccatgtcctgtactatttggaattggttttccagtctttcaacaaccgttgtggctaactatgttttagaagggctggaggtgtgggccctgtcttcgggtctcaggacccaaagatcctttagtcagttgttgggtcttccaagagccagacattaatacagattgaactccatcagtcccctaattgtcagcctttacctccctcccagagcaaggagtttagggattctaaagcttagtgtccacacatcattctaccagaccttagagctttagaagctcaatctaaaatactgtaactcagcataaactattactatcactcctttgaactcagtctccatgagcagtgttttgttggaaatacatagaacggcttaatgcctagagggtggtggatagtgaaggacggtcaaggttatatttttgactgcttagggattctttggatccaagaaacagaaatgttcaagcggaataaaggagggagtggagttgtggtaaggatgcagggtatttcgcagaacccaggacgggaagtgcctttggttcttgggtggagctggaactgcagagctttgcacctagtcctttctcccgcttcacagtctgcttatggtatatgtggcccccaaataggcactctagtcctcaagtctacaccaccttccaactctggggatcaccatgaacaaattctcaatttcccatacttaattttttttttttttgagatggagtctcgctgtgtcgcccaggctggagtgcagtggtgcagtctcaactcaccacaacctctgcctcccaggttcaagcagttctctgcctcaacctcccgagtagctgggattacaggcgcctgccaccatgcccagctaatgttcatatttttagtagagacagggtttcaccgtcttggctaggctggtcttgaactcctgaccctcatgatccacccacctcggcctcccaaagtgctaagattacaggcgtgagccaccgcgcccggcccatacttcgtattcttaaaaaaaactacactcagcccagcacattgatcaagtatctatctctgagcagttggccttgccagggagagcagagatgtggcaggctccttcagctggagacagggagcttctcagagaagtgagcagagactccacagacaccctaaaaaggcttctactcaagaagtaaagccactactcctgcctttttgcttagtggacaggaaggcacaggagtttgtctgggacatcatagaaattcttaggtttaacttaattctggtcattgtcttctttatttcctgtttttcttccctttgtcagtcttcgcatccaagatttcttccctccctcttgtgggccagcctgtcctgttccagagctagcctgttcctgggtagccttccttagcctccattcagcctcaggtcttttgccttcttccgtgtttatttagagagcagaatctaataacgggttccactgtagccactatccatggacttctgggtcctcttcaggtttgagtgcttgaaaatgttcattctctgggcttgtggcctgtctcctccactctcctcctcaccctctcgctccttcctgtgtgagggccgctctgcagtaatgttctcaggcaagccttcctaggcacctcagaaactactttgccagagccagtaagaatatataatattggagcagttgccaggatagaaattaaatatagattccagtttaggatagagtttttaccgagagctctttagacagtatacctgtgtcttctctggcaattgctttcattttagtcctatataaaagctttccttttctgtttttttttaaaactatgcttttgcttgcctaaatcttttgatcttatatttctctcatctcagagcctgtcctgagttgtaaggtatttcatactgccttacttaaaagttttttaaactactagagtcatttgatacacacagaagttacctaataatccaaagatgtccatcaagggaggaagggtgggtcatcagactttgcctttgatgttgtagactaggctcctgagttaagcagcagagggacagcagtgccatgtgccttcactgtgtcccaggaaatctgggttggttccagtgggaaataccagtatttcttggttctggaaagtagcaaaagagtaggagatggggaaatagggatggggagagcaagccccgcatgtccatggcgagtcaggtggggagcacgggtggaagggccggctgttgacagacagactaagctgtgtggtgctcttgccgccccttcctgggtacagagcttgagaaaaatgcagccgaccactccctgtgtttgtacagagcaaagcccaaaagccaacctcagatctcctgatttggcagctgaagaaatcagcagagtcctgattgcctgattcagtcccaaaaatgaatgtcaggccccgccccctccccaccaacattgcctctcctacattctccttctgcccctaaatcagacaggaggccagagaggagtattgctcaatgcgtgctatgtgcaactcctcaggccttgtgccacctccatgctgagccctgaagcagggtgtcctgggtgcctgtgtgtcagctccctcctctctacctacctctgaccttcttgtgggtgagggtggccatgcttatggccatcttaaaactggagaggcagagaactacttatgagtctgtagaccacgtgttgtcttccatggcctgtttctcctgctgtctgggtgagtgagcctgcaacgcaatgcccatgagagtaaatgcctcctgacctaccctgctcagcactgttctagtgtcttggccttgaaagaaaagcctgacttcctgctgacacatgtggtaggggcatggcagctatgaggcacctcctacgtctgttttctggctgtggtgacttgggatttttaaccttatatatctttttcctttactcaaaacaaaacaatttttagcacactgaaaaaaaaaaaaagccaaatgttttgtgcctttctaaggcagcactgtatcccaggctgcattttaggacttaatatggaaataccagagtctgagctcctctaccttgagtttcattagtccttagtgtctaggagacaggaaagaatgctctctgtgactggagaggtgacatgcaggtgcagtgtgtctggagtccctttcccctgctgtgagacttcagtggaggagagaagcattgtaccctgggatcatttggttggttccaatcacaagcttagttatcaggttgcatgccttgtctcctgcaaaagacagaatgtttcacaattcccaggtaaactctggaccattccaagtgtcctagccttctgatgacattaattacctagttgtgtcgaggagtataggatggactctcctgagaaggggaggttggtggctttgtcttttctttttgctggatcctgaactggtctagacctcctgcccccaccccccagcccccatcagatgtggctggcctttcatttgaaggcttcagacttaaagcattaagcagctagtgccctctgcagggcctggtttccccagggaagggcagcaaggaacatgggaccagaagcctgtcctcagtaatgtgactatagtgagctttagcaaaagtttttctatataatgacatcttacttatcttttaccctttcctcagttttcccctgcctttaactaataaagaattgggagacagaaattttaaagtcctccttattcaagattttgaaattcttagcctgggagtgctggagagaacctgatgctttctccagaatgaagagtcccaatttgtatatcagtgttaagaagaaaacaaaacaaacacataggtgagattttcgtggactattttaaaaatgtgtcattaatataaaaaatttatattagcagtatttaatcattctcacctgtaaagaataagaaaaacagaaggtaaatattcttacagagaatagcagagctttaagattcattttcattttaagtccattttattttgccagtgtattaatgtttagaagtctgttttactaatgttatttattaattttttttcatttccatacacagttagttaactaaagagctttttcaagcacccatgtctgtaaaaaaatatttttaaataaagtttcttttgttgtagcaga

SEQ ID NO: 115112 - DNA, 3457 bp, Homo sapiens
  Payload ID: 2479
  Gene Symbol: CBL
  Gene Name: Cbl proto-oncogene, E3 ubiquitin protein ligase
  ENST ID: ENST00000634586
  CDS Start-End: 121-2769
gcggcggcggcggcggcggcggcggccgggagaggcccctccttcacgccctgcttctctccctcgctcgcagtcgagccgagccggcggacccgcctgggctccgaccctgcccaggccatggccggcaacgtgaagaagagctctggggccgggggcggcagcggctccgggggctcgggttcgggtggcctgattgggctcatgaaggacgccttccagccgcaccaccaccaccaccaccacctcagcccccacccgccggggacggtggacaagaagatggtggagaagtgctggaagctcatggacaaggtggtgcggttgtgtcagaacccaaagctggcgctaaagaatagcccaccttatatcttagacctgctaccagatacctaccagcatctccgtactatcttgtcaagatatgaggggaagatggagacacttggagaaaatgagtattttagggtgtttatggagaatttgatgaagaaaactaagcaaaccataagcctcttcaaggagggaaaagaaagaatgtatgaggagaattctcagcctaggcgaaacctaaccaaactgtccctcatcttcagccacatgctggcagaactaaaaggaatctttccaagtggactctttcagggagacacatttcggattactaaagcagatgctgcggaattttggagaaaagcttttggggaaaagacaatagtcccttggaagagctttcgacaggctctacatgaagtgcatcccatcagttctgggctggaggccatggctctgaaatccactattgatctgacctgcaatgattatatttcggtttttgaatttgacatctttacccgactctttcagccctggtcctctttgctcaggaattggaacagccttgctgtaactcatcctggctacatggcttttttgacgtatgacgaagtgaaagctcggctccagaaattcattcacaaacctggcagttatatcttccggctgagctgtactcgtctgggtcagtgggctattgggtatgttactgctgatgggaacattctccagacaatccctcacaataaacctctcttccaagcactgattgatggcttcagggaaggcttctatttgtttcctgatggacgaaatcagaatcctgatctgactggcttatgtgaaccaactccccaagaccatatcaaagtgacccaggaacaatatgaattatactgtgagatgggctccacattccaactatgtaaaatatgtgctgaaaatgataaggatgtaaagattgagccctgtggacacctcatgtgcacatcctgtcttacatcctggcaggaatcagaaggtcagggctgtcctttctgccgatgtgaaattaaaggtactgaacccatcgtggtagatccgtttgatcctagagggagtggcagcctgttgaggcaaggagcagagggagctccctccccaaattatgatgatgatgatgatgaacgagctgatgatactctcttcatgatgaaggaattggctggtgccaaggtggaacggccgccttctccattctccatggccccacaagcttcccttcccccggtgccaccacgacttgaccttctgccgcagcgagtatgtgttccctcaagtgcttctgctcttggaactgcttctaaggctgcttctggctcccttcataaagacaaaccattgccagtacctcccacacttcgagatcttccaccaccaccgcctccagaccggccatattctgttggagcagaatcccgacctcaaagacgccccttgccttgtacaccaggcgactgtccctccagagacaaactgccccctgtcccctctagccgccttggagactcatggctgccccggccaatccccaaagtaccagtatctgccccaagttccagtgatccctggacaggaagagaattaaccaaccggcactcacttccattttcattgccctcacaaatggagcccagaccagatgtgcctaggctcggaagcacgttcagtctggatacctccatgagtatgaatagcagcccattagtaggtccagagtgtgaccaccccaaaatcaaaccttcctcatctgccaatgccatttattctctggctgccagacctcttcctgtgccaaaactgccacctggggagcaatgtgagggtgaagaggacacagagtacatgactccctcttccaggcctctacggcctttggatacatcccagagttcacgagcatgtgattgcgaccagcagattgatagctgtacgtatgaagcaatgtataatattcagtcccaggcgccatctatcaccgagagcagcacctttggtgaagggaatttggccgcagcccatgccaacactggtcccgaggagtcagaaaatgaggatgatgggtatgatgtcccaaagccacctgtgccggccgtgctggcccgccgaactctctcagatatctctaatgccagctcctcctttggctggttgtctctggatggtgatcctacaacaaatgtcactgaaggttcccaagttcccgagaggcctccaaaaccattcccgcggagaatcaactctgaacggaaagctggcagctgtcagcaaggtagtggtcctgccgcctctgctgccaccgcctcacctcagctctccaagcaaagcccaaaagccaacctcagatctcctgatttggcagctgaagaaatcagcagagtcctgattgcctgattcagtcccaaaaatgaatgcttcagacttaaagcattaagcagctagtgccctctgcagggcctggtttccccagggaagggcagcaaggaacatgggaccagaagcctgtcctcagtaatgtgactatagtgagctttagcaaaagtttttctatataatgacatcttacttatcttttaccctttcctcagttttcccctgcctttaactaataaagaattgggagacagaaattttaaagtcctccttattcaagattttgaaattcttagcctgggagtgctggagagaacctgatgctttctccagaatgaagagtcccaatttgtatatcagtgttaagaagaaaacaaaacaaacacataggtgagattttcgtggactattttaaaaatgtgtcattaatataaaaaatttatattagcagtatttaatcattctcacctgtaaagaataagaaaaacagaaggtaaatattcttacagagaatagcagagctttaagattcattttcattttaagtccattttattttgccagtgtattaatgtttagaagtctgttttactaatgttatttattaattttttttcatttccatacacagttagttaactaaagagctttttcaagcacccatgtctgtaaaaaaatatttttaaataaagtttcttttgttgtagca

SEQ ID NO: 115113 - DNA, 4813 bp, Homo sapiens
  Payload ID: 2479
  Gene Symbol: CBL
  Gene Name: Cbl proto-oncogene, E3 ubiquitin protein ligase
  ENST ID: ENST00000634840
  CDS Start-End: 119-2707
ggcggcggcggcggcggcggcggccgggagaggcccctccttcacgccctgcttctctccctcgctcgcagtcgagccgagccggcggacccgcctgggctccgaccctgcccaggccatggccggcaacgtgaagaagagctctggggccgggggcggcagcggctccgggggctcgggttcgggtggcctgattgggctcatgaaggacgccttccagccgcaccaccaccaccaccaccacctcagcccccacccgccggggacggtggacaagaagatggtggagaagtgctggaagctcatggacaaggtggtgcggttgtgtcagaacccaaagctggcgctaaagaatagcccaccttatatcttagacctgctaccagatacctaccagcatctccgtactatcttgtcaagatatgaggggaagatggagacacttggagaaaatgagtattttagggtgtttatggagaatttgatgaagaaaactaagcaaaccataagcctcttcaaggagggaaaagaaagaatgtatgaggagaattctcagcctaggcgaaacctaaccaaactgtccctcatcttcagccacatgctggcagaactaaaaggaatctttccaagtggactctttcagggagacacatttcggattactaaagcagatgctgcggaattttggagaaaagcttttggggaaaagacaatagtcccttggaagagctttcgacaggctctacatgaagtgcatcccatcagttctgggctggaggccatggctctgaaatccactattgatctgacctgcaatgattatatttcggtttttgaatttgacatctttacccgactctttcagccctggtcctctttgctcaggaattggaacagccttgctgtaactcatcctggctacatggcttttttgacgtatgacgaagtgaaagctcggctccagaaattcattcacaaacctggcagttatatcttccggctgagctgtactcgtctgggtcagtgggctattgggtatgttactgctgatgggaacattctccagacaatccctcacaataaacctctcttccaagcactgattgatggcttcagggaaggcttctatttgtttcctgatggacgaaatcagaatcctgatctgactggcttatgtgaaccaactccccaagaccatatcaaagtgacccaggaacaatatgaattatactgtgagatgggctccacattccaactatgtaaaatatgtgctgaaaatgataaggatgtaaagattgagccctgtggacacctcatgtgcacatcctgtcttacatcctggcaggaatcagaaggtcagggctgtcctttctgccgatgtgaaattaaaggtactgaacccatcgtggtagatccgtttgatcctagagggagtggcagcctgttgaggcaaggagcagagggagctccctccccaaattatgatgatgatgatgatgaacgagctgatgatactctcttcatgatgaaggaattggctggtgccaaggctgcttctggctcccttcataaagacaaaccattgccagtacctcccacacttcgagatcttccaccaccaccgcctccagaccggccatattctgttggagcagaatcccgacctcaaagacgccccttgccttgtacaccaggcgactgtccctccagagacaaactgccccctgtcccctctagccgccttggagactcatggctgccccggccaatccccaaagtaccagtatctgccccaagttccagtgatccctggacaggaagagaattaaccaaccggcactcacttccattttcattgccctcacaaatggagcccagaccagatgtgcctaggctcggaagcacgttcagtctggatacctccatgagtatgaatagcagcccattagtaggtccagagtgtgaccaccccaaaatcaaaccttcctcatctgccaatgccatttattctctggctgccagacctcttcctgtgccaaaactgccacctggggagcaatgtgagggtgaagaggacacagagtacatgactccctcttccaggcctctacggcctttggatacatcccagagttcacgagcatgtgattgcgaccagcagattgatagctgtacgtatgaagcaatgtataatattcagtcccaggcgccatctatcaccgagagcagcacctttggtgaagggaatttggccgcagcccatgccaacactggtcccgaggagtcagaaaatgaggatgatgggtatgatgtcccaaagccacctgtgccggccgtgctggcccgccgaactctctcagatatctctaatgccagctcctcctttggctggttgtctctggatggtgatcctacaacaaatgtcactgaaggttcccaagttcccgagaggcctccaaaaccattcccgcggagaatcaactctgaacggaaagctggcagctgtcagcaaggtagtggtcctgccgcctctgctgccaccgcctcacctcagctctccagtgagatcgagaacctcatgagtcaggggtactcctaccaggacatccagaaagctttggtcattgcccagaacaacatcgagatggccaaaaacatcctccgggaatttgtttccatttcttctcctgcccatgtagctacctagcacaccatctccctgctgcaggtttagaggaccagtgagttgggagttattactcaagtggcacctagaagggcaggagttcctttggtgacttcacagtgaagtcttgccctctctgtgggatatcacatcagtggttccaagatttcaaagtggtgaaatgaaaatggagcagctagtatgttttattattttatgggtcttgagtgcatttgaaggtgtccttcagttcccacgtagagagagtgtggattatattacatgataacctacctggggaacagtccagaaagctatagaacaagtattttgctggaaatcctaattgaggacttaagacttcctgggttaaggatgtggccgtgtgtgtgtgtgtctgcctgtggttgtatgtgtccttgtgattataagattaacctgctgtgtgtgttaattccaggcagggaattagcacaaaaggtttaggaaggaatctttttttaaagacttccatctactgtggtattatacccaagcctagtgtgtattacaacttcaacactcccctttggcttatattaccatgtgcatagctaaagtcttctatttttagaacaccttctgtctgttctttccccatcaactccttcctcatccttcttggtgttctgtcatgggccatgggcttgctatggccagccttactgaggccaagcagcttatgggatgttctttattgtgtgtgatggtattggtttgtttggtagataagtgggaggaaaagtactgttgctacactattataggcatgtttgatactagcagctaacactggtcactccaaagcactgtttctataggaacattgaagctattaagatgttttgattatcctaattacataatgaccgatttgagatagaggcctttaaatacattccatgccctccccagaaaatagtctgtgggagtcagttgccttggtgccaggtatgtgttctgatgtaggtcatgagtctttctacttaatgggaagggaagaacatttgtttccaggatgactttctggccagaataccggaaagcttttaggaagcttcgttcacatgctatttaaatgcacaaaatagacagtaaggatttatctgttcagtttttcttcccagtgaattaatttcagcttatatgggtgtcttcatttgaacatgaggaatattaggttatattttcagcagtggttttttcctttgccctttaaggagtggggataatgtccacggtggcccagcctcttgctgatggcaccttccctgcattgctgcctcccgatgatgtggttcttttcttgtgcctgtggctttgggaatgtaacatctctttcctcctttccttcccttttcctcttcacctgaggtcctaaatactctctgtaattactgtgttcttcacggtaattagacatcattcagtgaataaattactgtagtcaaagacagtatgggctggcagtttgtgtaattgcaagttcataaagagaattgagggtccagttgggagaactattagtcagttcttttatatgctgataaatgatccctcgagttcagttagtattctgtccagagtgtttagctcactttcttagcagtgtgtaagctttctccatgtcagaagcaagcctgctctttgataaatctgtcttcctgaaaatctaaatcatgcttttgtctttagatctacacagaaatgaccctccttggatcagttttctttccagtctaatcatctttggaactaaaacttgttctaactcgtctcttggcattcagctactcctagatcttttggttttatcccctggcctcagagccatttatattcccagagtaggcagtacaggatctcgtgttgatttgctgtggttacccagtgtcttctctacatggcataaagcggcaaagcccaccattaggtgaggcggtcccgagttgaggtagagtggggcagaggaagatggcagtgaatatcaaacagtagaccgccatcaacttctaacagccagtacacacactgtttcattttgaggtaacgttcagttttgcattttgtttaaatattgaaggccta

SEQ ID NO: 115114 - DNA, 340 bp, Homo sapiens
  Payload ID: 2479
  Gene Symbol: CBL
  Gene Name: Cbl proto-oncogene, E3 ubiquitin protein ligase
  ENST ID: ENST00000634301
  CDS Start-End: 1-270
gccgcagcccatgccaacactggtcccgaggagtcagaaaatgaggatgatgggtatgatgtcccaaagccacctgtgccggccgtgctggcccgccgaactctctcagatatctctaatgccagctcctcctttggctggttgtctctggatggtgatcctacaacaaatgtcactgaaggttcccaagttcccgagaggcctccaaaaccattcccgcggagaatcaactctgaacggaaagctggcagctgtcagcaagttagttaactaaagagctttttcaagcacccatgtctgtaaaaaaatatttttaaataaagtttcttttgttgtagca

SEQ ID NO: 115115 - DNA, 2003 bp, Homo sapiens
  Payload ID: 2480
  Gene Symbol: CBLL1
  Gene Name: Cbl proto-oncogene-like 1, E3 ubiquitin protein ligase
  Uniprot ID: Q75N03
  ENST ID: ENST00000222597
  CDS Start-End: 23-1495
actgtgctctgcgagccgaatcatggatcacactgacaatgagttacaaggcactaatagttctggatccttgggtggtcttgatgttcgcagacgaattcctataaagctcatctccaaacaagcaaacaaagcgaaacctgcaccgcgaactcaaagaactataaacaggatgcctgcaaaggctccacctggtgatgaaggatttgattataatgaagaagaacggtatgactgtaaagggggtgagctgtttgcaaatcagcgaagatttcctggacaccttttttgggactttcagataaacatcttaggtgaaaaggatgatacaccagttcatttctgtgacaagtgtggattgcctattaaaatctatgggagaatgattccatgcaagcatgttttttgctatgactgtgctattttacatgaaaaaaagggagataagatgtgtccaggctgtagtgatcctgtgcagcgaattgagcagtgtacacgaggttctctcttcatgtgtagcattgttcaagggtgcaagagaacatatttgtctcagagagacttacaggctcatatcaaccatcgccatatgagagctggaaaacctgttacccgtgcttcacttgaaaatgttcatcctcctattgccccaccaccaactgaaatccctgagcgttttataatgccaccagacaagcaccatatgagccatattccgccaaagcagcacatcatgatgccaccacctcctttgcaacatgtgccacatgagcactataatcagccacatgaggatattcgtgctcctccagcagaattgtccatggctccacctccacctcgatcggtcagtcaggaaacctttcgtatttcaacaagaaaacacagcaatttaataaccgtccctattcaggatgactcaaattcaggtgctagagaaccaccacctcctgccccagcacctgctcaccatcatcctgaatatcagggtcaaccagtggtatcgcaccctcatcatattatgcctccacagcaacattatgcaccacccccacctcctccaccaccaataagccatccaatgccacatcctccccaggctgcaggtactcctcacttggtatatagccaagctccacctccaccaatgacctctgctccaccaccaataacccctccccctggacatattattgcccagatgccaccttatatgaatcatcctcctccaggacctcccccacctcaacatggtggtccacctgtaactgcaccccctcctcaccattataatcctaactcattaccccagttcactgaagatcaaggaactctgagccctccatttacacaaccagggggaatgagtcctggtatatggcctgcaccaagagggccaccaccacctccacgattgcagggtccgccttctcaaaccccacttcctggaccacatcatccagatcagacaagatatagaccgtattaccaatgataatagtattttgaatggaagatatgagggggaaaaaaacttatgtgtagtcaatcttttaagctttgactgttttgggaaggaagagtacctcttatcgaggtagtataaaacacatagggtcttgtttcttaaaatggttttaaatcttgaccttaagattgatttcaagtaccatactgtagtacagataagtggctcagttgagcacagctatattttaacatctctttgttcccctagtttagtaaattgacccagaggtgaccatttgtaaaaaatttgaaaaaatttttcattgttttacttcaaaagtattgttttgttaaacccaacgtttagtttttcttgtgatacattttgttaacctgtgtaaaaggattaaatttcaatatggttgtaaaaatgctatttttatgtgaatttaagtgcagccacatactgttttttaaaccatatgttttaccactaatttcccaaagttataataaaatcctgaaagtaaaaa

SEQ ID NO: 115116 - DNA, 804 bp, Homo sapiens
  Payload ID: 2480
  Gene Symbol: CBLL1
  Gene Name: Cbl proto-oncogene-like 1, E3 ubiquitin protein ligase
  ENST ID: ENST00000415884
  CDS Start-End: 10-381
agccgaatcatggatcacactgacaatgagttacaaggcactaatagttctggatccttgggtggtcttgatgttcgcagacgaattcctataaagctcatctccaaacaagcaaacaaagcgaaacctgcaccgcgaactcaaagaactataaacaggatgcctgcaaaggctccacctggtgatgaagaaggatttgattataatgaagaagaacggtatgactgtaaagggggtgagctgtttgcaaatcagcgaagatttcctggacaccttttttgggactttcagataaacatcttaggtgaaaaggatgatacaccagttcatttctgtgacaagtgtggattgcctattaaaatctatgggagaatgctgtagtgatcctgtgcagcgaattgagcagtgtacacgaggttctctcttcatgtgtagcattgttcaagggtgcaagagaacatatttgtctcagagagacttacaggctcatatcaaccatcgccatatgagagctggaaaacctgttacccgtgcttcacttgaaaatgttcatcctcctattgccccaccaccaactgaaatccctgagcgttttataatgccaccagacaagcaccatatgagccatattccgccaaagcagcacatcatgatgccaccacctcctttgcaacatgtgccacatgagcactataatcagccacatgaggatattcgtgctcctccagcagaattgtccatggctccacctccacctcgatcggtcagtcaggaaacctttcgtatttcaacaagaaaacacag

SEQ ID NO: 115117 - DNA, 4432 bp, Homo sapiens
  Payload ID: 2480
  Gene Symbol: CBLL1
  Gene Name: Cbl proto-oncogene-like 1, E3 ubiquitin protein ligase
  Uniprot ID: Q75N03
  ENST ID: ENST00000440859
  CDS Start-End: 468-1943
gttactccgcccgccggggtggggccagcgcaacggccgagcctgcgcagccagccggctccgggggccccgcgcactacaagtcccagaaggcagctctccgcggggcgggcagtcgccttatctgcttctggctcatttttaccactgctctccccttccccggtccccctggtgtcctttccacagttaaaggctactttctcttgaagcacatgaggagaagccttagcaacctcaataccgaagttcttcgcgcgctcgctctttctgcctccgcccgaactatgcctgagtccctcacaggagttggatagtagaggcgagagaaggaagtctttgcaggccaaaattgggacaacctgcttggacttccgcctcccggcctccggaaggcagtgcgcacgcgctcgctgcgactccggcgcggttgacttccgctcccactgtgctctgcgagccgaatcatggatcacactgacaatgagttacaaggcactaatagttctggatccttgggtggtcttgatgttcgcagacgaattcctataaagctcatctccaaacaagcaaacaaagcgaaacctgcaccgcgaactcaaagaactataaacaggatgcctgcaaaggctccacctggtgatgaagaaggatttgattataatgaagaagaacggtatgactgtaaagggggtgagctgtttgcaaatcagcgaagatttcctggacaccttttttgggactttcagataaacatcttaggtgaaaaggatgatacaccagttcatttctgtgacaagtgtggattgcctattaaaatctatgggagaatgattccatgcaagcatgttttttgctatgactgtgctattttacatgaaaaaaagggagataagatgtgtccaggctgtagtgatcctgtgcagcgaattgagcagtgtacacgaggttctctcttcatgtgtagcattgttcaagggtgcaagagaacatatttgtctcagagagacttacaggctcatatcaaccatcgccatatgagagctggaaaacctgttacccgtgcttcacttgaaaatgttcatcctcctattgccccaccaccaactgaaatccctgagcgttttataatgccaccagacaagcaccatatgagccatattccgccaaagcagcacatcatgatgccaccacctcctttgcaacatgtgccacatgagcactataatcagccacatgaggatattcgtgctcctccagcagaattgtccatggctccacctccacctcgatcggtcagtcaggaaacctttcgtatttcaacaagaaaacacagcaatttaataaccgtccctattcaggatgactcaaattcaggtgctagagaaccaccacctcctgccccagcacctgctcaccatcatcctgaatatcagggtcaaccagtggtatcgcaccctcatcatattatgcctccacagcaacattatgcaccacccccacctcctccaccaccaataagccatccaatgccacatcctccccaggctgcaggtactcctcacttggtatatagccaagctccacctccaccaatgacctctgctccaccaccaataacccctccccctggacatattattgcccagatgccaccttatatgaatcatcctcctccaggacctcccccacctcaacatggtggtccacctgtaactgcaccccctcctcaccattataatcctaactcattaccccagttcactgaagatcaaggaactctgagccctccatttacacaaccagggggaatgagtcctggtatatggcctgcaccaagagggccaccaccacctccacgattgcagggtccgccttctcaaaccccacttcctggaccacatcatccagatcagacaagatatagaccgtattaccaatgataatagtattttgaatggaagatatgagggggaaaaaaacttatgtgtagtcaatcttttaagctttgactgttttgggaaggaagagtacctcttatcgaggtagtataaaacacatagggtcttgtttcttaaaatggttttaaatcttgaccttaagattgatttcaagtaccatactgtagtacagataagtggctcagttgagcacagctatattttaacatctctttgttcccctagtttagtaaattgacccagaggtgaccatttgtaaaaaatttgaaaaaatttttcattgttttacttcaaaagtattgttttgttaaacccaacgtttagtttttcttgtgatacattttgttaacctgtgtaaaaggattaaatttcaatatggttgtaaaaatgctatttttatgtgaatttaagtgcagccacatactgttttttaaaccatatgttttaccactaatttcccaaagttataataaaatcctgaaagtaaaaatctactagaatttgctgtaaggcagactgttaaatgatagagaattatttcacattttaggcactgaaatgttgaggtttcgaggtatagtaagtatacaatgcacttcacttggatgccttttcatttttaggcagcctcaggagcaccaaaatacattggaattctagtactaagatatatttgttcgtaatgttaaaagacattactaattatttggaaagagatggccaaaataatcaactctacaggcttcaagctggtgggggaatgctgttactcattaatgcttttttactgaatggtcggaatcacatatgcaccacacatactgatcttaagtaacattattttatagaactgtttaaatgggtttaaatggtgttctttagatgaaatgtgttctgttttgttcattgtcttaaactgaatagggctgaataggctttatgtaattcttcatttcatggtagagtttgatgctgtgtttaagtgggttcttgtttataggattttcaactacagtttgaatgccatggaggaatttgaataatatattaatgaaggacatattcttgtaatcacaaatttgcatttgctcaggtttcattgctgtgtgataggatttttcctctaacttgaaatttaaaaacttttatttcctattccttttgtcggtaaagcagtctgaatttggaacattttatcatggagtcaacagtgaagactaccagataattttgtattggagaagaggaaataacagctaaattgtggatttcagtgctttacatggtgcctttcgagtcagcttttacattataggggcttgttatagtttagctaagatgaccacttaacagtttatacagaactcatatgtataaatcaacattcttaggatattatttatatcctttgaataaatccctgtgaagtttttcctccccactaaaatggtgcataataaaacatgaaatatgtagtatgcagatatcatttattagatagtttgtagtgtatacatttagaacatacttcttttgacaaagggtgatctgattgctaatttaccattttattctgtcaggtacaggtgaaacaaattctcatcttgaatgatcagatgcaaaatcatttctgaaccctagagcagaagttagaaataacaaaatggccgtttcaaccttgactggccaaaaataactaataaacttttttgttttaagtcaggcaagtgattttctacatttagcagtttgaaagtccagtgttaatgcaatatttctagtgagaaatgcttgttattaaaagcatgggagtgatagtgtgaaatggtggtgagtgcttctatcatattactgtaggtacttggactggtgcaaacttgattccttttcatccccctgtttaggagctattaaaatattactgttaaaaatccaaaccattctttgttccatgtaataagaaaatagccaaaatcactttagagcttctcaactatttatgaagagctatcctgcttttattgaaagtcactagagttgaatgtggtaagaaaccacttagcctatgtattggacgagaaaatcagtatcatgataaaattttgaattaagagaacccttgtagagtttttaaaaaatgatttattttcaattaggtttaagaaatctatgttatgcagggaggcatatcagatgaatgttgtagcagacaaaagttttaaatcgtgttagacttgaattcatcaattgtttgaatgagggtgggtgggtagaaggataacaaaattactgttagtgtttctttccttacggaaaaagatgtgaatcccagccttatttcagggaagcctttgaagctatgatggacataagtctaaattaaatgtatgtatgtttcattatattgctcttaagactactgaggtggcagtttaattcttaaaaacaataaaatggaagcataaatacta

SEQ ID NO: 115118 - DNA, 573 bp, Homo sapiens
  Payload ID: 2480
  Gene Symbol: CBLL1
  Gene Name: Cbl proto-oncogene-like 1, E3 ubiquitin protein ligase
  ENST ID: ENST00000432748
  CDS Start-End: 23-226
actgtgctctgcgagccgaatcatggatcacactgacaatgagttacaaggcactaatagttctggatccttgggtggtcttgatgttcgcagacgaattcctataaagctcatctccaaacaagcaaacaaagcgaaacctgcaccgcgaactcaaagaactataaacaggatgcctgcaaaggctccacctggtgatgaagttctagggccaaaagagtcgtgagaagcctggctccttggagggatatatttgtctgctcagctttactttagaaggatttgattataatgaagaagaacggtatgactgtaaagggggtgagctgtttgcaaatcagcgaagatttcctggacaccttttttgggactttcagataaacatcttaggtgaaaaggatgatacaccagttcatttctgtgacaagtgtggattgcctattaaaatctatgggagaatgattccatgcaagcatgttttttgctatgactgtgctattttacatgaaaaaaagggagataagatgtgtccaggctgtagtgatcctgtgcagcgaattgagcagtgtacac

SEQ ID NO: 115119 - DNA, 1506 bp, Homo sapiens
  Payload ID: 2480
  Gene Symbol: CBLL1
  Gene Name: Cbl proto-oncogene-like 1, E3 ubiquitin protein ligase
  ENST ID: ENST00000420796
  CDS Start-End: 539-1506
ggcgatgtaggccttcgggaagggagagccccggctctgttttatttagcccagctgctctggcctacgttatggagactggcgggtagattgcggtctccgagtcgcggaatcctctttacgctgggagtggacgggcgagaatgggttggagacttcctgctgtctcagtcagctttgggcgggtgctgcagtggtcaccccctgtcgtctctccgatcctttatggactagaggggtgaaagaagggagtctgatagagtttttggaatcaaactcggagcagtttttctacctaaaccaaaagcatgccccgcgcttcggctgaggtccttactcatcatttgagggtatttacaaagaggagtttaaaatcaaggcattctcatacttttctccaaacaatgagttacaaggcactaatagttctggatccttgggtggtcttgatgttcgcagacgaattcctataaagctcatctccaaacaagcaaacaaagcgaaacctgcaccgcgaactcaaagaactataaacaggatgcctgcaaaggctccacctggtgatgaagaaggatttgattataatgaagaagaacggtatgactgtaaagggggtgagctgtttgcaaatcagcgaagatttcctggacaccttttttgggactttcagataaacatcttaggtgaaaaggatgatacaccagttcatttctgtgacaagtgtggattgcctattaaaatctatgggagaatgattccatgcaagcatgttttttgctatgactgtgctattttacatgaaaaaaagggagataagatgtgtccaggctgtagtgatcctgtgcagcgaattgagcagtgtacacgaggttctctcttcatgtgtagcattgttcaagggtgcaagagaacatatttgtctcagagagacttacaggctcatatcaaccatcgccatatgagagctggaaaacctgttacccgtgcttcacttgaaaatgttcatcctcctattgccccaccaccaactgaaatccctgagcgttttataatgccaccagacaagcaccatatgagccatattccgccaaagcagcacatcatgatgccaccacctcctttgcaacatgtgccacatgagcactataatcagccacatgaggatattcgtgctcctccagcagaattgtccatggctccacctccacctcgatcggtcagtcaggaaacctttcgtatttcaacaagaaaacacagcaatttaataaccgtccctattcaggatgactcaaattcaggtgctagagaaccaccacctcctgccccagcacctgctcaccatcatcctgaatatcagggtcaaccagtggtatcgcaccctcatcatattatgcctccacagcaacattatgcaccacccccacctcctccaccaccaataagccatccaatgccacatcctccccaggctgcaggtactcctcacttggtatatagccaagctcc

SEQ ID NO: 115120 - DNA, 1231 bp, Homo sapiens
  Payload ID: 2481
  Gene Symbol: CITED1
  Gene Name: Cbp/p300-interacting transactivator, with Glu/Asp-rich carboxy-terminal domain, 1
  Uniprot ID: Q99966
  ENST ID: ENST00000246139
  CDS Start-End: 577-1158
acgagccaggacatgtgctaataatgccctaagccggttataaagacgtggaaattgaggggagaaaaaaaaagggaaaaaaagggtctgtccttcctgggattcctagccgaggccagtctgctgccgtgtgcgtgtgcgtcagggctctccgggcggcaatgggggcttgagagccgggtccccagcgccgggaagggagcgcggtggccgccaccgccaccgccccggagtccggcgccgaagctgcgggcgggcgggcgggcaccagctcggtcaggggctgcttggcgcggcactgtgcggtgcagcggcggcgcggcgcggtgcgggcttttcccaggcgccccggggtcgggtggccaacggcgcggccgcgggcgctgagcgcgaccggttcgcggtagcggtggcggcggcgtgcgtgccaggggctgggggctccgccgcctctcttgcggctcaccgagctccgcgcttccctctctccagggcaggcggcttctcagagcacaacagctccagctggcagcatcacttcccgccaatttatccaacttctgccaaggctctgaaatgccaacaacgtcgaggcctgcacttgatgtcaagggtggcacctcacctgcgaaggaggatgccaaccaagagatgagctccgtggcctactccaaccttgcggtgaaagatcgcaaagcagtggccattctgcactaccctggggtagcctcaaatggaaccaaggccagtggggctcccactagttcctcgggatctccaataggctctcctacaaccacccctcccactaaacccccatccttcaacctgcaccccgcccctcacttgctggctagtatgcacctgcagaaacttaatagccagtatcaggggatggctgctgccactccaggccaacccggggaggcaggacccctgcaaaactgggactttggggcccaggcgggaggggcagaatcactctctccttctgctggtgcccagagccctgctatcatcgattcggacccagtggatgaggaagtgctgatgtcgctggtggtggaactggggttggaccgagccaatgagcttccggagctgtggctggggcagaatgagtttgacttcactgcggactttccatctagctgctaatgccaagtgtccctaaagatggaggaataaagccaccaattctgttgtaaataaaaataaagttacttacaaa

SEQ ID NO: 115121 - DNA, 886 bp, Homo sapiens
  Payload ID: 2481
  Gene Symbol: CITED1
  Gene Name: Cbp/p300-interacting transactivator, with Glu/Asp-rich carboxy-terminal domain, 1
  Uniprot ID: Q99966
  ENST ID: ENST00000373619
  CDS Start-End: 229-810
ctataaaaatgtgcccggcggcaaagctgcagaaggggcaccgctgagctgccgagaggaagctcgctctgcccggctgccctcttgtagtccgccggcgaggggcagttctcggtgaggaggaagagagcagcggacggcacagcacccgcgcgggccctcccacaacagctccagctggcagcatcacttcccgccaatttatccaacttctgccaaggctctgaaatgccaacaacgtcgaggcctgcacttgatgtcaagggtggcacctcacctgcgaaggaggatgccaaccaagagatgagctccgtggcctactccaaccttgcggtgaaagatcgcaaagcagtggccattctgcactaccctggggtagcctcaaatggaaccaaggccagtggggctcccactagttcctcgggatctccaataggctctcctacaaccacccctcccactaaacccccatccttcaacctgcaccccgcccctcacttgctggctagtatgcacctgcagaaacttaatagccagtatcaggggatggctgctgccactccaggccaacccggggaggcaggacccctgcaaaactgggactttggggcccaggcgggaggggcagaatcactctctccttctgctggtgcccagagccctgctatcatcgattcggacccagtggatgaggaagtgctgatgtcgctggtggtggaactggggttggaccgagccaatgagcttccggagctgtggctggggcagaatgagtttgacttcactgcggactttccatctagctgctaatgccaagtgtccctaaagatggaggaataaagccaccaattctgttgtaaataaaaataaagttacttacaaagag

SEQ ID NO: 115122 - DNA, 941 bp, Homo sapiens
  Payload ID: 2481
  Gene Symbol: CITED1
  Gene Name: Cbp/p300-interacting transactivator, with Glu/Asp-rich carboxy-terminal domain, 1
  Uniprot ID: Q99966
  ENST ID: ENST00000431381
  CDS Start-End: 199-858
gagtccctgcttcgcagagcaccggacttggagtcagagagacctggctgcgaatcccggctccgccactttctagcgctgtgaccttggttttcaggtggcgaaactgactggtctggttagagcgcgtccaagccaagccgcagtgctgtttggatttttaaatttctccttctgagtgagaaaatagcaatcgagatggaaccatccgcacaacagctccagctggcagcatcacttcccgccaatttatccaacttctgccaaggctctgaaatgccaacaacgtcgaggcctgcacttgatgtcaagggtggcacctcacctgcgaaggaggatgccaaccaagagatgagctccgtggcctactccaaccttgcggtgaaagatcgcaaagcagtggccattctgcactaccctggggtagcctcaaatggaaccaaggccagtggggctcccactagttcctcgggatctccaataggctctcctacaaccacccctcccactaaacccccatccttcaacctgcaccccgcccctcacttgctggctagtatgcacctgcagaaacttaatagccagtatcaggggatggctgctgccactccaggccaacccggggaggcaggacccctgcaaaactgggactttggggcccaggcgggaggggcagaatcactctctccttctgctggtgcccagagccctgctatcatcgattcggacccagtggatgaggaagtgctgatgtcgctggtggtggaactggggttggaccgagccaatgagcttccggagctgtggctggggcagaatgagtttgacttcactgcggactttccatctagctgctaatgccaagtgtccctaaagatggaggaataaagccaccaattctgttgtaaataaaaataaagttacttacaaagagacgggcc

SEQ ID NO: 115123 - DNA, 666 bp, Homo sapiens
  Payload ID: 2481
  Gene Symbol: CITED1
  Gene Name: Cbp/p300-interacting transactivator, with Glu/Asp-rich carboxy-terminal domain, 1
  ENST ID: ENST00000427412
  CDS Start-End: 252-666
gggaacggacgctcagggccccggtggcctgggtgcacgcgcccgccgtgcaagggatgctcccggccgcccccggttccgcggctccatctgggatgcggcgaggagggcagccgagctgtccgcaaacaacgggcctttagttttcaggtggcgaaactgactggtctggttagagcgcgtccaagccaagccgcagtgctgtttggatttttaaatttctccttctgagtgagaaaatagcaatcgagatggaaccatccgcacaacagctccagctggcagcatcacttcccgccaatttatccaacttctgccaaggctctgaaatgccaacaacgtcgaggcctgcacttgatgtcaagggtggcacctcacctgcgaaggaggatgccaaccaagagatgagctccgtggcctactccaaccttgcggtgaaagatcgcaaagcagtggccattctgcactaccctggggtagcctcaaatggaaccaaggccagtggggctcccactagttcctcgggatctccaataggctctcctacaaccacccctcccactaaacccccatccttcaacctgcaccccgcccctcacttgctggctagtatgcacctgcagaaacttaatagccagtatcaggggatggctgctgccactccag

SEQ ID NO: 115124 - DNA, 998 bp, Homo sapiens
  Payload ID: 2481
  Gene Symbol: CITED1
  Gene Name: Cbp/p300-interacting transactivator, with Glu/Asp-rich carboxy-terminal domain, 1
  Uniprot ID: Q99966
  ENST ID: ENST00000453707
  CDS Start-End: 254-913
gcaccgctgagctgccgagaggaagctcgctctgcccggctgccctcttgtagtccgccggcgaggggcagttctcggtgaggaggaagagagcagcggacggcacagcacccgcgcgggccctccggcaggcggcttctcagagttttcaggtggcgaaactgactggtctggttagagcgcgtccaagccaagccgcagtgctgtttggatttttaaatttctccttctgagtgagaaaatagcaatcgagatggaaccatccgcacaacagctccagctggcagcatcacttcccgccaatttatccaacttctgccaaggctctgaaatgccaacaacgtcgaggcctgcacttgatgtcaagggtggcacctcacctgcgaaggaggatgccaaccaagagatgagctccgtggcctactccaaccttgcggtgaaagatcgcaaagcagtggccattctgcactaccctggggtagcctcaaatggaaccaaggccagtggggctcccactagttcctcgggatctccaataggctctcctacaaccacccctcccactaaacccccatccttcaacctgcaccccgcccctcacttgctggctagtatgcacctgcagaaacttaatagccagtatcaggggatggctgctgccactccaggccaacccggggaggcaggacccctgcaaaactgggactttggggcccaggcgggaggggcagaatcactctctccttctgctggtgcccagagccctgctatcatcgattcggacccagtggatgaggaagtgctgatgtcgctggtggtggaactggggttggaccgagccaatgagcttccggagctgtggctggggcagaatgagtttgacttcactgcggactttccatctagctgctaatgccaagtgtccctaaagatggaggaataaagccaccaattctgttgtaaataaaaataaagttacttacaaagagacgggccaa

SEQ ID NO: 115125 - DNA, 820 bp, Homo sapiens
  Payload ID: 2481
  Gene Symbol: CITED1
  Gene Name: Cbp/p300-interacting transactivator, with Glu/Asp-rich carboxy-terminal domain, 1
  Uniprot ID: Q99966
  ENST ID: ENST00000445983
  CDS Start-End: 156-737
gagtccctgcttcgcagagcaccggacttggagtcagagagacctggctgcgaatcccggctccgccactttctagcgctgtgaccttggcacaacagctccagctggcagcatcacttcccgccaatttatccaacttctgccaaggctctgaaatgccaacaacgtcgaggcctgcacttgatgtcaagggtggcacctcacctgcgaaggaggatgccaaccaagagatgagctccgtggcctactccaaccttgcggtgaaagatcgcaaagcagtggccattctgcactaccctggggtagcctcaaatggaaccaaggccagtggggctcccactagttcctcgggatctccaataggctctcctacaaccacccctcccactaaacccccatccttcaacctgcaccccgcccctcacttgctggctagtatgcacctgcagaaacttaatagccagtatcaggggatggctgctgccactccaggccaacccggggaggcaggacccctgcaaaactgggactttggggcccaggcgggaggggcagaatcactctctccttctgctggtgcccagagccctgctatcatcgattcggacccagtggatgaggaagtgctgatgtcgctggtggtggaactggggttggaccgagccaatgagcttccggagctgtggctggggcagaatgagtttgacttcactgcggactttccatctagctgctaatgccaagtgtccctaaagatggaggaataaagccaccaattctgttgtaaataaaaataaagttacttacaaagagacgggcc

SEQ ID NO: 115126 - DNA, 505 bp, Homo sapiens
  Payload ID: 2481
  Gene Symbol: CITED1
  Gene Name: Cbp/p300-interacting transactivator, with Glu/Asp-rich carboxy-terminal domain, 1
  ENST ID: ENST00000450875
  CDS Start-End: 177-505
cggacttggagtcagagagacctggctgcgaatcccggctccgccactttctagcgctgtgaccttggttttcaggtggcgaaactgactggtctggttagagcgcgtccaagccaagccgcagtgctgtttggatttttaaatttctccttctgagtgagaaaatagcaatcgagatggaaccatccgcacaacagctccagctggcagcatcacttcccgccaatttatccaacttctgccaaggctctgaaatgccaacaacgtcgaggcctgcacttgatgtcaagggtggcacctcacctgcgaaggaggatgccaaccaagagatgagctccgtggcctactccaaccttgcggtgaaagatcgcaaagcagtggccattctgcactaccctggggtagcctcaaatggaaccaaggccagtggggctcccactagttcctcgggatctccaataggctctcctacaaccacccctcccactaaacccccatccttcaa

SEQ ID NO: 115127 - DNA, 395 bp, Homo sapiens
  Payload ID: 2481
  Gene Symbol: CITED1
  Gene Name: Cbp/p300-interacting transactivator, with Glu/Asp-rich carboxy-terminal domain, 1
  ENST ID: ENST00000429794
  CDS Start-End: 1-320
tgccaacaacgtcgaggcctgcacttgatgtcaagggtggcacctcacctgcgaaggaggatgccaaccaagagatgagctccgtggcctactccaaccttgcggtgaaagatcgcaaagcagtggccattctgcactaccctggggtagcctcaaatggaaccaagagccctgctatcatcgattcggacccagtggatgaggaagtgctgatgtcgctggtggtggaactggggttggaccgagccaatgagcttccggagctgtggctggggcagaatgagtttgacttcactgcggactttccatctagctgctaatgccaagtgtccctaaagatggaggaataaagccaccaattctgttgtaaataaaaataaagttacttacaaaga

SEQ ID NO: 115128 - DNA, 716 bp, Homo sapiens
  Payload ID: 2481
  Gene Symbol: CITED1
  Gene Name: Cbp/p300-interacting transactivator, with Glu/Asp-rich carboxy-terminal domain, 1
  ENST ID: ENST00000454225
  CDS Start-End: 540-716
aaagggtctgtccttcctgggattcctagccgaggccagtctgctgccgtgtgcgtgtgcgtcagggctctccgggcggcaatgggggcttgagagccgggtccccagcgccgggaagggagcgcggtggccgccaccgccaccgccccggagtccggcgccgaagctgcgggcgggcgggcgggcaccagctcggtcaggggctgcttggcgcggcactgtgcggtgcagcggcggcgcggcgcggtgcgggcttttcccaggcgccccggggtcgggtggccaacggcgcggccgcgggcgctgagcgcgaccggttcgcggtagcggtggcggcggcgtgcgtgccaggggctgggggctccgccgcctctcttgcggctcaccgagctccgcgcttccctctctccagggcaggcggcttctcagagttttcaggtggcgaaactgactggtctggttagagcgcgtccaagccaagccgcagtgctgtttggatttttaaatttctccttctgagtgagaaaatagcaatcgagatggaaccatccgcacaacagctccagctggcagcatcacttcccgccaatttatccaacttctgccaaggctctgaaatgccaacaacgtcgaggcctgcacttgatgtcaagggtggcacctcacctgcgaaggaggatgccaaccaagagatgagctccgtggcctactccaac

SEQ ID NO: 115129 - DNA, 560 bp, Homo sapiens
  Payload ID: 2481
  Gene Symbol: CITED1
  Gene Name: Cbp/p300-interacting transactivator, with Glu/Asp-rich carboxy-terminal domain, 1
  ENST ID: ENST00000417400
  CDS Start-End: 139-560
agcaccggacttggagtcagagagacctggctgcgaatcccggctccgccactttctagcgctgtgaccttggcacaacagctccagctggcagcatcacttcccgccaatttatccaacttctgccaaggctctgaaatgccaacaacgtcgaggcctgcacttgatgtcaagggtggcacctcacctgcgaaggaggatgccaaccaagagatgagctccgtggcctactccaaccttgcggtgaaagatcgcaaagcagtggccattctgcactaccctggggtagcctcaaatggaaccaaggccagtggggctcccactagttcctcgggatctccaataggctctcctacaaccacccctcccactaaacccccatccttcaacctgcaccccgcccctcacttgctggctagtatgcacctgcagaaacttaatagccagtatcaggggatggctgctgccactccaggccaacccggggaggcaggacccctgcaaaactgggactttggggcccaggcgggaggggcagaatcactctctccttctgctgg

SEQ ID NO: 115130 - DNA, 2354 bp, Homo sapiens
  Payload ID: 2482
  Gene Symbol: CITED2
  Gene Name: Cbp/p300-interacting transactivator, with Glu/Asp-rich carboxy-terminal domain, 2
  Uniprot ID: Q99967
  ENST ID: ENST00000367651
  CDS Start-End: 217-1029
gtcctgccgagctgtgagggcaacggaggggaaataaaagggaacggctccgaatctgccccagcggccgctgcgagacctcggcgccgacatcgcgacagcgaagcgctttgcacgccaggaaggtcccctctatgtgctgctgagccggtcctggacgcgacgagcccgccctcggtcttcggagcagaaatcgcaaaaacggaaggactggaaatggcagaccatatgatggccatgaaccacgggcgcttccccgacggcaccaatgggctgcaccatcaccctgcccaccgcatgggcatggggcagttcccgagcccccatcaccaccagcagcagcagccccagcacgccttcaacgccctaatgggcgagcacatacactacggcgcgggcaacatgaatgccacgagcggcatcaggcatgcgatggggccggggactgtgaacggagggcaccccccgagcgcgctggcccccgcggccaggtttaacaactcccagttcatgggtcccccggtggccagccagggaggctccctgccggccagcatgcagctgcagaagctcaacaaccagtatttcaaccatcacccctacccccacaaccactacatgccggatttgcaccctgctgcaggccaccagatgaacgggacaaaccagcacttccgagattgcaaccccaagcacagcggcggcagcagcacccccggcggctcgggcggcagcagcacccccggcggctctggcagcagctcgggcggcggcgcgggcagcagcaacagcggcggcggcagcggcagcggcaacatgcccgcctccgtggcccacgtccccgctgcaatgctgccgcccaatgtcatagacactgatttcatcgacgaggaagttcttatgtccttggtgatagaaatgggtttggaccgcatcaaggagctgcccgaactctggctggggcaaaacgagtttgattttatgacggacttcgtgtgcaaacagcagcccagcagagtgagctgttgactcgatcgaaaccccggcgaaagaaatcaaacccccaacttcttcggcgtgaattaaaagaaacattcccttagacacagtatctcacttttcagatcttgaaaggtttgagaacttggaaacaaagtaaactataaacttgtacaaattggttttaaaaaaaattgctgccacttttttttcctgtttttgtttcgtttttgtagccttgacattcacccacctcccttatgtagttgaaatatctagctaacttggtctttttcgttgtttgtttttactcctttccctcactttctccagtgctcaactgttagatattaatcttggcaaactgcttaatcttgtggattttgtagatggtttcaaatgactgaactgcattcagatttacgagtgaaaggaaaaattgcattagttggttgcatgaacttcgaagggcagatattactgcacaaactgccatctcgcttcatttttttaactatgcatttgagtacagactaatttttaaaatatgctaaactggaagattaaacagatgtgggccaaactgttctggatcaggaaagtcatactgttcactttcaagttggctgtcccccccgccgccccccccacccccatatgtacagatgataatagggtgtggaatgtcgtcagtggcaaacatttcacagatttttattttgtttctgtcttcaacatttttgacactgtgctaatagttatattcagtacatgaaaagatactactgtgttgaaagctttttaggaaattttgacagtatttttgtacaaaacatttttttgaaaaaatacttgttaatttattctattttaatttgccaatgtcaataaaaagttaagaaataacttgttttctagaagtcatttgggggtggttgttccctttggtggcttttttccccccgtctttgagttgaacactattgatgagagtaagcattccaaaggataaattacaggacactaaaacaggtcatgatgagcttaagcggagagcaggatttaacataattggcataatgcttcattgttatcattgtaacatgcctcttggtgtgctttaatcaaaagctgcaaagttgtcactgcttttttttttttcttaattgccatcatatcaagtgtactccagagttagaaaggtttgcaatactcaacattatctttttcaatgggcaggaggcaaaaaaaatcaagtgtttctgtttatacctgattcaactacttaaatagaggtagattggaataatacactgattgattgatgggtggcattaaatataaatctaccttta

SEQ ID NO: 115131 - DNA, 1797 bp, Homo sapiens
  Payload ID: 2482
  Gene Symbol: CITED2
  Gene Name: Cbp/p300-interacting transactivator, with Glu/Asp-rich carboxy-terminal domain, 2
  Uniprot ID: Q99967
  ENST ID: ENST00000536159
  CDS Start-End: 108-920
gagggcagggtttgcccggaggaagagcgtgaggcgaagctggggaataacaacaggatgtgcaacaacaggatgaggagggctgatttaatgcctgaagactggaaatggcagaccatatgatggccatgaaccacgggcgcttccccgacggcaccaatgggctgcaccatcaccctgcccaccgcatgggcatggggcagttcccgagcccccatcaccaccagcagcagcagccccagcacgccttcaacgccctaatgggcgagcacatacactacggcgcgggcaacatgaatgccacgagcggcatcaggcatgcgatggggccggggactgtgaacggagggcaccccccgagcgcgctggcccccgcggccaggtttaacaactcccagttcatgggtcccccggtggccagccagggaggctccctgccggccagcatgcagctgcagaagctcaacaaccagtatttcaaccatcacccctacccccacaaccactacatgccggatttgcaccctgctgcaggccaccagatgaacgggacaaaccagcacttccgagattgcaaccccaagcacagcggcggcagcagcacccccggcggctcgggcggcagcagcacccccggcggctctggcagcagctcgggcggcggcgcgggcagcagcaacagcggcggcggcagcggcagcggcaacatgcccgcctccgtggcccacgtccccgctgcaatgctgccgcccaatgtcatagacactgatttcatcgacgaggaagttcttatgtccttggtgatagaaatgggtttggaccgcatcaaggagctgcccgaactctggctggggcaaaacgagtttgattttatgacggacttcgtgtgcaaacagcagcccagcagagtgagctgttgactcgatcgaaaccccggcgaaagaaatcaaacccccaacttcttcggcgtgaattaaaagaaacattcccttagacacagtatctcacttttcagatcttgaaaggtttgagaacttggaaacaaagtaaactataaacttgtacaaattggttttaaaaaaaattgctgccacttttttttcctgtttttgtttcgtttttgtagccttgacattcacccacctcccttatgtagttgaaatatctagctaacttggtctttttcgttgtttgtttttactcctttccctcactttctccagtgctcaactgttagatattaatcttggcaaactgcttaatcttgtggattttgtagatggtttcaaatgactgaactgcattcagatttacgagtgaaaggaaaaattgcattagttggttgcatgaacttcgaagggcagatattactgcacaaactgccatctcgcttcatttttttaactatgcatttgagtacagactaatttttaaaatatgctaaactggaagattaaacagatgtgggccaaactgttctggatcaggaaagtcatactgttcactttcaagttggctgtcccccccgccgccccccccacccccatatgtacagatgataatagggtgtggaatgtcgtcagtggcaaacatttcacagatttttattttgtttctgtcttcaacatttttgacactgtgctaatagttatattcagtacatgaaaagatactactgtgttgaaagctttttaggaaattttgacagtatttttgtacaaaacatttttttgaaaaaatacttgttaatttattctattttaatttgccaatgtcaataaaaagttaagaaataac

SEQ ID NO: 115132 - DNA, 1780 bp, Homo sapiens
  Payload ID: 2482
  Gene Symbol: CITED2
  Gene Name: Cbp/p300-interacting transactivator, with Glu/Asp-rich carboxy-terminal domain, 2
  ENST ID: ENST00000537332
  CDS Start-End: 76-903
caaagggggtgtgggctcgggtccccccgcccgatcgcaggggaaggggctgtttgtgcagcgtccggctgtgttatgagtggactggaaatggcagaccatatgatggccatgaaccacgggcgcttccccgacggcaccaatgggctgcaccatcaccctgcccaccgcatgggcatggggcagttcccgagcccccatcaccaccagcagcagcagccccagcacgccttcaacgccctaatgggcgagcacatacactacggcgcgggcaacatgaatgccacgagcggcatcaggcatgcgatggggccggggactgtgaacggagggcaccccccgagcgcgctggcccccgcggccaggtttaacaactcccagttcatgggtcccccggtggccagccagggaggctccctgccggccagcatgcagctgcagaagctcaacaaccagtatttcaaccatcacccctacccccacaaccactacatgccggatttgcaccctgctgcaggccaccagatgaacgggacaaaccagcacttccgagattgcaaccccaagcacagcggcggcagcagcacccccggcggctcgggcggcagcagcacccccggcggctctggcagcagctcgggcggcggcgcgggcagcagcaacagcggcggcggcagcggcagcggcaacatgcccgcctccgtggcccacgtccccgctgcaatgctgccgcccaatgtcatagacactgatttcatcgacgaggaagttcttatgtccttggtgatagaaatgggtttggaccgcatcaaggagctgcccgaactctggctggggcaaaacgagtttgattttatgacggacttcgtgtgcaaacagcagcccagcagagtgagctgttgactcgatcgaaaccccggcgaaagaaatcaaacccccaacttcttcggcgtgaattaaaagaaacattcccttagacacagtatctcacttttcagatcttgaaaggtttgagaacttggaaacaaagtaaactataaacttgtacaaattggttttaaaaaaaattgctgccacttttttttcctgtttttgtttcgtttttgtagccttgacattcacccacctcccttatgtagttgaaatatctagctaacttggtctttttcgttgtttgtttttactcctttccctcactttctccagtgctcaactgttagatattaatcttggcaaactgcttaatcttgtggattttgtagatggtttcaaatgactgaactgcattcagatttacgagtgaaaggaaaaattgcattagttggttgcatgaacttcgaagggcagatattactgcacaaactgccatctcgcttcatttttttaactatgcatttgagtacagactaatttttaaaatatgctaaactggaagattaaacagatgtgggccaaactgttctggatcaggaaagtcatactgttcactttcaagttggctgtcccccccgccgccccccccacccccatatgtacagatgataatagggtgtggaatgtcgtcagtggcaaacatttcacagatttttattttgtttctgtcttcaacatttttgacactgtgctaatagttatattcagtacatgaaaagatactactgtgttgaaagctttttaggaaattttgacagtatttttgtacaaaacatttttttgaaaaaatacttgttaatttattctattttaatttgccaatgtcaataaaaagttaagaaataac

SEQ ID NO: 115133 - DNA, 901 bp, Homo sapiens
  Payload ID: 2482
  Gene Symbol: CITED2
  Gene Name: Cbp/p300-interacting transactivator, with Glu/Asp-rich carboxy-terminal domain, 2
  Uniprot ID: Q99967
  ENST ID: ENST00000618718
  CDS Start-End: 202-843
gagggcaacggaggggaaataaaagggaacggctccgaatctgccccagcggccgctgcgagacctcggcgccgacatcgcgacagcgaagcgctttgcacgccaggaaggtcccctctatgtgctgctgagccggtcctggacgcgacgagcccgccctcggtcttcggagcagaaatcgcaaaaacggaaggactggaaatggcagaccatatgatggccatgaaccacgggcgcttccccgacggcaccaatgggctgcaccatcaccctgcccaccgcatgggcatggggcagttcccgagcccccatcaccaccagcagcagcagccccagcacgccttcaacgccctaatgggcgagcacatacactacggcgcgggcaacatgaatgccacgagcggcatcaggcatgcgatggggccggggactgtgaacggagggcaccccccgagcgcgctggcccccgcggccaggtttaacaactcccagttcatgggtcccccggtggccagccagggaggctccctgccggccagcatgcagctgcagaagctcaacaaccagtatttcaaccatcacccctacccccacaaccactacatgccggatttgcaccctgctgcaggccaccagatgaacgggacaaaccagcacttccgagattgcaaccccaatgtcatagacactgatttcatcgacgaggaagttcttatgtccttggtgatagaaatgggtttggaccgcatcaaggagctgcccgaactctggctggggcaaaacgagtttgattttatgacggacttcgtgtgcaaacagcagcccagcagagtgagctgttgactcgatcgaaaccccggcgaaagaaatcaaacccccaacttcttcggcgtgaattaaa

SEQ ID NO: 115134 - DNA, 1316 bp, Homo sapiens
  Payload ID: 2483
  Gene Symbol: CITED4
  Gene Name: Cbp/p300-interacting transactivator, with Glu/Asp-rich carboxy-terminal domain, 4
  Uniprot ID: Q96RK1
  ENST ID: ENST00000372638
  CDS Start-End: 240-794
gacgcggaggtttcggagcactacaggttgcgggcctttgtgaccccaggctgcggccgcaaggtgcgcagtagtgggctgggccggggcaccagtcgggtttggttttgctccgcccggccgagctgcagggaccgcacggtgcccgggtctcccgccgcagagcagccgctggcccgggccgggggagccggcgctgaccaccgcgcgctgtccccgcaggcagccggcctgccgccatggccgaccacctgatgctcgccgagggctaccgcctggtgcagaggccgccgtccgccgcggccgcccatggccctcatgcgctccggactctgccgccgtacgcgggcccgggcctggacagtgggctgaggccgcggggggctccgctggggccgccgccgccccgccaacccggggccctggcgtacggggccttcgggccgccgtcctccttccagccctttccggccgtgcctccgccggccgcgggcatcgcgcacctgcagcctgtggcgacgccgtaccccggccgcgcggccgcgccccccaacgctccgggaggccccccgggcccgcagccggcgccaagcgccgcagccccgccgccgcccgcgcacgccctgggcggcatggacgccgaactcatcgacgaggaggcgctgacgtcgctggagctggagctcgggctgcaccgcgtgcgcgagctgcccgagctcttcctgggccagagcgagttcgactgcttctcggacttggggtccgcgccgcccgccggctccgtgagctgctgagggcggccggcgcccgcccggcgtgccggagaggagaaagggcccgactgcccgccggaccctgcacccagcgactgggccccgcgcgcgccctccgcgagggtggaggcggcggctgtgtgcgcagggcccggcaccggactgggaccctggcgtccctccaggccttgcctcctgcgggaggacagtttggcttcacttctctgaccccagcctcggccgtaaagtgaaagagaccggaccagcttcagctttcggactctggttcttggatcgtgtcctctccccctcgccgccctcttcccccaatctgagccattgcaggcctctgcctgctgccccctctctcctcgggatcgggtccccagagccaccatctcctgagcctcccaccccgctgcctgggccctgtggttgctgggcctcccacctcaaggaggggaaggttgtacagcccgaacccgtggagcaatgccctgtctggcctccaaaaccaaaataaaactgggtcactttacagtc

SEQ ID NO: 115135 - DNA, 5750 bp, Homo sapiens
  Payload ID: 2484
  Gene Symbol: CTIF
  Gene Name: CBP80/20-dependent translation initiation factor
  Uniprot ID: O43310
  ENST ID: ENST00000256413
  CDS Start-End: 296-2092
ctttccctgtgtcagatcagggatcattttttttccttcctctactccctcccccctacccgcccctccctccctgtttcccttccctccctccctcccctctctgctgggtctgtgcgctggggcgcccgatcccctccgcagctgggacgctccgaactcgaggcaggagtcggctctccggagcctcgtccctcccttccccttccctgcccccttcccccacccccgactcgggcttggcgcggcggccagaggaaccccgagtcccggcccaggcccctgagctggagggatggaaaactcctctgcagcatcagcctcctcggaggcagggagcagccgctcccaggagatcgaggagctggagcgcttcatcgacagctacgtgctggagtaccaggtgcaggggctgctggctgacaagacggagggtgatggcgagagcgagaggacccagtcccacatctcccagtggacagcggactgcagcgaaccgctggacagcagctgttccttctcccgagggcgagcccccccacagcagaatggcagcaaagacaactctctggacatgctgggcacggacatctgggcggccaacaccttcgattccttcagtggtgccacctgggacctgcagccggaaaagctggacttcacccagttccaccgcaaagtccgacacacgcccaagcagcccctgccacacatcgaccgcgaagggtgtggcaaagggaagctggaagatggggatggcatcaacctgaatgacatcgagaaggtccttccagcctggcagggctaccacccgatgccccatgaagtggagatcgcacacaccaagaagctgttccgcaggaggagaaatgatcgaaggcggcagcagagacctccggggggcaacaagccccaacagcatggtgaccaccagccaggcagtgccaaacacaacagggaccaccagaaatcctaccaggggggctcagcaccccacccctcagggaggcccactcaccatggctacagccagaaccggcgctggcaccatggcaacatgaagcacccaccaggcgacaagggggaggcaggcgcacaccgcaatgccaaagagaccatgaccatcgagaacccaaaactggaggacactgcaggggacaccgggcacagcagccttgaggccccccgcagccctgacaccctggccccggtggcttctgagcggctgcccccacagcagtcaggggggccagaggttgagacaaaacgtaaagacagtattcttcccgagcgcatcggggagcggcccaaaattaccctgctccagtcttccaaagacagactgcggcgaaggctaaaggaaaaggatgaagtggccgtggagacgaccactccccagcagaacaagatggacaagctgatcgagatcctgaacagcatgcggaacaacagcagcgacgtggacaccaagctcaccaccttcatggaggaggcccagaactccaccaactccgaggagatgctgggcgagatcgtgcgcacaatctaccagaaggctgtgtccgaccgcagcttcgccttcaccgctgccaagctctgcgacaagatggcgctctttatggtggaggggaccaagttccggagcctgctcctcaacatgctgcagaaggacttcacggtgcgcgaggagctgcagcagcaggacgtggagcgctggctgggcttcatcaccttcctgtgcgaggtcttcggcaccatgcgcagcagcacaggcgagcccttccgtgtgctcgtgtgccccatctacacctgcctcagggagctcttgcaatctcaggatgtgaaggaagatgctgtcctttgctgctctatggagctgcagagtacaggccggctgctggaggaacagctgcctgagatgatgacagagctcctggccagcgcacgggacaagatgctgtgcccctcggagtccatgctgacccggtcgctgctcctagaggtcatcgagctccacgctaacagctggaaccctctgacgccccccatcacgcagtactacaacagaaccatccagaaactgacagcctgacagccagggggcctggcaggcggcccacgggcagctggggccctggtgcacagggccagatggacaggcgggaggacaggggtggccctggcgggagaaagaaatggggaggagggcaggcagagtcggtggccagtctggagccagacggggaagggagcaaatccctgagaggagtgcccccgcacaagccccccagcccgagcatgcaagctcacaccaataagggaagcatgtttctttttcctggtggccctggccctccccttcctcactcccgcctctcccctccccatcagacccatcccccacggagctttgtgtgagggatctcatcgctgtgactcctcggagaccttggcagcctcgcacgccggggcaccgcttgggtcagaaaggacctcggaaggctgaaaaagtgggtcggagacgggctcgcattgttcccgcatgctgtcagccgcagtcgccaactggcagcaggcgacgtgtagcagatgtccgggaggacaaaggcaggcacggtccccaccagccgcccgtaattgacggcctttgtcagccatggcagagctgacgctccacctcccacctccaagtcctcctcactgcagcccccacagcctcaggcctagggggtcaggcgcagcgggggagatggagtttgcagttccacttgcactcttttgtttattgtgttttatttttcaaaagtcggttgctttgaagtctctttggccaatgaaaatgcccgtgatgtgatcacacagtcagcactgttgaggacccccggattagtgggagatcaaacccagctcccctctagaagaaggattcgagccacagacagcttgccagtagccaattagggtaattggaaacttctgccccggcggggggtccccgctggaatcctgtgttcctcgccactggcttccagcgcctctgttttctcaaagggctgatactgtcaccactgggaccaagttaaacctggtcctggccccaggggccttgtggcaaacagggcacagaacgagactggcaaattaaaaccaaaattctagatggtgtcttgcgctccacacgcaggtcttactggggaaaaggatgggagtgggggctccccaggactcgattttagctaatgcgctgtgtcactgccccagctcggacgtagaagcccagccctccgtgagctcttgggaaaggggtgaattcactgggtcatggaagggacagtcaggtgaccagcggggtcgccagatgaagcttcccagccgggaaacaagacggggtttcttggcaggccctggtcctggggagcaggccctgttgttggctggagaggaaggtgtggggtggaacaggtgtccacatagctccatctctgggggctggagcacacactttgatgagcccccccggaaatgatgtcagagcctagccgcttccttatttgctcttttattgaggccgggcaggccctgggtcactttggaggcccctcttggtccacactggactggccgggaggtgatgggcggggaaggttctcgtgattgattgattctgagtctgagagtggcgagtggggagaggcttccccagttctctccagctttccctgcagctgcaacctgccctctggtcccaggtgtggagcctttgcctgtctctaaaaagagcctgttggcgacaaggtgtagggggcacaagtttacctgaaacaggtcagtggtctctcccaagaagcgcacgccacctctggtccctggccctgaaccctgccttcttcctccctccacggtttcttcccagactttctcaagctcctcctcactgcccttcctccccagcccagcctgggaacacagatgccccgcgggtaggaggcctcgagggaggagccgggctgatgcggggctgctcagggcaggccccagggcgagcttgccatcgtggccaggcagcctccacctgtgcttcagtggcccctgcccccctgaagcatgtggggtttgtccgctaggaggaggcaaggcccccgaagagaggagagacctgggagtgggagctcaggtcagggaggaggcaggggagtggggtctcccagacccaacggtgagctcagagcaagcttcacgcaggacgctccgaaacactgtgtggagggggctgtgttgtgggcaccttggggcctgattctccttcctccgaacgggctccttgatggcctggccacaggggcagctccccattggctgttaggaccagagtgtgaagaagaagtgaaatataaatatgtatacatatataaatatatttttaattacatgtcgtgtcacggtggctccagacatactgtttgcctagtttattccactgcttgaaagcgcttcctagccaatctgaacaacaacactttaagctgtttttctaaatgcaggttgctgctcctttttcagatatggaaggaaaacgttaagactattttttttttaaagaaacaacagtcaagcctaaaatttgagaccccgaggcagcttcccgagggagactgctcagacaggaactgcaggacagaagtggatgccccacagaccctggccccctccccaagtccatcccctctctgtggcatgaggaaggccgcgtccgagttgacctctgaatgtatgtgatgagaggcagagctggatattgcatttctaaggcttgcattgctttcccctcgcccgcggttcttggcgcatggaagaggcggtccagccatctgatgttgatcctgtctcagtctccccactgcctgtcaggatgagttagtcattgtttttctccgaggcggcctgcttgccacagccctgctccccaaggcctggtggctttgccgaagctctgggaccgcagccccagcgaggcccccaacctcacccagacgaggccaggagccccgccaccctccacgggatgtgcaccctcagaccccattctctctgttcgtccttccttgaccagtctgtaaaccttcactgtttggggatcgtcctgtccatccatgtaaatgtaaatgttggccgagtcggtatttattctgattgatttttattttattctattattttctccgagggatgagggtggggggtgtgggaagggtaccacagatcaggccggggcagctgtaggggcgggggcccagacagccaggccgccaccagagcagccccatggggtgccccagacgcgggcctccaagaagccaagtcccagtctgttttctggcatcagacaccggcccgtgttccttgtcagacagacagactctcaggcctgcctggggagtcgtgtccctcagctgcagggcactgtgttgggaaaccattggctgggcctttgaggacacagatcagaagaaagaaagacaactttcctctgcgcggaacactcacacggaagggctggccgcctccctgagccggctgggagtggacgacaggacctacctccccagagcaagggcctggggcttcccgccaaagctgccgcggaaccccgctagtgcgaccaccctccctccgtcggtatgtcctgctttccagctgaacccaaactacaagtgggtttaaaaaaataaacaccaccaccaaaaacaaaa

SEQ ID NO: 115136 - DNA, 4407 bp, Homo sapiens
  Payload ID: 2484
  Gene Symbol: CTIF
  Gene Name: CBP80/20-dependent translation initiation factor
  Uniprot ID: O43310
  ENST ID: ENST00000382998
  CDS Start-End: 258-2060
ctgtgcgctggggcgcccgatcccctccgcagctgggacgctccgaactcgaggcaggagtcggctctccggagcctcgtccctcccttccccttccctgcccccttcccccacccccgactcgggcttggcgcggcggccagaggaaccccgagcccgcatttgctgcatcgagcagttggtttagtatcagccaaacttgcagctgttcagaccgcgctccgccgagtcccggcccaggcccctgagctggagggatggaaaactcctctgcagcatcagcctcctcggaggcagggagcagccgctcccaggagatcgaggagctggagcgcttcatcgacagctacgtgctggagtaccaggtgcaggggctgctggctgacaagacggagggtgatggcgagagcgagaggacccagtcccacatctcccagtggacagcggactgcagcgaaccgctggacagcagctgttccttctcccgagggcgagcccccccacagcagaatggcagcaaagacaactctctggacatgctgggcacggacatctgggcggccaacaccttcgattccttcagtggtgccacctgggacctgcagccggaaaagctggacttcacccagttccaccgcaaagtccgacacacgcccaagcagcccctgccacacatcgaccgcgaagggtgtggcaaagggaagctggaagatggggatggcatcaacctgaatgacatcgagaaggtccttccagcctggcagggctaccacccgatgccccatgaagtggagatcgcacacaccaagaagctgttccgcaggaggagaaatgatcgaaggcggcagcagagacctccggggggcaacaagccccaacagcatggtgaccaccagccaggcagtgccaaacacaacagggaccaccagaaatcctaccaggggggctcagcaccccacccctcagggaggcccactcaccatggctacagccagaaccggcgctggcaccatggcaacatgaagcacccaccaggcgacaagggggaggcaggcgcacaccgcaatgccaaagagaccatgaccatcgagaacccaaaactggaggacactgcaggggacaccgggcacagcagccttgaggccccccgcagccctgacaccctggccccggtggcttctgagcggctgcccccacagcagtcaggggggccagaggttgagacaaaacgtaaagacagtattcttcccgagcgcatcggggagcggcccaaaattaccctgctccagtcttccaaagacagactgcggcgaaggctaaaggaaaaggtaccggatgaagtggccgtggagacgaccactccccagcagaacaagatggacaagctgatcgagatcctgaacagcatgcggaacaacagcagcgacgtggacaccaagctcaccaccttcatggaggaggcccagaactccaccaactccgaggagatgctgggcgagatcgtgcgcacaatctaccagaaggctgtgtccgaccgcagcttcgccttcaccgctgccaagctctgcgacaagatggcgctctttatggtggaggggaccaagttccggagcctgctcctcaacatgctgcagaaggacttcacggtgcgcgaggagctgcagcagcaggacgtggagcgctggctgggcttcatcaccttcctgtgcgaggtcttcggcaccatgcgcagcagcacaggcgagcccttccgtgtgctcgtgtgccccatctacacctgcctcagggagctcttgcaatctcaggatgtgaaggaagatgctgtcctttgctgctctatggagctgcagagtacaggccggctgctggaggaacagctgcctgagatgatgacagagctcctggccagcgcacgggacaagatgctgtgcccctcggagtccatgctgacccggtcgctgctcctagaggtcatcgagctccacgctaacagctggaaccctctgacgccccccatcacgcagtactacaacagaaccatccagaaactgacagcctgacagccagggggcctggcaggcggcccacgggcagctggggccctggtgcacagggccagatggacaggcgggaggacaggggtggccctggcgggagaaagaaatggggaggagggcaggcagagtcggtggccagtctggagccagacggggaagggagcaaatccctgagaggagtgcccccgcacaagccccccagcccgagcatgcaagctcacaccaataagggaagcatgtttctttttcctggtggccctggccctccccttcctcactcccgcctctcccctccccatcagacccatcccccacggagctttgtgtgagggatctcatcgctgtgactcctcggagaccttggcagcctcgcacgccggggcaccgcttgggtcagaaaggacctcggaaggctgaaaaagtgggtcggagacgggctcgcattgttcccgcatgctgtcagccgcagtcgccaactggcagcaggcgacgtgtagcagatgtccgggaggacaaaggcaggcacggtccccaccagccgcccgtaattgacggcctttgtcagccatggcagagctgacgctccacctcccacctccaagtcctcctcactgcagcccccacagcctcaggcctagggggtcaggcgcagcgggggagatggagtttgcagttccacttgcactcttttgtttattgtgttttatttttcaaaagtcggttgctttgaagtctctttggccaatgaaaatgcccgtgatgtgatcacacagtcagcactgttgaggacccccggattagtgggagatcaaacccagctcccctctagaagaaggattcgagccacagacagcttgccagtagccaattagggtaattggaaacttctgccccggcggggggtccccgctggaatcctgtgttcctcgccactggcttccagcgcctctgttttctcaaagggctgatactgtcaccactgggaccaagttaaacctggtcctggccccaggggccttgtggcaaacagggcacagaacgagactggcaaattaaaaccaaaattctagatggtgtcttgcgctccacacgcaggtcttactggggaaaaggatgggagtgggggctccccaggactcgattttagctaatgcgctgtgtcactgccccagctcggacgtagaagcccagccctccgtgagctcttgggaaaggggtgaattcactgggtcatggaagggacagtcaggtgaccagcggggtcgccagatgaagcttcccagccgggaaacaagacggggtttcttggcaggccctggtcctggggagcaggccctgttgttggctggagaggaaggtgtggggtggaacaggtgtccacatagctccatctctgggggctggagcacacactttgatgagcccccccggaaatgatgtcagagcctagccgcttccttatttgctcttttattgaggccgggcaggccctgggtcactttggaggcccctcttggtccacactggactggccgggaggtgatgggcggggaaggttctcgtgattgattgattctgagtctgagagtggcgagtggggagaggcttccccagttctctccagctttccctgcagctgcaacctgccctctggtcccaggtgtggagcctttgcctgtctctaaaaagagcctgttggcgacaaggtgtagggggcacaagtttacctgaaacaggtcagtggtctctcccaagaagcgcacgccacctctggtccctggccctgaaccctgccttcttcctccctccacggtttcttcccagactttctcaagctcctcctcactgcccttcctccccagcccagcctgggaacacagatgccccgcgggtaggaggcctcgagggaggagccgggctgatgcggggctgctcagggcaggccccagggcgagcttgccatcgtggccaggcagcctccacctgtgcttcagtggcccctgcccccctgaagcatgtggggtttgtccgctaggaggaggcaaggcccccgaagagaggagagacctgggagtgggagctcaggtcagggaggaggcaggggagtggggtctcccagacccaacggtgagctcagagcaagcttcacgcaggacgctccgaaacactgtgtggagggggctgtgttgtgggcaccttggggcctgattctccttcctccgaacgggctccttgatggcctggccacaggggcagctccccattggctgttaggaccagagtgtgaagaagaagtgaaatataaatatgtatacatatataaatatatttttaattacatgtcgtgtca

SEQ ID NO: 115137 - DNA, 683 bp, Homo sapiens
  Payload ID: 2484
  Gene Symbol: CTIF
  Gene Name: CBP80/20-dependent translation initiation factor
  ENST ID: ENST00000587752
  CDS Start-End: 100-683
ccccgcgggctcggggatgtctgtggatggctgtcgtctagacagggcgcagccccctccctgcgtccccgtcccggcccaggcccctgagctggagggatggaaaactcctctgcagcatcagcctcctcggaggcagggagcagccgctcccaggagatcgaggagctggagcgcttcatcgacagctacgtgctggagtaccaggtgcaggggctgctggctgacaagacggagggtgatggcgagagcgagaggacccagtcccacatctcccagtggacagcggactgcagcgaaccgctggacagcagctgttccttctcccgagggcgagcccccccacagcagaatggcagcaaagacaactctctggacatgctgggcacggacatctgggcggccaacaccttcgattccttcagtggtgccacctgggacctgcagccggaaaagctggacttcacccagttccaccgcaaagtccgacacacgcccaagcagcccctgccacacatcgaccgcgaagggtgtggcaaagggaagctggaagatggggatggcatcaacctgaatgacatcgagaaggtccttccagcctggcagggctaccacccgatgccccatgaagtggagatcgcacacaccaagaagctgttccgcaggaggagaaatgatcgaag

SEQ ID NO: 115138 - DNA, 859 bp, Homo sapiens
  Payload ID: 2484
  Gene Symbol: CTIF
  Gene Name: CBP80/20-dependent translation initiation factor
  ENST ID: ENST00000591387
  CDS Start-End: 446-859
aaatccgggaaaaccgccccaaacaatcagcccccttccccccatccctgctcctgggccagcggggtgtccgcacccatctaccatcccctcctccccctcggtggggaactgcactccacagtgtcgccccctccctgggtttgtcccattccctgccgggttccccgccccgcggggtgtcgtggccctggagctccggcgccaaggggggctcttgggggacgcacggctggagcccggctcgctttggagctgcgcggtgtagccgctgtcatgtgccgggttccgacctgggaggaggaaaagagcgagcgcgattcctctcccttttgttttgaagcccgcatttgctgcatcgagcagttggtttagtatcagccaaacttgcagctgttcagaccgcgctccgccgagtcccggcccaggcccctgagctggagggatggaaaactcctctgcagcatcagcctcctcggaggcagggagcagccgctcccaggagatcgaggagctggagcgcttcatcgacagctacgtgctggagtaccaggtgcaggggctgctggctgacaagacggagggtgatggcgagagcgagaggacccagtcccacatctcccagtggacagcggactgcagcgaaccgctggacagcagctgttccttctcccgagggcgagcccccccacagcagaatggcagcaaagacaactctctggacatgctgggcacggacatctgggcggccaacaccttcgattccttcagtggtgccacctgggacctgcagccggaaaagctggacttcacccagttccaccgcaaagtccgacacacgcccaagcagcccctgcca

SEQ ID NO: 115139 - DNA, 584 bp, Homo sapiens
  Payload ID: 2484
  Gene Symbol: CTIF
  Gene Name: CBP80/20-dependent translation initiation factor
  ENST ID: ENST00000588345
  CDS Start-End: 272-584
agcagaggaagaaaccaaatcggtggacccgttgcggtctcccctttggttattcccaacggttgtggttctgttggctttttttattattcctgtcgctgcggtgcaatcgggcctggggaatagatacgcccggcggagaggggttcacttgacaggctctgaaaagccacctctgggtggcgagtgacccgagaggccgtggggtgggctccggctcgggttcatcaggacgacgagcagtcccggcccaggcccctgagctggagggatggaaaactcctctgcagcatcagcctcctcggaggcagggagcagccgctcccaggagatcgaggagctggagcgcttcatcgacagctacgtgctggagtaccaggtgcaggggctgctggctgacaagacggagggtgatggcgagagcgagaggacccagtcccacatctcccagtggacagcggactgcagcgaaccgctggacagcagctgttccttctcccgagggcgagcccccccacagcagaatggcagcaaagacaactctctggacatgctgggcacggacatctgggcggccaacacct

SEQ ID NO: 115140 - DNA, 491 bp, Homo sapiens
  Payload ID: 2484
  Gene Symbol: CTIF
  Gene Name: CBP80/20-dependent translation initiation factor
  ENST ID: ENST00000591412
  CDS Start-End: 132-491
ggcaggagtcggctctccggagcctcgtccctcccttccccttccctgcccccttcccccacccccgactcgggcttggcgcggcggccagaggaaccccgagtcccggcccaggcccctgagctggagggatggaaaactcctctgcagcatcagcctcctcggaggcagggagcagccgctcccaggagatcgaggagctggagcgcttcatcgacagctacgtgctggagtaccaggtgcaggggctgctggctgacaagacggagggtgatggcgagagcgagaggacccagtcccacatctcccaggaggaagtactcaatggtggaccacccatgaaaggcttaacagaagaatggacagcggactgcagcgaaccgctggacagcagctgttccttctcccgagggcgagcccccccacagcagaatggcagcaaagacaactctctggacatgctgggcacggacatctgggcggccaacacc

SEQ ID NO: 115141 - DNA, 491 bp, Homo sapiens; identical to SEQ ID NO: 115140
  Payload ID: 2484
  Gene Symbol: CTIF
  Gene Name: CBP80/20-dependent translation initiation factor
  ENST ID: ENST00000635283
  CDS Start-End: 132-491

SEQ ID NO: 115142 - DNA, 683 bp, Homo sapiens; identical to SEQ ID NO: 115137
  Payload ID: 2484
  Gene Symbol: CTIF
  Gene Name: CBP80/20-dependent translation initiation factor
  ENST ID: ENST00000634755
  CDS Start-End: 100-683

SEQ ID NO: 115143 - DNA, 584 bp, Homo sapiens; identical to SEQ ID NO: 115139
  Payload ID: 2484
  Gene Symbol: CTIF
  Gene Name: CBP80/20-dependent translation initiation factor
  ENST ID: ENST00000634324
  CDS Start-End: 272-584

SEQ ID NO: 115144 - DNA, 4407 bp, Homo sapiens; identical to SEQ ID NO: 115136
  Payload ID: 2484
  Gene Symbol: CTIF
  Gene Name: CBP80/20-dependent translation initiation factor
  ENST ID: ENST00000634350
  CDS Start-End: 258-2060

SEQ ID NO: 115145 - DNA, 859 bp, Homo sapiens; identical to SEQ ID NO: 115138
  Payload ID: 2484
  Gene Symbol: CTIF
  Gene Name: CBP80/20-dependent translation initiation factor
  ENST ID: ENST00000635367
  CDS Start-End: 446-859

SEQ ID NO: 115146 - DNA, 5750 bp, Homo sapiens; identical to SEQ ID NO: 115135
  Payload ID: 2484
  Gene Symbol: CTIF
  Gene Name: CBP80/20-dependent translation initiation factor
  ENST ID: ENST00000635228
  CDS Start-End: 296-2092

SEQ ID NO: 115147 - DNA, 2631 bp, Homo sapiens
  Payload ID: 2485
  Gene Symbol: CEBPA
  Gene Name: CCAAT/enhancer binding protein (C/EBP), alpha
  Uniprot ID: P49715
  ENST ID: ENST00000498907
  CDS Start-End: 151-1227
tataaaagctgggccggcgcgggccgggccattcgcgacccggaggtgcgcgggcgcgggcgagcagggtctccgggtgggcggcggcgacgccccgcgcaggctggaggccgccgaggctcgccatgccgggagaactctaactcccccatggagtcggccgacttctacgaggcggagccgcggcccccgatgagcagccacctgcagagccccccgcacgcgcccagcagcgccgccttcggctttccccggggcgcgggccccgcgcagcctcccgccccacctgccgccccggagccgctgggcggcatctgcgagcacgagacgtccatcgacatcagcgcctacatcgacccggccgccttcaacgacgagttcctggccgacctgttccagcacagccggcagcaggagaaggccaaggcggccgtgggccccacgggcggcggcggcggcggcgactttgactacccgggcgcgcccgcgggccccggcggcgccgtcatgcccgggggagcgcacgggcccccgcccggctacggctgcgcggccgccggctacctggacggcaggctggagcccctgtacgagcgcgtcggggcgccggcgctgcggccgctggtgatcaagcaggagccccgcgaggaggatgaagccaagcagctggcgctggccggcctcttcccttaccagccgccgccgccgccgccgccctcgcacccgcacccgcacccgccgcccgcgcacctggccgccccgcacctgcagttccagatcgcgcactgcggccagaccaccatgcacctgcagcccggtcaccccacgccgccgcccacgcccgtgcccagcccgcaccccgcgcccgcgctcggtgccgccggcctgccgggccctggcagcgcgctcaaggggctgggcgccgcgcaccccgacctccgcgcgagtggcggcagcggcgcgggcaaggccaagaagtcggtggacaagaacagcaacgagtaccgggtgcggcgcgagcgcaacaacatcgcggtgcgcaagagccgcgacaaggccaagcagcgcaacgtggagacgcagcagaaggtgctggagctgaccagtgacaatgaccgcctgcgcaagcgggtggaacagctgagccgcgaactggacacgctgcggggcatcttccgccagctgccagagagctccttggtcaaggccatgggcaactgcgcgtgaggcgcgcggctgtgggaccgccctgggccagcctccggcggggacccagggagtggtttggggtcgccggatctcgaggcttgcccgagccgtgcgagccaggactaggagattccggtgcctcctgaaagcctggcctgctccgcgtgtcccctcccttcctctgcgccggacttggtgcgtctaagatgagggggccaggcggtggcttctccctgcgaggaggggagaattcttggggctgagctgggagcccggcaactctagtatttaggataaccttgtgccttggaaatgcaaactcaccgctccaatgcctactgagtagggggagcaaatcgtgccttgtcattttatttggaggtttcctgcctccttcccgaggctacagcagacccccatgagagaaggaggggagcaggcccgtggcaggaggagggctcagggagctgagatcccgacaagcccgccagccccagccgctcctccacgcctgtccttagaaaggggtggaaacatagggacttggggcttggaacctaaggttgttcccctagttctacatgaaggtggagggtctctagttccacgcctctcccacctccctccgcacacaccccaccccagcctgctataggctgggcttccccttggggcggaactcactgcgatgggggtcaccaggtgaccagtgggagcccccaccccgagtcacaccagaaagctaggtcgtgggtcagctctgaggatgtatacccctggtgggagagggagacctagagatctggctgtggggcgggcatggggggtgaagggccactgggaccctcagccttgtttgtactgtatgccttcagcattgcctaggaacacgaagcacgatcagtccatcccagagggaccggagttatgacaagctttccaaatattttgctttatcagccgatatcaacacttgtatctggcctctgtgccccagcagtgccttgtgcaatgtgaatgtgcgcgtctctgctaaaccaccattttatttggtttttgttttgttttggttttgctcggatacttgccaaaatgagactctccgtcggcagctgggggaagggtctgagactccctttccttttggttttgggattacttttgatcctgggggaccaatgaggtgaggggggttctcctttgccctcagctttccccagcccctccggcctgggctgcccacaaggcttgtcccccagaggccctggctcctggtcgggaagggaggtggcctcccgccaacgcatcactggggctgggagcagggaaggacggcttggttctcttcttttggggagaacgtagagtctcactctagatgttttatgtattatatctataatataaacatatcaaagtcaa

SEQ ID NO: 115148 - DNA, 1956 bp, Homo sapiens
  Payload ID: 2486
  Gene Symbol: CEBPB
  Gene Name: CCAAT/enhancer binding protein (C/EBP), beta
  Uniprot ID: P17676
  ENST ID: ENST00000303004
  CDS Start-End: 301-1338
gtccttcgcgtcccggcggcgcggcgggaggggccggcgtgacgcagcggttgctacgggccgcccttataaataaccgggctcaggagaaactttagcgagtcagagccgcgcacgggactgggaaggggacccacccgagggtccagccaccagccccctcactaatagcggccaccccggcagcggcggcagcagcagcagcgacgcagcggcgacagctcagagcagggaggccgcgccacctgcgggccggccggagcgggcagccccaggccccctccccgggcacccgcgttcatgcaacgcctggtggcctgggacccagcatgtctccccctgccgccgccgccgcctgcctttaaatccatggaagtggccaacttctactacgaggcggactgcttggctgctgcgtacggcggcaaggcggcccccgcggcgccccccgcggccagacccgggccgcgcccccccgccggcgagctgggcagcatcggcgaccacgagcgcgccatcgacttcagcccgtacctggagccgctgggcgcgccgcaggccccggcgcccgccacggccacggacaccttcgaggcggctccgcccgcgcccgcccccgcgcccgcctcctccgggcagcaccacgacttcctctccgacctcttctccgacgactacgggggcaagaactgcaagaagccggccgagtacggctacgtgagcctggggcgcctgggggccgccaagggcgcgctgcaccccggctgcttcgcgcccctgcacccaccgcccccgccgccgccgccgcccgccgagctcaaggcggagccgggcttcgagcccgcggactgcaagcggaaggaggaggccggggcgccgggcggcggcgcaggcatggcggcgggcttcccgtacgcgctgcgcgcttacctcggctaccaggcggtgccgagcggcagcagcgggagcctctccacgtcctcctcgtccagcccgcccggcacgccgagccccgctgacgccaaggcgcccccgaccgcctgctacgcgggggccgcgccggcgccctcgcaggtcaagagcaaggccaagaagaccgtggacaagcacagcgacgagtacaagatccggcgcgagcgcaacaacatcgccgtgcgcaagagccgcgacaaggccaagatgcgcaacctggagacgcagcacaaggtcctggagctcacggccgagaacgagcggctgcagaagaaggtggagcagctgtcgcgcgagctcagcaccctgcggaacttgttcaagcagctgcccgagcccctgctcgcctcctccggccactgctagcgcggcccccgcgcgcgtccccctgccggccggggctgagactccggggagcgcccgcgcccgcgccctcgcccccgcccccggcggcgccggcaaaactttggcactggggcacttggcagcgcggggagcccgtcggtaattttaatattttattatatatatatatctatatttttgtccaaaccaaccgcacatgcagatggggctcccgcccgtggtgttatttaaagaagaaacgtctatgtgtacagatgaatgataaactctctgcttctccctctgcccctctccaggcgccggcgggcgggccggtttcgaagttgatgcaatcggtttaaacatggctgaacgcgtgtgtacacgggactgacgcaacccacgtgtaactgtcagccgggccctgagtaatcgcttaaagatgttcctacgggcttgttgctgttgatgttttgttttgttttgttttttggtctttttttgtattataaaaaataatctatttctatgagaaaagaggcgtctgtatattttgggaatcttttccgtttcaagcattaagaacacttttaataaacttttttttgagaatggttacaaagccttttgggggcagta

SEQ ID NO: 115149 - DNA, 2178 bp, Homo sapiens
  Payload ID: 2487
  Gene Symbol: CEBPD
  Gene Name: CCAAT/enhancer binding protein (C/EBP), delta
  Uniprot ID: P49716
  ENST ID: ENST00000408965
  CDS Start-End: 967-1776
gatgccgccacacgatggcactgcttccgtagacctggaagaaacgcgggcgcgggagctggcggcggacgcccgggtctgcggggtcggggagtagcgtccggccggagagcccgcacctcgaggagccggcggaggacgcggtgtcgtgaccgcgtctcccccatctgctctgcttttggcgacagcgtcccgtcggcctttcggccaggacgcagcagccgcgtctctgggcctcgacccccagggccggccggacccgggacctccgaggagagcagcgagaaccggcccggattccccgaggcgcccgagtgcggtgcgggcagccctccccgcctgccaggccgccgctgtccccacgtctggtcccccacgcctcttcccgcatctggtcccacggtggaggcgcggggcgagggcctcacgcgcgtgcccacggtcggggggcgtccttggacgcgcgggtcctctcccacgggtctccaccccccgccctccggcgacaggagccggcctgggacgcgcgcgctgcggccaagtcctggttttgatttcactcccaaccccgaggagcgaggaggttccaagcccacaaacaggaagaagagaaggccctggagtgctggcagagggagtgtcattcccagcagcgcagcgcaggccggcccgggccggggagggagcagcagcgcgggcaccctcctgcaacgtgggctgggggtccccagggccggggagggggccccggggaggaactgagagggggcgcgccccgggaaggctcggggcggctccggggggctcccagggcgcccccgccccttcccccgcggccccggggcgcccccgcggtgccggagtcggggcggggcgtgcacgtcagccggggctagaaaaggcggcggggctgggcccagcgaggtgacagcctcgcttggacgcagagcccggcccgacgccgccatgagcgccgcgctcttcagcctggacggcccggcgcgcggcgcgccctggcctgcggagcctgcgcccttctacgaaccgggccgggcgggcaagccgggccgcggggccgagccaggggccctaggcgagccaggcgccgccgcccccgccatgtacgacgacgagagcgccatcgacttcagcgcctacatcgactccatggccgccgtgcccaccctggagctgtgccacgacgagctcttcgccgacctcttcaacagcaatcacaaggcgggcggcgcggggcccctggagcttcttcccggcggccccgcgcgccccttgggcccgggccctgccgctccccgcctgctcaagcgcgagcccgactggggcgacggcgacgcgcccggctcgctgttgcccgcgcaggtggccgcgtgcgcacagaccgtggtgagcttggcggccgcagggcagcccaccccgcccacgtcgccggagccgccgcgcagcagccccaggcagacccccgcgcccggccccgcccgggagaagagcgccggcaagaggggcccggaccgcggcagccccgagtaccggcagcggcgcgagcgcaacaacatcgccgtgcgcaagagccgcgacaaggccaagcggcgcaaccaggagatgcagcagaagttggtggagctgtcggctgagaacgagaagctgcaccagcgcgtggagcagctcacgcgggacctggccggcctccggcagttcttcaagcagctgcccagcccgcccttcctgccggccgccgggacagcagactgccggtaacgcgcggccggggcgggagagactcagcaacgacccatacctcagacccgacggcccggagcggagcgcgccctgccctggcgcagccagagccgccgggtgcccgctgcagtttcttgggacataggagcgcaaagaagctacagcctggacttaccaccactaaactgcgagagaagctaaacgtgtttattttcccttaaattatttttgtaatggtagctttttctacatcttactcctgttgatgcagctaaggtacatttgtaaaaagaaaaaaaaccagacttttcagacaaaccctttgtattgtagataagaggaaaagactgagcatgctcacttttttatattaatttttacagtatttgtaagaataaagcagcatttgaaatcgcccct

SEQ ID NO: 115150 - DNA, 1554 bp, Homo sapiens
  Payload ID: 2488
  Gene Symbol: CEBPE
  Gene Name: CCAAT/enhancer binding protein (C/EBP), epsilon
  Uniprot ID: Q15744
  ENST ID: ENST00000206513
  CDS Start-End: 526-1371
ggaacctcattctgcatagaactttttcaaagtcggagggaggaggttgctcagagtggggtgttgccctctgcgaggatttggagtcccctggcctcccagcagggagtggagaggcattcccagaagcatcagcttcgggcatctccagaaccctggcttggtccctgaccaaggagtgtccccaactgctgaataggccaggagtcgcctttctctaaggcttacatctctccctctggggtgtgtcctgcccctccctgagtcaccccaaggggagagaggggaaaaaagggaagagaagagaggcattgactacagaggaaggaaaaggaagcagagcagaggggggagagaggccacacaggagtgggtgacagaggagactgcagagggcaggtctagggcagaagatcgagagagggcaggcccaggtcaggaggaggtagagagagggcagccggagcaccccaaggggtgcctcaagagcaggtgggggcggggagccgagggggcgggccggccatgtcccacgggacctactacgagtgtgagccccggggtggccagcagccactcgagttctcagggggccgagctgggcccggggagctaggggacatgtgtgagcatgaggcctccattgacctctccgcctacatcgagtctggggaagagcagcttctctccgatctctttgccgtgaagccagcgcctgaggccagaggcctcaagggccccggaacccctgccttcccccactacttgccgcctgaccctcggccctttgcctaccctccacataccttcggcccagacaggaaggcgctggggcctggcatctacagcagcccagggagctacgaccccagggctgtggcggtgaaggaggagccccgggggccagagggcagccgagctgccagccgaggcagctacaatcccctgcagtaccaagtggcacactgtgggcagacagccatgcacctgcccccaactctggcagcacccggccagcctctgcgcgttctcaaggcccctttggccactgccgcacccccctgcagtcccctcctgaaggcgccctccccggctggccccttacacaagggcaagaaggcagtgaacaaagatagccttgagtaccggctgaggcgggagcgcaacaacatcgccgtgcgcaagagccgagacaaggccaagaggcgcattctggagacgcagcagaaggtgctggagtacatggcagagaacgagcgcctccgcagccgcgtggagcagctcacccaggagctagacaccctccgcaacctcttccgccagattcctgaggcggccaacctcatcaagggcgtggggggttgcagctgaggctggctggtggattgtgggcaccaggctccctggcacggcctaactctgcggacccccatcctgctgggggcctagaaccctgagacatagaccatggataaatggcaaccggggtggcaaagagggcaggacccagcataatgattatatggctgaataaagttgcactgtgactgggtg

SEQ ID NO: 115151 - DNA, 4109 bp, Homo sapiens
  Payload ID: 2489
  Gene Symbol: CEBPG
  Gene Name: CCAAT/enhancer binding protein (C/EBP), gamma
  Uniprot ID: P53567
  ENST ID: ENST00000284000
  CDS Start-End: 663-1115
ccgcgggggcttccaagggacgcggcgaaaccaaaacagtcgccggtggttcacaaaaccacctcagaaaatgcttccaaaggcacgtctggcctccacaaggtgacggcttttcagcctccgactcgaacttgagtcgtccacagcactaggccgccgccagcccgggcgagctgcctagggaccgcggacgccgcagcaagcagctccctgctcccgccacacccgccgagccagccgcgcggaacccactcccccaccgtgggcccgcctcccgccgccagcctgcccacgattggtcgactgggctgcccgtcgcgagagaaggcggtgcctccggcaggccggcgctcccattggccgggatggcggcggcggcgcgcgcggccccggcgagcaggggaagccggtggccgcggctgcggaacgggcggaggctgccggtttcgtaaccgtcgctcctcctcgctgactcgcgggctgtgaggcctgggtcggctcgggccgcaccgcgcggggccgctcggagtggaggccgcctgggggcaggcgggctagaggagcaggtacatgtgaagattttttggcagcttagcgtggaaaccattgatcaccctgctctcatttctacctgttctgtgttggcaagggagagtgcccaaatgagcaagatatcgcagcaaaacagcactccaggggtgaacggaattagtgttatccatacccaggcacatgccagcggcttacagcaggttcctcagctggtgcctgctggccctgggggaggaggcaaagctgtggctcccagcaagcagagcaaaaagagttcgcccatggatcgaaacagtgacgagtatcggcaacgccgagagaggaacaacatggctgtgaaaaagagccggttgaaaagcaagcagaaagcacaagacacactgcagagagtcaatcagctcaaagaagagaatgaacggttggaagcaaaaatcaaattgctgaccaaggaattaagtgtactcaaagatttgtttcttgagcatgcacacaaccttgcagacaacgtacagtccattagcactgaaaatacgacagcagatggcgacaatgcaggacagtagacctcaccctttccagactttagagcttgtggcttgaatgttaaaggtgtgaccaccgacaccactcatgtcaatggctgaaagttgtccatttccatgactcaaagacccattggaggctattttctgggatcagcactgaagagttgattagctaaaaatgttagccttgtaattcgaatatctggttttaaatgatagaggtttttgtgggaatcaaaatcccccaaatgttaaggtatatggtaaaaaaagaaatatctgggatcccgatgttcttaataaatcctgacttcccaagaaatgcttcttttttaagttgacaaaaggaatggggaactggcaggccgcgcagaaggttcttggttttaatggataggctgaattggattaagaaaagttgaatgccacctatggtaatctatttgtgattttcttctaaattatgtattataaattcgtagagctatagaaagcaatgagtgtgtaatttggagtgattttatatatggcataaactttgttttaacataattagtactgttttcccccaaaagtacaagtttttgagtagcaatgtcaggttaagtaaagaaacttcatcacatcttataggtagtgtgtggccaattgacttaaaaaatacaaataacatttaggaagcaaatagattaaacacaaaaataaaactaaagcataggaattatgtttttgagatacctttgggcttagattggcattgttttattctaaaaacccaactcagtggtgtagagaaacttgtgtaccaaaattttagtttctgcagatgctagtgtttttttggatacaattttgacaaccaagttagtaaacaaaatatcttaacagtttgatgacacaagctactgatgagggtttggaatattaattcagaaggtagtttctcttgtgttcaaaatagctgccatggggctgttacttttaaagtcaaaattttcttctgaaggctcattttggtatttgatcttaaccaagtgattattagagaaatgtatcaactccatgccatctcccaaaataattgtctaagaaaacttgaaagtgtaaggttttaacctttaatttatttctcttaaatacatcttttgatattgttgttgtgacatttctttttctggttagtgggctttccagactttgtaccactgcttctgtttattcatttatatgcttttgtgtcccataaattatttcagaaaatgctgataaaactcaggatattgacatttttgttgagactaaaaaatggcagtcgctaaagtagggactctagagtctggcttacgtcagtgttggtagtttagattgtctttgtcaacgttttttcttctctcttttgctttcttttctttctctttttttcttagcacagttctagctcaaatttgtgtattttttgtgtgcctgggctggagatgagagactgagtcataactgatttaaaagtttgtgttatcaggtatcttatttgaacatggtcatttttggccacattgctgtttcatactaggacttgggatgatgtagccagaataaaactcaagttgcaccctccggttggtggaagattgctgaccgtgccgtttctgggcaggagaagacatcatggtgtccagcaactcagcaaagccattcttaagagtcgtgaggtccttctgaatgtaaaactggagcccaggagaagctgtcccaggagggctgttaactccctatagagccaggagacaggataggggtttctagggtccaacaccagcttaccttggagtatgaatctacccatgaaggatgagagatgttttgaaaaactagccaggacacacccacaggatcctactggctccttagcagctgattggtgttacataattaacttaattggagatgcattaggtcacttgaatgtataagcaagcacctatggtaggcgctacagacatttaaatctcttgggaattcgatgctcccatggaatttataccagttatatgaattgacttaagtatcttgaaaaagaaactttagagaaagcatcaggggtgtgtactcagtatttcaaatcagaacacaagattggaacttttggaaaaatgggttcaagctttcctattagccatggaaatgcaaagtttagcagaagcaagcaattaggcagagaacaaaaatgttaagcatggtgttgtctatcttattgaagtggttggaaatgaaagcttttaatttgatagatttatcagtataaaattagggaaaccacgtgtggggaatgaatcaatttagagcttcgggaattgtgaggtgacttttgtaacttttgttctgtgtgtgacctgtgaaccactaggatgtgatctgcccttgtgggcaggtccagcatagttaggagttaggctttagcataaatttctagctgcatctgagtctcctgggatgggtgctctttggctggttttggctgcggatggtgagatcagagcagctcttcctgctgctggcccctgcaatcagttgttgggatgccagtgcagatcactaagtagtaagattttaatcaaacacgaccaggtccgaaatgcaggtcatgagtgtgaaattctcaaatttacataaaaagtagaagtatagacagtttaacatttggtattaaaggagaggaaattgtagcagcttttcacgtttcccagtccccattagagggcttgagaccttgtacctgaacaacccattttgcactcagtgctttctgatgccttaggagaattgttttgtttcacaaaagctgggaaggaagaagtccattctgcagctgttagatctgcctctcaggaaaaagtactaacttgttctttttgttcctggctttcatcagtttgtgagatttctctattttttttaaatataattttatttctttcaacaaatataaaataaaaaacaactttggaacaatga

SEQ ID NO: 115152 - DNA, 3845 bp, Homo sapiens
  Payload ID: 2489
  Gene Symbol: CEBPG
  Gene Name: CCAAT/enhancer binding protein (C/EBP), gamma
  Uniprot ID: P53567
  ENST ID: ENST00000585933
  CDS Start-End: 399-851
gaaggtggaccgagtcgagctttagaatcctgatcttctagaagggctcagcttgcggtgatcgaaaatctgttcagaagttcaaagactgatcaataaaatagggaaagcaactggtttttaaatgcatgactttgcagagataatattttgcttctttgtggagctgttggaatgtcctgcactttactgttgaacgtagtttagaagaacacgcaacacctacgggtcgaatagagaagaaatgaagcacttcgcaggcatagttggagggagcggagcagggccgacagccagcggaggtacatgtgaagattttttggcagcttagcgtggaaaccattgatcaccctgctctcatttctacctgttctgtgttggcaagggagagtgcccaaatgagcaagatatcgcagcaaaacagcactccaggggtgaacggaattagtgttatccatacccaggcacatgccagcggcttacagcaggttcctcagctggtgcctgctggccctgggggaggaggcaaagctgtggctcccagcaagcagagcaaaaagagttcgcccatggatcgaaacagtgacgagtatcggcaacgccgagagaggaacaacatggctgtgaaaaagagccggttgaaaagcaagcagaaagcacaagacacactgcagagagtcaatcagctcaaagaagagaatgaacggttggaagcaaaaatcaaattgctgaccaaggaattaagtgtactcaaagatttgtttcttgagcatgcacacaaccttgcagacaacgtacagtccattagcactgaaaatacgacagcagatggcgacaatgcaggacagtagacctcaccctttccagactttagagcttgtggcttgaatgttaaaggtgtgaccaccgacaccactcatgtcaatggctgaaagttgtccatttccatgactcaaagacccattggaggctattttctgggatcagcactgaagagttgattagctaaaaatgttagccttgtaattcgaatatctggttttaaatgatagaggtttttgtgggaatcaaaatcccccaaatgttaaggtatatggtaaaaaaagaaatatctgggatcccgatgttcttaataaatcctgacttcccaagaaatgcttcttttttaagttgacaaaaggaatggggaactggcaggccgcgcagaaggttcttggttttaatggataggctgaattggattaagaaaagttgaatgccacctatggtaatctatttgtgattttcttctaaattatgtattataaattcgtagagctatagaaagcaatgagtgtgtaatttggagtgattttatatatggcataaactttgttttaacataattagtactgttttcccccaaaagtacaagtttttgagtagcaatgtcaggttaagtaaagaaacttcatcacatcttataggtagtgtgtggccaattgacttaaaaaatacaaataacatttaggaagcaaatagattaaacacaaaaataaaactaaagcataggaattatgtttttgagatacctttgggcttagattggcattgttttattctaaaaacccaactcagtggtgtagagaaacttgtgtaccaaaattttagtttctgcagatgctagtgtttttttggatacaattttgacaaccaagttagtaaacaaaatatcttaacagtttgatgacacaagctactgatgagggtttggaatattaattcagaaggtagtttctcttgtgttcaaaatagctgccatggggctgttacttttaaagtcaaaattttcttctgaaggctcattttggtatttgatcttaaccaagtgattattagagaaatgtatcaactccatgccatctcccaaaataattgtctaagaaaacttgaaagtgtaaggttttaacctttaatttatttctcttaaatacatcttttgatattgttgttgtgacatttctttttctggttagtgggctttccagactttgtaccactgcttctgtttattcatttatatgcttttgtgtcccataaattatttcagaaaatgctgataaaactcaggatattgacatttttgttgagactaaaaaatggcagtcgctaaagtagggactctagagtctggcttacgtcagtgttggtagtttagattgtctttgtcaacgttttttcttctctcttttgctttcttttctttctctttttttcttagcacagttctagctcaaatttgtgtattttttgtgtgcctgggctggagatgagagactgagtcataactgatttaaaagtttgtgttatcaggtatcttatttgaacatggtcatttttggccacattgctgtttcatactaggacttgggatgatgtagccagaataaaactcaagttgcaccctccggttggtggaagattgctgaccgtgccgtttctgggcaggagaagacatcatggtgtccagcaactcagcaaagccattcttaagagtcgtgaggtccttctgaatgtaaaactggagcccaggagaagctgtcccaggagggctgttaactccctatagagccaggagacaggataggggtttctagggtccaacaccagcttaccttggagtatgaatctacccatgaaggatgagagatgttttgaaaaactagccaggacacacccacaggatcctactggctccttagcagctgattggtgttacataattaacttaattggagatgcattaggtcacttgaatgtataagcaagcacctatggtaggcgctacagacatttaaatctcttgggaattcgatgctcccatggaatttataccagttatatgaattgacttaagtatcttgaaaaagaaactttagagaaagcatcaggggtgtgtactcagtatttcaaatcagaacacaagattggaacttttggaaaaatgggttcaagctttcctattagccatggaaatgcaaagtttagcagaagcaagcaattaggcagagaacaaaaatgttaagcatggtgttgtctatcttattgaagtggttggaaatgaaagcttttaatttgatagatttatcagtataaaattagggaaaccacgtgtggggaatgaatcaatttagagcttcgggaattgtgaggtgacttttgtaacttttgttctgtgtgtgacctgtgaaccactaggatgtgatctgcccttgtgggcaggtccagcatagttaggagttaggctttagcataaatttctagctgcatctgagtctcctgggatgggtgctctttggctggttttggctgcggatggtgagatcagagcagctcttcctgctgctggcccctgcaatcagttgttgggatgccagtgcagatcactaagtagtaagattttaatcaaacacgaccaggtccgaaatgcaggtcatgagtgtgaaattctcaaatttacataaaaagtagaagtatagacagtttaacatttggtattaaaggagaggaaattgtagcagcttttcacgtttcccagtccccattagagggcttgagaccttgtacctgaacaacccattttgcactcagtgctttctgatgccttaggagaattgttttgtttcacaaaagctgggaaggaagaagtccattctgcagctgttagatctgcctctcaggaaaaagtactaacttgttctttttgttcctggctttcatcagtttgtgagatttctctattttttttaaatataattttatttctttcaacaaatataaaataaaaaacaactttggaacaatga

SEQ ID NO: 115153 - DNA, 3463 bp, Homo sapiens
  Payload ID: 2490
  Gene Symbol: CEBPZ
  Gene Name: CCAAT/enhancer binding protein (C/EBP), zeta
  Uniprot ID: Q03701
  ENST ID: ENST00000234170
  CDS Start-End: 147-3311
acactcatgctgaaattcgcaggctagctcgctccgccaggagctggggcttagaccatttccgggagaagacacgccccgacaggaattacgccactggcagagcggaaataggctgagtttcacgcgcgtatgctttgcccgccatggccgcagtcaaggagcctttggagttccatgccaagcggccttggcgccccgaggaggcagtagaagatccggacgaggaggatgaggataatactagtgaagccgagaatgggttctccctggaggaagtgttacggctcggaggcaccaagcaagattaccttatgctggctactttggatgagaatgaggaagtgatagatggaggcaaaaaaggagcaatcgatgaccttcagcaaggtgaattggaagcatttattcaaaatcttaatttggcgaagtatacaaaagcttccttagttgaagaagatgaaccagctgaaaaagaaaattccagcaaaaaagaagtaaaaatacctaaaataaataataaaaatacagcagaaagtcaaaggacatcagttaataaggtgaaaaataagaataggccagaaccacattctgatgagaatggcagtaccacaccgaaagtaaagaaagataaacagaacatctttgaattttttgagagacagactttgttacttaggcctggaggcaaatggtatgatctggagtacagcaatgaatattctttgaaaccccagcctcaggatgttgtatctaagtacaaaacccttgctcagaagctgtatcagcatgaaatcaacttattcaaaagtaagacgaatagtcaaaagggagcctcttctacctggatgaaggcaattgtgtcatcggggacactaggtgacaggatggcagccatgattcttcttattcaggatgatgccgttcacacacttcagtttgtagaaactcttgtgaaccttgttaaaaagaagggcagcaaacagcagtgccttatggccttggatactttcaaagagttgcttatcacagaccttttgccagacaatcggaagctgaggattttcagccagcgtccttttgacaaactggaacagttgtccagtggcaacaaggactcaagagatagaagactgatattatggtattttgaacaccagctgaaacacttagtggctgaatttgtgcaggtcttagaaactttaagtcatgatacattagtaaccactaaaactcgagcccttaccgtggctcatgagctgctttgtaacaagcctgaggaagaaaaggctcttcttgtgcaagtggtaaataaactgggagatcctcagaacagaattgccacaaaagcatcccatctgttagagacattactttgtaaacatcccaatatgaaaggagttgtgtctggtgaagtagaaaggctactcttccgctcaaatatcagctccaaagctcaatattatgcaatttgctttttaaatcaaatggctctgtcccatgaagaaagtgaattggctaacaaattaataactgtttacttttgcttttttcggacttgtgtcaaaaaaaaagatgttgaatcaaaaatgcttagcgcccttttaacaggtgtgaatagggcatacccttattcccagactggtgatgacaaagtaagggagcagattgacacactgtttaaagtgttgcatattgtgaattttaataccagtgtccaggctttaatgttgcttttccaagtaatgaattctcagcagacaatatcggatcgatattacacagcattatacaggaagatgttggatccagggttgatgacgtgttccaagcaagctatgtttcttaaccttgtctacaaatctctgaaagctgacattgtgttgcgccgggtgaaggcttttgtgaagaggttacttcaagttacttgtcaacagatgccaccatttatatgtggagctttatatcttgtgtctgagatccttaaagcaaaaccaggtttaagaagccaactagatgatcatccggagtctgatgatgaagaaaattttattgatgcaaatgatgatgaagacatggaaaaattcactgatgcagacaaagaaacagagatagtgaaaaaacttgagacagaggaaacagttcctgaaactgatgtagaaaccaaaaaaccagaggttgcttcctgggtgcactttgataatttgaaaggtgggaaacagttaaataaatacgatccattcagtagaaaccctctgttctgtggagctgaaaatacaagtctttgggaactcaaaaagttatctgtgcattttcatccctccgtggccctttttgcaaagaccatccttcagggaaactatattcagtattcaggggacccactgcaggatttcactctaatgagatttttggatcgatttgtataccgaaatccaaagccccataaaggcaaagaaaacacagatagtgttgtgatgcagccgaaaagaaaacattttattaaggatattcgtcatcttcctgtgaacagtaaggagttccttgcaaaagaagaaagccaaataccagtggatgaagtgtttttccacaggtattataaaaaagttgctgttaaagagaaacaaaaacgggatgcagatgaagaaagtatagaagacgtggatgatgaagaatttgaagagctgattgacacatttgaagatgataactgtttcagctctggaaaggatgatatggattttgctggaaacgtgaaaaagagaacaaaaggagctaaggataacacattagatgaagattcagaaggtagtgatgatgaacttggtaacctggatgacgatgaagtttctttaggaagtatggatgatgaagaatttgctgaagttgatgaagatggaggaacattcatggatgtgttagatgatgaaagtgagagcgttccagaacttgaagtccactccaaagtcagtactaagaaaagcaagagaaaaggtacagatgattttgactttgctggctcatttcaagggccaagaaaaaagaaaagaaacttaaatgattccagcctatttgtatctgctgaagagtttggccatctattggatgaaaatatgggatccaagtttgataacattggcatgaatgccatggctaacaaagataatgcaagtctcaaacagcttagatgggaggctgaacgtgatgactggctacacaacagagatgcaaaaagtatcatcaagaaaaagaaacattttaaaaagaagaggattaaaaccactcaaaaaactaaaaaacaaaggaaatgagttattaatgtaaattatagattaaaattctacttacatctaatttttgctgttcaaccatgttttttgatctagctctctgattccatacattccagacttctcagtggatttgtaataaactataaataaaaatagctctcatttataaa

SEQ ID NO: 115154 - DNA, 526 bp, Homo sapiens
  Payload ID: 2490
  Gene Symbol: CEBPZ
  Gene Name: CCAAT/enhancer binding protein (C/EBP), zeta
  ENST ID: ENST00000446769
  CDS Start-End: 89-526
gttccgaaggtggctaggctgactgccccgccgcttccgcgctgcgtagagcgcgggcgtccaggaccgagatcccagcctctgaagcatgtgttcgcaagattaccttatgctggctactttggatgagaatgaggaagtgatagatggaggcaaaaaaggagcaatcgatgaccttcagcaaggtgaattggaagcatttattcaaaatcttaatttggcgaagtatacaaaagcttccttagttgaagaagatgaaccagctgaaaaagaaaattccagcaaaaaagaagtaaaaatacctaaaataaataataaaaatacagcagaaagtcaaaggacatcagttaataaggtgaaaaataagaataggccagaaccacattctgatgagaatggcagtaccacaccgaaagtaaagaaagataaacagaacatctttgaattttttgagagacagactttgttacttaggcctggaggcaaatggtatgatctggagtacagcaatgaatattctttgaaa

SEQ ID NO: 115155 - DNA, 3217 bp, Homo sapiens
  Payload ID: 2490
  Gene Symbol: CEBPZ
  Gene Name: CCAAT/enhancer binding protein (C/EBP), zeta
  ENST ID: ENST00000619061
  CDS Start-End: 13-3009
gctttgcccgccatggccgcagtcaaggagcctttggagttccatgccaagcggccttggcgccccgaggaggcagtagaagatccggacgaggaggatgaggataatactagtgaagccgagaatgggttctccctggaggaagtgttacggctcggaggcaccaagcaagattaccttatgctggctactttggatgagaatgaggaagtgatagatggaggcaaaaaaggagcaatcgatgaccttcagcaaggtgaattggaagcatttattcaaaatcttaatttggcgaagtatacaaaagcttccttagttgaagaagatgaaccagctgaaaaagaaaattccagcaaaaaagaagtaaaaatacctaaaataaataataaaaatacagcagaaagtcaaaggacatcagttaataaggtgaaaaataagaataggccagaaccacattctgatgagaatggcagtaccacaccgaaagtaaagaaagataaacagaacatctttgaattttttgagagacagactttgttacttaggcctggaggcaaatggtatgatctggagtacagcaatgaatattctttgaaaccccagcctcaggatgttgtatctaagtacaaaacccttgctcagaagctgtatcagcatgaaatcaacttattcaaaagtaagacgaatagtcaaaagggagcctcttctacctggatgaaggcaattgtgtcatcggggacactaggtgacaggatggcagccatgattcttcttattcaggatgatgccgttcacacacttcagtttgtagaaactcttgtgaaccttgttaaaaagaagggcagcaaacagcagtgccttatggccttggatactttcaaagagttgcttatcacagaccttttgccagacaatcggaagctgaggattttcagccagcgtccttttgacaaactggaacagttgtccagtggcaacaaggactcaagagatagaagactgatattatggtattttgaacaccagctgaaacacttagtggctgaatttgtgcaggtcttagaaactttaagtcatgatacattagtaaccactaaaactcgagcccttaccgtggctcatgagctgctttgtaacaagcctgaggaagaaaaggctcttcttgtgcaagtggtaaataaactgggagatcctcagaacagaattgccacaaaagcatcccatctgttagagacattactttgtaaacatcccaatatgaaaggagttgtgtctggtgaagtagaaaggctactcttccgctcaaatatcagctccaaagctcaatattatgcaatttgctttttaaatcaaatggctctgtcccatgaagaaagtgaattggctaacaaattaataactgtttacttttgcttttttcggacttgtgtcaaaaaaaaagatgttgaatcaaaaatgcttagcgcccttttaacaggtgtgaatagggcatacccttattcccagactggtgatgacaaagtaagggagcagattgacacactgtttaaagtgttgcatattgtgaattttaataccagtgtccaggctttaatgttgcttttccaagtaatgaattctcagcagacaatatcggatcgatattacacagcattatacaggaagatgttggatccagggttgatgacgtgttccaagcaagctatgtttcttaaccttgtctacaaatctctgaaagctgacattgtgttgcgccgggtgaaggcttttgtgaagaggttacttcaagttacttgtcaacagatgccaccatttatatgtggagctttatatcttgtgtctgagatccttaaagcaaaaccaggtttaagaagccaactagatgatcatccggagtctgatgatgaagaaaattttattgatgcaaatgatgatgaagacatggaaaaattcactgatgcagacaaagaaacagagatagtgaaaaaacttgagacagaggaaacagttcctgaaactgatgtagaaaccaaaaaaccagaggttgcttcctgggtgcactttgataatttgaaaggtgggaaacagttaaataaatacgatccattcagtagaaaccctctgttctgtggagctgaaaatacaagtctttgggaactcaaaaagttatctgtgcattttcatccctccgtggccctttttgcaaagaccatccttcagggaaactatattcagtattcaggggacccactgcaggatttcactctaatgagatttttggatcgatttgtataccgaaatccaaagccccataaaggcaaagaaaacacagatagtgttgtgatgcagccgaaaagaaaacattttattaaggatattcgtcatcttcctgtgaacagtaaggagttccttgcaaaagaagaaagccaaataccagtggatgaagtgtttttccacaggtattataaaaaagttgctgttaaagagaaacaaaaacgggatgcagatgaagaaagtatagaagacgtggatgatgaagaatttgaagagctgattgacacatttgaagatgataactgtttcagctctggaaaggatgatatggattttgctggaaacgtgaaaaagagaacaaaaggagctaaggataacacattagatgaagattcagaaggtagtgatgatgaacttggtaacctggatgacgatgaagtttctttaggaagtatggatgatgaagaatttgctgaagttgatgaagatggaggaacattcatggatgtgttagatgatgaaagtgagagcgttccagaacttgaagtccactccaaagtcagtactaagaaaagcaagagaaaaggtacagatgattttgactttgctggctcatttcaagggccaagaaaaaagaaaagaaacttaaatgattccagcctatttgtatctgctgaagagtttggccatctattggatgaaaatatgggatccaagtttgataacattgcatgaatgccatggctaacaaagataatgcaagtctcaaacagcttagatgggaggctgaacgtgatgactggctacacaacagagatgcaaaaagtatcatcaagaaaaagaaacattttaaaaagaagaggattaaaaccactcaaaaaactaaaaaacaaaggaaatgagttattaatgtaaattatagattaaaattctacttacatct

SEQ ID NO: 115156 - DNA, 3939 bp, Homo sapiens
  Payload ID: 2491
  Gene Symbol: CTCF
  Gene Name: CCCTC-binding factor (zinc finger protein)
  Uniprot ID: P49711
  ENST ID: ENST00000264010
  CDS Start-End: 445-2628
cccatgctgccctgcgccaacccctcccctcacctttcctcccccgccctctactcgccgcccggccggtccccccacccgtcccttcccttatcagcacccgcggccccggcagcgccgacgcaggcgcactgcaccgcgccgccgccattttgtgtctgagcctgtggagcgattaaaccgtgcgcggagctgcttctttggcggcagcggcggcggcggtggccggtgcggacgcgcggagctcgccggagacgccgggtggccggagccgtggagcggcggcggagcgggcgccgcggggggtgtggcgcggagaatgattacggacctgaagccaaagaacaagatgcgctagtggacagattgctgaccaggggcttgagagctgggttctattttccctcctcaaactgactttgcagccacggagaggcaggggaaatggaaggtgatgcagtcgaagccattgtggaggagtccgaaacttttattaaaggaaaggagagaaagacttaccagagacgccgggaagggggccaggaagaagatgcctgccacttaccccagaaccagacggatgggggtgaggtggtccaggatgtcaacagcagtgtacagatggtgatgatggaacagctggaccccacccttcttcagatgaagactgaagtaatggagggcacagtggctccagaagcagaggctgctgtggacgatacccagattataactttacaggttgtaaatatggaggaacagcccataaacataggagaacttcagcttgttcaagtacctgttcctgtgactgtacctgttgctaccacttcagtagaagaacttcagggggcttatgaaaatgaagtgtctaaagagggccttgcggaaagtgaacccatgatatgccacaccctacctttgcctgaagggtttcaggtggttaaagtgggggccaatggagaggtggagacactagaacaaggggaacttccaccccaggaagatcctagttggcaaaaagacccagactatcagccaccagccaaaaaaacaaagaaaaccaaaaagagcaaactgcgttatacagaggagggcaaagatgtagatgtgtctgtctacgattttgaggaagaacagcaggagggtctgctatcagaggttaatgcagagaaagtggttggtaatatgaagcctccaaagccaacaaaaattaaaaagaaaggtgtaaagaagacattccagtgtgagctttgcagttacacgtgtccacggcgttcaaatttggatcgtcacatgaaaagccacactgatgagagaccacacaagtgccatctctgtggcagggcattcagaacagtcaccctcctgaggaatcaccttaacacacacacaggtactcgtcctcacaagtgcccagactgcgacatggcctttgtgaccagtggagaattggttcggcatcgtcgttacaaacacacccacgagaagccattcaagtgttccatgtgcgattacgccagtgtagaagtcagcaaattaaaacgtcacattcgctctcatactggagagcgtccgtttcagtgcagtttgtgcagttatgccagcagggacacatacaagctgaaaaggcacatgagaacccattcaggggaaaagccttatgaatgttatatttgtcatgctcggtttacccaaagtggtaccatgaagatgcacattttacagaagcacacagaaaatgtggccaaatttcactgtccccactgtgacacagtcatagcccgaaaaagtgatttgggtgtccacttgcgaaagcagcattcctatattgagcaaggcaagaaatgccgttactgtgatgctgtgtttcatgagcgctatgccctcatccagcatcagaagtcacacaagaatgagaagcgctttaagtgtgaccagtgtgattacgcttgtagacaggagaggcacatgatcatgcacaagcgcacccacaccggggagaagccttacgcctgcagccactgcgataagaccttccgccagaagcagcttctcgacatgcacttcaagcgctatcacgaccccaacttcgtccctgcggcttttgtctgttctaagtgtgggaaaacatttacacgtcggaataccatggcaagacatgctgataattgtgctggcccagatggcgtagagggggaaaatggaggagaaacgaagaagagtaaacgtggaagaaaaagaaagatgcgctctaagaaagaagattcctctgacagtgaaaatgctgaaccagatctggacgacaatgaggatgaggaggagcctgccgtagaaattgaacctgagccagagcctcagcctgtgaccccagccccaccacccgccaagaagcggagaggacgaccccctggcagaaccaaccagcccaaacagaaccagccaacagctatcattcaggttgaagaccagaatacaggtgcaattgagaacattatagttgaagtaaaaaaagagccagatgctgagcccgcagagggagaggaagaggaggcccagccagctgccacagatgcccccaacggagacctcacgcccgagatgatcctcagcatgatggaccggtgatggcggagccttgtgcgtcgccaggacttctctgggctgtgtttaaacggcccgcatcttaatttttctcccttctttctttttttggctttgggaaaagcatcattttaccaaacataccgagaacgaaaacttcaaggatgatgttagaaaaaaatgtgatttaactagaacttgctgtctgatgttagcaaatcatggaatgttctgagtccctgagggtttactgtgaagtgctgaggacagtgttgacaactaactcgttttcctagatggaaacggagacattgacccctccctccatgtggtaaaccactccagaatggccaccaggcttcccagagttctatggtcttcttcccaagagagtttttaattgtaaatgcatacttgggaaggacttagagttttaaactgttttttgcttttgcttttccctgactccctttgcttggagtcagctgcacaccagtagtatggcatgctacgatcaggttctgtcctgaaagctttgcctctttcttggcaaagtttctggtatggtcaagcttgtaaataactttttttacattttaatcttttccattaattaagaggttgaaaagaagtgcagtgtaagaaaacccagcattttaattacttgcaaattaagttaccacagactctgtagtgtgtaaatgttgacaaggaattggatcacaatcatgtagcagaatggcacccagaccactgcccaccagtgacggacatgcacgtggcagatcatgatttccagcccacggagccagcatttgaaccttgtataattaactttcagttatgatttcccatcgacattttctttgccctgtttgtagctgattgttgtgttttataaatcttctgttaaggcagaagggtgattatgagtggttcacagcagcccttataagctgggccagaaaatttcactaggtcagtaatttaaaccttggatcttcaaaaaataaaataatgtgaagcaaaaccaactaaaaagtgattcttgcacatgaactgtcacatgtttaaaaatgtgttttttagagagcctcagtcttactgatttcaaacacttttttcttctgtgtattgcttttaagagagccatcagttagctatcagactctaggttgatgcattttgtacttagctgtactgtgtgatatttttcattattttaggacgccaacatgagacctgtaataaaatatgtaatggggttgaaagctggggaggaggatctactgctgtacagctaataaatcataacggattaacaagtgctccaaa

SEQ ID NO: 115157 - DNA, 2978 bp, Homo sapiens
  Payload ID: 2491
  Gene Symbol: CTCF
  Gene Name: CCCTC-binding factor (zinc finger protein)
  Uniprot ID: P49711
  ENST ID: ENST00000401394
  CDS Start-End: 468-1667
cccatgctgccctgcgccaacccctcccctcacctttcctcccccgccctctactcgccgcccggccggtccccccacccgtcccttcccttatcagcacccgcggccccggcagcgccgacgcaggcgcactgcaccgcgccgccgccattttgtgtctgagcctgtggagcgattaaaccgtgcgcggagctgcttctttggcggcagcggcggcggcggtggccggtgcggacgcgcggagctcgccggagacgccgggtggccggagccgtggagcggcggcggagcgggcgccgcggggggtgtggcgcggagaatgattacggacctgaagccaaagaacaagatgcgctagtggacagattgctgaccaggggcttgagagctgggttctattttccctcctcaaactgactttgcagccacggagaggtactcgtcctcacaagtgcccagactgcgacatggcctttgtgaccagtggagaattggttcggcatcgtcgttacaaacacacccacgagaagccattcaagtgttccatgtgcgattacgccagtgtagaagtcagcaaattaaaacgtcacattcgctctcatactggagagcgtccgtttcagtgcagtttgtgcagttatgccagcagggacacatacaagctgaaaaggcacatgagaacccattcaggggaaaagccttatgaatgttatatttgtcatgctcggtttacccaaagtggtaccatgaagatgcacattttacagaagcacacagaaaatgtggccaaatttcactgtccccactgtgacacagtcatagcccgaaaaagtgatttgggtgtccacttgcgaaagcagcattcctatattgagcaaggcaagaaatgccgttactgtgatgctgtgtttcatgagcgctatgccctcatccagcatcagaagtcacacaagaatgagaagcgctttaagtgtgaccagtgtgattacgcttgtagacaggagaggcacatgatcatgcacaagcgcacccacaccggggagaagccttacgcctgcagccactgcgataagaccttccgccagaagcagcttctcgacatgcacttcaagcgctatcacgaccccaacttcgtccctgcggcttttgtctgttctaagtgtgggaaaacatttacacgtcggaataccatggcaagacatgctgataattgtgctggcccagatggcgtagagggggaaaatggaggagaaacgaagaagagtaaacgtggaagaaaaagaaagatgcgctctaagaaagaagattcctctgacagtgaaaatgctgaaccagatctggacgacaatgaggatgaggaggagcctgccgtagaaattgaacctgagccagagcctcagcctgtgaccccagccccaccacccgccaagaagcggagaggacgaccccctggcagaaccaaccagcccaaacagaaccagccaacagctatcattcaggttgaagaccagaatacaggtgcaattgagaacattatagttgaagtaaaaaaagagccagatgctgagcccgcagagggagaggaagaggaggcccagccagctgccacagatgcccccaacggagacctcacgcccgagatgatcctcagcatgatggaccggtgatggcggagccttgtgcgtcgccaggacttctctgggctgtgtttaaacggcccgcatcttaatttttctcccttctttctttttttggctttgggaaaagcatcattttaccaaacataccgagaacgaaaacttcaaggatgatgttagaaaaaaatgtgatttaactagaacttgctgtctgatgttagcaaatcatggaatgttctgagtccctgagggtttactgtgaagtgctgaggacagtgttgacaactaactcgttttcctagatggaaacggagacattgacccctccctccatgtggtaaaccactccagaatggccaccaggcttcccagagttctatggtcttcttcccaagagagtttttaattgtaaatgcatacttgggaaggacttagagttttaaactgttttttgcttttgcttttccctgactccctttgcttggagtcagctgcacaccagtagtatggcatgctacgatcaggttctgtcctgaaagctttgcctctttcttggcaaagtttctggtatggtcaagcttgtaaataactttttttacattttaatcttttccattaattaagaggttgaaaagaagtgcagtgtaagaaaacccagcattttaattacttgcaaattaagttaccacagactctgtagtgtgtaaatgttgacaaggaattggatcacaatcatgtagcagaatggcacccagaccactgcccaccagtgacggacatgcacgtggcagatcatgatttccagcccacggagccagcatttgaaccttgtataattaactttcagttatgatttcccatcgacattttctttgccctgtttgtagctgattgttgtgttttataaatcttctgttaaggcagaagggtgattatgagtggttcacagcagcccttataagctgggccagaaaatttcactaggtcagtaatttaaaccttggatcttcaaaaaataaaataatgtgaagcaaaaccaactaaaaagtgattcttgcacatgaactgtcacatgtttaaaaatgtgttttttagagagcctcagtcttactgatttcaaacacttttttcttctgtgtattgcttttaagagagccatcagttagctatcagactctaggttgatgcattttgtacttagctgtactgtgtgatatttttcattattttaggacgccaacatgagacctgtaataaaatatgtaatggggttgaaagctggggaggaggatctactgctgtacagctaataaatcataacggattaacaagtgctccaaa

SEQ ID NO: 115158 - DNA, 3567 bp, Homo sapiens
  Payload ID: 2492
  Gene Symbol: CTCFL
  Gene Name: CCCTC-binding factor (zinc finger protein)-like
  Uniprot ID: Q8NI51
  ENST ID: ENST00000243914
  CDS Start-End: 194-2185
aaccctgcctggctccgcccccttcacgccccctcttttccgctccgcgcctgcgcactgccaccctccactctcgcgccagcccggcggcggccggctgtgggctgcagcacgcggtgcacgaggcagagcccacaagccaaagacggagtgggccgagcattccggccacgccttccgcggccaagtcattatggcagccactgagatctctgtcctttctgagcaattcaccaagatcaaagaactcgagttgatgccggaaaaaggcctgaaggaggaggaaaaagacggagtgtgcagagagaaagaccatcggagccctagtgagttggaggccgagcgtacctctggggccttccaggacagcgtcctggaggaagaagtggagctggtgctggccccctcggaggagagcgagaagtacatcctgaccctgcagacggtgcacttcacttctgaagctgtggagttgcaggatatgagcttgctgagcatacagcagcaagaaggggtgcaggtggtggtgcaacagcctggccctgggttgctgtggcttgaggaagggccccggcagagcctgcagcagtgtgtggccattagtatccagcaagagctgtactccccgcaagagatggaggtgttgcagttccacgctctagaggagaatgtgatggtggccagtgaagacagtaagttagcggtgagcctggctgaaactactggactgatcaagctcgaggaagagcaggagaagaaccagttattggctgaaagaacaaaggagcagctcttttttgtggaaacaatgtcaggagatgaaagaagtgacgaaattgttctcacagtttcaaattcaaatgtggaagaacaagaggatcaacctacagctggtcaagcagatgctgaaaaggccaaatctacaaaaaatcaaagaaagacaaagggagcaaaaggaaccttccactgtgatgtctgcatgttcacctcttctagaatgtcaagttttaatcgtcatatgaaaactcacaccagtgagaagcctcacctgtgtcacctctgcctgaaaaccttccgtacggtcactctgctgcggaaccatgttaacacccacacaggaaccaggccctacaagtgtaacgactgcaacatggcatttgtcaccagtggagaactcgtccgacacaggcgctataaacatactcatgagaaaccctttaaatgttccatgtgcaagtatgccagtgtggaggcaagtaaattgaagcgccatgtccgatcccacactggggagcgcccctttcagtgttgccagtgcagctatgccagcagagatacctacaagctgaaacgccacatgagaacgcactcaggtgagaagccttacgaatgccacatctgccacacccgcttcacccagagcgggaccatgaaaatacatattctgcagaaacacggcgaaaatgtccccaaataccagtgtccccattgtgccaccatcattgcacggaaaagcgacctacgtgtgcatatgcgcaacttgcatgcttacagcgctgcagagctgaaatgccgctactgttctgctgtcttccatgaacgctatgccctcattcagcaccagaaaactcataagaatgagaagaggttcaagtgcaaacactgcagttatgcctgcaagcaggaacgtcatatgaccgctcacattcgtacccacactggagagaaaccattcacctgcctttcttgcaataaatgtttccgacagaagcaacttctaaacgctcacttcaggaaataccacgatgcaaatttcatcccgactgtttacaaatgctccaagtgtggcaaaggcttttcccgctggattaacctgcacagacattcggagaagtgtggatcaggggaagcaaagtcggctgcttcaggaaagggaagaagaacaagaaagaggaagcagaccatcctgaaggaagccacaaagggtcagaaggaagctgcgaagggatggaaggaagccgcgaacggagacgaagctgctgctgaggaggcttccaccacgaagggagaacagttcccaggagagatgtttcctgtcgcctgcagagaaaccacagccagagtcaaagaggaagtggatgaaggcgtgacctgtgaaatgctcctcaacacgatggataagtgagagggattcgggttgcgtgttcactgcccccaattcctaaagcaagttagaagtttttagcatttaaggtgtgaaatgctcctcaacacgatggataagtgagagagagtcaggttgcatgttcactgcccctaattcctaaagcaagttagaaatttttagcattttctttgaaacaattaagttcatgacaatggatgacacaagtttgaggtagtgtctagaattgttctcctgtttgtagctggatatttcaaagaaacattgcaggtattttataaaagttttaaaccttgaatgagagggtaacacctcaaacctatggattcattcacttgatattggcaaggtggcccacaatgagtgagtagtgatttttggatatttcaaaatagtctagaccagctagtgcttccacagtcaaagctggacatttttatgttgcattatatacacccatgatatttctaataatatatggttttaaacattaaagacaaatgtttttatacaaatgaattttctacaaaatttaaagctaccataatgcttttaattagttctaaattcaaccaaaaaatgttttactcttataaaaaggaaaactgagtaggaaatgaaatactagattagactagaaaataaggaataaatcgattttactttggtataggagcaaggttcacctttagatttttgtattctcttttaattatgctccttggcaggtatgaaattgccctggttacattccattattgcttattagtatttcactccataacccttttttctgctaaaactactctttttatatttgtaaaataattggcagagtgagaagaaacataaaatcagataaggcaaatgtgtacctgtaaggaatttgtactttttcataatgcccagtgattagtgagtatttcccttttgccagttgacaagatttttccaccctcgagcagcgtgagagatgcctctttaacacttgaaattcatttctatctggatacagaggcagatttttcttcattgcttagttgagcagtttgttttgctgccaacctgtctccacccctgtatttcaagatcattgataagccctaaattcaaattcttaagatatggaccttttattgaaaatatcacaagttcagaatccctatacaatgtgaatatgtggaaataatttcccagcaggaagagcattatattctctttgtaccagcaaattaatttaactcaactcacatgagatttaaattctgtgggctgtagtatgccatcattgtgactgaatttgtgcaatggtttcttaatttttttactgttatttaaagatgttttacataattcaataaaatgaaatgacttaaaattgc

SEQ ID NO: 115159 - DNA, 3491 bp, Homo sapiens
  Payload ID: 2492
  Gene Symbol: CTCFL
  Gene Name: CCCTC-binding factor (zinc finger protein)-like
  Uniprot ID: Q8NI51
  ENST ID: ENST00000371196
  CDS Start-End: 118-2109
tctcccaggccccctgcaggccctcgtgccctccttacttcccccccgggtctcccagcgccccctgcggggccctcctcccttcctcatccacttcaaccccaaggccaagtcattatggcagccactgagatctctgtcctttctgagcaattcaccaagatcaaagaactcgagttgatgccggaaaaaggcctgaaggaggaggaaaaagacggagtgtgcagagagaaagaccatcggagccctagtgagttggaggccgagcgtacctctggggccttccaggacagcgtcctggaggaagaagtggagctggtgctggccccctcggaggagagcgagaagtacatcctgaccctgcagacggtgcacttcacttctgaagctgtggagttgcaggatatgagcttgctgagcatacagcagcaagaaggggtgcaggtggtggtgcaacagcctggccctgggttgctgtggcttgaggaagggccccggcagagcctgcagcagtgtgtggccattagtatccagcaagagctgtactccccgcaagagatggaggtgttgcagttccacgctctagaggagaatgtgatggtggccagtgaagacagtaagttagcggtgagcctggctgaaactactggactgatcaagctcgaggaagagcaggagaagaaccagttattggctgaaagaacaaaggagcagctcttttttgtggaaacaatgtcaggagatgaaagaagtgacgaaattgttctcacagtttcaaattcaaatgtggaagaacaagaggatcaacctacagctggtcaagcagatgctgaaaaggccaaatctacaaaaaatcaaagaaagacaaagggagcaaaaggaaccttccactgtgatgtctgcatgttcacctcttctagaatgtcaagttttaatcgtcatatgaaaactcacaccagtgagaagcctcacctgtgtcacctctgcctgaaaaccttccgtacggtcactctgctgcggaaccatgttaacacccacacaggaaccaggccctacaagtgtaacgactgcaacatggcatttgtcaccagtggagaactcgtccgacacaggcgctataaacatactcatgagaaaccctttaaatgttccatgtgcaagtatgccagtgtggaggcaagtaaattgaagcgccatgtccgatcccacactggggagcgcccctttcagtgttgccagtgcagctatgccagcagagatacctacaagctgaaacgccacatgagaacgcactcaggtgagaagccttacgaatgccacatctgccacacccgcttcacccagagcgggaccatgaaaatacatattctgcagaaacacggcgaaaatgtccccaaataccagtgtccccattgtgccaccatcattgcacggaaaagcgacctacgtgtgcatatgcgcaacttgcatgcttacagcgctgcagagctgaaatgccgctactgttctgctgtcttccatgaacgctatgccctcattcagcaccagaaaactcataagaatgagaagaggttcaagtgcaaacactgcagttatgcctgcaagcaggaacgtcatatgaccgctcacattcgtacccacactggagagaaaccattcacctgcctttcttgcaataaatgtttccgacagaagcaacttctaaacgctcacttcaggaaataccacgatgcaaatttcatcccgactgtttacaaatgctccaagtgtggcaaaggcttttcccgctggattaacctgcacagacattcggagaagtgtggatcaggggaagcaaagtcggctgcttcaggaaagggaagaagaacaagaaagaggaagcagaccatcctgaaggaagccacaaagggtcagaaggaagctgcgaagggatggaaggaagccgcgaacggagacgaagctgctgctgaggaggcttccaccacgaagggagaacagttcccaggagagatgtttcctgtcgcctgcagagaaaccacagccagagtcaaagaggaagtggatgaaggcgtgacctgtgaaatgctcctcaacacgatggataagtgagagggattcgggttgcgtgttcactgcccccaattcctaaagcaagttagaagtttttagcatttaaggtgtgaaatgctcctcaacacgatggataagtgagagagagtcaggttgcatgttcactgcccctaattcctaaagcaagttagaaatttttagcattttctttgaaacaattaagttcatgacaatggatgacacaagtttgaggtagtgtctagaattgttctcctgtttgtagctggatatttcaaagaaacattgcaggtattttataaaagttttaaaccttgaatgagagggtaacacctcaaacctatggattcattcacttgatattggcaaggtggcccacaatgagtgagtagtgatttttggatatttcaaaatagtctagaccagctagtgcttccacagtcaaagctggacatttttatgttgcattatatacacccatgatatttctaataatatatggttttaaacattaaagacaaatgtttttatacaaatgaattttctacaaaatttaaagctaccataatgcttttaattagttctaaattcaaccaaaaaatgttttactcttataaaaaggaaaactgagtaggaaatgaaatactagattagactagaaaataaggaataaatcgattttactttggtataggagcaaggttcacctttagatttttgtattctcttttaattatgctccttggcaggtatgaaattgccctggttacattccattattgcttattagtatttcactccataacccttttttctgctaaaactactctttttatatttgtaaaataattggcagagtgagaagaaacataaaatcagataaggcaaatgtgtacctgtaaggaatttgtactttttcataatgcccagtgattagtgagtatttcccttttgccagttgacaagatttttccaccctcgagcagcgtgagagatgcctctttaacacttgaaattcatttctatctggatacagaggcagatttttcttcattgcttagttgagcagtttgttttgctgccaacctgtctccacccctgtatttcaagatcattgataagccctaaattcaaattcttaagatatggaccttttattgaaaatatcacaagttcagaatccctatacaatgtgaatatgtggaaataatttcccagcaggaagagcattatattctctttgtaccagcaaattaatttaactcaactcacatgagatttaaattctgtgggctgtagtatgccatcattgtgactgaatttgtgcaatggtttcttaatttttttactgttatttaaagatgttttacataattcaataaaatgaaatgacttaaaattgc

SEQ ID NO: 115160 - DNA, 2234 bp, Homo sapiens
  Payload ID: 2492
  Gene Symbol: CTCFL
  Gene Name: CCCTC-binding factor (zinc finger protein)-like
  Uniprot ID: Q8NI51
  ENST ID: ENST00000433949
  CDS Start-End: 153-1535
ggctgcagcacgcggtgcacgaggcagagcccacaagccaaagacggagtgggccgagcattccggccacgccttccgcgctcgaggaagagcaggagaagaaccagttattggctgaaagaacaaaggagcagctcttttttgtggaaacaatgtcaggagatgaaagaagtgacgaaattgttctcacagtttcaaattcaaatgtggaagaacaagaggatcaacctacagctggtcaagcagatgctgaaaaggccaaatctacaaaaaatcaaagaaagacaaagggagcaaaaggaaccttccactgtgatgtctgcatgttcacctcttctagaatgtcaagttttaatcgtcatatgaaaactcacaccagtgagaagcctcacctgtgtcacctctgcctgaaaaccttccgtacggtcactctgctgcggaaccatgttaacacccacacaggaaccaggccctacaagtgtaacgactgcaacatggcatttgtcaccagtggagaactcgtccgacacaggcgctataaacatactcatgagaaaccctttaaatgttccatgtgcaagtatgccagtgtggaggcaagtaaattgaagcgccatgtccgatcccacactggggagcgcccctttcagtgttgccagtgcagctatgccagcagagatacctacaagctgaaacgccacatgagaacgcactcaggtgagaagccttacgaatgccacatctgccacacccgcttcacccagagcgggaccatgaaaatacatattctgcagaaacacggcgaaaatgtccccaaataccagtgtccccattgtgccaccatcattgcacggaaaagcgacctacgtgtgcatatgcgcaacttgcatgcttacagcgctgcagagctgaaatgccgctactgttctgctgtcttccatgaacgctatgccctcattcagcaccagaaaactcataagaatgagaagaggttcaagtgcaaacactgcagttatgcctgcaagcaggaacgtcatatgaccgctcacattcgtacccacactggagagaaaccattcacctgcctttcttgcaataaatgtttccgacagaagcaacttctaaacgctcacttcaggaaataccacgatgcaaatttcatcccgactgtttacaaatgctccaagtgtggcaaaggcttttcccgctggattaacctgcacagacattcggagaagtgtggatcaggggaagcaaagtcggctgcttcaggaaagggaagaagaacaagaaagaggaagcagaccatcctgaaggaagccacaaagggtcagaaggaagctgcgaagggatggaaggaagccgcgaacggagacggtgtgatctcagctcaccgcaacctctgcctcctgggttcaagtgattctcatgcctcagtctccggagctgggattacagatgcccgccaccacgcctggctaattgttctattatttttagtagagatggggttttaccatgtctctcactcctgacctcaagtgatctgcccgcctcggcctcccaaagtggtgggattacaggcatgagcccctgtgcctggcctgatggcaccagttttgtggatctcagtgtttcttttcatatccaagaactgggtcttcttgtctccctccatccaccaaaaaaaaaaaaaaaaaaatacttcaaggaagcatggacaaaaatatcctcagacaagttagaacatgagacagtcacgttcttcagtgtggcgctctgtggatgtttgggaaagtaatttggaaaatgagtagagcagggctccccaaccccccagccgtggacctgtgggctgttaggaactgggcctcccagcaggaggtgagcagtgggtgagggagtgaagctttgtattgacagccgctccccatcgggcgcatcaccgcctgagctccgcctcctgtcagatcagcggcagcgttagattctcatgagtgtgaaccctgttgtgaactctgcacgtgcaagggatctaggctgcacactccttacgagaatctaatgcccgacgatctgtcactgtctcccatcacccccagatgggactgtctagatgcaggaaaacaagcccagggctcccactgattctacattatggtgagctgtataattatttcattatatatcacaatgtaataataaaaataaagtacataagaaatgtaatgtgc

SEQ ID NO: 115161 - DNA, 2966 bp, Homo sapiens
  Payload ID: 2492
  Gene Symbol: CTCFL
  Gene Name: CCCTC-binding factor (zinc finger protein)-like
  Uniprot ID: Q8NI51
  ENST ID: ENST00000422869
  CDS Start-End: 191-1912
attccacccctccccccagtatctcagtgcctcctgtgggccctcctcccctccttatccattccccctcagatctcccaggccccctgcaggccctcgtgccctccttacttcccccccgggtctcccagcgccccctgcggggccctcctcccttcctcatccacttcaaccccaaggccaagtcattatggcagccactgagatctctgtcctttctgagcaattcaccaagatcaaagaactcgagttgatgccggaaaaaggcctgaaggaggaggaaaaagacggagtgtgcagagagaaagaccatcggagccctagtgagttggaggccgagcgtacctctggggccttccaggacagcgtcctggaggaagaagtggagctggtgctggccccctcggaggagagcgagaagtacatcctgaccctgcagacggtgcacttcacttctgaagctgtggagttgcaggatatgagcttgctgagcatacagcagcaagaaggggtgcaggtggtggtgcaacagcctggccctgggttgctgtggcttgaggaagggccccggcagagcctgcagcagtgtgtggccattagtatccagcaagagctgtactccccgcaagagatggaggtgttgcagttccacgctctagaggagaatgtgatggtggccagtgaagacagtaagttagcggtgagcctggctgaaactactggactgatcaagctcgaggaagagcaggagaagaaccagttattggctgaaagaacaaaggagcagctcttttttgtggaaacaatgtcaggagatgaaagaagtgacgaaattgttctcacagtttcaaattcaaatgtggaagaacaagaggatcaacctacagctggtcaagcagatgctgaaaaggccaaatctacaaaaaatcaaagaaagacaaagggagcaaaaggaaccttccactgtgatgtctgcatgttcacctcttctagaatgtcaagttttaatcgtcatatgaaaactcacaccagtgagaagcctcacctgtgtcacctctgcctgaaaaccttccgtacggtcactctgctgcggaaccatgttaacacccacacaggaaccaggccctacaagtgtaacgactgcaacatggcatttgtcaccagtggagaactcgtccgacacaggcgctataaacatactcatgagaaaccctttaaatgttccatgtgcaagtatgccagtgtggaggcaagtaaattgaagcgccatgtccgatcccacactggggagcgcccctttcagtgttgccagtgcagctatgccagcagagatacctacaagctgaaacgccacatgagaacgcactcaggtgagaagccttacgaatgccacatctgccacacccgcttcacccagagcgggaccatgaaaatacatattctgcagaaacacggcgaaaatgtccccaaataccagtgtccccattgtgccaccatcattgcacggaaaagcgacctacgtgtgcatatgcgcaacttgcatgcttacagcgctgcagagctgaaatgccgctactgttctgctgtcttccatgaacgctatgccctcattcagcaccagaaaactcataagaatgagaagaggttcaagtgcaaacactgcagttatgcctgcaagcaggaacgtcatatgaccgctcacattcgtacccacactggagagaaaccattcacctgcctttcttgcaataaatgtttccgacagaagcaacttctaaacgctcacttcaggaaataccacgatgcaaatttcatcccgactgtttacaaatgctccaagtgtggcaaaggcttttcccgctggattacctcaaaatggagtggcttaaaaccacaaacatttatcacctgacagattctctgggttgggaactcggaagtggctgaactgggtggtcctggctcagggccactcctgaggctgcagtcaggatgtccgccagggctgcatcatccgaaggctggactggggccagaggatccacttccaggacagctccgccacacaactgctggcaccggcctcagttccttgctacagggacctctctgcagggctgcttgagtgtcctcctgactcagagcaagtgagagagtgcaagtaggaagccatggtgccttttgcagtctagtcctaaaagcggcacaacagccagctgtgggggctcacacctgtaatcccagtacttcgggaggccaaggcaggtggataacttgaggccaggagctcaagaccagcctggccaacatggtgaaaccctgtctctactttaaaaaaaaaaaaagaaaatagctaggcgtggtagtgcacgcttgtaatcccagctacttgggtggttgggacgggaggatcacttgaacccaggagacagaggttgcagtgagctgagattgtgccactggcctccagcctgggcgacagagcaagactctgtctcaaaaaaaaaaaaaaagtggcacattctagtcacaagaaatgaaccatgaagtcccacccacactcgagtggggaatgaagtttcttttgaaaggaacagcatcaaagaatttcaggacatttaaaaaccactgcacatggctagctagatccttggaccatgtaggcttcagcctaactttataaaagttttataaaagttgaatttcctgaagttgactatttttttaaaaatatttcttcttaaaacagtagtgtagttgtgtttttctgagtagcacagtgggatagttctggaatgtcaaccctattagtttaaaatttcaaataaaagctgtggcagtgctcccaaaacaccattgctcatgcaaaaattgtgaagagttaaaattaacgagtagaattctaaagagaaaaaaactgctctttggtgcaagaaataaaaatgtagagaaaagaacaagtctgc

SEQ ID NO: 115162 - DNA, 3996 bp, Homo sapiens
  Payload ID: 2492
  Gene Symbol: CTCFL
  Gene Name: CCCTC-binding factor (zinc finger protein)-like
  ENST ID: ENST00000426658
  CDS Start-End: 663-2018
agggtaaagcaggggccctgccaggcctccgagggagtgtgcttggtctggccgagggctgcttggccaagtctgggtgggctcgaggccactaggcccaaagcctgcctggctctgagggtgctaggtctagaaccgtgcacgaggggaatgcctgctcgggcccgaacctcgctgggcgccgggtgtgcactggcccggggcctgcttggacctgaaacttgctaggcccaggatatgcactggccgagagcctgctgggcccaaaccttactaggcccaggatgttcactgactgaaccggctcaggcctaaccttgctaggcccaggatatgcactgggccagagtgtgctcaggcggaaccttgccaggcgcaggatgtgtgctggccctaagcctgctgaggcccaaacctgttcgttctagggttttgtacaaaatcctgctttagcctaaatcctgcttagccttgaccccctcctagacccaagccagatcagcattgttctgaccctactaagtccaaaaccttttgaggccagaccttgtttcaactccaaagcctgctaggttccagcaccccccgcatccctcctcataccacccccttctcccccctatggaaaccgcttgcttatttttcaaacaggccaagtcattatggcagccactgagatctctgtcctttctgagcaattcaccaagatcaaagaactcgagttgatgccggaaaaaggcctgaaggaggaggaaaaagacggagtgtgcagagagaaagaccatcggagccctagtgagttggaggccgagcgtacctctggggccttccaggacagcgtcctggaggaagaagtggagctggtgctggccccctcggaggagagcgagaagtacatcctgaccctgcagacggtgcacttcacttctgaagctgtggagttgcaggatatgagcttgctgagcatacagcagcaagaaggggtgcaggtggtggtgcaacagcctggccctgggttgctgtggcttgaggaagggccccggcagagcctgcagcagtgtgtggccattagtatccagcaagagctgtactccccgcaagagatggaggtgttgcagttccacgctctagaggagaatgtgatggtggccagtgaagacagtaagttagcggtgagcctggctgaaactactggactgatcaagctcgaggaagagcaggagaagaaccagttattggctgaaagaacaaaggagcagctcttttttgtggaaacaatgtcaggagatgaaagaagtgacgaaattgttctcacagtttcaaattcaaatgtggaagaacaagaggatcaacctacagctggtcaagcagatgctgaaaaggccaaatctacaaaaaatcaaagaaagacaaagggagcaaaaggaaccttccactgtgatgtctgcatgttcacctcttctagaatgtcaagttttaatcgtcatatgaaaactcacaccagtgagaagcctcacctgtgtcacctctgcctgaaaaccttccgtacggtcactctgctgcggaaccatgttaacacccacacaggaaccaggccctacaagtgtaacgactgcaacatggcatttgtcaccagtggagaactcgtccgacacaggcgctataaacatactcatgagaaaccctttaaatgttccatgtgcaagtatgccagtgtggaggcaagtaaattgaagcgccatgtccgatcccacactggggagcgcccctttcagtgttgccagtgcagctatgccagcagagatacctacaagctgaaacgccacatgagaacgcactcaggtgagaagccttacgaatgccacatctgccacacccgcttcacccagagcgggaccatgaaaatacatattctgcagaaacacggcgaaaatgtccccaaataccagtgtccccattgtgccaccatcattgcacggaaaagcgacctacgattcctgggcctcccttttccatgatcttatttctctttccaaaatatatgacactgtgatacacaaaaatatgttagcagaacaaaaaatttgacccttttgcccaaagagattctggagatgagatgaatttttttgaaaacctttctgaaaggcgaaaggtgttccacaaagtcttcacttttatttttcatctggaccattctgtcattgttgccgtagataccagcacatcacaaaacacagtccagtggggcttggtggggcacaagtctagccagttgctagacttttttgacaccatggcaaagtaacatggtttatatccatctcatgccagtgggtgatacactccacatagccctataagatgctttataaacacattaattcttccttcccatgactgtatgagaaatcaagctctctaaatgtctgagtcactgtgggtaaggtggagtagctccatcacacagctgtccattgtcatttggcttcttacacaagtatcacaagaccatcatgctttagacttagatgagcaaacccagccagaccttaccatgtgtctcaggttaatttcaacataggaaataacagggcactgacttctaacaacgagtggattatttaaggtgtgcatatgcgcaacttgcatgcttacagcgctgcagagctgaaatgccgctactgttctgctgtcttccatgaacgctatgccctcattcagcaccagaaaactcataagaatgagaagaggttcaagtgcaaacactgcagttatgcctgcaagcaggaacgtcatatgaccgctcacattcgtacccacactggagagaaaccattcacctgcctttcttgcaataaatgtttccgacagaagcaacttctaaacgctcacttcaggaaataccacgatgcaaatttcatcccgactgtttacaaatgctccaagtgtggcaaaggcttttcccgctggattaacctgcacagacattcggagaagtgtggatcaggggaagcaaagtcggctgcttcaggaaagggaagaagaacaagaaagaggaagcagaccatcctgaaggaagccacaaagggtcagaaggaagctgcgaagggatggaaggaagccgcgaacggagacggtgtgatctcagctcaccgcaacctctgcctcctgggttcaagtgattctcatgcctcagtctccggagctgggattacagatgcccgccaccacgcctggctaattgttctattatttttagtagagatggggttttaccatgtctctcactcctgacctcaagtgatctgcccgcctcggcctcccaaagtggtgggattacaggcatgagcccctgtgcctggcctgatggcaccagttttgtggatctcagtgtttcttttcatatccaagaactgggtcttcttgtctccctccatccaccaaaaaaaaaaaaaaaaaaatacttcaaggaagcatggacaaaaatatcctcagacaagttagaacatgagacagtcacgttcttcagtgtggcgctctgtggatgtttgggaaagtaatttggaaaatgagtagagcagggctccccaaccccccagccgtggacctgtgggctgttaggaactgggcctcccagcaggaggtgagcagtgggtgagggagtgaagctttgtattgacagccgctccccatcgggcgcatcaccgcctgagctccgcctcctgtcagatcagcggcagcgttagattctcatgagtgtgaaccctgttgtgaactctgcacgtgcaagggatctaggctgcacactccttacgagaatctaatgcccgacgatctgtcactgtctcccatcacccccagatgggactgtctagatgcaggaaaacaagcccagggctcccactgattctacattatggtgagctgtataattatttcattatatatcacaatgtaataataaaaataaagtacataagaaatgtaatgtgc

SEQ ID NO: 115163 - DNA, 2955 bp, Homo sapiens
  Payload ID: 2492
  Gene Symbol: CTCFL
  Gene Name: CCCTC-binding factor (zinc finger protein)-like
  Uniprot ID: Q8NI51
  ENST ID: ENST00000432255
  CDS Start-End: 663-2114
agggtaaagcaggggccctgccaggcctccgagggagtgtgcttggtctggccgagggctgcttggccaagtctgggtgggctcgaggccactaggcccaaagcctgcctggctctgagggtgctaggtctagaaccgtgcacgaggggaatgcctgctcgggcccgaacctcgctgggcgccgggtgtgcactggcccggggcctgcttggacctgaaacttgctaggcccaggatatgcactggccgagagcctgctgggcccaaaccttactaggcccaggatgttcactgactgaaccggctcaggcctaaccttgctaggcccaggatatgcactgggccagagtgtgctcaggcggaaccttgccaggcgcaggatgtgtgctggccctaagcctgctgaggcccaaacctgttcgttctagggttttgtacaaaatcctgctttagcctaaatcctgcttagccttgaccccctcctagacccaagccagatcagcattgttctgaccctactaagtccaaaaccttttgaggccagaccttgtttcaactccaaagcctgctaggttccagcaccccccgcatccctcctcataccacccccttctcccccctatggaaaccgcttgcttatttttcaaacaggccaagtcattatggcagccactgagatctctgtcctttctgagcaattcaccaagatcaaagaactcgagttgatgccggaaaaaggcctgaaggaggaggaaaaagacggagtgtgcagagagaaagaccatcggagccctagtgagttggaggccgagcgtacctctggggccttccaggacagcgtcctggaggaagaagtggagctggtgctggccccctcggaggagagcgagaagtacatcctgaccctgcagacggtgcacttcacttctgaagctgtggagttgcaggatatgagcttgctgagcatacagcagcaagaaggggtgcaggtggtggtgcaacagcctggccctgggttgctgtggcttgaggaagggccccggcagagcctgcagcagtgtgtggccattagtatccagcaagagctgtactccccgcaagagatggaggtgttgcagttccacgctctagaggagaatgtgatggtggccagtgaagacagtaagttagcggtgagcctggctgaaactactggactgatcaagctcgaggaagagcaggagaagaaccagttattggctgaaagaacaaaggagcagctcttttttgtggaaacaatgtcaggagatgaaagaagtgacgaaattgttctcacagtttcaaattcaaatgtggaagaacaagaggatcaacctacagctggtcaagcagatgctgaaaaggccaaatctacaaaaaatcaaagaaagacaaagggagcaaaaggaaccttccactgtgatgtctgcatgttcacctcttctagaatgtcaagttttaatcgtcatatgaaaactcacaccagtgagaagcctcacctgtgtcacctctgcctgaaaaccttccgtacggtcactctgctgcggaaccatgttaacacccacacaggaaccaggccctacaagtgtaacgactgcaacatggcatttgtcaccagtggagaactcgtccgacacaggcgctataaacatactcatgagaaaccctttaaatgttccatgtgcaagtatgccagtgtggaggaacgtcatatgaccgctcacattcgtacccacactggagagaaaccattcacctgcctttcttgcaataaatgtttccgacagaagcaacttctaaacgctcacttcaggaaataccacgatgcaaatttcatcccgactgtttacaaatgctccaagtgtggcaaaggcttttcccgctggattctctgggttgggaactcggaagtggctgaactgggtggtcctggctcagggccactcctgaggctgcagtcaggatgtccgccagggctgcatcatccgaaggctggactggggccagaggatccacttccaggacagctccgccacacaactgctggcaccggcctcagttccttgctacagggacctctctgcagggctgcttgagtgtcctcctgactcagagcaagtgagagagtgcaagtaggaagccatggtgccttttgcagtctagtcctaaaagcggcacaacagccagctgtgggggctcacacctgtaatcccagtacttcgggaggccaaggcaggtggataacttgaggccaggagctcaagaccagcctggccaacatggtgaaaccctgtctctactttaaaaaaaaaaaaagaaaatagctaggcgtggtagtgcacgcttgtaatcccagctacttgggtggttgggacgggaggatcacttgaacccaggagacagaggttgcagtgagctgagattgtgccactggcctccagcctgggcgacagagcaagactctgtctcaaaaaaaaaaaaaaagtggcacattctagtcacaagaaatgaaccatgaagtcccacccacactcgagtggggaatgaagtttcttttgaaaggaacagcatcaaagaatttcaggacatttaaaaaccactgcacatggctagctagatccttggaccatgtaggcttcagcctaactttataaaagttttataaaagttgaatttcctgaagttgactatttttttaaaaatatttcttcttaaaacagtagtgtagttgtgtttttctgagtagcacagtgggatagttctggaatgtcaaccctattagtttaaaatttcaaataaaagctgtggcagtgctcccaaaacaccattgctcatgcaaaaattgtgaagagttaaaattaacgagtagaattctaaagagaaaaaaactgctctttggtgcaagaaataaaaatgtagagaaaagaacaagtctgc

SEQ ID NO: 115164 - DNA, 2964 bp, Homo sapiens
  Payload ID: 2492
  Gene Symbol: CTCFL
  Gene Name: CCCTC-binding factor (zinc finger protein)-like
  Uniprot ID: Q8NI51
  ENST ID: ENST00000422109
  CDS Start-End: 663-1946
agggtaaagcaggggccctgccaggcctccgagggagtgtgcttggtctggccgagggctgcttggccaagtctgggtgggctcgaggccactaggcccaaagcctgcctggctctgagggtgctaggtctagaaccgtgcacgaggggaatgcctgctcgggcccgaacctcgctgggcgccgggtgtgcactggcccggggcctgcttggacctgaaacttgctaggcccaggatatgcactggccgagagcctgctgggcccaaaccttactaggcccaggatgttcactgactgaaccggctcaggcctaaccttgctaggcccaggatatgcactgggccagagtgtgctcaggcggaaccttgccaggcgcaggatgtgtgctggccctaagcctgctgaggcccaaacctgttcgttctagggttttgtacaaaatcctgctttagcctaaatcctgcttagccttgaccccctcctagacccaagccagatcagcattgttctgaccctactaagtccaaaaccttttgaggccagaccttgtttcaactccaaagcctgctaggttccagcaccccccgcatccctcctcataccacccccttctcccccctatggaaaccgcttgcttatttttcaaacaggccaagtcattatggcagccactgagatctctgtcctttctgagcaattcaccaagatcaaagaactcgagttgatgccggaaaaaggcctgaaggaggaggaaaaagacggagtgtgcagagagaaagaccatcggagccctagtgagttggaggccgagcgtacctctggggccttccaggacagcgtcctggaggaagaagtggagctggtgctggccccctcggaggagagcgagaagtacatcctgaccctgcagacggtgcacttcacttctgaagctgtggagttgcaggatatgagcttgctgagcatacagcagcaagaaggggtgcaggtggtggtgcaacagcctggccctgggttgctgtggcttgaggaagggccccggcagagcctgcagcagtgtgtggccattagtatccagcaagagctgtactccccgcaagagatggaggtgttgcagttccacgctctagaggagaatgtgatggtggccagtgaagacagtaagttagcggtgagcctggctgaaactactggactgatcaagctcgaggaagagcaggagaagaaccagttattggctgaaagaacaaaggagcagctcttttttgtggaaacaatgtcaggagatgaaagaagtgacgaaattgttctcacagtttcaaattcaaatgtggaagaacaagaggatcaacctacagctggtcaagcagatgctgaaaaggccaaatctacaaaaaatcaaagaaagacaaagggagcaaaaggaaccttccactgtgatgtctgcatgttcacctcttctagaatgtcaagttttaatcgtcatatgaaaactcacaccagtgagaagcctcacctgtgtcacctctgcctgaaaaccttccgtacggtcactctgctgcggaaccatgttaacacccacacaggaaccaggccctacaagtgtaacgactgcaacatggcatttgtcaccagtggagaactcgtccgacacaggcgctataaacatactcatgagaaaccctttaaatgttccatgtgcaagtatgccagtgtggaggcaagtaaattgaagcgccatgtccgatcccacactggggagcgcccctttcagtgttgccagtgcagctatgccagcagagatacctacaagctgaaacgccacatgagaacgcactcagaagcaacttctaaacgctcacttcaggaaataccacgatgcaaatttcatcccgactgtttacaaatgctccaagtgtggcaaaggcttttcccgctggattaacctgcacagacattcggagaagtgtggatcaggggaagcaaagtcggctgcttcaggaaagggaagaagaacaagaaagaggaagcagaccatcctgaaggaagccacaaagggtcagaaggaagctgcgaagggatggaaggaagccgcgaacggagacggtgtgatctcagctcaccgcaacctctgcctcctgggttcaagtgattctcatgcctcagtctccggagctgggattacagatgcccgccaccacgcctggctaattgttctattatttttagtagagatggggttttaccatgtctctcactcctgacctcaagtgatctgcccgcctcggcctcccaaagtggtgggattacaggcatgagcccctgtgcctggcctgatggcaccagttttgtggatctcagtgtttcttttcatatccaagaactgggtcttcttgtctccctccatccaccaaaaaaaaaaaaaaaaaaatacttcaaggaagcatggacaaaaatatcctcagacaagttagaacatgagacagtcacgttcttcagtgtggcgctctgtggatgtttgggaaagtaatttggaaaatgagtagagcagggctccccaaccccccagccgtggacctgtgggctgttaggaactgggcctcccagcaggaggtgagcagtgggtgagggagtgaagctttgtattgacagccgctccccatcgggcgcatcaccgcctgagctccgcctcctgtcagatcagcggcagcgttagattctcatgagtgtgaaccctgttgtgaactctgcacgtgcaagggatctaggctgcacactccttacgagaatctaatgcccgacgatctgtcactgtctcccatcacccccagatgggactgtctagatgcaggaaaacaagcccagggctcccactgattctacattatggtgagctgtataattatttcattatatatcacaatgtaataataaaaataaagtacataagaaatgtaatgtgc

SEQ ID NO: 115165 - DNA, 3864 bp, Homo sapiens
  Payload ID: 2492
  Gene Symbol: CTCFL
  Gene Name: CCCTC-binding factor (zinc finger protein)-like
  Uniprot ID: Q8NI51
  ENST ID: ENST00000429804
  CDS Start-End: 637-2478
attccacccctccccccagtatctcagtgcctcctgtgggccctcctcccctccttatccattccccctcagatctcccaggccccctgcaggccctcgtgccctccttacttcccccccgggtctcccagcgccccctgcggggccctcctcccttcctcatccacttcaaccccaaggtatttccgtgcccctgcaggaccctcctcccctccttaggcgctcccccactacccagtcttccagtgccctgcaggctctcctcctctccttatccacccccaccccaggtctcccagtgccctgtatgggaccctcctcccctcctcatccacccccccaggtccaccagtgccccctctggggtcctcctcatccgtgctccccctccccctccctactccccttcccccctgcccccacagtacatcaccccctcccccaaccctgcctggctccgcccccttcacgccccctcttttccgctccgcgcctgcgcactgccaccctccactctcgcgccagcccggcggcggccggctgtgggctgcagcacgcggtgcacgaggcagagcccacaagccaaagacggagtgggccgagcattccggccacgccttccgcggccaagtcattatggcagccactgagatctctgtcctttctgagcaattcaccaagatcaaagaactcgagttgatgccggaaaaaggcctgaaggaggaggaaaaagacggagtgtgcagagagaaagaccatcggagccctagtgagttggaggccgagcgtacctctggggccttccaggacagcgtcctggaggaagaagtggagctggtgctggccccctcggaggagagcgagaagtacatcctgaccctgcagacggtgcacttcacttctgaagctgtggagttgcaggatatgagcttgctgagcatacagcagcaagaaggggtgcaggtggtggtgcaacagcctggccctgggttgctgtggcttgaggaagggccccggcagagcctgcagcagtgtgtggccattagtatccagcaagagctgtactccccgcaagagatggaggtgttgcagttccacgctctagaggagaatgtgatggtggccagtgaagacagtaagttagcggtgagcctggctgaaactactggactgatcaagctcgaggaagagcaggagaagaaccagttattggctgaaagaacaaaggagcagctcttttttgtggaaacaatgtcaggagatgaaagaagtgacgaaattgttctcacagtttcaaattcaaatgtggaagaacaagaggatcaacctacagctggtcaagcagatgctgaaaaggccaaatctacaaaaaatcaaagaaagacaaagggagcaaaaggaaccttccactgtgatgtctgcatgttcacctcttctagaatgtcaagttttaatcgtcatatgaaaactcacaccagtgagaagcctcacctgtgtcacctctgcctgaaaaccttccgtacggtcactctgctgcggaaccatgttaacacccacacaggaaccaggccctacaagtgtaacgactgcaacatggcatttgtcaccagtggagaactcgtccgacacaggcgctataaacatactcatgagaaaccctttaaatgttccatgtgcaagtatgccagtgtggaggcaagtaaattgaagcgccatgtccgatcccacactggggagcgcccctttcagtgttgccagtgcagctatgccagcagagatacctacaagctgaaacgccacatgagaacgcactcaggtgtgcatatgcgcaacttgcatgcttacagcgctgcagagctgaaatgccgctactgttctgctgtcttccatgaacgctatgccctcattcagcaccagaaaactcataagaatgagaagaggttcaagtgcaaacactgcagttatgcctgcaagcaggaacgtcatatgaccgctcacattcgtacccacactggagagaaaccattcacctgcctttcttgcaataaatgtttccgacagaagcaacttctaaacgctcacttcaggaaataccacgatgcaaatttcatcccgactgtttacaaatgctccaagtgtggcaaaggcttttcccgctggattaacctgcacagacattcggagaagtgtggatcaggggaagcaaagtcggctgcttcaggaaagggaagaagaacaagaaagaggaagcagaccatcctgaaggaagccacaaagggtcagaaggaagctgcgaagggatggaaggaagccgcgaacggagacgaagctgctgctgaggaggcttccaccacgaagggagaacagttcccaggagagatgtttcctgtcgcctgcagagaaaccacagccagagtcaaagaggaagtggatgaaggcgtgacctgtgaaatgctcctcaacacgatggataagtgagagggattcgggttgcgtgttcactgcccccaattcctaaagcaagttagaagtttttagcatttaaggtgtgaaatgctcctcaacacgatggataagtgagagagagtcaggttgcatgttcactgcccctaattcctaaagcaagttagaaatttttagcattttctttgaaacaattaagttcatgacaatggatgacacaagtttgaggtagtgtctagaattgttctcctgtttgtagctggatatttcaaagaaacattgcaggtattttataaaagttttaaaccttgaatgagagggtaacacctcaaacctatggattcattcacttgatattggcaaggtggcccacaatgagtgagtagtgatttttggatatttcaaaatagtctagaccagctagtgcttccacagtcaaagctggacatttttatgttgcattatatacacccatgatatttctaataatatatggttttaaacattaaagacaaatgtttttatacaaatgaattttctacaaaatttaaagctaccataatgcttttaattagttctaaattcaaccaaaaaatgttttactcttataaaaaggaaaactgagtaggaaatgaaatactagattagactagaaaataaggaataaatcgattttactttggtataggagcaaggttcacctttagatttttgtattctcttttaattatgctccttggcaggtatgaaattgccctggttacattccattattgcttattagtatttcactccataacccttttttctgctaaaactactctttttatatttgtaaaataattggcagagtgagaagaaacataaaatcagataaggcaaatgtgtacctgtaaggaatttgtactttttcataatgcccagtgattagtgagtatttcccttttgccagttgacaagatttttccaccctcgagcagcgtgagagatgcctctttaacacttgaaattcatttctatctggatacagaggcagatttttcttcattgcttagttgagcagtttgttttgctgccaacctgtctccacccctgtatttcaagatcattgataagccctaaattcaaattcttaagatatggaccttttattgaaaatatcacaagttcagaatccctatacaatgtgaatatgtggaaataatttcccagcaggaagagcattatattctctttgtaccagcaaattaatttaactcaactcacatgagatttaaattctgtgggctgtagtatgccatcattgtgactgaatttgtgcaatggtttcttaatttttttactgttatttaaagatgttttacataattcaataaaatgaaatgacttaaaattgctata

SEQ ID NO: 115166 - DNA, 2478 bp, Homo sapiens
  Payload ID: 2492
  Gene Symbol: CTCFL
  Gene Name: CCCTC-binding factor (zinc finger protein)-like
  Uniprot ID: Q8NI51
  ENST ID: ENST00000423479
  CDS Start-End: 92-2194
ggctgcagcacgcggtgcacgaggcagagcccacaagccaaagacggagtgggccgagcattccggccacgccttccgcggccaagtcattatggcagccactgagatctctgtcctttctgagcaattcaccaagatcaaagaactcgagttgatgccggaaaaaggcctgaaggaggaggaaaaagacggagtgtgcagagagaaagaccatcggagccctagtgagttggaggccgagcgtacctctggggccttccaggacagcgtcctggaggaagaagtggagctggtgctggccccctcggaggagagcgagaagtacatcctgaccctgcagacggtgcacttcacttctgaagctgtggagttgcaggatatgagcttgctgagcatacagcagcaagaaggggtgcaggtggtggtgcaacagcctggccctgggttgctgtggcttgaggaagggccccggcagagcctgcagcagtgtgtggccattagtatccagcaagagctgtactccccgcaagagatggaggtgttgcagttccacgctctagaggagaatgtgatggtggccagtgaagacagtaagttagcggtgagcctggctgaaactactggactgatcaagctcgaggaagagcaggagaagaaccagttattggctgaaagaacaaaggagcagctcttttttgtggaaacaatgtcaggagatgaaagaagtgacgaaattgttctcacagtttcaaattcaaatgtggaagaacaagaggatcaacctacagctggtcaagcagatgctgaaaaggccaaatctacaaaaaatcaaagaaagacaaagggagcaaaaggaaccttccactgtgatgtctgcatgttcacctcttctagaatgtcaagttttaatcgtcatatgaaaactcacaccagtgagaagcctcacctgtgtcacctctgcctgaaaaccttccgtacggtcactctgctgcggaaccatgttaacacccacacaggaaccaggccctacaagtgtaacgactgcaacatggcatttgtcaccagtggagaactcgtccgacacaggcgctataaacatactcatgagaaaccctttaaatgttccatgtgcaagtatgccagtgtggaggcaagtaaattgaagcgccatgtccgatcccacactggggagcgcccctttcagtgttgccagtgcagctatgccagcagagatacctacaagctgaaacgccacatgagaacgcactcaggtgagaagccttacgaatgccacatctgccacacccgcttcacccagagcgggaccatgaaaatacatattctgcagaaacacggcgaaaatgtccccaaataccagtgtccccattgtgccaccatcattgcacggaaaagcgacctacgtgtgcatatgcgcaacttgcatgcttacagcgctgcagagctgaaatgccgctactgttctgctgtcttccatgaacgctatgccctcattcagcaccagaaaactcataagaatgagaagaggttcaagtgcaaacactgcagttatgcctgcaagcaggaacgtcatatgaccgctcacattcgtacccacactggagagaaaccattcacctgcctttcttgcaataaatgtttccgacagaagcaacttctaaacgctcacttcaggaaataccacgatgcaaatttcatcccgactgtttacaaatgctccaagtgtggcaaaggcttttcccgctggattaacctgcacagacattcggagaagtgtggatcaggggaagcaaagtcggctgcttcaggaaagggaagaagaacaagaaagaggaagcagaccatcctgaaggaagccacaaagggtcagaaggaagctgcgaagggatggaaggaagccgcgaacggagacgaagctgctgctgaggaggcttccaccacgaagggagaacagttcccaggagagatgtttcctgtcgcctgcagagaaaccacagccagagtcaaagaggaagtggatgaaggcgtgacctgtgaaatgctcctcaacacgatggataattccgcaggctgtacaggaaggatgatgttggtatctgcctggcttctggggaggcctcaggaaacttacaatcaaggcagaaggcgaagagggagtaggcgcgtcacatggtgaaagcaggagcgagagagggggaggcgccacactcctctgaacgaccagattccttgagaaccgccactgtcatgaggacagcaccaagcggatggtgctaaatcattcctaagaaaccgcccccgtgatccagtcacctcctaccaggccccacctccaacactggggattacaattcaacatgagctttggccagggacaaatatccaaactatatcatgtattttactacaaccaaatgtatgttaatttcaaaaacagataacataaatatgtttgaaaac

SEQ ID NO: 115167 - DNA, 2023 bp, Homo sapiens
  Payload ID: 2492
  Gene Symbol: CTCFL
  Gene Name: CCCTC-binding factor (zinc finger protein)-like
  Uniprot ID: Q8NI51
  ENST ID: ENST00000502686
  CDS Start-End: 113-1324
ggctgcagcacgcggtgcacgaggcagagcccacaagccaaagacggagtgggccgagcattccggccacgccttccgcggagcaaaaggaaccttccactgtgatgtctgcatgttcacctcttctagaatgtcaagttttaatcgtcatatgaaaactcacaccagtgagaagcctcacctgtgtcacctctgcctgaaaaccttccgtacggtcactctgctgcggaaccatgttaacacccacacaggaaccaggccctacaagtgtaacgactgcaacatggcatttgtcaccagtggagaactcgtccgacacaggcgctataaacatactcatgagaaaccctttaaatgttccatgtgcaagtatgccagtgtggaggcaagtaaattgaagcgccatgtccgatcccacactggggagcgcccctttcagtgttgccagtgcagctatgccagcagagatacctacaagctgaaacgccacatgagaacgcactcaggtgagaagccttacgaatgccacatctgccacacccgcttcacccagagcgggaccatgaaaatacatattctgcagaaacacggcgaaaatgtccccaaataccagtgtccccattgtgccaccatcattgcacggaaaagcgacctacgtgtgcatatgcgcaacttgcatgcttacagcgctgcagagctgaaatgccgctactgttctgctgtcttccatgaacgctatgccctcattcagcaccagaaaactcataagaatgagaagaggttcaagtgcaaacactgcagttatgcctgcaagcaggaacgtcatatgaccgctcacattcgtacccacactggagagaaaccattcacctgcctttcttgcaataaatgtttccgacagaagcaacttctaaacgctcacttcaggaaataccacgatgcaaatttcatcccgactgtttacaaatgctccaagtgtggcaaaggcttttcccgctggattaacctgcacagacattcggagaagtgtggatcaggggaagcaaagtcggctgcttcaggaaagggaagaagaacaagaaagaggaagcagaccatcctgaaggaagccacaaagggtcagaaggaagctgcgaagggatggaaggaagccgcgaacggagacggtgtgatctcagctcaccgcaacctctgcctcctgggttcaagtgattctcatgcctcagtctccggagctgggattacagatgcccgccaccacgcctggctaattgttctattatttttagtagagatggggttttaccatgtctctcactcctgacctcaagtgatctgcccgcctcggcctcccaaagtggtgggattacaggcatgagcccctgtgcctggcctgatggcaccagttttgtggatctcagtgtttcttttcatatccaagaactgggtcttcttgtctccctccatccaccaaaaaaaaaaaaaaaaaaatacttcaaggaagcatggacaaaaatatcctcagacaagttagaacatgagacagtcacgttcttcagtgtggcgctctgtggatgtttgggaaagtaatttggaaaatgagtagagcagggctccccaaccccccagccgtggacctgtgggctgttaggaactgggcctcccagcaggaggtgagcagtgggtgagggagtgaagctttgtattgacagccgctccccatcgggcgcatcaccgcctgagctccgcctcctgtcagatcagcggcagcgttagattctcatgagtgtgaaccctgttgtgaactctgcacgtgcaagggatctaggctgcacactccttacgagaatctaatgcccgacgatctgtcactgtctcccatcacccccagatgggactgtctagatgcaggaaaacaagcccagggctcccactgattctacattatggtgagctgtataattatttcattatatatcacaatgtaataataaaaataaagtacataagaaatgtaatgtgc

SEQ ID NO: 115168 - DNA, 2262 bp, Homo sapiens
  Payload ID: 2492
  Gene Symbol: CTCFL
  Gene Name: CCCTC-binding factor (zinc finger protein)-like
  Uniprot ID: Q8NI51
  ENST ID: ENST00000539382
  CDS Start-End: 153-1421
ggctgcagcacgcggtgcacgaggcagagcccacaagccaaagacggagtgggccgagcattccggccacgccttccgcgctcgaggaagagcaggagaagaaccagttattggctgaaagaacaaaggagcagctcttttttgtggaaacaatgtcaggagatgaaagaagtgacgaaattgttctcacagtttcaaattcaaatgtggaagaacaagaggatcaacctacagctggtcaagcagatgctgaaaaggccaaatctacaaaaaatcaaagaaagacaaagggagcaaaaggaaccttccactgtgatgtctgcatgttcacctcttctagaatgtcaagttttaatcgtcatatgaaaactcacaccagtgagaagcctcacctgtgtcacctctgcctgaaaaccttccgtacggtcactctgctgcggaaccatgttaacacccacacaggaaccaggccctacaagtgtaacgactgcaacatggcatttgtcaccagtggagaactcgtccgacacaggcgctataaacatactcatgagaaaccctttaaatgttccatgtgcaagtatgccagtgtggaggcaagtaaattgaagcgccatgtccgatcccacactggggagcgcccctttcagtgttgccagtgcagctatgccagcagagatacctacaagctgaaacgccacatgagaacgcactcaggtgagaagccttacgaatgccacatctgccacacccgcttcacccagagcgggaccatgaaaatacatattctgcagaaacacggcgaaaatgtccccaaataccagtgtccccattgtgccaccatcattgcacggaaaagcgacctacgtgtgcatatgcgcaacttgcatgcttacagcgctgcagagctgaaatgccgctactgttctgctgtcttccatgaacgctatgccctcattcagcaccagaaaactcataagaatgagaagaggttcaagtgcaaacactgcagttatgcctgcaagcaggaacgtcatatgaccgctcacattcgtacccacactggagagaaaccattcacctgcctttcttgcaataaatgtttccgacagaagcaacttctaaacgctcacttcaggaaataccacgatgcaaatttcatcccgactgtttacaaatgctccaagtgtggcaaaggcttttcccgctggattctctgggttgggaactcggaagtggctgaactgggtggtcctggctcagggccactcctgaggctgcagtcaggatgtccgccagggctgcatcatccgaaggctggactggggccagaggatccacttccaggacagctccgccacacaactgctggcaccggcctcagttccttgctacagggacctctctgcagggctgcttgagtgtcctcctgactcagagcaagtgagagagtgcaagtaggaagccatggtgccttttgcagtctagtcctaaaagcggcacaacagccagctgtgggggctcacacctgtaatcccagtacttcgggaggccaaggcaggtggataacttgaggccaggagctcaagaccagcctggccaacatggtgaaaccctgtctctactttaaaaaaaaaaaaagaaaatagctaggcgtggtagtgcacgcttgtaatcccagctacttgggtggttgggacgggaggatcacttgaacccaggagacagaggttgcagtgagctgagattgtgccactggcctccagcctgggcgacagagcaagactctgtctcaaaaaaaaaaaaaaagtggcacattctagtcacaagaaatgaaccatgaagtcccacccacactcgagtggggaatgaagtttcttttgaaaggaacagcatcaaagaatttcaggacatttaaaaaccactgcacatggctagctagatccttggaccatgtaggcttcagcctaactttataaaagttttataaaagttgaatttcctgaagttgactatttttttaaaaatatttcttcttaaaacagtagtgtagttgtgtttttctgagtagcacagtgggatagttctggaatgtcaaccctattagtttaaaatttcaaataaaagctgtggcagtgctcccaaaacaccattgctcatgcaaaaattgtgaagagttaaaattaacgagtagaattctaaagagaaaaaaactgctctttggtgcaagaaataaaaatgtagagaaaagaacaagtctgc

SEQ ID NO: 115169 - DNA, 3668 bp, Homo sapiens
  Payload ID: 2492
  Gene Symbol: CTCFL
  Gene Name: CCCTC-binding factor (zinc finger protein)-like
  Uniprot ID: Q8NI51
  ENST ID: ENST00000609232
  CDS Start-End: 291-2282
attccacccctccccccagtatctcagtgcctcctgtgggccctcctcccctccttatccattccccctcagatctcccaggccccctgcaggccctcgtgccctccttacttcccccccgggtctcccagcgccccctgcggggccctcctcccttcctcatccacttcaaccccaagcccggcggcggccggctgtgggctgcagcacgcggtgcacgaggcagagcccacaagccaaagacggagtgggccgagcattccggccacgccttccgcggccaagtcattatggcagccactgagatctctgtcctttctgagcaattcaccaagatcaaagaactcgagttgatgccggaaaaaggcctgaaggaggaggaaaaagacggagtgtgcagagagaaagaccatcggagccctagtgagttggaggccgagcgtacctctggggccttccaggacagcgtcctggaggaagaagtggagctggtgctggccccctcggaggagagcgagaagtacatcctgaccctgcagacggtgcacttcacttctgaagctgtggagttgcaggatatgagcttgctgagcatacagcagcaagaaggggtgcaggtggtggtgcaacagcctggccctgggttgctgtggcttgaggaagggccccggcagagcctgcagcagtgtgtggccattagtatccagcaagagctgtactccccgcaagagatggaggtgttgcagttccacgctctagaggagaatgtgatggtggccagtgaagacagtaagttagcggtgagcctggctgaaactactggactgatcaagctcgaggaagagcaggagaagaaccagttattggctgaaagaacaaaggagcagctcttttttgtggaaacaatgtcaggagatgaaagaagtgacgaaattgttctcacagtttcaaattcaaatgtggaagaacaagaggatcaacctacagctggtcaagcagatgctgaaaaggccaaatctacaaaaaatcaaagaaagacaaagggagcaaaaggaaccttccactgtgatgtctgcatgttcacctcttctagaatgtcaagttttaatcgtcatatgaaaactcacaccagtgagaagcctcacctgtgtcacctctgcctgaaaaccttccgtacggtcactctgctgcggaaccatgttaacacccacacaggaaccaggccctacaagtgtaacgactgcaacatggcatttgtcaccagtggagaactcgtccgacacaggcgctataaacatactcatgagaaaccctttaaatgttccatgtgcaagtatgccagtgtggaggcaagtaaattgaagcgccatgtccgatcccacactggggagcgcccctttcagtgttgccagtgcagctatgccagcagagatacctacaagctgaaacgccacatgagaacgcactcaggtgagaagccttacgaatgccacatctgccacacccgcttcacccagagcgggaccatgaaaatacatattctgcagaaacacggcgaaaatgtccccaaataccagtgtccccattgtgccaccatcattgcacggaaaagcgacctacgtgtgcatatgcgcaacttgcatgcttacagcgctgcagagctgaaatgccgctactgttctgctgtcttccatgaacgctatgccctcattcagcaccagaaaactcataagaatgagaagaggttcaagtgcaaacactgcagttatgcctgcaagcaggaacgtcatatgaccgctcacattcgtacccacactggagagaaaccattcacctgcctttcttgcaataaatgtttccgacagaagcaacttctaaacgctcacttcaggaaataccacgatgcaaatttcatcccgactgtttacaaatgctccaagtgtggcaaaggcttttcccgctggattaacctgcacagacattcggagaagtgtggatcaggggaagcaaagtcggctgcttcaggaaagggaagaagaacaagaaagaggaagcagaccatcctgaaggaagccacaaagggtcagaaggaagctgcgaagggatggaaggaagccgcgaacggagacgaagctgctgctgaggaggcttccaccacgaagggagaacagttcccaggagagatgtttcctgtcgcctgcagagaaaccacagccagagtcaaagaggaagtggatgaaggcgtgacctgtgaaatgctcctcaacacgatggataagtgagagggattcgggttgcgtgttcactgcccccaattcctaaagcaagttagaagtttttagcatttaaggtgtgaaatgctcctcaacacgatggataagtgagagagagtcaggttgcatgttcactgcccctaattcctaaagcaagttagaaatttttagcattttctttgaaacaattaagttcatgacaatggatgacacaagtttgaggtagtgtctagaattgttctcctgtttgtagctggatatttcaaagaaacattgcaggtattttataaaagttttaaaccttgaatgagagggtaacacctcaaacctatggattcattcacttgatattggcaaggtggcccacaatgagtgagtagtgatttttggatatttcaaaatagtctagaccagctagtgcttccacagtcaaagctggacatttttatgttgcattatatacacccatgatatttctaataatatatggttttaaacattaaagacaaatgtttttatacaaatgaattttctacaaaatttaaagctaccataatgcttttaattagttctaaattcaaccaaaaaatgttttactcttataaaaaggaaaactgagtaggaaatgaaatactagattagactagaaaataaggaataaatcgattttactttggtataggagcaaggttcacctttagatttttgtattctcttttaattatgctccttggcaggtatgaaattgccctggttacattccattattgcttattagtatttcactccataacccttttttctgctaaaactactctttttatatttgtaaaataattggcagagtgagaagaaacataaaatcagataaggcaaatgtgtacctgtaaggaatttgtactttttcataatgcccagtgattagtgagtatttcccttttgccagttgacaagatttttccaccctcgagcagcgtgagagatgcctctttaacacttgaaattcatttctatctggatacagaggcagatttttcttcattgcttagttgagcagtttgttttgctgccaacctgtctccacccctgtatttcaagatcattgataagccctaaattcaaattcttaagatatggaccttttattgaaaatatcacaagttcagaatccctatacaatgtgaatatgtggaaataatttcccagcaggaagagcattatattctctttgtaccagcaaattaatttaactcaactcacatgagatttaaattctgtgggctgtagtatgccatcattgtgactgaatttgtgcaatggtttcttaatttttttactgttatttaaagatgttttacataattcaataaaatgaaatgacttaaaattgctata

SEQ ID NO: 115170 - DNA, 2915 bp, Homo sapiens
  Payload ID: 2492
  Gene Symbol: CTCFL
  Gene Name: CCCTC-binding factor (zinc finger protein)-like
  ENST ID: ENST00000608425
  CDS Start-End: 191-2074
attccacccctccccccagtatctcagtgcctcctgtgggccctcctcccctccttatccattccccctcagatctcccaggccccctgcaggccctcgtgccctccttacttcccccccgggtctcccagcgccccctgcggggccctcctcccttcctcatccacttcaaccccaaggccaagtcattatggcagccactgagatctctgtcctttctgagcaattcaccaagatcaaagaactcgagttgatgccggaaaaaggcctgaaggaggaggaaaaagacggagtgtgcagagagaaagaccatcggagccctagtgagttggaggccgagcgtacctctggggccttccaggacagcgtcctggaggaagaagtggagctggtgctggccccctcggaggagagcgagaagtacatcctgaccctgcagacggtgcacttcacttctgaagctgtggagttgcaggatatgagcttgctgagcatacagcagcaagaaggggtgcaggtggtggtgcaacagcctggccctgggttgctgtggcttgaggaagggccccggcagagcctgcagcagtgtgtggccattagtatccagcaagagctgtactccccgcaagagatggaggtgttgcagttccacgctctagaggagaatgtgatggtggccagtgaagacagtaagttagcggtgagcctggctgaaactactggactgatcaagctcgaggaagagcaggagaagaaccagttattggctgaaagaacaaaggagcagctcttttttgtggaaacaatgtcaggagatgaaagaagtgacgaaattgttctcacagtttcaaattcaaatgtggaagaacaagaggatcaacctacagctggtcaagcagatgctgaaaaggccaaatctacaaaaaatcaaagaaagacaaagggagcaaaaggaaccttccactgtgatgtctgcatgttcacctcttctagaatgtcaagttttaatcgtcatatgaaaactcacaccagtgagaagcctcacctgtgtcacctctgcctgaaaaccttccgtacggtcactctgctgcggaaccatgttaacacccacacaggaaccaggccctacaagtgtaacgactgcaacatggcatttgtcaccagtggagaactcgtccgacacaggcgctataaacatactcatgagaaaccctttaaatgttccatgtgcaagtatgccagtgtggaggcaagtaaattgaagcgccatgtccgatcccacactggggagcgcccctttcagtgttgccagtgcagctatgccagcagagatacctacaagctgaaacgccacatgagaacgcactcaggtgagaagccttacgaatgccacatctgccacacccgcttcacccagagcgggaccatgaaaatacatattctgcagaaacacggcgaaaatgtccccaaataccagtgtccccattgtgccaccatcattgcacggaaaagcgacctacgtgtgcatatgcgcaacttgcatgcttacagcgctgcagagctgaaatgccgctactgttctgctgtcttccatgaacgctatgccctcattcagcaccagaaaactcataagaatgagaagaggttcaagtgcaaacactgcagttatgcctgcaagcaggaacgtcatatgaccgctcacattcgtacccacactggagagaaaccattcacctgcctttcttgcaataaatgtttccgacagaagcaacttctaaacgctcacttcaggaaataccacgatgcaaatttcatcccgactgtttacaaatgctccaagtgtggcaaaggcttttcccgctggattctctgggttgggaactcggaagtggctgaactgggtggtcctggctcagggccactcctgaggctgcagtcaggatgtccgccagggctgcatcatccgaaggctggactggggccagaggatccacttccaggacagctccgccacacaactgctggcaccggcctcagttccttgctacagggacctctctgcagggctgcttgagtgtcctcctgactcagagcaagtgagagagtgcaagtaggaagccatggtgccttttgcagtctagtcctaaaagcggcacaacagccagctgtgggggctcacacctgtaatcccagtacttcgggaggccaaggcaggtggataacttgaggccaggagctcaagaccagcctggccaacatggtgaaaccctgtctctactttaaaaaaaaaaaaagaaaatagctaggcgtggtagtgcacgcttgtaatcccagctacttgggtggttgggacgggaggatcacttgaacccaggagacagaggttgcagtgagctgagattgtgccactggcctccagcctgggcgacagagcaagactctgtctcaaaaaaaaaaaaaaagtggcacattctagtcacaagaaatgaaccatgaagtcccacccacactcgagtggggaatgaagtttcttttgaaaggaacagcatcaaagaatttcaggacatttaaaaaccactgcacatggctagctagatccttggaccatgtaggcttcagcctaactttataaaagttttataaaagttgaatttcctgaagttgactatttttttaaaaatatttcttcttaaaacagtagtgtagttgtgtttttctgagtagcacagtgggatagttctggaatgtcaaccctattagtttaaaatttcaaataaaagctgtggcagtgctcccaaaacaccattgctcatgcaaaaattgtgaagagttaaaattaacgagtagaattctaaagagaaaaaaactgctctttggtgcaagaaataaaaatgtagagaaaagaacaagtctgc

SEQ ID NO: 115171 - DNA, 1512 bp, Homo sapiens
  Payload ID: 2492
  Gene Symbol: CTCFL
  Gene Name: CCCTC-binding factor (zinc finger protein)-like
  ENST ID: ENST00000481655
  CDS Start-End: 191-1405
attccacccctccccccagtatctcagtgcctcctgtgggccctcctcccctccttatccattccccctcagatctcccaggccccctgcaggccctcgtgccctccttacttcccccccgggtctcccagcgccccctgcggggccctcctcccttcctcatccacttcaaccccaaggccaagtcattatggcagccactgagatctctgtcctttctgagcaattcaccaagatcaaagaactcgagttgatgccggaaaaaggcctgaaggaggaggaaaaagacggagtgtgcagagagaaagaccatcggagccctagtgagttggaggccgagcgtacctctggggccttccaggacagcgtcctggaggaagaagtggagctggtgctggccccctcggaggagagcgagaagtacatcctgaccctgcagacggtgcacttcacttctgaagctgtggagttgcaggatatgagcttgctgagcatacagcagcaagaaggggtgcaggtggtggtgcaacagcctggccctgggttgctgtggcttgaggaagggccccggcagagcctgcagcagtgtgtggccattagtatccagcaagagctgtactccccgcaagagatggaggtgttgcagttccacgctctagaggagaatgtgatggtggccagtgaagacagtaagttagcggtgagcctggctgaaactactggactgatcaagctcgaggaagagcaggagaagaaccagttattggctgaaagaacaaaggagcagctcttttttgtggaaacaatgtcaggagatgaaagaagtgacgaaattgttctcacagtttcaaattcaaatgtggaagaacaagaggatcaacctacagctggtcaagcagatgctgaaaaggccaaatctacaaaaaatcaaagaaagacaaagggagcaaaaggaaccttccactgtgatgtctgcatgttcacctcttctagaatgtcaagttttaatcgtcatatgaaaactcacaccagtgagaagcctcacctgtgtcacctctgcctgaaaaccttccgtacggtcactctgctgcggaaccatgttaacacccacacaggaaccaggccctacaagtgtaacgactgcaacatggcatttgtcaccagtggagaactcgtccgacacaggcgctataaacatactcatgagaaaccctttaaatgttccatgtgcaagtatgccagtgtggaggtaaagccattcttggacttgaagcttcatggcatcttagtagaggctgctgtacaagttactccaagtgtaactaacagtagaatctgttacaaacaggctttttattattcatataaaatttatgcaggaaataatatgcattctcttttatgaagttaaaatagaaaattggatttctttgtttctttgattactaattagtgaaaataatatgtaaaggtttacaaattacaaataaaccatctgtggtcaagaaataa

SEQ ID NO: 115172 - DNA, 2135 bp, Homo sapiens
  Payload ID: 2492
  Gene Symbol: CTCFL
  Gene Name: CCCTC-binding factor (zinc finger protein)-like
  Uniprot ID: Q8NI51
  ENST ID: ENST00000608903
  CDS Start-End: 113-1012
ggctgcagcacgcggtgcacgaggcagagcccacaagccaaagacggagtgggccgagcattccggccacgccttccgcggagcaaaaggaaccttccactgtgatgtctgcatgttcacctcttctagaatgtcaagttttaatcgtcatatgaaaactcacaccagtgagaagcctcacctgtgtcacctctgcctgaaaaccttccgtacggtcactctgctgcggaaccatgttaacacccacacaggaaccaggccctacaagtgtaacgactgcaacatggcatttgtcaccagtggagaactcgtccgacacaggcgctataaacatactcatgagaaaccctttaaatgttccatgtgcaagtatgccagtgtggaggcaagtaaattgaagcgccatgtccgatcccacactggggagcgcccctttcagtgttgccagtgcagctatgccagcagagatacctacaagctgaaacgccacatgagaacgcactcaggtgagaagccttacgaatgccacatctgccacacccgcttcacccagagcgggaccatgaaaatacatattctgcagaaacacggcgaaaatgtccccaaataccagtgtccccattgtgccaccatcattgcacggaaaagcgacctacgtgtgcatatgcgcaacttgcatgcttacagcgctgcagagctgaaatgccgctactgttctgctgtcttccatgaacgctatgccctcattcagcaccagaaaactcataagaatgagaagaggttcaagtgcaaacactgcagttatgcctgcaagcaggaacgtcatatgaccgctcacattcgtacccacactggagagaaaccattcacctgcctttcttgcaataaatgtttccgacagaagcaacttctaaacgctcacttcaggaaataccacgatgcaaatttcatcccgactgtttacaaatgctccaagtgtggcaaaggcttttcccgctgggtgttgtattagttatctatttctgtatgacagattacctcaaaatggagtggcttaaaaccacaaacatttatcacctgacagattctctgggttgggaactcggaagtggctgaactgggtggtcctggctcagggccactcctgaggctgcagtcaggatgtccgccagggctgcatcatccgaaggctggactggggccagaggatccacttccaggacagctccgccacacaactgctggcaccggcctcagttccttgctacagggacctctctgcagggctgcttgagtgtcctcctgactcagagcaagtgagagagtgcaagtaggaagccatggtgccttttgcagtctagtcctaaaagcggcacaacagccagctgtgggggctcacacctgtaatcccagtacttcgggaggccaaggcaggtggataacttgaggccaggagctcaagaccagcctggccaacatggtgaaaccctgtctctactttaaaaaaaaaaaaagaaaatagctaggcgtggtagtgcacgcttgtaatcccagctacttgggtggttgggacgggaggatcacttgaacccaggagacagaggttgcagtgagctgagattgtgccactggcctccagcctgggcgacagagcaagactctgtctcaaaaaaaaaaaaaaagtggcacattctagtcacaagaaatgaaccatgaagtcccacccacactcgagtggggaatgaagtttcttttgaaaggaacagcatcaaagaatttcaggacatttaaaaaccactgcacatggctagctagatccttggaccatgtaggcttcagcctaactttataaaagttttataaaagttgaatttcctgaagttgactatttttttaaaaatatttcttcttaaaacagtagtgtagttgtgtttttctgagtagcacagtgggatagttctggaatgtcaaccctattagtttaaaatttcaaataaaagctgtggcagtgctcccaaaacaccattgctcatgcaaaaattgtgaagagttaaaattaacgagtagaattctaaagagaaaaaaactgctctttggtgcaagaaataaaaatgtagagaaaagaacaagtctgc

SEQ ID NO: 115173 - DNA, 4040 bp, Homo sapiens
  Payload ID: 2492
  Gene Symbol: CTCFL
  Gene Name: CCCTC-binding factor (zinc finger protein)-like
  Uniprot ID: Q8NI51
  ENST ID: ENST00000608263
  CDS Start-End: 663-2654
agggtaaagcaggggccctgccaggcctccgagggagtgtgcttggtctggccgagggctgcttggccaagtctgggtgggctcgaggccactaggcccaaagcctgcctggctctgagggtgctaggtctagaaccgtgcacgaggggaatgcctgctcgggcccgaacctcgctgggcgccgggtgtgcactggcccggggcctgcttggacctgaaacttgctaggcccaggatatgcactggccgagagcctgctgggcccaaaccttactaggcccaggatgttcactgactgaaccggctcaggcctaaccttgctaggcccaggatatgcactgggccagagtgtgctcaggcggaaccttgccaggcgcaggatgtgtgctggccctaagcctgctgaggcccaaacctgttcgttctagggttttgtacaaaatcctgctttagcctaaatcctgcttagccttgaccccctcctagacccaagccagatcagcattgttctgaccctactaagtccaaaaccttttgaggccagaccttgtttcaactccaaagcctgctaggttccagcaccccccgcatccctcctcataccacccccttctcccccctatggaaaccgcttgcttatttttcaaacaggccaagtcattatggcagccactgagatctctgtcctttctgagcaattcaccaagatcaaagaactcgagttgatgccggaaaaaggcctgaaggaggaggaaaaagacggagtgtgcagagagaaagaccatcggagccctagtgagttggaggccgagcgtacctctggggccttccaggacagcgtcctggaggaagaagtggagctggtgctggccccctcggaggagagcgagaagtacatcctgaccctgcagacggtgcacttcacttctgaagctgtggagttgcaggatatgagcttgctgagcatacagcagcaagaaggggtgcaggtggtggtgcaacagcctggccctgggttgctgtggcttgaggaagggccccggcagagcctgcagcagtgtgtggccattagtatccagcaagagctgtactccccgcaagagatggaggtgttgcagttccacgctctagaggagaatgtgatggtggccagtgaagacagtaagttagcggtgagcctggctgaaactactggactgatcaagctcgaggaagagcaggagaagaaccagttattggctgaaagaacaaaggagcagctcttttttgtggaaacaatgtcaggagatgaaagaagtgacgaaattgttctcacagtttcaaattcaaatgtggaagaacaagaggatcaacctacagctggtcaagcagatgctgaaaaggccaaatctacaaaaaatcaaagaaagacaaagggagcaaaaggaaccttccactgtgatgtctgcatgttcacctcttctagaatgtcaagttttaatcgtcatatgaaaactcacaccagtgagaagcctcacctgtgtcacctctgcctgaaaaccttccgtacggtcactctgctgcggaaccatgttaacacccacacaggaaccaggccctacaagtgtaacgactgcaacatggcatttgtcaccagtggagaactcgtccgacacaggcgctataaacatactcatgagaaaccctttaaatgttccatgtgcaagtatgccagtgtggaggcaagtaaattgaagcgccatgtccgatcccacactggggagcgcccctttcagtgttgccagtgcagctatgccagcagagatacctacaagctgaaacgccacatgagaacgcactcaggtgagaagccttacgaatgccacatctgccacacccgcttcacccagagcgggaccatgaaaatacatattctgcagaaacacggcgaaaatgtccccaaataccagtgtccccattgtgccaccatcattgcacggaaaagcgacctacgtgtgcatatgcgcaacttgcatgcttacagcgctgcagagctgaaatgccgctactgttctgctgtcttccatgaacgctatgccctcattcagcaccagaaaactcataagaatgagaagaggttcaagtgcaaacactgcagttatgcctgcaagcaggaacgtcatatgaccgctcacattcgtacccacactggagagaaaccattcacctgcctttcttgcaataaatgtttccgacagaagcaacttctaaacgctcacttcaggaaataccacgatgcaaatttcatcccgactgtttacaaatgctccaagtgtggcaaaggcttttcccgctggattaacctgcacagacattcggagaagtgtggatcaggggaagcaaagtcggctgcttcaggaaagggaagaagaacaagaaagaggaagcagaccatcctgaaggaagccacaaagggtcagaaggaagctgcgaagggatggaaggaagccgcgaacggagacgaagctgctgctgaggaggcttccaccacgaagggagaacagttcccaggagagatgtttcctgtcgcctgcagagaaaccacagccagagtcaaagaggaagtggatgaaggcgtgacctgtgaaatgctcctcaacacgatggataagtgagagggattcgggttgcgtgttcactgcccccaattcctaaagcaagttagaagtttttagcatttaaggtgtgaaatgctcctcaacacgatggataagtgagagagagtcaggttgcatgttcactgcccctaattcctaaagcaagttagaaatttttagcattttctttgaaacaattaagttcatgacaatggatgacacaagtttgaggtagtgtctagaattgttctcctgtttgtagctggatatttcaaagaaacattgcaggtattttataaaagttttaaaccttgaatgagagggtaacacctcaaacctatggattcattcacttgatattggcaaggtggcccacaatgagtgagtagtgatttttggatatttcaaaatagtctagaccagctagtgcttccacagtcaaagctggacatttttatgttgcattatatacacccatgatatttctaataatatatggttttaaacattaaagacaaatgtttttatacaaatgaattttctacaaaatttaaagctaccataatgcttttaattagttctaaattcaaccaaaaaatgttttactcttataaaaaggaaaactgagtaggaaatgaaatactagattagactagaaaataaggaataaatcgattttactttggtataggagcaaggttcacctttagatttttgtattctcttttaattatgctccttggcaggtatgaaattgccctggttacattccattattgcttattagtatttcactccataacccttttttctgctaaaactactctttttatatttgtaaaataattggcagagtgagaagaaacataaaatcagataaggcaaatgtgtacctgtaaggaatttgtactttttcataatgcccagtgattagtgagtatttcccttttgccagttgacaagatttttccaccctcgagcagcgtgagagatgcctctttaacacttgaaattcatttctatctggatacagaggcagatttttcttcattgcttagttgagcagtttgttttgctgccaacctgtctccacccctgtatttcaagatcattgataagccctaaattcaaattcttaagatatggaccttttattgaaaatatcacaagttcagaatccctatacaatgtgaatatgtggaaataatttcccagcaggaagagcattatattctctttgtaccagcaaattaatttaactcaactcacatgagatttaaattctgtgggctgtagtatgccatcattgtgactgaatttgtgcaatggtttcttaatttttttactgttatttaaagatgttttacataattcaataaaatgaaatgacttaaaattgctata

SEQ ID NO: 115174 - DNA, 1984 bp, Homo sapiens
  Payload ID: 2492
  Gene Symbol: CTCFL
  Gene Name: CCCTC-binding factor (zinc finger protein)-like
  ENST ID: ENST00000608158
  CDS Start-End: 663-1877
agggtaaagcaggggccctgccaggcctccgagggagtgtgcttggtctggccgagggctgcttggccaagtctgggtgggctcgaggccactaggcccaaagcctgcctggctctgagggtgctaggtctagaaccgtgcacgaggggaatgcctgctcgggcccgaacctcgctgggcgccgggtgtgcactggcccggggcctgcttggacctgaaacttgctaggcccaggatatgcactggccgagagcctgctgggcccaaaccttactaggcccaggatgttcactgactgaaccggctcaggcctaaccttgctaggcccaggatatgcactgggccagagtgtgctcaggcggaaccttgccaggcgcaggatgtgtgctggccctaagcctgctgaggcccaaacctgttcgttctagggttttgtacaaaatcctgctttagcctaaatcctgcttagccttgaccccctcctagacccaagccagatcagcattgttctgaccctactaagtccaaaaccttttgaggccagaccttgtttcaactccaaagcctgctaggttccagcaccccccgcatccctcctcataccacccccttctcccccctatggaaaccgcttgcttatttttcaaacaggccaagtcattatggcagccactgagatctctgtcctttctgagcaattcaccaagatcaaagaactcgagttgatgccggaaaaaggcctgaaggaggaggaaaaagacggagtgtgcagagagaaagaccatcggagccctagtgagttggaggccgagcgtacctctggggccttccaggacagcgtcctggaggaagaagtggagctggtgctggccccctcggaggagagcgagaagtacatcctgaccctgcagacggtgcacttcacttctgaagctgtggagttgcaggatatgagcttgctgagcatacagcagcaagaaggggtgcaggtggtggtgcaacagcctggccctgggttgctgtggcttgaggaagggccccggcagagcctgcagcagtgtgtggccattagtatccagcaagagctgtactccccgcaagagatggaggtgttgcagttccacgctctagaggagaatgtgatggtggccagtgaagacagtaagttagcggtgagcctggctgaaactactggactgatcaagctcgaggaagagcaggagaagaaccagttattggctgaaagaacaaaggagcagctcttttttgtggaaacaatgtcaggagatgaaagaagtgacgaaattgttctcacagtttcaaattcaaatgtggaagaacaagaggatcaacctacagctggtcaagcagatgctgaaaaggccaaatctacaaaaaatcaaagaaagacaaagggagcaaaaggaaccttccactgtgatgtctgcatgttcacctcttctagaatgtcaagttttaatcgtcatatgaaaactcacaccagtgagaagcctcacctgtgtcacctctgcctgaaaaccttccgtacggtcactctgctgcggaaccatgttaacacccacacaggaaccaggccctacaagtgtaacgactgcaacatggcatttgtcaccagtggagaactcgtccgacacaggcgctataaacatactcatgagaaaccctttaaatgttccatgtgcaagtatgccagtgtggaggtaaagccattcttggacttgaagcttcatggcatcttagtagaggctgctgtacaagttactccaagtgtaactaacagtagaatctgttacaaacaggctttttattattcatataaaatttatgcaggaaataatatgcattctcttttatgaagttaaaatagaaaattggatttctttgtttctttgattactaattagtgaaaataatatgtaaaggtttacaaattacaaataaaccatctgtggtcaagaaataa

SEQ ID NO: 115175 - DNA, 2241 bp, Homo sapiens
  Payload ID: 2492
  Gene Symbol: CTCFL
  Gene Name: CCCTC-binding factor (zinc finger protein)-like
  ENST ID: ENST00000608720
  CDS Start-End: 663-1943
agggtaaagcaggggccctgccaggcctccgagggagtgtgcttggtctggccgagggctgcttggccaagtctgggtgggctcgaggccactaggcccaaagcctgcctggctctgagggtgctaggtctagaaccgtgcacgaggggaatgcctgctcgggcccgaacctcgctgggcgccgggtgtgcactggcccggggcctgcttggacctgaaacttgctaggcccaggatatgcactggccgagagcctgctgggcccaaaccttactaggcccaggatgttcactgactgaaccggctcaggcctaaccttgctaggcccaggatatgcactgggccagagtgtgctcaggcggaaccttgccaggcgcaggatgtgtgctggccctaagcctgctgaggcccaaacctgttcgttctagggttttgtacaaaatcctgctttagcctaaatcctgcttagccttgaccccctcctagacccaagccagatcagcattgttctgaccctactaagtccaaaaccttttgaggccagaccttgtttcaactccaaagcctgctaggttccagcaccccccgcatccctcctcataccacccccttctcccccctatggaaaccgcttgcttatttttcaaacaggccaagtcattatggcagccactgagatctctgtcctttctgagcaattcaccaagatcaaagaactcgagttgatgccggaaaaaggcctgaaggaggaggaaaaagacggagtgtgcagagagaaagaccatcggagccctagtgagttggaggccgagcgtacctctggggccttccaggacagcgtcctggaggaagaagtggagctggtgctggccccctcggaggagagcgagaagtacatcctgaccctgcagacggtgcacttcacttctgaagctgtggagttgcaggatatgagcttgctgagcatacagcagcaagaaggggtgcaggtggtggtgcaacagcctggccctgggttgctgtggcttgaggaagggccccggcagagcctgcagcagtgtgtggccattagtatccagcaagagctgtactccccgcaagagatggaggtgttgcagttccacgctctagaggagaatgtgatggtggccagtgaagacagtaagttagcggtgagcctggctgaaactactggactgatcaagctcgaggaagagcaggagaagaaccagttattggctgaaagaacaaaggagcagctcttttttgtggaaacaatgtcaggagatgaaagaagtgacgaaattgttctcacagtttcaaattcaaatgtggaagaacaagaggatcaacctacagctggtcaagcagatgctgaaaaggccaaatctacaaaaaatcaaagaaagacaaagggagcaaaaggaaccttccactgtgatgtctgcatgttcacctcttctagaatgtcaagttttaatcgtcatatgaaaactcacaccagtgagaagcctcacctgtgtcacctctgcctgaaaaccttccgtacggtcactctgctgcggaaccatgttaacacccacacaggaaccaggccctacaagtgtaacgactgcaacatggcatttgtcaccagtggagaactcgtccgacacaggcgctataaacatactcatgagaaaccctttaaatgttccatgtgcaagtatgccagtgtggaggcaagtaaattgaagcgccatgtccgatcccacactggggagcgcccctttcagtgttgccagtgcagctatgccagcagagatacctacaagctgaaacgccacatgagaacgcactcaggtaagggctctggtgctgaaggcctgatacctacagtgttaactcttaaagcaagctttaaaaaattactttttattggcacaattaaagttcaaaggtaaaagtggatttttgcgtgccttcatgataaaagaatcttgatctgtacttttacctttatttagcagtaagagagtctgcatagatactgtgccacaaccccactgtgtggagtaaaacacaaagtatttgcttccgtagatttttcaggtgagaagccttacgaatgccacatctgccacacccgcttcacccagagcgggaccatgaaaatacatattctgcagaaacacggcgaaaatgtccccaaataccagtgtccccattgtgccaccatcattgcacggaaaagcgacctac

SEQ ID NO: 115176 - DNA, 2749 bp, Homo sapiens
  Payload ID: 2492
  Gene Symbol: CTCFL
  Gene Name: CCCTC-binding factor (zinc finger protein)-like
  Uniprot ID: Q8NI51
  ENST ID: ENST00000608440
  CDS Start-End: 53-2050
ttctcccccctatggaaaccgcttgcttatttttcaaacaggccaagtcattatggcagccactgagatctctgtcctttctgagcaattcaccaagatcaaagaactcgagttgatgccggaaaaaggcctgaaggaggaggaaaaagacggagtgtgcagagagaaagaccatcggagccctagtgagttggaggccgagcgtacctctggggccttccaggacagcgtcctggaggaagaagtggagctggtgctggccccctcggaggagagcgagaagtacatcctgaccctgcagacggtgcacttcacttctgaagctgtggagttgcaggatatgagcttgctgagcatacagcagcaagaaggggtgcaggtggtggtgcaacagcctggccctgggttgctgtggcttgaggaagggccccggcagagcctgcagcagtgtgtggccattagtatccagcaagagctgtactccccgcaagagatggaggtgttgcagttccacgctctagaggagaatgtgatggtggccagtgaagacagtaagttagcggtgagcctggctgaaactactggactgatcaagctcgaggaagagcaggagaagaaccagttattggctgaaagaacaaaggagcagctcttttttgtggaaacaatgtcaggagatgaaagaagtgacgaaattgttctcacagtttcaaattcaaatgtggaagaacaagaggatcaacctacagctggtcaagcagatgctgaaaaggccaaatctacaaaaaatcaaagaaagacaaagggagcaaaaggaaccttccactgtgatgtctgcatgttcacctcttctagaatgtcaagttttaatcgtcatatgaaaactcacaccagtgagaagcctcacctgtgtcacctctgcctgaaaaccttccgtacggtcactctgctgcggaaccatgttaacacccacacaggaaccaggccctacaagtgtaacgactgcaacatggcatttgtcaccagtggagaactcgtccgacacaggcgctataaacatactcatgagaaaccctttaaatgttccatgtgcaagtatgccagtgtggaggcaagtaaattgaagcgccatgtccgatcccacactggggagcgcccctttcagtgttgccagtgcagctatgccagcagagatacctacaagctgaaacgccacatgagaacgcactcaggtgagaagccttacgaatgccacatctgccacacccgcttcacccagagcgggaccatgaaaatacatattctgcagaaacacggcgaaaatgtccccaaataccagtgtccccattgtgccaccatcattgcacggaaaagcgacctacgtgtgcatatgcgcaacttgcatgcttacagcgctgcagagctgaaatgccgctactgttctgctgtcttccatgaacgctatgccctcattcagcaccagaaaactcataagaatgagaagaggttcaagtgcaaacactgcagttatgcctgcaagcaggaacgtcatatgaccgctcacattcgtacccacactggagagaaaccattcacctgcctttcttgcaataaatgtttccgacagaagcaacttctaaacgctcacttcaggaaataccacgatgcaaatttcatcccgactgtttacaaatgctccaagtgtggcaaaggcttttcccgctggattaacctgcacagacattcggagaagtgtggatcaggggaagcaaagtcggctgcttcaggaaagggaagaagaacaagaaagaggaagcagaccatcctgaaggaagccacaaagggtcagaaggaagctgcgaagggatggaaggaagccgcgaacggagacggtgtgatctcagctcaccgcaacctctgcctcctgggttcaagtgattctcatgcctcagtctccggagctgggattacagatgcccgccaccacgcctggctaattgttctattatttttagtagagatggggttttaccatgtctctcactcctgacctcaagtgatctgcccgcctcggcctcccaaagtggtgggattacaggcatgagcccctgtgcctggcctgatggcaccagttttgtggatctcagtgtttcttttcatatccaagaactgggtcttcttgtctccctccatccaccaaaaaaaaaaaaaaaaaaatacttcaaggaagcatggacaaaaatatcctcagacaagttagaacatgagacagtcacgttcttcagtgtggcgctctgtggatgtttgggaaagtaatttggaaaatgagtagagcagggctccccaaccccccagccgtggacctgtgggctgttaggaactgggcctcccagcaggaggtgagcagtgggtgagggagtgaagctttgtattgacagccgctccccatcgggcgcatcaccgcctgagctccgcctcctgtcagatcagcggcagcgttagattctcatgagtgtgaaccctgttgtgaactctgcacgtgcaagggatctaggctgcacactccttacgagaatctaatgcccgacgatctgtcactgtctcccatcacccccagatgggactgtctagatgcaggaaaacaagcccagggctcccactgattctacattatggtgagctgtataattatttcattatatatcacaatgtaataataaaaataaagtacataagaaatgtaatgtgc

SEQ ID NO: 115177 - DNA, 2051 bp, Homo sapiens
  Payload ID: 2493
  Gene Symbol: CCDC169-SOHLH2
  Gene Name: CCDC169-SOHLH2 readthrough
  ENST ID: ENST00000511166
  CDS Start-End: 303-1811
aggtgcgaccggggggcggttggggttcaccgcctcgtgccgtactggcttctgggtggcccttaatgtcttgtgctctaaggtgctgaggggaaagacgcgggaggtctctggcctgacactatgaaggaagagagaaactacaacttcgacggtgtgagcaccaaccgcctgaaacagcagttgctggaagaagtccgcaagaagtagtgaatggaaaacccgttatgagacacaacttgaattaaatgatgaactagaaaagcaaattgtttatctcaaggagaaagtggaaaaaatccatggaaactcttcaggaatccttaaacacattacttaaacagctagaagaagaaaagaagactcttgaaagtcaagtgaaatactatgcacttaaactggaacaagaatcaaaggcttaccagaagatcaacaatgaacgccgtacatacctagctgaaatgtctcagggttctggtttacatcaagtttctaaaaggcaacaggtggatcaactgcctaggatgcaagagaatctagtgaaaaccctcctcttaaaagaagaattggaccctttaaaggcaaaaatagacatcttattagttggagatgtcactgtgggctacctggctgatactgtacagaaactatttgcaaacatagcagaagtcaccatcaccatcagtgacacgaaggaggcagcagcgcttttggatgattgcatattcaacatggttctcttgaaggtgccttcttcactaagtgccgaggagctggaagccatcaagttaattagatttggcaaaaagaaaaatacacattcactgtttgtttttataatccctgaaaattttaaaggttgtatttcagggcatggaatggatattgctttaactgaaccactgacaatggaaaaaatgagtaatgtggtaaaatactggacaacatgtccctcaaacactgttaagactgaaaacgcaactgggcctgaagaacttggattgcccctgcagaggtcctacagcgaacacctgggatattttcctactgatctatttgcctgctctgaatctttaaggaatggcaatgggcttgaattaaatgcttcgttgtcagagttcgagaaaaacaaaaagatctctcttcttcattcaagcaaggaaaaactaagaagggaaagaatcaaatattgctgtgagcagctgcgtactctcttgccgtatgtaaaagggagaaagaatgatgcggcttcagttcttgaggcaacagttgattatgtgaaatatatccgggagaaaatctctccagccgttatggcccagattacagaagcacttcagagcaacatgaggttttgtaagaaacaacaaacacccattgagctgtctctcccaggcactgtcatggcacagcgggaaaacagtgtgatgagcacttactcccctgagagagggctccaattcctgactaatacgtgctggaatgggtgctccactcctgatgcagagagctccttggatgaagctgtgagagttccatcaagctccgcctcagagaatgctattggtgatccatataaaactcacatttccagtgcagcgctgtctctgaattccttgcatactgtcagatattattctaaagtcaccccttcctacgatgcaactgctgtaacaaatcagaacatttcaattcatttaccttcagccatgcccccggtctcaaagcttctccctcggcactgcacttctgggttgggccagacgtgcactacacatcccaactgtctgcaacagttttgggcgtattaaaagcacatgtttgaaattcacactctcaaccacctactgggcgcagtttgacaatctaggaaaagtggaacaaagaatgattttgaaagctccacccaaagacctaatatcaaaagagttggcatggtttggcttctgataaatgcactcaaagcttctgcagatagaaagaccagcagcgaaaaagctggccacacactgtcactcatcttcatacacacttggatccccgccagccag

SEQ ID NO: 115178 - DNA, 1641 bp, Homo sapiens
  Payload ID: 2494
  Gene Symbol: CNBP
  Gene Name: CCHC-type zinc finger, nucleic acid binding protein
  Uniprot ID: P62633
  ENST ID: ENST00000451728
  CDS Start-End: 139-675
cgtgtgcagacccgcgtgtggcgcaggcaaggaccctcaaaataaacagcctctaccttgcgagccgtcttccccaggcctgcgtccgagtctccgccgctgcgggcccgctccgacgcggaagatctgactgcagccatgagcagcaatgagtgcttcaagtgtggacgatctggccactgggcccgggaatgtcctactggtggaggccgtggtcgtggaatgagaagccgtggcagaggtggttttacctcggatagaggtttccagtttgtttcctcgtctcttccagacatttgttatcgctgtggtgagtctggtcatcttgccaaggattgtgatcttcaggaggatgaagcctgctataactgcggtagaggtggccacattgccaaggactgcaaggagcccaagagagagcgagagcaatgctgctacaactgtggcaaaccaggccatctggctcgtgactgcgaccatgcagatgagcagaaatgctattcttgtggagaattcggacacattcaaaaagactgcaccaaagtgaagtgctataggtgtggtgaaactggtcatgtagccatcaactgcagcaagacaagtgaagtcaactgttaccgctgtggcgagtcagggcaccttgcacgggaatgcacaattgaggctacagcctaattattttcctttgtcgcccctcctttttctgattgatggttgtattattttctctgaatcctcttcactggccaaaggttggcagatagaggcaactcccaggccagtgagctttacttgccgtgtaaaaggaggaaaggggtggaaaaaaaccgactttctgcatttaactacaaaaaaagtttatgtttagtttggtagaggtgttatgtataatgctttgttaaagaaccccctttccgtgccactggtgaatagggattgatgaatgggaagagttgagtcagaccagtaagcccgtcctgggttccttgaacatgttcccatgtaggaggtaaaaccaattctggaagtgtctatgaacttccataaataactttaattttagtataatgatggtcttggattgtctgacctcagtagctattaaataacatcaagtaacatctgtatcaggccctacatagaacatacagttgagtgggagtaaacaaaaagataaacatgcgtgttaatggctgttcgagagaaatcggaataaaagcctaaacaggaacaacttcatcacagtgttgatgttggacacatagatggtgatggcaaaggtttagaacacattattttcaaagactaaatctaaaacccagagtaaacatcaatgctcagagttagcataatttggagctattcaggaattgcagagaaatgcattttcacagaaatcaagatgttatttttgtatactatatcacttagacaactgtgtttcatttgctgtaatcagtttttaaaagtcagatggaaagagcaactgaagtcctagaaaatagaaatgtaattttaaactattccaataaagctggaggaggaaggggagtttgactaaagttctttttgtttgtttcaaattttcattaatgtatatagtgcaaaataccatattaaagaggggaatgtggaggactg

SEQ ID NO: 115179 - DNA, 1623 bp, Homo sapiens
  Payload ID: 2494
  Gene Symbol: CNBP
  Gene Name: CCHC-type zinc finger, nucleic acid binding protein
  Uniprot ID: P62633
  ENST ID: ENST00000446936
  CDS Start-End: 139-657
cgtgtgcagacccgcgtgtggcgcaggcaaggaccctcaaaataaacagcctctaccttgcgagccgtcttccccaggcctgcgtccgagtctccgccgctgcgggcccgctccgacgcggaagatctgactgcagccatgagcagcaatgagtgcttcaagtgtggacgatctggccactgggcccgggaatgtcctactggtggaggccgtggtcgtggaatgagaagccgtggcagaggtttccagtttgtttcctcgtctcttccagacatttgttatcgctgtggtgagtctggtcatcttgccaaggattgtgatcttcaggaggatgttgaagcctgctataactgcggtagaggtggccacattgccaaggactgcaaggagcccaagagagagcgagagcaatgctgctacaactgtggcaaaccaggccatctggctcgtgactgcgaccatgcagatgagcagaaatgctattcttgtggagaattcggacacattcaaaaagactgcaccaaagtgaagtgctataggtgtggtgaaactggtcatgtagccatcaactgcagcaagacaagtgaagtcaactgttaccgctgtggcgagtcagggcaccttgcacgggaatgcacaattgaggctacagcctaattattttcctttgtcgcccctcctttttctgattgatggttgtattattttctctgaatcctcttcactggccaaaggttggcagatagaggcaactcccaggccagtgagctttacttgccgtgtaaaaggaggaaaggggtggaaaaaaaccgactttctgcatttaactacaaaaaaagtttatgtttagtttggtagaggtgttatgtataatgctttgttaaagaaccccctttccgtgccactggtgaatagggattgatgaatgggaagagttgagtcagaccagtaagcccgtcctgggttccttgaacatgttcccatgtaggaggtaaaaccaattctggaagtgtctatgaacttccataaataactttaattttagtataatgatggtcttggattgtctgacctcagtagctattaaataacatcaagtaacatctgtatcaggccctacatagaacatacagttgagtgggagtaaacaaaaagataaacatgcgtgttaatggctgttcgagagaaatcggaataaaagcctaaacaggaacaacttcatcacagtgttgatgttggacacatagatggtgatggcaaaggtttagaacacattattttcaaagactaaatctaaaacccagagtaaacatcaatgctcagagttagcataatttggagctattcaggaattgcagagaaatgcattttcacagaaatcaagatgttatttttgtatactatatcacttagacaactgtgtttcatttgctgtaatcagtttttaaaagtcagatggaaagagcaactgaagtcctagaaaatagaaatgtaattttaaactattccaataaagctggaggaggaaggggagtttgactaaagttctttttgtttgtttcaaattttcattaatgtatatagtgcaaaataccatattaaagaggggaatgtggaggactg

SEQ ID NO: 115180 - DNA, 1664 bp, Homo sapiens
  Payload ID: 2494
  Gene Symbol: CNBP
  Gene Name: CCHC-type zinc finger, nucleic acid binding protein
  Uniprot ID: P62633
  ENST ID: ENST00000422453
  CDS Start-End: 162-695
gtgcgcagcggcgtatgtggggccgtgtgcagacccgcgtgtggcgcaggcaaggaccctcaaaataaacagcctctaccttgcgagccgtcttccccaggcctgcgtccgagtctccgccgctgcgggcccgctccgacgcggaagatctgactgcagccatgagcagcaatgagtgcttcaagtgtggacgatctggccactgggcccgggaatgtcctactggtggaggccgtggtcgtggaatgagaagccgtggcagaggtggttttacctcggatagaggtttccagtttgtttcctcgtctcttccagacatttgttatcgctgtggtgagtctggtcatcttgccaaggattgtgatcttcaggaggatgcctgctataactgcggtagaggtggccacattgccaaggactgcaaggagcccaagagagagcgagagcaatgctgctacaactgtggcaaaccaggccatctggctcgtgactgcgaccatgcagatgagcagaaatgctattcttgtggagaattcggacacattcaaaaagactgcaccaaagtgaagtgctataggtgtggtgaaactggtcatgtagccatcaactgcagcaagacaagtgaagtcaactgttaccgctgtggcgagtcagggcaccttgcacgggaatgcacaattgaggctacagcctaattattttcctttgtcgcccctcctttttctgattgatggttgtattattttctctgaatcctcttcactggccaaaggttggcagatagaggcaactcccaggccagtgagctttacttgccgtgtaaaaggaggaaaggggtggaaaaaaaccgactttctgcatttaactacaaaaaaagtttatgtttagtttggtagaggtgttatgtataatgctttgttaaagaaccccctttccgtgccactggtgaatagggattgatgaatgggaagagttgagtcagaccagtaagcccgtcctgggttccttgaacatgttcccatgtaggaggtaaaaccaattctggaagtgtctatgaacttccataaataactttaattttagtataatgatggtcttggattgtctgacctcagtagctattaaataacatcaagtaacatctgtatcaggccctacatagaacatacagttgagtgggagtaaacaaaaagataaacatgcgtgttaatggctgttcgagagaaatcggaataaaagcctaaacaggaacaacttcatcacagtgttgatgttggacacatagatggtgatggcaaaggtttagaacacattattttcaaagactaaatctaaaacccagagtaaacatcaatgctcagagttagcataatttggagctattcaggaattgcagagaaatgcattttcacagaaatcaagatgttatttttgtatactatatcacttagacaactgtgtttcatttgctgtaatcagtttttaaaagtcagatggaaagagcaactgaagtcctagaaaatagaaatgtaattttaaactattccaataaagctggaggaggaaggggagtttgactaaagttctttttgtttgtttcaaattttcattaatgtatatagtgcaaaataccatattaaagaggggaatgtggaggactgaaa

SEQ ID NO: 115181 - DNA, 1040 bp, Homo sapiens
  Payload ID: 2494
  Gene Symbol: CNBP
  Gene Name: CCHC-type zinc finger, nucleic acid binding protein
  Uniprot ID: P62633
  ENST ID: ENST00000441626
  CDS Start-End: 150-689
gtatgtggggccgtgtgcagacccgcgtgtggcgcaggcaaggaccctcaaaataaacagcctctaccttgcgagccgtcttccccaggcctgcgtccgagtctccgccgctgcgggcccgctccgacgcggaagatctgactgcagccatgagcagcaatgagtgcttcaagtgtggacgatctggccactgggcccgggaatgtcctactggtggaggccgtggtcgtggaatgagaagccgtggcagaggtggttttacctcggatagaggtttccagtttgtttcctcgtctcttccagacatttgttatcgctgtggtgagtctggtcatcttgccaaggattgtgatcttcaggaggatgttgaagcctgctataactgcggtagaggtggccacattgccaaggactgcaaggagcccaagagagagcgagagcaatgctgctacaactgtggcaaaccaggccatctggctcgtgactgcgaccatgcagatgagcagaaatgctattcttgtggagaattcggacacattcaaaaagactgcaccaaagtgaagtgctataggtgtggtgaaactggtcatgtagccatcaactgcagcaagacaagtgaagtcaactgttaccgctgtggcgagtcagggcaccttgcacgggaatgcacaattgaggctacagcctaattattttcctttgtcgcccctcctttttctgattgatggttgtattattttctctgaatcctcttcactggccaaaggttggcagatagaggcaactcccaggccagtgagctttacttgccgtgtaaaaggaggaaaggggtggaaaaaaaccgactttctgcatttaactacaaaaaaagtttatgtttagtttggtagaggtgttatgtataatgctttgttaaagaaccccctttccgtgccactggtgaatagggattgatgaatgggaagagttgagtcagaccagtaagcccgtcctgggttccttgaacatgttcccatgtaggaggtaaaaccaattctgga

SEQ ID NO: 115182 - DNA, 1626 bp, Homo sapiens
  Payload ID: 2494
  Gene Symbol: CNBP
  Gene Name: CCHC-type zinc finger, nucleic acid binding protein
  Uniprot ID: P62633
  ENST ID: ENST00000502976
  CDS Start-End: 145-657
tggggccgtgtgcagacccgcgtgtggcgcaggcaaggaccctcaaaataaacagcctctaccttgcgagccgtcttccccaggcctgcgtccgagtctccgccgctgcgggcccgctccgacgcggaagatctgactgcagccatgagcagcaatgagtgcttcaagtgtggacgatctggccactgggcccgggaatgtcctactggtggaggccgtggtcgtggaatgagaagccgtggcagaggtttccagtttgtttcctcgtctcttccagacatttgttatcgctgtggtgagtctggtcatcttgccaaggattgtgatcttcaggaggatgcctgctataactgcggtagaggtggccacattgccaaggactgcaaggagcccaagagagagcgagagcaatgctgctacaactgtggcaaaccaggccatctggctcgtgactgcgaccatgcagatgagcagaaatgctattcttgtggagaattcggacacattcaaaaagactgcaccaaagtgaagtgctataggtgtggtgaaactggtcatgtagccatcaactgcagcaagacaagtgaagtcaactgttaccgctgtggcgagtcagggcaccttgcacgggaatgcacaattgaggctacagcctaattattttcctttgtcgcccctcctttttctgattgatggttgtattattttctctgaatcctcttcactggccaaaggttggcagatagaggcaactcccaggccagtgagctttacttgccgtgtaaaaggaggaaaggggtggaaaaaaaccgactttctgcatttaactacaaaaaaagtttatgtttagtttggtagaggtgttatgtataatgctttgttaaagaaccccctttccgtgccactggtgaatagggattgatgaatgggaagagttgagtcagaccagtaagcccgtcctgggttccttgaacatgttcccatgtaggaggtaaaaccaattctggaagtgtctatgaacttccataaataactttaattttagtataatgatggtcttggattgtctgacctcagtagctattaaataacatcaagtaacatctgtatcaggccctacatagaacatacagttgagtgggagtaaacaaaaagataaacatgcgtgttaatggctgttcgagagaaatcggaataaaagcctaaacaggaacaacttcatcacagtgttgatgttggacacatagatggtgatggcaaaggtttagaacacattattttcaaagactaaatctaaaacccagagtaaacatcaatgctcagagttagcataatttggagctattcaggaattgcagagaaatgcattttcacagaaatcaagatgttatttttgtatactatatcacttagacaactgtgtttcatttgctgtaatcagtttttaaaagtcagatggaaagagcaactgaagtcctagaaaatagaaatgtaattttaaactattccaataaagctggaggaggaaggggagtttgactaaagttctttttgtttgtttcaaattttcattaatgtatatagtgcaaaataccatattaaagaggggaatgtggaggactgaaa

SEQ ID NO: 115183 - DNA, 1549 bp, Homo sapiens
  Payload ID: 2494
  Gene Symbol: CNBP
  Gene Name: CCHC-type zinc finger, nucleic acid binding protein
  Uniprot ID: P62633
  ENST ID: ENST00000504813
  CDS Start-End: 162-665
gtgcgcagcggcgtatgtggggccgtgtgcagacccgcgtgtggcgcaggcaaggaccctcaaaataaacagcctctaccttgcgagccgtcttccccaggcctgcgtccgagtctccgccgctgcgggcccgctccgacgcggaagatctgactgcagccatgagcagcaatgagtgcttcaagtgtggacgatctggccactgggcccgggaatgtcctactggtggaggccgtggtcgtggaatgagaagccgtggcagaggtggttttacctcggatagagacatttgttatcgctgtggtgagtctggtcatcttgccaaggattgtgatcttcaggaggatgcctgctataactgcggtagaggtggccacattgccaaggactgcaaggagcccaagagagagcgagagcaatgctgctacaactgtggcaaaccaggccatctggctcgtgactgcgaccatgcagatgagcagaaatgctattcttgtggagaattcggacacattcaaaaagactgcaccaaagtgaagtgctataggtgtggtgaaactggtcatgtagccatcaactgcagcaagacaagtgaagtcaactgttaccgctgtggcgagtcagggcaccttgcacgggaatgcacaattgaggctacagcctaattattttcctttgtcgcccctcctttttctgattgatggttgtattattttctctgaatcctcttcactggccaaaggttggcagatagaggcaactcccaggccagtgagctttacttgccgtgtaaaaggaggaaaggggtggaaaaaaaccgactttctgcatttaactacaaaaaaagtttatgtttagtttggtagaggtgttatgtataatgctttgttaaagaaccccctttccgtgccactggtgaatagggattgatgaatgggaagagttgagtcagaccagtaagcccgtcctgggttccttgaacatgttcccatgtaggaggtaaaaccaattctggaagtgtctatgaacttccataaataactttaattttagtataatgatggtcttggattgtctgacctcagtagctattaaataacatcaagtaacatctgtatcaggccctacatagaacatacagttgagtgggagtaaacaaaaagataaacatgcgtgttaatggctgttcgagagaaatcggaataaaagcctaaacaggaacaacttcatcacagtgttgatgttggacacatagatggtgatggcaaaggtttagaacacattattttcaaagactaaatctaaaacccagagtaaacatcaatgctcagagttagcataatttggagctattcaggaattgcagagaaatgcattttcacagaaatcaagatgttatttttgtatactatatcacttagacaactgtgtttcatttgctgtaatcagtttttaaaagtcagatggaaagagcaactgaagtcctagaaaatagaaatgtaattttaaactattccaataaagctggaggaggaaggggagtttgact

SEQ ID NO: 115184 - DNA, 502 bp, Homo sapiens
  Payload ID: 2494
  Gene Symbol: CNBP
  Gene Name: CCHC-type zinc finger, nucleic acid binding protein
  ENST ID: ENST00000512338
  CDS Start-End: 162-502
gtgcgcagcggcgtatgtggggccgtgtgcagacccgcgtgtggcgcaggcaaggaccctcaaaataaacagcctctaccttgcgagccgtcttccccaggcctgcgtccgagtctccgccgctgcgggcccgctccgacgcggaagatctgactgcagccatgagcagcaatgagtgcttcaagtgtggacgatctggccactgggcccgggaatgtcctactggtggaggccgtggtcgtggaatgagaagccgtggcagaggtggtttccagtttgtttcctcgtctcttccagacatttgttatcgctgtggtgagtctggtcatcttgccaaggattgtgatcttcaggaggatgtcttggcctgtttcttttccttattgttgaagcctgctataactgcggtagaggtggccacattgccaaggactgcaaggagcccaagagagagcgagagcaatgctgctacaactgtggcaaaccaggccatctggctcgt

SEQ ID NO: 115185 - DNA, 1516 bp, Homo sapiens
  Payload ID: 2494
  Gene Symbol: CNBP
  Gene Name: CCHC-type zinc finger, nucleic acid binding protein
  Uniprot ID: P62633
  ENST ID: ENST00000500450
  CDS Start-End: 150-632
gtatgtggggccgtgtgcagacccgcgtgtggcgcaggcaaggaccctcaaaataaacagcctctaccttgcgagccgtcttccccaggcctgcgtccgagtctccgccgctgcgggcccgctccgacgcggaagatctgactgcagccatgagcagcaatgagtgcttcaagtgtggacgatctggccactgggcccgggaatgtcctactggtggaggccgtggtcgtggaatgagaagccgtggcagagacatttgttatcgctgtggtgagtctggtcatcttgccaaggattgtgatcttcaggaggatgcctgctataactgcggtagaggtggccacattgccaaggactgcaaggagcccaagagagagcgagagcaatgctgctacaactgtggcaaaccaggccatctggctcgtgactgcgaccatgcagatgagcagaaatgctattcttgtggagaattcggacacattcaaaaagactgcaccaaagtgaagtgctataggtgtggtgaaactggtcatgtagccatcaactgcagcaagacaagtgaagtcaactgttaccgctgtggcgagtcagggcaccttgcacgggaatgcacaattgaggctacagcctaattattttcctttgtcgcccctcctttttctgattgatggttgtattattttctctgaatcctcttcactggccaaaggttggcagatagaggcaactcccaggccagtgagctttacttgccgtgtaaaaggaggaaaggggtggaaaaaaaccgactttctgcatttaactacaaaaaaagtttatgtttagtttggtagaggtgttatgtataatgctttgttaaagaaccccctttccgtgccactggtgaatagggattgatgaatgggaagagttgagtcagaccagtaagcccgtcctgggttccttgaacatgttcccatgtaggaggtaaaaccaattctggaagtgtctatgaacttccataaataactttaattttagtataatgatggtcttggattgtctgacctcagtagctattaaataacatcaagtaacatctgtatcaggccctacatagaacatacagttgagtgggagtaaacaaaaagataaacatgcgtgttaatggctgttcgagagaaatcggaataaaagcctaaacaggaacaacttcatcacagtgttgatgttggacacatagatggtgatggcaaaggtttagaacacattattttcaaagactaaatctaaaacccagagtaaacatcaatgctcagagttagcataatttggagctattcaggaattgcagagaaatgcattttcacagaaatcaagatgttatttttgtatactatatcacttagacaactgtgtttcatttgctgtaatcagtttttaaaagtcagatggaaagagcaactgaagtcctagaaaatagaaatgtaattttaaactattccaataaagctggaggaggaaggggagtttgact

SEQ ID NO: 115186 - DNA, 999 bp, Homo sapiens
  Payload ID: 2495
  Gene Symbol: CCL15-CCL14
  Gene Name: CCL15-CCL14 readthrough (NMD candidate)
  ENST ID: ENST00000616694
  CDS Start-End: 130-471
ctgacctctgccctgggacttcctggatcctcctcttcttataaatacaagggcagagctggtatcccggggagccaggaagcagtgagcccaggagtcctcggccagccctgcctgcccaccaggaggatgaaggtctccgtggctgccctctcctgcctcatgcttgttgctgtccttggatcccaggcccagttcacaaatgatgcagagacagagttaatgatgtcaaagcttccactggaaaatccagtagttctgaacagctttcactttgctgctgactgctgcacctcctacatctcacaaagcatcccgtgttcactcatgaaaagttattttgaaacgagcagcgagtgctccaagccaggtgtcatattcctcaccaagaaggggcggcaagtctgtgccaaacccagtggtccgggagttcaggattgcatgaaaaagctgaagccctactcaatataataataaagagacaaaagaggccagccacccacctccaacacctcctgagcctctgaagctcccaccaggccagctctcctcccacaacagcttcccacagcatgaagatctccgtggctgccattcccttcttcctcctcatcaccatcgccctagggaccaagactgaatcctcctcacggggaccttaccacccctcagagtgctgcttcacctacactacctacaagatcccgcgtcagcggattatggattactatgagaccaacagccagtgctccaagcccggaattgtcttcatcaccaaaaggggccattccgtctgtaccaaccccagtgacaagtgggtccaggactatatcaaggacatgaaggagaactgagtgacccagaaggggtggcgaaggcacagctcagagacataaagagaagatgccaaggccccctcctccacccaccgctaactctcagccccagtcaccctcttggagcttccctgctttgaattaaagaccactcatgctcttc

SEQ ID NO: 115187 - DNA, 977 bp, Homo sapiens
  Payload ID: 2495
  Gene Symbol: CCL15-CCL14
  Gene Name: CCL15-CCL14 readthrough (NMD candidate)
  ENST ID: ENST00000610751
  CDS Start-End: 60-401
ggagccaggaagcagtgagcccaggagtcctcggccagccctgcctgcccaccaggaggatgaaggtctccgtggctgccctctcctgcctcatgcttgttgctgtccttggatcccaggcccagttcacaaatgatgcagagacagagttaatgatgtcaaagcttccactggaaaatccagtagttctgaacagctttcactttgctgctgactgctgcacctcctacatctcacaaagcatcccgtgttcactcatgaaaagttattttgaaacgagcagcgagtgctccaagccaggtgtcatattcctcaccaagaaggggcggcaagtctgtgccaaacccagtggtccgggagttcaggattgcatgaaaaagctgaagccctactcaatataataataaagagacaaaagaggccagccacccacctccaacacctcctgagcctctgaagctcccaccaggccagctctcctcccacaacagcttcccacagcatgaagatctccgtggctgccattcccttcttcctcctcatcaccatcgccctagggaccaagactgaatcctcctcacaaactggggggaaaccgaaggttgttaaaatacagctaaagttggtggggggaccttaccacccctcagagtgctgcttcacctacactacctacaagatcccgcgtcagcggattatggattactatgagaccaacagccagtgctccaagcccggaattgtcttcatcaccaaaaggggccattccgtctgtaccaaccccagtgacaagtgggtccaggactatatcaaggacatgaaggagaactgagtgacccagaaggggtggcgaaggcacagctcagagacataaagagaagatgccaaggccccctcctccacccaccgctaactctcagccccagtcaccctcttggagcttccctgctttgaattaaagaccactcatgctcttc

SEQ ID NO: 115188 - DNA, 977 bp, Homo sapiens
  Payload ID: 2495
  Gene Symbol: CCL15-CCL14
  Gene Name: CCL15-CCL14 readthrough (NMD candidate)
  ENST ID: ENST00000632208
  CDS Start-End: 60-401
ggagccaggaagcagtgagcccaggagtcctcggccagccctgcctgcccaccaggaggatgaaggtctccgtggctgccctctcctgcctcatgcttgttgctgtccttggatcccaggcccagttcataaatgatgcagagacagagttaatgatgtcaaagcttccactggaaaatccagtagttctgaacagctttcactttgctgctgactgctgcacctcctacatctcacaaagcatcccgtgttcactcatgaaaagttattttgaaacgagcagcgagtgctccaagccaggtgtcatattcctcaccaagaaggggcggcaagtctgtgccaaacccagtggtccgggagttcaggattgcatgaaaaagctgaagccctactcaatataataataaagagacaaaagaggccagccacccacctccaacacctcctgagcctctgaagctcccaccaggccagctctcctcccacaacagcttcccacagcatgaagatctccgtggctgccattcccttcttcctcctcatcaccatcgccctagggaccaagactgaatcctcctcacaaactggggggaaaccgaaggttgttaaaatacagctaaagttggtggggggaccttaccacccctcagagtgctgcttcacctacactacctacaagatcccgcgtcagcggattatggattactatgagaccaacagccagtgctccaagcccggaattgtcttcatcaccaaaaggggccattccgtctgtaccaaccccagtgacaagtgggtccaggactatatcaaggacatgaaggagaactgagtgacccagaaggggtggcgaaggcacagctcagagacataaagagaagatgccaaggccccctcctccacccaccgctaactctcagccccagtcaccctcttggagcttccctgctttgaattaaagaccactcatgctcttc

SEQ ID NO: 115189 - DNA, 999 bp, Homo sapiens
  Payload ID: 2495
  Gene Symbol: CCL15-CCL14
  Gene Name: CCL15-CCL14 readthrough (NMD candidate)
  ENST ID: ENST00000632206
  CDS Start-End: 130-471
ctgccctctgccctgggacttcctggatcctcctcttcttataaatacaagggcagagctggtatcccggggagccaggaagcagtgagcccaggagtcctcggccagccctgcctgcccaccaggaggatgaaggtctccgtggctgccctctcctgcctcatgcttgttgctgtccttggatcccaggcccagttcataaatgatgcagagacagagttaatgatgtcaaagcttccactggaaaatccagtagttctgaacagctttcactttgctgctgactgctgcacctcctacatctcacaaagcatcccgtgttcactcatgaaaagttattttgaaacgagcagcgagtgctccaagccaggtgtcatattcctcaccaagaaggggcggcaagtctgtgccaaacccagtggtccgggagttcaggattgcatgaaaaagctgaagccctactcaatataataataaagagacaaaagaggccagccacccacctccaacacctcctgagcctctgaagctcccaccaggccagctctcctcccacaacagcttcccacagcatgaagatctccgtggctgccattcccttcttcctcctcatcaccatcgccctagggaccaagactgaatcctcctcacggggaccttaccacccctcagagtgctgcttcacctacactacctacaagatcccgcgtcagcggattatggattactatgagaccaacagccagtgctccaagcccggaattgtcttcatcaccaaaaggggccattccgtctgtaccaaccccagtgacaagtgggtccaggactatatcaaggacatgaaggagaactgagtgacccagaaggggtggcgaaggcacagctcagagacataaagagaagatgccaaggccccctcctccacccaccgctaactctcagccccagtcaccctcttggagcttccctgctttgaattaaagaccactcatgctcttc

SEQ ID NO: 115190 - DNA, 2241 bp, Homo sapiens
  Payload ID: 2496
  Gene Symbol: CNOT1
  Gene Name: CCR4-NOT transcription complex, subunit 1
  ENST ID: ENST00000245138
  CDS Start-End: 93-1043
aggtccttggtatagtagtgggagttctccttcaggatcatgatgttcgtcagagtgaatttcagcaacttccctaccatcgaatttttatcatgcttctcttggaactcaatgcacctgagcatgtgttggaaaccattaatttccagacacttacagctttctgcaatacattccacatcttgaggcctaccaaagctcctggctttgtatatgcctggcttgaactgatttcccatcggatatttattgcaagaatgctggcacatacgccacagcagaaggggtggcctatgtatgcacagctactgattgatttattcaaatatttagcgcctttccttagaaatgtggaactcaccaaacctatgcaaatcctctacaagggcactttaagagtgctgctggttcttttgcatgatttcccagagttcctttgtgattaccattatgggttctgtgatgtgatcccacctaattgtatccagttaagaaatttgatcctgagtgcctttccaagaaacatgaggctccccgacccattcactcctaatctaaaggtggacatgttgagtgaaattaacattgctccccggattctcaccaatttcactggagtaatgccacctcagttcaaaaaggatttggattcctatcttaaaactcgatcaccagtcactttcctgtctgatctgcgcagcaacctacaggtatccaatgaacctgggaatcgctacaacctccagctcatcaatgcactggtgctctatgtcgggactcaggccattgcgcacatccacaacaagggcagcacaccttcaatgagcaccatcactcactcagcacacatggatatcttccagaatttggctgtggacttggacactgagggtcgctatctctttttgaatgcaattgcaaatcagtccggtacccaaatagccacactcactacttcagttgcaccatgctgtacctttttgcagaggccaatacggaagccatccaagaacagatcacaagagttctcttggaacggttgattgtaaataggccacatccttggggtcttcttattaccttcattgagctgattaaaaacccagcgtttaagttctggaaccatgaatttgtacactgtgccccagaaatcgaaaagttattccagtcggtcgcacagtgctgcatgggacagaagcaggcccagcaagtaatggaagggacaggtgccagttagacgaaactgcatctctgttgtacgtgtcagtctagaggtctcactgcaccgagttcataaactgactgaagaatcctttcagctcttcctgactttcccagccctttggtttgtgggtatctgccccaactactgttgggatcagcctcctgtcttatgtgggcacgttccaaagtttaaatgcatttttttgactcttggccaaaatttagaagatgctgtgaatatcattttgaacttgtgtaaatacatgaaagagaaaacctttgtctggaacttcttggctttgtgcaagctgtgtccaaggcaagtacataaactggtaccttgtaatgaagaggcagctgatgccatgcacttgtctgagggcatagctccatgtcttctgacattcctggtgtcccaaagaatagcaaaaagccagtttgaatattatgtaacttatttttttaatgtggacaggggaccttgaaaatcactaagttattaaaaatgtggatgtgctagaattggatatgtccaggaacatgggaagggctcactattggaatcccatgagtttccattttgtctctacccaaacgtattccaaagctgactgcatttgtaccatcttatttcttttggggattatacacctcagccgcctgagatgggggtcagctctttatataaagggaaaccagaccaggcctaaagcccacccctaccctcacccccccaatcctctcctgaaacttaaaaacagtgggaatataggaaagggaaccaaatctcattaattaattgttctcccccattaccccactgaatgaatggccatacaggctaagctgaataatgacaaagttgaaaggaccaatacagccccttttataaggattttgaatgttttgcaaatgtattggtccctgtgttgtattttgtagccttttcctgggcttcagctcccctacttcttgtatgtgtatgcatactgtagctaaccattaaagtcatgacac

SEQ ID NO: 115191 - DNA, 8471 bp, Homo sapiens
  Payload ID: 2496
  Gene Symbol: CNOT1
  Gene Name: CCR4-NOT transcription complex, subunit 1
  Uniprot ID: A5YKK6
  ENST ID: ENST00000317147
  CDS Start-End: 334-7464
gaaatgggaacggggaggggaaaggccgcgacgtgagcgcgcgacctccggcgccattttgtagagaaacaagcggagttaaccgaagagggggtcgaggagagccggagtcggggacccaggagtttcctgtgtccagcgctgccggagccgcctgaggtgccatgtttcagaacagagtaagacccctggtaaagaagaactgaagatattatacagataccagatatagcctaattacaaagaaagcattaacctgcctctgaggtgactaaaggggaataatggtgattttgcgccgggctcggccgcctgcttccgccccaaccagcaatgaatcttgactcgctctcgctggccttgtctcaaatcagctacctggtggacaatttaaccaagaaaaattaccgagccagccagcaggaaatacagcatattgtgaatcggcacggtcctgaggcagacaggcatttattacgctgcctattttcgcatgtggatttcagtggcgatggtaaaagcagtggcaaagatttccatcagactcagtttctgattcaggagtgtgcgttgctgattacaaagccaaattttatctcgacgctgtcctatgccattgataatccattgcactatcagaagagtttaaagcctgcaccccacttatttgcccagctgagtaaagtgctcaaattaagcaaagtacaagaggtaatttttggccttgccctgttgaattcttccagctcagatcttagaggtttcgctgcccagtttatcaaacagaagcttccagatcttctgcgttcttacattgacgcagacgtcagtggaaatcaagaaggtggcttccaagatatagcaatagaggtcctacacctcctcctctcccatctcctctttgggcagaagggagcctttggagttggacaagaacagatagacgcttttcttaagacgctgcgcagagattttccccaagaacgctgtcccgtggtgctcgcaccacttttataccctgaaaaacgggacattctaatggacaggatcctgcctgattccggaggggtagctaaaaccatgatggagagctctttggctgatttcatgcaagaagtaggctatggcttttgtgcaagtattgaagaatgtcgcaatataatcgtgcagtttggtgttcgggaggtcacagctgcccaggttgcaagggttttgggaatgatggctcgaactcattcaggattaacagatggcattccattacagagtatttctgctccgggcagtgggatctggagtgatgggaaagataaaagtgatggagcacaggcacacacatggaatgtagaagtcttgattgacgttcttaaagaactgaatccaagtttgaatttcaaggaagtaacttatgaactggaccatcctggatttcaaattcgtgacagtaaaggacttcataatgtggtttatggcattcagaggggtttgggtatggaagtgttcccagtagacctcatatatagaccttggaaacatgctgaaggccagctctccttcattcaacattcccttataaatccagagatcttctgttttgctgactatccctgtcatactgttgccactgatattctgaaagcaccaccagaggatgacaatcgagaaattgccacatggaagagcttggatttgattgaatctctgctgaggcttgcagaggttgggcagtatgagcaagtcaaacagctcttcagcttccctatcaaacactgtccagacatgctggtattggccttactacaaattaacacctcttggcataccttgcgccatgaacttatctccactctgatgccaattttccttggaaaccatcctaactcagctattattttgcactatgcatggcatgggcagggacagtctccctcaattcgccaacttatcatgcatgcaatggcagaatggtacatgagaggggagcagtatgatcaggccaaattgtctcgaatacttgatgtggcccaggacttgaaggccttgtcaatgctgctaaatggtactccatttgcctttgttattgaccttgctgcacttgcttcacgtcgtgaatacctcaaacttgataagtggctcacagataaaattcgagagcatggggagccttttatccaggcgtgtatgacttttttaaagagacggtgtccttctattttgggcggacttgccccagaaaaagaccagcccaaaagtgctcaacttcctccagaaactttggcgacaatgttggcctgtctgcaagcttgtgcagggagtgtttctcaggagctatcagaaactatcctcaccatggtagccaattgcagtaatgttatgaataaggccagacaaccaccacctggagttatgccaaaaggacgtcctcctagtgctagcagcttagatgccatttctcctgttcagattgaccctcttgctggaatgacatctcttagtataggtggttcagctgcccctcacacccagagtatgcagggttttcctccaaatttgggttctgcattcagtacccctcagtcaccagcaaaagcatttccacccctttcaacccccaatcagaccactgcattcagtggtattggaggactttcatcacagcttccagtaggtggtcttggcacaggcagcctgactggtataggaactggtgctcttggactccctgcagtgaataacgacccttttgtacagaggaaactgggcacctctggactgaatcagcctacattccagcagagtaagatgaaaccttcggacttgtctcaggtgtggccagaggcaaaccagcactttagtaaagagatagatgatgaagcaaacagctatttccagcgaatatataatcatccaccacatccaaccatgtctgttgatgaggtattagaaatgctgcagagatttaaagactctactataaagagggaacgagaagtatttaactgtatgctaaggaacttgtttgaagaatatcgtttttttccccagtatcctgataaagagttacatataacagcctgcctatttggtggtataattgagaaaggactggtcacttacatggcactaggtctggctctacgatatgttcttgaagccttacgcaagccttttggatccaaaatgtattatttcgggattgctgcactagatagatttaaaaacagattgaaggactatccccagtattgtcagcatttggcttctatcagtcactttatgcaatttccacatcatttacaggagtatattgagtatggacagcagtctagagatcctcctgtgaaaatgcaaggctctatcacaacccctggaagtattgcactggctcaggcccaggctcaggcccaggttccagcaaaagctcctcttgctggtcaagttagcactatggtaaccacctcaacaactaccactgttgctaaaacggttacggtcaccaggccaactggagtcagctttaagaaagatgtgccaccttctattaatactacaaatatagatacgttgcttgtggccacagatcaaactgagagaattgtggagcccccagaaaatatccaggagaaaattgcttttattttcaataatctctcacagtcaaatatgacacaaaaggttgaagagctaaaggaaacggtgaaagaagaatttatgccttgggtttcacagtatctggttatgaagagagtcagtattgagccaaactttcatagcctgtattcaaacttccttgacacgctgaagaatcctgaatttaacaagatggttctgaatgagacctacagaaacattaaagtgctcctgacctctgataaagctgcagccaatttctcagatcgttctttgctgaagaacttgggacattggctaggaatgatcacattagctaaaaacaaacccatcttacacactgacttggatgtgaaatcattgctgctagaggcttatgttaaaggacaacaagaattgctctatgtagtgccctttgttgccaaagtcttagaatctagcattcgtagtgtggtttttaggccaccaaacccttggacaatggcaattatgaatgtattagctgagctacatcaggagcatgacttaaagttaaacttgaagtttgaaatcgaggttctctgcaagaaccttgcattagacatcaatgagctaaaacctggaaacctcctaaaggataaagatcgcctgaagaatttagatgagcaactctctgctccaaagaaagatgtcaagcagccagaagaactccctcccatcacaaccacaacaacttctactacaccagctaccaacaccacttgtacagccacggttccaccacagccacagtacagctaccacgacatcaatgtctattcccttgcgggcttggcaccacacattactctgaatccaacaattcccttgtttcaggcccatccacagttgaagcagtgtgtgcgtcaggcaattgaacgggctgtccaggagctggtccatcctgtggtggatcgatcaattaagattgccatgactacttgtgagcaaatagtcaggaaggattttgccctggattcggaggaatctcgaatgcgaatagcagctcatcacatgatgcgtaacttgacagctggaatggctatgattacatgcagggaacctttgctcatgagcatatctaccaacttaaaaaacagttttgcctcagcccttcgtactgcttccccacaacaaagagaaatgatggatcaggcagctgctcaattagctcaggacaattgtgagttggcttgctgttttattcagaagactgcagtagaaaaagcaggccctgagatggacaagagattagcaactgaatttgagctgagaaaacatgctaggcaagaaggacgcagatactgtgatcctgttgttttaacatatcaagctgaacggatgccagagcaaatcaggctgaaagttggtggtgtggacccaaagcagttggctgtttacgaagagtttgcacgcaatgttcctggcttcttacctacaaatgacttaagtcagcccacgggatttttagcccagcccatgaagcaagcttgggcaacagatgatgtagctcagatttatgataagtgtattacagaactggagcaacatctacatgccatcccaccaactttggccatgaaccctcaagctcaggctcttcgaagtctcttggaggttgtagttttatctcgaaactctcgggatgccatagctgctcttggattgctccaaaaggctgtagagggcttactagatgccacaagtggtgctgatgctgaccttctgctgcgctacagggaatgccacctcttggtcctaaaagctctgcaggatggccgggcatatgggtctccatggtgcaacaaacagatcacaaggtgcctaattgaatgtcgagatgaatataaatataatgtggaggctgtggagctgctaattcgcaatcatttggttaatatgcagcagtatgatcttcacctagcgcagtcaatggagaatggcttaaactacatggctgtggcatttgctatgcagttagtaaaaatcctgctggtggatgaaaggagtgttgctcatgttactgaggcagatctgttccacaccattgaaaccctcatgaggattaatgctcattccagaggcaatgctccagaaggattgccccagctgatggaagtagtgcgatccaactatgaagcaatgattgatcgtgctcatggaggcccaaactttatgatgcattctgggatctctcaagcctcagagtatgatgaccctccaggcctgagggagaaggcagagtatcttctgagggaatgggtgaatctctaccattcagcagcagctggccgcgacagtaccaaagctttctctgcatttgttggacagatgcaccagcaaggaatactgaagaccgatgatctcataacaaggttctttcgtctgtgtactgaaatgtgtgttgaaatcagttaccgtgctcaggctgagcagcagcacaatcctgctgccaatcccaccatgatccgagccaagtgctatcacaacctggatgcctttgttcgactcattgcactgctcgtgaaacactcaggggaggccaccaacactgtcacaaagattaatctgctgaacaaggtccttggtatagtagtgggagttctccttcaggatcatgatgttcgtcagagtgaatttcagcaacttccctaccatcgaatttttatcatgcttctcttggaactcaatgcacctgagcatgtgttggaaaccattaatttccagacacttacagctttctgcaatacattccacatcttgaggcctaccaaagctcctggctttgtatatgcctggcttgaactgatttcccatcggatatttattgcaagaatgctggcacatacgccacagcagaaggggtggcctatgtatgcacagctactgattgatttattcaaatatttagcgcctttccttagaaatgtggaactcaccaaacctatgcaaatcctctacaagggcactttaagagtgctgctggttcttttgcatgatttcccagagttcctttgtgattaccattatgggttctgtgatgtgatcccacctaattgtatccagttaagaaatttgatcctgagtgcctttccaagaaacatgaggctccccgacccattcactcctaatctaaaggtggacatgttgagtgaaattaacattgctccccggattctcaccaatttcactggagtaatgccacctcagttcaaaaaggatttggattcctatcttaaaactcgatcaccagtcactttcctgtctgatctgcgcagcaacctacaggtatccaatgaacctgggaatcgctacaacctccagctcatcaatgcactggtgctctatgtcgggactcaggccattgcgcacatccacaacaagggcagcacaccttcaatgagcaccatcactcactcagcacacatggatatcttccagaatttggctgtggacttggacactgagggtcgctatctctttttgaatgcaattgcaaatcagctccggtacccaaatagccacactcactacttcagttgcaccatgctgtacctttttgcagaggccaatacggaagccatccaagaacagatcacaagagttctcttggaacggttgattgtaaataggccacatccttggggtcttcttattaccttcattgagctgattaaaaacccagcgtttaagttctggaaccatgaatttgtacactgtgccccagaaatcgaaaagttattccagtcggtcgcacagtgctgcatgggacagaagcaggcccagcaagtaatggaagggacaggtgccagttagacgaaactgcatctctgttgtacgtgtcagtctagaggtctcactgcaccgagttcataaactgactgaagaatcctttcagctcttcctgactttcccagccctttggtttgtgggtatctgccccaactactgttgggatcagcctcctgtcttatgtgggcacgttccaaagtttaaatgcatttttttgactcttggccaaaatttagaagatgctgtgaatatcattttgaacttgtgtaaatacatgaaagagaaaacctttgtctggaacttcttggctttgtgcaagctgtgtccaaggcaagtacataaactggtaccttgtaatgaagaggcagctgatgccatgcacttgtctgagggcatagctccatgtcttctgacattcctggtgtcccaaagaatagcaaaaagccagtttgaatattatgtaacttatttttttaatgtggacaggggaccttgaaaatcactaagttattaaaaatgtggatgtgctagaattggatatgtccaggaacatgggaagggctcactattggaatcccatgagtttccattttgtctctacccaaacgtattccaaagctgactgcatttgtaccatcttatttcttttggggattatacacctcagccgcctgagatgggggtcagctctttatataaagggaaaccagaccaggcctaaagcccacccctaccctcacccccccaatcctctcctgaaacttaaaaacagtgggaatataggaaagggaaccaaatctcattaattaattgttctcccccattaccccactgaatgaatggccatacaggctaagctgaataatgacaaagttgaaaggaccaatacagccccttttataaggattttgaatgttttgcaaatgtattggtccctgtgttgtattttgtagccttttcctgggcttcagctcccctacttcttgtatgtgtatgcatactgtagctaaccattaaagtcatgacacaca

SEQ ID NO: 115192 - DNA, 4999 bp, Homo sapiens
  Payload ID: 2496
  Gene Symbol: CNOT1
  Gene Name: CCR4-NOT transcription complex, subunit 1
  Uniprot ID: A5YKK6
  ENST ID: ENST00000441024
  CDS Start-End: 286-4941
cggcgccattttgtagagaaacaagcggagttaaccgaagagggggtcgaggagagccggagtcggggacccaggagtttcctgtgtccagcgctgccggagccgcctgaggtgccatgtttcagaacagagtaagacccctggtaaagaagaactgaagatattatacagataccagatatagcctaattacaaagaaagcattaacctgcctctgaggtgactaaaggggaataatggtgattttgcgccgggctcggccgcctgcttccgccccaaccagcaatgaatcttgactcgctctcgctggccttgtctcaaatcagctacctggtggacaatttaaccaagaaaaattaccgagccagccagcaggaaatacagcatattgtgaatcggcacggtcctgaggcagacaggcatttattacgctgcctattttcgcatgtggatttcagtggcgatggtaaaagcagtggcaaagatttccatcagactcagtttctgattcaggagtgtgcgttgctgattacaaagccaaattttatctcgacgctgtcctatgccattgataatccattgcactatcagaagagtttaaagcctgcaccccacttatttgcccagctgagtaaagtgctcaaattaagcaaagtacaagaggtaatttttggccttgccctgttgaattcttccagctcagatcttagaggtttcgctgcccagtttatcaaacagaagcttccagatcttctgcgttcttacattgacgcagacgtcagtggaaatcaagaaggtggcttccaagatatagcaatagaggtcctacacctcctcctctcccatctcctctttgggcagaagggagcctttggagttggacaagaacagatagacgcttttcttaagacgctgcgcagagattttccccaagaacgctgtcccgtggtgctcgcaccacttttataccctgaaaaacgggacattctaatggacaggatcctgcctgattccggaggggtagctaaaaccatgatggagagctctttggctgatttcatgcaagaagtaggctatggcttttgtgcaagtattgaagaatgtcgcaatataatcgtgcagtttggtgttcgggaggtcacagctgcccaggttgcaagggttttgggaatgatggctcgaactcattcaggattaacagatggcattccattacagagtatttctgctccgggcagtgggatctggagtgatgggaaagataaaagtgatggagcacaggcacacacatggaatgtagaagtcttgattgacgttcttaaagaactgaatccaagtttgaatttcaaggaagtaacttatgaactggaccatcctggatttcaaattcgtgacagtaaaggacttcataatgtggtttatggcattcagaggggtttgggtatggaagtgttcccagtagacctcatatatagaccttggaaacatgctgaaggccagctctccttcattcaacattcccttataaatccagagatcttctgttttgctgactatccctgtcatactgttgccactgatattctgaaagcaccaccagaggatgacaatcgagaaattgccacatggaagagcttggatttgattgaatctctgctgaggcttgcagaggttgggcagtatgagcaagtcaaacagctcttcagcttccctatcaaacactgtccagacatgctggtattggccttactacaaattaacacctcttggcataccttgcgccatgaacttatctccactctgatgccaattttccttggaaaccatcctaactcagctattattttgcactatgcatggcatgggcagggacagtctccctcaattcgccaacttatcatgcatgcaatggcagaatggtacatgagaggggagcagtatgatcaggccaaattgtctcgaatacttgatgtggcccaggacttgaaggccttgtcaatgctgctaaatggtactccatttgcctttgttattgaccttgctgcacttgcttcacgtcgtgaatacctcaaacttgataagtggctcacagataaaattcgagagcatggggagccttttatccaggcgtgtatgacttttttaaagagacggtgtccttctattttgggcggacttgccccagaaaaagaccagcccaaaagtgctcaacttcctccagaaactttggcgacaatgttggcctgtctgcaagcttgtgcagggagtgtttctcaggagctatcagaaactatcctcaccatggtagccaattgcagtaatgttatgaataaggccagacaaccaccacctggagttatgccaaaaggacgtcctcctagtgctagcagcttagatgccatttctcctgttcagattgaccctcttgctggaatgacatctcttagtataggtggttcagctgcccctcacacccagagtatgcagggttttcctccaaatttgggttctgcattcagtacccctcagtcaccagcaaaagcatttccacccctttcaacccccaatcagaccactgcattcagtggtattggaggactttcatcacagcttccagtaggtggtcttggcacaggcagcctgactggtataggaactggtgctcttggactccctgcagtgaataacgacccttttgtacagaggaaactgggcacctctggactgaatcagcctacattccagcagagtaagatgaaaccttcggacttgtctcaggtgtggccagaggcaaaccagcactttagtaaagagatagatgatgaagcaaacagctatttccagcgaatatataatcatccaccacatccaaccatgtctgttgatgaggtattagaaatgctgcagagatttaaagactctactataaagagggaacgagaagtatttaactgtatgctaaggaacttgtttgaagaatatcgtttttttccccagtatcctgataaagagttacatataacagcctgcctatttggtggtataattgagaaaggactggtcacttacatggcactaggtctggctctacgatatgttcttgaagccttacgcaagccttttggatccaaaatgtattatttcgggattgctgcactagatagatttaaaaacagattgaaggactatccccagtattgtcagcatttggcttctatcagtcactttatgcaatttccacatcatttacaggagtatattgagtatggacagcagtctagagatcctcctgtgaaaatgcaaggctctatcacaacccctggaagtattgcactggctcaggcccaggctcaggcccaggttccagcaaaagctcctcttgctggtcaagttagcactatggtaaccacctcaacaactaccactgttgctaaaacggttacggtcaccaggccaactggagtcagctttaagaaagatgtgccaccttctattaatactacaaatatagatacgttgcttgtggccacagatcaaactgagagaattgtggagcccccagaaaatatccaggagaaaattgcttttattttcaataatctctcacagtcaaatatgacacaaaaggttgaagagctaaaggaaacggtgaaagaagaatttatgccttgggtttcacagtatctggttatgaagagagtcagtattgagccaaactttcatagcctgtattcaaacttccttgacacgctgaagaatcctgaatttaacaagatggttctgaatgagacctacagaaacattaaagtgctcctgacctctgataaagctgcagccaatttctcagatcgttctttgctgaagaacttgggacattggctaggaatgatcacattagctaaaaacaaacccatcttacacactgacttggatgtgaaatcattgctgctagaggcttatgttaaaggacaacaagaattgctctatgtagtgccctttgttgccaaagtcttagaatctagcattcgtagtgtggtttttaggccaccaaacccttggacaatggcaattatgaatgtattagctgagctacatcaggagcatgacttaaagttaaacttgaagtttgaaatcgaggttctctgcaagaaccttgcattagacatcaatgagctaaaacctggaaacctcctaaaggataaagatcgcctgaagaatttagatgagcaactctctgctccaaagaaagatgtcaagcagccagaagaactccctcccatcacaaccacaacaacttctactacaccagctaccaacaccacttgtacagccacggttccaccacagccacagtacagctaccacgacatcaatgtctattcccttgcgggcttggcaccacacattactctgaatccaacaattcccttgtttcaggcccatccacagttgaagcagtgtgtgcgtcaggcaattgaacgggctgtccaggagctggtccatcctgtggtggatcgatcaattaagattgccatgactacttgtgagcaaatagtcaggaaggattttgccctggattcggaggaatctcgaatgcgaatagcagctcatcacatgatgcgtaacttgacagctggaatggctatgattacatgcagggaacctttgctcatgagcatatctaccaacttaaaaaacagttttgcctcagcccttcgtgtaagttggctatttccttggtataggtacaaaacgtattactgcttgtctgtaataatttttttctttgtctatatatggcactgggcgttaccacttattcttaataatcaccatatttgtttgatgtcttccatcattttagattgtaattctgtgaggcaaagcatcatgtctgtgtgtttttttttttttctgttatattctcaacacgatgtttgacagatagtagatacccaaatatttgttggtttaaataaattaagatttaaaaaggaaa

SEQ ID NO: 115193 - DNA, 831 bp, Homo sapiens
  Payload ID: 2496
  Gene Symbol: CNOT1
  Gene Name: CCR4-NOT transcription complex, subunit 1
  ENST ID: ENST00000569882
  CDS Start-End: 1-831
cgtcgtgaatacctcaaacttgataagtggctcacagataaaattcgagagcatggggagccttttatccaggcgtgtatgacttttttaaagagacggtgtccttctattttgggcggacttgccccagaaaaagaccagcccaaaagtgctcaacttcctccagaaactttggcgacaatgttggcctgtctgcaagcttgtgcagggagtgtttctcaggagctatcagaaactatcctcaccatggtagccaattgcagtaatgttatgaataaggccagacaaccaccacctggagttatgccaaaaggacgtcctcctagtgctagcagcttagatgccatttctcctgttcagattgaccctcttgctggaatgacatctcttagtataggtggttcagctgcccctcacacccagagtatgcagggttttcctccaaatttgggttctgcattcagtacccctcagtcaccagcaaaagcatttccacccctttcaacccccaatcagaccactgcattcagtggtattggaggactttcatcacagcttccaggtggtcttggcacaggcagcctgactggtataggaactggtgctcttggactccctgcagtgaataacgacccttttgtacagaggaaactgggcacctctggactgaatcagcctacattccagcagagtaagatgaaaccttcggacttgtctcaggtgtggccagaggcaaaccagcactttagtaaagagatagatgatgaagcaaacagctatttccagcgaatatataatcatccaccacatccaaccatgtctgttgatgag

SEQ ID NO: 115194 - DNA, 1317 bp, Homo sapiens
  Payload ID: 2496
  Gene Symbol: CNOT1
  Gene Name: CCR4-NOT transcription complex, subunit 1
  ENST ID: ENST00000568917
  CDS Start-End: 1-1317
ccaactttggccatgaaccctcaagctcaggctcttcgaagtctcttggaggttgtagttttatctcgaaactctcgggatgccatagctgctcttggattgctccaaaaggctgtagagggcttactagatgccacaagtggtgctgatgctgaccttctgctgcgctacagggaatgccacctcttggtcctaaaagctctgcaggatggccgggcatatgggtctccatggtgcaacaaacagatcacaaggtgcctaattgaatgtcgagatgaatataaatataatgtggaggctgtggagctgctaattcgcaatcatttggttaatatgcagcagtatgatcttcacctagcgcagtcaatggagaatggcttaaactacatggctgtggcatttgctatgcagttagtaaaaatcctgctggtggatgaaaggagtgttgctcatgttactgaggcagatctgttccacaccattgaaaccctcatgaggattaatgctcattccagaggcaatgctccagaaggattgccccagctgatggaagtagtgcgatccaactatgaagcaatgattgatcgtgctcatggaggcccaaactttatgatgcattctgggatctctcaagcctcagagtatgatgaccctccaggcctgagggagaaggcagagtatcttctgagggaatgggtgaatctctaccattcagcagcagctggccgcgacagtaccaaagctttctctgcatttgttggacaggtagagcttttggaaagaaagatgcaccagcaaggaatactgaagaccgatgatctcataacaaggttctttcgtctgtgtactgaaatgtgtgttgaaatcagttaccgtgctcaggctgagcagcagcacaatcctgctgccaatcccaccatgatccgagccaagtgctatcacaacctggatgcctttgttcgactcattgcactgctcgtgaaacactcaggggaggccaccaacactgtcacaaagattaatctgctgaacaaggtccttggtatagtagtgggagttctccttcaggatcatgatgttcgtcagagtgaatttcagcaacttccctaccatcgaatttttatcatgcttctcttggaactcaatgcacctgagcatgtgttggaaaccattaatttccagacacttacagctttctgcaatacattccacatcttgaggcctaccaaagctcctggctttgtatatgcctggcttgaactgatttcccatcggatatttattgcaagaatgctggcacatacgccacagcagaag

SEQ ID NO: 115195 - DNA, 553 bp, Homo sapiens
  Payload ID: 2496
  Gene Symbol: CNOT1
  Gene Name: CCR4-NOT transcription complex, subunit 1
  ENST ID: ENST00000567133
  CDS Start-End: 1-553
agctgagctacatcaggagcatgacttaaaggataaagatcgcctgaagaatttagatgagcaactctctgctccaaagaaagatgtcaagcagccagaagaactccctcccatcacaaccacaacaacttctactacaccagctaccaacaccacttgtacagccacggttccaccacagccacagtacagctaccacgacatcaatgtctattcccttgcgggcttggcaccacacattactctgaatccaacaattcccttgtttcaggcccatccacagttgaagcagtgtgtgcgtcaggcaattgaacgggctgtccaggagctggtccatcctgtggtggatcgatcaattaagattgccatgactacttgtgagcaaatagtcaggaaggattttgccctggattcggaggaatctcgaatgcgaatagcagctcatcacatgatgcgtaacttgacagctggaatggctatgattacatgcagggaacctttgctcatgagcatatctaccaacttaaaaaacagttttgcctcagcccttcgt

SEQ ID NO: 115196 - DNA, 385 bp, Homo sapiens
  Payload ID: 2496
  Gene Symbol: CNOT1
  Gene Name: CCR4-NOT transcription complex, subunit 1
  ENST ID: ENST00000565697
  CDS Start-End: 309-385
ttgctctgttgcccaggcttgagagcagtggtgtgatctcggctcactgcaacgtccgcctcccaggttcaagtgattctcctccctcagcctcccgagtagctgggattacaggcgcgtgccaccacggctgggtgccatgtttcagaacagagtaagacccctggtaaagaagaactgaagatattatacagataccagatatagcctaattacaaagaaagcattaacctgcctctgaggtgactaaaggggaataatggtgattttgcgccgggctcggccgcctgcttccgccccaaccagcaatgaatcttgactcgctctcgctggccttgtctcaaatcagctacctggtggacaatttaaccaagaaaaattaccg

SEQ ID NO: 115197 - DNA, 7660 bp, Homo sapiens
  Payload ID: 2496
  Gene Symbol: CNOT1
  Gene Name: CCR4-NOT transcription complex, subunit 1
  Uniprot ID: A5YKK6
  ENST ID: ENST00000569240
  CDS Start-End: 282-7397
gccattttgtagagaaacaagcggagttaaccgaagagggggtcgaggagagccggagtcggggacccaggagtttcctgtgtccagcgctgccggagccgcctgaggtgccatgtttcagaacagagtaagacccctggtaaagaagaactgaagatattatacagataccagatatagcctaattacaaagaaagcattaacctgcctctgaggtgactaaaggggaataatggtgattttgcgccgggctcggccgcctgcttccgccccaaccagcaatgaatcttgactcgctctcgctggccttgtctcaaatcagctacctggtggacaatttaaccaagaaaaattaccgagccagccagcaggaaatacagcatattgtgaatcggcacggtcctgaggcagacaggcatttattacgctgcctattttcgcatgtggatttcagtggcgatggtaaaagcagtggcaaagatttccatcagactcagtttctgattcaggagtgtgcgttgctgattacaaagccaaattttatctcgacgctgtcctatgccattgataatccattgcactatcagaagagtttaaagcctgcaccccacttatttgcccagctgagtaaagtgctcaaattaagcaaagtacaagaggtaatttttggccttgccctgttgaattcttccagctcagatcttagaggtttcgctgcccagtttatcaaacagaagcttccagatcttctgcgttcttacattgacgcagacgtcagtggaaatcaagaaggtggcttccaagatatagcaatagaggtcctacacctcctcctctcccatctcctctttgggcagaagggagcctttggagttggacaagaacagatagacgcttttcttaagacgctgcgcagagattttccccaagaacgctgtcccgtggtgctcgcaccacttttataccctgaaaaacgggacattctaatggacaggatcctgcctgattccggaggggtagctaaaaccatgatggagagctctttggctgatttcatgcaagaagtaggctatggcttttgtgcaagtattgaagaatgtcgcaatataatcgtgcagtttggtgttcgggaggtcacagctgcccaggttgcaagggttttgggaatgatggctcgaactcattcaggattaacagatggcattccattacagagtatttctgctccgggcagtgggatctggagtgatgggaaagataaaagtgatggagcacaggcacacacatggaatgtagaagtcttgattgacgttcttaaagaactgaatccaagtttgaatttcaaggaagtaacttatgaactggaccatcctggatttcaaattcgtgacagtaaaggacttcataatgtggtttatggcattcagaggggtttgggtatggaagtgttcccagtagacctcatatatagaccttggaaacatgctgaaggccagctctccttcattcaacattcccttataaatccagagatcttctgttttgctgactatccctgtcatactgttgccactgatattctgaaagcaccaccagaggatgacaatcgagaaattgccacatggaagagcttggatttgattgaatctctgctgaggcttgcagaggttgggcagtatgagcaagtcaaacagctcttcagcttccctatcaaacactgtccagacatgctggtattggccttactacaaattaacacctcttggcataccttgcgccatgaacttatctccactctgatgccaattttccttggaaaccatcctaactcagctattattttgcactatgcatggcatgggcagggacagtctccctcaattcgccaacttatcatgcatgcaatggcagaatggtacatgagaggggagcagtatgatcaggccaaattgtctcgaatacttgatgtggcccaggacttgaaggccttgtcaatgctgctaaatggtactccatttgcctttgttattgaccttgctgcacttgcttcacgtcgtgaatacctcaaacttgataagtggctcacagataaaattcgagagcatggggagccttttatccaggcgtgtatgacttttttaaagagacggtgtccttctattttgggcggacttgccccagaaaaagaccagcccaaaagtgctcaacttcctccagaaactttggcgacaatgttggcctgtctgcaagcttgtgcagggagtgtttctcaggagctatcagaaactatcctcaccatggtagccaattgcagtaatgttatgaataaggccagacaaccaccacctggagttatgccaaaaggacgtcctcctagtgctagcagcttagatgccatttctcctgttcagattgaccctcttgctggaatgacatctcttagtataggtggttcagctgcccctcacacccagagtatgcagggttttcctccaaatttgggttctgcattcagtacccctcagtcaccagcaaaagcatttccacccctttcaacccccaatcagaccactgcattcagtggtattggaggactttcatcacagcttccagtaggtggtcttggcacaggcagcctgactggtataggaactggtgctcttggactccctgcagtgaataacgacccttttgtacagaggaaactgggcacctctggactgaatcagcctacattccagcagacggacttgtctcaggtgtggccagaggcaaaccagcactttagtaaagagatagatgatgaagcaaacagctatttccagcgaatatataatcatccaccacatccaaccatgtctgttgatgaggtattagaaatgctgcagagatttaaagactctactataaagagggaacgagaagtatttaactgtatgctaaggaacttgtttgaagaatatcgtttttttccccagtatcctgataaagagttacatataacagcctgcctatttggtggtataattgagaaaggactggtcacttacatggcactaggtctggctctacgatatgttcttgaagccttacgcaagccttttggatccaaaatgtattatttcgggattgctgcactagatagatttaaaaacagattgaaggactatccccagtattgtcagcatttggcttctatcagtcactttatgcaatttccacatcatttacaggagtatattgagtatggacagcagtctagagatcctcctgtgaaaatgcaaggctctatcacaacccctggaagtattgcactggctcaggcccaggctcaggcccaggttccagcaaaagctcctcttgctggtcaagttagcactatggtaaccacctcaacaactaccactgttgctaaaacggttacggtcaccaggccaactggagtcagctttaagaaagatgtgccaccttctattaatactacaaatatagatacgttgcttgtggccacagatcaaactgagagaattgtggagcccccagaaaatatccaggagaaaattgcttttattttcaataatctctcacagtcaaatatgacacaaaaggttgaagagctaaaggaaacggtgaaagaagaatttatgccttgggtttcacagtatctggttatgaagagagtcagtattgagccaaactttcatagcctgtattcaaacttccttgacacgctgaagaatcctgaatttaacaagatggttctgaatgagacctacagaaacattaaagtgctcctgacctctgataaagctgcagccaatttctcagatcgttctttgctgaagaacttgggacattggctaggaatgatcacattagctaaaaacaaacccatcttacacactgacttggatgtgaaatcattgctgctagaggcttatgttaaaggacaacaagaattgctctatgtagtgccctttgttgccaaagtcttagaatctagcattcgtagtgtggtttttaggccaccaaacccttggacaatggcaattatgaatgtattagctgagctacatcaggagcatgacttaaagttaaacttgaagtttgaaatcgaggttctctgcaagaaccttgcattagacatcaatgagctaaaacctggaaacctcctaaaggataaagatcgcctgaagaatttagatgagcaactctctgctccaaagaaagatgtcaagcagccagaagaactccctcccatcacaaccacaacaacttctactacaccagctaccaacaccacttgtacagccacggttccaccacagccacagtacagctaccacgacatcaatgtctattcccttgcgggcttggcaccacacattactctgaatccaacaattcccttgtttcaggcccatccacagttgaagcagtgtgtgcgtcaggcaattgaacgggctgtccaggagctggtccatcctgtggtggatcgatcaattaagattgccatgactacttgtgagcaaatagtcaggaaggattttgccctggattcggaggaatctcgaatgcgaatagcagctcatcacatgatgcgtaacttgacagctggaatggctatgattacatgcagggaacctttgctcatgagcatatctaccaacttaaaaaacagttttgcctcagcccttcgtactgcttccccacaacaaagagaaatgatggatcaggcagctgctcaattagctcaggacaattgtgagttggcttgctgttttattcagaagactgcagtagaaaaagcaggccctgagatggacaagagattagcaactgaatttgagctgagaaaacatgctaggcaagaaggacgcagatactgtgatcctgttgttttaacatatcaagctgaacggatgccagagcaaatcaggctgaaagttggtggtgtggacccaaagcagttggctgtttacgaagagtttgcacgcaatgttcctggcttcttacctacaaatgacttaagtcagcccacgggatttttagcccagcccatgaagcaagcttgggcaacagatgatgtagctcagatttatgataagtgtattacagaactggagcaacatctacatgccatcccaccaactttggccatgaaccctcaagctcaggctcttcgaagtctcttggaggttgtagttttatctcgaaactctcgggatgccatagctgctcttggattgctccaaaaggctgtagagggcttactagatgccacaagtggtgctgatgctgaccttctgctgcgctacagggaatgccacctcttggtcctaaaagctctgcaggatggccgggcatatgggtctccatggtgcaacaaacagatcacaaggtgcctaattgaatgtcgagatgaatataaatataatgtggaggctgtggagctgctaattcgcaatcatttggttaatatgcagcagtatgatcttcacctagcgcagtcaatggagaatggcttaaactacatggctgtggcatttgctatgcagttagtaaaaatcctgctggtggatgaaaggagtgttgctcatgttactgaggcagatctgttccacaccattgaaaccctcatgaggattaatgctcattccagaggcaatgctccagaaggattgccccagctgatggaagtagtgcgatccaactatgaagcaatgattgatcgtgctcatggaggcccaaactttatgatgcattctgggatctctcaagcctcagagtatgatgaccctccaggcctgagggagaaggcagagtatcttctgagggaatgggtgaatctctaccattcagcagcagctggccgcgacagtaccaaagctttctctgcatttgttggacagatgcaccagcaaggaatactgaagaccgatgatctcataacaaggttctttcgtctgtgtactgaaatgtgtgttgaaatcagttaccgtgctcaggctgagcagcagcacaatcctgctgccaatcccaccatgatccgagccaagtgctatcacaacctggatgcctttgttcgactcattgcactgctcgtgaaacactcaggggaggccaccaacactgtcacaaagattaatctgctgaacaaggtccttggtatagtagtgggagttctccttcaggatcatgatgttcgtcagagtgaatttcagcaacttccctaccatcgaatttttatcatgcttctcttggaactcaatgcacctgagcatgtgttggaaaccattaatttccagacacttacagctttctgcaatacattccacatcttgaggcctaccaaagctcctggctttgtatatgcctggcttgaactgatttcccatcggatatttattgcaagaatgctggcacatacgccacagcagaaggggtggcctatgtatgcacagctactgattgatttattcaaatatttagcgcctttccttagaaatgtggaactcaccaaacctatgcaaatcctctacaagggcactttaagagtgctgctggttcttttgcatgatttcccagagttcctttgtgattaccattatgggttctgtgatgtgatcccacctaattgtatccagttaagaaatttgatcctgagtgcctttccaagaaacatgaggctccccgacccattcactcctaatctaaaggtggacatgttgagtgaaattaacattgctccccggattctcaccaatttcactggagtaatgccacctcagttcaaaaaggatttggattcctatcttaaaactcgatcaccagtcactttcctgtctgatctgcgcagcaacctacaggtatccaatgaacctgggaatcgctacaacctccagctcatcaatgcactggtgctctatgtcgggactcaggccattgcgcacatccacaacaagggcagcacaccttcaatgagcaccatcactcactcagcacacatggatatcttccagaatttggctgtggacttggacactgagggtcgctatctctttttgaatgcaattgcaaatcagctccggtacccaaatagccacactcactacttcagttgcaccatgctgtacctttttgcagaggccaatacggaagccatccaagaacagatcacaagagttctcttggaacggttgattgtaaataggccacatccttggggtcttcttattaccttcattgagctgattaaaaacccagcgtttaagttctggaaccatgaatttgtacactgtgccccagaaatcgaaaagttattccagtcggtcgcacagtgctgcatgggacagaagcaggcccagcaagtaatggaagggacaggtgccagttagacgaaactgcatctctgttgtacgtgtcagtctagaggtctcactgcaccgagttcataaactgactgaagaatcctttcagctcttcctgactttcccagccctttggtttgtgggtatctgccccaactactgttgggatcagcctcctgtcttatgtgggcacgttccaaagtttaaatgcatttttttgactcttggccaaaatttagaagatgctgtgaatatcattttgaacttgtgtaaatacatgaaagagaaaa

SEQ ID NO: 115198 - DNA, 578 bp, Homo sapiens
  Payload ID: 2496
  Gene Symbol: CNOT1
  Gene Name: CCR4-NOT transcription complex, subunit 1
  ENST ID: ENST00000562046
  CDS Start-End: 1-578
tttcatcacagcttccagtaggtggtcttggcacaggcagcctgactggtataggaactggtgctcttggactccctgcagtgaataacgacccttttgtacagaggaaactgggcacctctggactgaatcagcctacattccagcagagtaagatgaaaccttcggacttgtctcaggtgtggccagaggcaaaccagcactttagtaaagagatagatgatgaagcaaacagctatttccagcgaatatataatcatccaccacatccaaccatgtctgttgatgagtatcctgataaagagttacatataacagcctgcctatttggtggtataattgagaaaggactggtcacttacatggcactaggtctggctctacgatatgttcttgaagccttacgcaagccttttggatccaaaatgtattatttcgggattgctgcactagatagatttaaaaacagattgaaggactatccccagtattgtcagcatttggcttctatcagtcactttatgcaatttccacatcatttacaggagtatattgagtatggacagcagtctagagat

SEQ ID NO: 115199 - DNA, 7830 bp, Homo sapiens
  Payload ID: 2496
  Gene Symbol: CNOT1
  Gene Name: CCR4-NOT transcription complex, subunit 1
  Uniprot ID: A5YKK6
  ENST ID: ENST00000567188
  CDS Start-End: 280-6732
cattttgtagagaaacaagcggagttaaccgaagagggggtcgaggagagccggagtcggggacccaggagtttcctgtgtccagcgctgccggagccgcctgaggtgccatgtttcagaacagagtaagacccctggtaaagaagaactgaagatattatacagataccagatatagcctaattacaaagaaagcattaacctgcctctgaggtgactaaaggggaataatggtgattttgcgccgggctcggccgcctgcttccgccccaaccagcaatgaatcttgactcgctctcgctggccttgtctcaaatcagctacctggtggacaatttaaccaagaaaaattaccgagccagccagcaggaaatacagcatattgtgaatcggcacggtcctgaggcagacaggcatttattacgctgcctattttcgcatgtggatttcagtggcgatggtaaaagcagtggcaaagatttccatcagactcagtttctgattcaggagtgtgcgttgctgattacaaagccaaattttatctcgacgctgtcctatgccattgataatccattgcactatcagaagagtttaaagcctgcaccccacttatttgcccagctgagtaaagtgctcaaattaagcaaagtacaagaggtaatttttggccttgccctgttgaattcttccagctcagatcttagaggtttcgctgcccagtttatcaaacagaagcttccagatcttctgcgttcttacattgacgcagacgtcagtggaaatcaagaaggtggcttccaagatatagcaatagaggtcctacacctcctcctctcccatctcctctttgggcagaagggagcctttggagttggacaagaacagatagacgcttttcttaagacgctgcgcagagattttccccaagaacgctgtcccgtggtgctcgcaccacttttataccctgaaaaacgggacattctaatggacaggatcctgcctgattccggaggggtagctaaaaccatgatggagagctctttggctgatttcatgcaagaagtaggctatggcttttgtgcaagtattgaagaatgtcgcaatataatcgtgcagtttggtgttcgggaggtcacagctgcccaggttgcaagggttttgggaatgatggctcgaactcattcaggattaacagatggcattccattacagagtatttctgctccgggcagtgggatctggagtgatgggaaagataaaagtgatggagcacaggcacacacatggaatgtagaagtcttgattgacgttcttaaagaactgaatccaagtttgaatttcaaggaagtaacttatgaactggaccatcctggatttcaaattcgtgacagtaaaggacttcataatgtggtttatggcattcagaggggtttgggtatggaagtgttcccagtagacctcatatatagaccttggaaacatgctgaaggccagctctccttcattcaacattcccttataaatccagagatcttctgttttgctgactatccctgtcatactgttgccactgatattctgaaagcaccaccagaggatgacaatcgagaaattgccacatggaagagcttggatttgattgaatctctgctgaggcttgcagaggttgggcagtatgagcaagtcaaacagctcttcagcttccctatcaaacactgtccagacatgctggtattggccttactacaaattaacacctcttggcataccttgcgccatgaacttatctccactctgatgccaattttccttggaaaccatcctaactcagctattattttgcactatgcatggcatgggcagggacagtctccctcaattcgccaacttatcatgcatgcaatggcagaatggtacatgagaggggagcagtatgatcaggccaaattgtctcgaatacttgatgtggcccaggacttgaaggccttgtcaatgctgctaaatggtactccatttgcctttgttattgaccttgctgcacttgcttcacgtcgtgaatacctcaaacttgataagtggctcacagataaaattcgagagcatggggagccttttatccaggcgtgtatgacttttttaaagagacggtgtccttctattttgggcggacttgccccagaaaaagaccagcccaaaagtgctcaacttcctccagaaactttggcgacaatgttggcctgtctgcaagcttgtgcagggagtgtttctcaggagctatcagaaactatcctcaccatggtagccaattgcagtaatgttatgaataaggccagacaaccaccacctggagttatgccaaaaggacgtcctcctagtgctagcagcttagatgccatttctcctgttcagattgaccctcttgctggaatgacatctcttagtataggtggttcagctgcccctcacacccagagtatgcagggttttcctccaaatttgggttctgcattcagtacccctcagtcaccagcaaaagcatttccacccctttcaacccccaatcagaccactgcattcagtggtattggaggactttcatcacagcttccagtaggtggtcttggcacaggcagcctgactggtataggaactggtgctcttggactccctgcagtgaataacgacccttttgtacagaggaaactgggcacctctggactgaatcagcctacattccagcagacggacttgtctcaggtgtggccagaggcaaaccagcactttagtaaagagatagatgatgaagcaaacagctatttccagcgaatatataatcatccaccacatccaaccatgtctgttgatgaggtattagaaatgctgcagagatttaaagactctactataaagagggaacgagaagtatttaactgtatgctaaggaacttgtttgaagaatatcgtttttttccccagtatcctgataaagagttacatataacagcctgcctatttggtggtataattgagaaaggactggtcacttacatggcactaggtctggctctacgatatgttcttgaagccttacgcaagccttttggatccaaaatgtattatttcgggattgctgcactagatagatttaaaaacagattgaaggactatccccagtattgtcagcatttggcttctatcagtcactttatgcaatttccacatcatttacaggagtatattgagtatggacagcagtctagagatcctcctgtgaaaatgcaaggctctatcacaacccctggaagtattgcactggctcaggcccaggctcaggcccaggttccagcaaaagctcctcttgctggtcaagttagcactatggtaaccacctcaacaactaccactgttgctaaaacggttacggtcaccaggccaactggagtcagctttaagaaagatgtgccaccttctattaatactacaaatatagatacgttgcttgtggccacagatcaaactgagagaattgtggagcccccagaaaatatccaggagaaaattgcttttattttcaataatctctcacagtcaaatatgacacaaaaggttgaagagctaaaggaaacggtgaaagaagaatttatgccttgggtttcacagtatctggttatgaagagagtcagtattgagccaaactttcatagcctgtattcaaacttccttgacacgctgaagaatcctgaatttaacaagatggttctgaatgagacctacagaaacattaaagtgctcctgacctctgataaagctgcagccaatttctcagatcgttctttgctgaagaacttgggacattggctaggaatgatcacattagctaaaaacaaacccatcttacacactgacttggatgtgaaatcattgctgctagaggcttatgttaaaggacaacaagaattgctctatgtagtgccctttgttgccaaagtcttagaatctagcattcgtagtgtggtttttaggccaccaaacccttggacaatggcaattatgaatgtattagctgagctacatcaggagcatgacttaaagttaaacttgaagtttgaaatcgaggttctctgcaagaaccttgcattagacatcaatgagctaaaacctggaaacctcctaaaggataaagatcgcctgaagaatttagatgagcaactctctgctccaaagaaagatgtcaagcagccagaagaactccctcccatcacaaccacaacaacttctactacaccagctaccaacaccacttgtacagccacggttccaccacagccacagtacagctaccacgacatcaatgtctattcccttgcgggcttggcaccacacattactctgaatccaacaattcccttgtttcaggcccatccacagttgaagcagtgtgtgcgtcaggcaattgaacgggctgtccaggagctggtccatcctgtggtggatcgatcaattaagattgccatgactacttgtgagcaaatagtcaggaaggattttgccctggattcggaggaatctcgaatgcgaatagcagctcatcacatgatgcgtaacttgacagctggaatggctatgattacatgcagggaacctttgctcatgagcatatctaccaacttaaaaaacagttttgcctcagcccttcgtactgcttccccacaacaaagagaaatgatggatcaggcagctgctcaattagctcaggacaattgtgagttggcttgctgttttattcagaagactgcagtagaaaaagcaggccctgagatggacaagagattagcaactgaatttgagctgagaaaacatgctaggcaagaaggacgcagatactgtgatcctgttgttttaacatatcaagctgaacggatgccagagcaaatcaggctgaaagttggtggtgtggacccaaagcagttggctgtttacgaagagtttgcacgcaatgttcctggcttcttacctacaaatgacttaagtcagcccacgggatttttagcccagcccatgaagcaagcttgggcaacagatgatgtagctcagatttatgataagtgtattacagaactggagcaacatctacatgccatcccaccaactttggccatgaaccctcaagctcaggctcttcgaagtctcttggaggttgtagttttatctcgaaactctcgggatgccatagctgctcttggattgctccaaaaggctgtagagggcttactagatgccacaagtggtgctgatgctgaccttctgctgcgctacagggaatgccacctcttggtcctaaaagctctgcaggatggccgggcatatgggtctccatggtgcaacaaacagatcacaaggtgcctaattgaatgtcgagatgaatataaatataatgtggaggctgtggagctgctaattcgcaatcatttggttaatatgcagcagtatgatcttcacctagcgcagtcaatggagaatggcttaaactacatggctgtggcatttgctatgcagttagtaaaaatcctgctggtggatgaaaggagtgttgctcatgttactgaggcagatctgttccacaccattgaaaccctcatgaggattaatgctcattccagaggcaatgctccagaaggattgccccagctgatggaagtagtgcgatccaactatgaagcaatgattgatcgtgctcatggaggcccaaactttatgatgcattctgggatctctcaagcctcagagtatgatgaccctccaggcctgagggagaaggcagagtatcttctgagggaatgggtgaatctctaccattcagcagcagctggccgcgacagtaccaaagctttctctgcatttgttggacagatgcaccagcaaggaatactgaagaccgatgatctcataacaaggttctttcgtctgtgtactgaaatgtgtgttgaaatcagttaccgtgctcaggctgagcagcagcacaatcctgctgccaatcccaccatgatccgagccaagtgctatcacaacctggatgcctttgttcgactcattgcactgctcgtgaaacactcaggggaggccaccaacactgtcacaaagattaatctgctgaacaaggtccttggtatagtagtgggagttctccttcaggatcatgatgttcgtcagagtgaatttcagcaacttccctaccatcgaatttttatcatgcttctcttggaactcaatgcacctgagcatgtgttggaaaccattaatttccagacacttacagctttctgcaatacattccacatcttgaggcctaccaaagctcctggctttgtatatgcctggcttgaactgatttcccatcggatatttattgcaagaatgctggcacatacgccacagcagaaggggtggcctatgtatgcacagctactgattgatttattcaaatatttagcgcctttccttagaaatgtggaactcaccaaacctatgcaaatcctctacaagggcactttaagagtgctgctggttcttttgcatgatttcccagagttcctttgtgattaccattatgggttctgtgatgtgatcccacctaattgtatccagttaagaaatttgatcctgagtgcctttccaagaaacatgaggctccccgacccattcactcctaatctaaagagtcttactctgtgacccaggctggagtgcagtggtgcagtctcggcttactgcaacctccccttcgctggttcaagctattctcccgcctcagcctcccaagtagctgggattacaggcactcgccaccacacctggctaattatgtgtttagtggagatggggtttcgccatgtcagccaggtggacatgttgagtgaaattaacattgctccccggattctcaccaatttcactggagtaatgccacctcagttcaaaaaggatttggattcctatcttaaaactcgatcaccagtcactttcctgtctgatctgcgcagcaacctacaggtatccaatgaacctgggaatcgctacaacctccagctcatcaatgcactggtgctctatgtcgggactcaggccattgcgcacatccacaacaagggcagcacaccttcaatgagcaccatcactcactcagcacacatggatatcttccagaatttggctgtggacttggacactgagggtcgctatctctttttgaatgcaattgcaaatcagctccggtacccaaatagccacactcactacttcagttgcaccatgctgtacctttttgcagaggccaatacggaagccatccaagaacagatcacaagagttctcttggaacggttgattgtaaataggccacatccttggggtcttcttattaccttcattgagctgattaaaaacccagcgtttaagttctggaaccatgaatttgtacactgtgccccagaaatcgaaaagttattccagtcggtcgcacagtgctgcatgggacagaagcaggcccagcaagtaatggaagggacaggtgccagttagacgaaactgcatctctgttgtacgtgtcagtctagaggtctcactgcaccgagttcataaactgactgaagaatcctttcagctcttcctgactttcccagccctttggtttgtgggtatctgccccaactactgttgggatcagcctcctgtcttatgtgggcacgttccaaagtttaaatgcatttttttgactcttggccaaaatttagaagatgctgtgaatatcattttgaacttgtgtaaatacat

SEQ ID NO: 115200 - DNA, 582 bp, Homo sapiens
  Payload ID: 2496
  Gene Symbol: CNOT1
  Gene Name: CCR4-NOT transcription complex, subunit 1
  ENST ID: ENST00000564557
  CDS Start-End: 395-582
tagagaaacaagcggagttaaccgaagagggggtcgaggagagccggagtcggggacccaggagtttcctgtgtccagcgctgccggagccgcctgagatggagtcttgctctgttgcccaggcttgagagcagtggtgtgatctcggctcactgcaacgtccgcctcccaggttcaagtgattctcctccctcagcctcccgagtagctgggattacaggtgccatgtttcagaacagagtaagacccctggtaaagaagaactgaagatattatacagataccagatatagcctaattacaaagaaagcattaacctgcctctgaggtgactaaaggggaataatggtgattttgcgccgggctcggccgcctgcttccgccccaaccagcaatgaatcttgactcgctctcgctggccttgtctcaaatcagctacctggtggacaatttaaccaagaaaaattaccgagccagccagcaggaaatacagcatattgtgaatcggcacggtcctgaggcagacaggcatttattacgctgcctattttcgcatgtggatttcagtggcgatggtaaaag

SEQ ID NO: 115201 - DNA, 567 bp, Homo sapiens
  Payload ID: 2496
  Gene Symbol: CNOT1
  Gene Name: CCR4-NOT transcription complex, subunit 1
  ENST ID: ENST00000566240
  CDS Start-End: 1-205
taagattgccatgactacttgtgagcaaatagtcaggaaggattttgccctggattcggaggaatctcgaatgcgaatagcagctcatcacatgatgcgtaacttgacagctggaatggctatgattacatgcagggaacctttgctcatgagcatatctaccaacttaaaaaacagttttgcctcagcccttcgtgaaggatgaaagctgtttgagaaggccgatacaaaatgacttaaagtgatgttgcatgtgcacacacttttcaaataattcacttactagttttgagtctcagatatcatggttaataattcagactgcttccccacaacaaagagaaatgatggatcaggcagctgctcaattagctcaggacaattgtgagttggcttgctgttttattcagaagactgcagtagaaaaagcaggccctgagatggacaagagattagcaactgaatttgagctgagaaaacatgctaggcaagaaggacgcagatactgtgatcctgttgttttaacatatcaagctgaacggatgccagagcaaatcaggctgaaag

SEQ ID NO: 115202 - DNA, 739 bp, Homo sapiens
  Payload ID: 2496
  Gene Symbol: CNOT1
  Gene Name: CCR4-NOT transcription complex, subunit 1
  ENST ID: ENST00000565605
  CDS Start-End: 280-570
cattttgtagagaaacaagcggagttaaccgaagagggggtcgaggagagccggagtcggggacccaggagtttcctgtgtccagcgctgccggagccgcctgaggtgccatgtttcagaacagagtaagacccctggtaaagaagaactgaagatattatacagataccagatatagcctaattacaaagaaagcattaacctgcctctgaggtgactaaaggggaataatggtgattttgcgccgggctcggccgcctgcttccgccccaaccagcaatgaatcttgactcgctctcgctggccttgtctcaaatcagctacctggtggacaatttaaccaagaaaaattaccgagccagccagcaggaaatacagcatattgtgaatcggcacggtcctgaggcagacaggcatttattacgctgcctattttcgcatgtggatttcagtggcgatggtaaaagcagtggcaaagatttccatcagactcagtttctgattcaggagtgtgcgttgctgattacaaagccaaattgtctcgaatacttgatgtggcccaggacttgaaggccttgtcaatgctgctaaatggtactccatttgcctttgttattgaccttgctgcacttgcttcacgtcgtgaatacctcaaacttgataagtggctcacagataaaattcgagagcatggggagccttttatccaggcgtgtatgacttttttaaagagacggtg

SEQ ID NO: 115203 - DNA, 535 bp, Homo sapiens
  Payload ID: 2496
  Gene Symbol: CNOT1
  Gene Name: CCR4-NOT transcription complex, subunit 1
  ENST ID: ENST00000569020
  CDS Start-End: 461-535
aaatgggaacggggaggggaaaggccgcgacgtgagcgcgcgacctccggcgccattttgtagagaaacaagcggagttaaccgaagagggggtcgaggagagccggagtcggggacccaggagtttcctgtgtccagcgctgccggagccgcctgaggtgaccagcacccatgcagaaactacctagaagttgccaagctatcagtcaactcagcatacaaaaagaaacttaccattctaaggatcttagaagttgtatgccaggaaatgggatgaagaccaaatgtgccatgtttcagaacagagtaagacccctggtaaagaagaactgaagatattatacagataccagatatagcctaattacaaagaaagcattaacctgcctctgaggtgactaaaggggaataatggtgattttgcgccgggctcggccgcctgcttccgccccaaccagcaatgaatcttgactcgctctcgctggccttgtctcaaatcagctacctggtggacaatttaaccaagaaaaattac

SEQ ID NO: 115204 - DNA, 722 bp, Homo sapiens
  Payload ID: 2496
  Gene Symbol: CNOT1
  Gene Name: CCR4-NOT transcription complex, subunit 1
  ENST ID: ENST00000567285
  CDS Start-End: 1-722
tatcacaacccctggaagtattgcactggctcaggcccaggctcaggcccaggttccagcaaaagctcctcttgctggtcaagttagcactatggtaaccacctcaacaactaccactgttgctaaaacggttacggtcaccaggccaactggagtcagctttaagaaagatgtgccaccttctattaatactacaaatatagatacgttgcttgtggccacagatcaaactgagagaattgtggagcccccagaaaatatccaggagaaaattgcttttattttcaataatctctcacagtcaaatatgacacaaaaggttgaagagctaaaggaaacggtgaaagaagaatttatgccttgggtttcacagtatctggttatgaagagagtcagtattgagccaaactttcatagcctgtattcaaacttccttgacacgctgaagaatcctgaatttaacaagatggttctgaatgagacctacagaaacattaaagacttggatgtgaaatcattgctgctagaggcttatgttaaaggacaacaagaattgctctatgtagtgccctttgttgccaaagtcttagaatctagcattcgtagtgtggtttttaggccaccaaacccttggacaatggcaattatgaatgtattagctgagctacatcaggagcatgacttaaagttaaacttgaagtttgaaatcgaggttctctgca

SEQ ID NO: 115205 - DNA, 291 bp, Homo sapiens
  Payload ID: 2496
  Gene Symbol: CNOT1
  Gene Name: CCR4-NOT transcription complex, subunit 1
  ENST ID: ENST00000628857
  CDS Start-End: 1-291
atgaatcttgactcgctctcgctggccttgtctcaaatcagctacctggtggacaatttaaccaagaaaaattaccgagccagccagcaggaaatacagcatattgtgaatcggcacggtcctgaggcagacaggcatttattacgctgcctattttcgcatgtggatttcagtggcgatggtaaaagcagtggcaaagatttccatcagactcagtttctgattcaggagtgtgcgttgctgattacaaagccaaattgtctcgaatacttgatgtggcccaggacttga

SEQ ID NO: 115206 - DNA, 2573 bp, Homo sapiens
  Payload ID: 2497
  Gene Symbol: CNOT10
  Gene Name: CCR4-NOT transcription complex, subunit 10
  Uniprot ID: Q9H9A5
  ENST ID: ENST00000331889
  CDS Start-End: 317-2470
cacgccggcgctccaggcgcggcaggctgccgcccccggaagtagtgggtaccgggacgccgtgaggcggaagctgtgtatggcgggaggctgtggcggtcccttggtggggaagctgttgctgttgctagacgacgggaactagctctcgtcacttcctcagcccgccgtctgcccactcctctagccggaacctgggggcccggagccggggtaggcacagagttgtcctcggaggtccaggacagcggccagcccggcggcgggagtcagggccacgccacctgcagggaagaacccgagtcgaagcgggaagatggctgcagacaagcctgcagatcagggagcagagaaacatgaaggcacaggtcagtcctctgggatcactgatcaagagaaggagttatccaccaatgctttccaagctttcacatctggaaattatgatgcctgtctacaacaccttgcctgtctacaagatataaacaaagatgattataaaataattttgaatacagcagtagctgagttttttaaaagtaaccaaacaacaacagataatttgagacaaacacttaaccagctgaagaatcaggtccactcagctgttgaagaaatggatggattagatgatgttgaaaacagcatgttgtactataatcaagcagtcattctttatcatctgcggcagtatacagaagccatatcagttggtgaaaaactttatcagttcatagagccttttgaagaaaaatttgcccaagcagtgtgttttttgcttgtagacctgtatatattaacctaccaagctgagaaagctttgcatcttcttgctgtcctagaaaaaatgatttcacagggtaacaataacaaaaatggaaagaatgagactggtaataacaacaacaaagatggatctaatcataaagctgaaagtggagctctaatagaagctgcaaaatcaaagatacatcagtacaaagtacgagcttatatccaaatgaagtctctgaaagcatgtaaaagggaaatcaagtcagtcatgaatacagctggaaattccgcaccctctctctttcttaaaagcaattttgagtacttaagaggtaattatcgaaaagccgtgaagctattaaatagttcaaacattgctgagcatccaggattcatgaaaacaggtgaatgcttgagatgcatgttctggaataaccttggttgcatccattttgccatgagcaagcacaatttgggaatattctactttaaaaaggctctgcaagagaatgacaatgtctgtgcacagctcagtgcaggtagcactgatccaggtaaaaaattttcaggaagacccatgtgtacgttactaaccaataagagatatgagttgctgtataactgtggaattcagcttcttcacattggaaggcctcttgctgccttcgaatgtctgattgaagctgttcaggtttatcatgcaaatcctcgcctctggctacggctggctgaatgctgcattgctgccaataaggggacttctgaacaagaaactaaaggccttcccagcaaaaaaggaattgtacagtctattgttggtcaaggctatcatcgtaaaatagttttggcatcacagtctatacagaatactgtttataatgatgggcagtcttcggccattcctgtagccagtatggagtttgcagccatatgtctcagaaatgccttgttgctgctacctgaagaacagcaagatccaaagcaggaaaatggggctaaaaatagtaatcaattaggtgggaacacagagagcagcgaaagcagtgaaacttgcaggtgctccatacttgcttgcagtgcctacgtggctctggctttgggtgataacctcatggctttgaatcatgcagataaacttcttcagcagcccaagctgtcaggatctcttaagtttttgggacatttatatgctgcagaagccctcatctctctcgacagaatatctgatgccattactcacttgaacccggagaatgtcactgatgtctccttagggatctcttcaaatgagcaggaccaaggatcagacaaaggtgaaaatgaagcaatggaatcctctggtaagcgggcccctcagtgctaccccagttccgtcaactctgccaggactgtgatgctgttcaaccttggcagcgcttactgcctgaggagcgaatatgacaaagcccgaaagtgtctccaccaggcggcttcaatgatccatcctaaagaggtgccccctgaggccatcttgctggcagtctaccttgaactgcagaatggtaatactcagctggccttacagatcatcaaaaggaatcagctgctccctgcagtgaaaacacactctgaagtgagaaagaagccagtgtttcagcctgtccacccgatccagcccatccaaatgccggctttcaccactgtgcagagaaagtgatacttcacttttggaaaactgttacctgagacccaggggagaatttactggccattttagttgtatcacagcagaatgaataaaagatggtgaaggctgttaa

SEQ ID NO: 115207 - DNA, 2815 bp, Homo sapiens
  Payload ID: 2497
  Gene Symbol: CNOT10
  Gene Name: CCR4-NOT transcription complex, subunit 10
  Uniprot ID: Q9H9A5
  ENST ID: ENST00000328834
  CDS Start-End: 317-2551
cacgccggcgctccaggcgcggcaggctgccgcccccggaagtagtgggtaccgggacgccgtgaggcggaagctgtgtatggcgggaggctgtggcggtcccttggtggggaagctgttgctgttgctagacgacgggaactagctctcgtcacttcctcagcccgccgtctgcccactcctctagccggaacctgggggcccggagccggggtaggcacagagttgtcctcggaggtccaggacagcggccagcccggcggcgggagtcagggccacgccacctgcagggaagaacccgagtcgaagcgggaagatggctgcagacaagcctgcagatcagggagcagagaaacatgaaggcacaggtcagtcctctgggatcactgatcaagagaaggagttatccaccaatgctttccaagctttcacatctggaaattatgatgcctgtctacaacaccttgcctgtctacaagatataaacaaagatgattataaaataattttgaatacagcagtagctgagttttttaaaagtaaccaaacaacaacagataatttgagacaaacacttaaccagctgaagaatcaggtccactcagctgttgaagaaatggatggattagatgatgttgaaaacagcatgttgtactataatcaagcagtcattctttatcatctgcggcagtatacagaagccatatcagttggtgaaaaactttatcagttcatagagccttttgaagaaaaatttgcccaagcagtgtgttttttgcttgtagacctgtatatattaacctaccaagctgagaaagctttgcatcttcttgctgtcctagaaaaaatgatttcacagggtaacaataacaaaaatggaaagaatgagactggtaataacaacaacaaagatggatctaatcataaagctgaaagtggagctctaatagaagctgcaaaatcaaagatacatcagtacaaagtacgagcttatatccaaatgaagtctctgaaagcatgtaaaagggaaatcaagtcagtcatgaatacagctggaaattccgcaccctctctctttcttaaaagcaattttgagtacttaagaggtaattatcgaaaagccgtgaagctattaaatagttcaaacattgctgagcatccaggattcatgaaaacaggtgaatgcttgagatgcatgttctggaataaccttggttgcatccattttgccatgagcaagcacaatttgggaatattctactttaaaaaggctctgcaagagaatgacaatgtctgtgcacagctcagtgcaggtagcactgatccaggtaaaaaattttcaggaagacccatgtgtacgttactaaccaataagagatatgagttgctgtataactgtggaattcagcttcttcacattggaaggcctcttgctgccttcgaatgtctgattgaagctgttcaggtttatcatgcaaatcctcgcctctggctacggctggctgaatgctgcattgctgccaataaggggacttctgaacaagaaactaaaggccttcccagcaaaaaaggaattgtacagtctattgttggtcaaggctatcatcgtaaaatagttttggcatcacagtctatacagaatactgtttataatgatgggcagtcttcggccattcctgtagccagtatggagtttgcagccatatgtctcagaaatgccttgttgctgctacctgaagaacagcaagatccaaagcaggaaaatggggctaaaaatagtaatcaattaggtgggaacacagagagcagcgaaagcagtgaaacttgcagcagtaaaagccatgatggagataaattcattccagctccaccttcttctccattgagaaaacaggaattagaaaacttaaagtgctccatacttgcttgcagtgcctacgtggctctggctttgggtgataacctcatggctttgaatcatgcagataaacttcttcagcagcccaagctgtcaggatctcttaagtttttgggacatttatatgctgcagaagccctcatctctctcgacagaatatctgatgccattactcacttgaacccggagaatgtcactgatgtctccttagggatctcttcaaatgagcaggaccaaggatcagacaaaggtgaaaatgaagcaatggaatcctctggtaagcgggcccctcagtgctaccccagttccgtcaactctgccaggactgtgatgctgttcaaccttggcagcgcttactgcctgaggagcgaatatgacaaagcccgaaagtgtctccaccaggcggcttcaatgatccatcctaaagaggtgccccctgaggccatcttgctggcagtctaccttgaactgcagaatggtaatactcagctggccttacagatcatcaaaaggaatcagctgctccctgcagtgaaaacacactctgaagtgagaaagaagccagtgtttcagcctgtccacccgatccagcccatccaaatgccggctttcaccactgtgcagagaaagtgatacttcacttttggaaaactgttacctgagacccaggggagaatttactggccattttagttgtatcacagcagaatgaataaaagatggtgaaggctgttaattttgagtcaattctacccctgacatttggccaaaagcttacttaaaattaaggatttactaagtcatcatcagctgtttttcttaatttcagccagactattaattttgagccattatgtaatatatgccataggcaattaaaacataattttatcagaa

SEQ ID NO: 115208 - DNA, 770 bp, Homo sapiens
  Payload ID: 2497
  Gene Symbol: CNOT10
  Gene Name: CCR4-NOT transcription complex, subunit 10
  ENST ID: ENST00000455381
  CDS Start-End: 1-132
ggattagatgatgttgaaaacagcatgttgtactataatcaagcagtcattctttatcatctgcggcagtatacagaagccatatcagttggtgaaaaactttatcagttcatagagccttttgactggtaataacaacaacaaagatggatctaatcataaagctgaaagtggagctctaatagaagctgcaaaatcaaagatacatcagtacaaagtacgagcttatatccaaatgaagtctctgaaagcatgtaaaagggaaatcaagtcagtcatgaatacagctggaaattccgcaccctctctctttcttaaaagcaattttgagtacttaagaggtaattatcgaaaagccgtgaagctattaaatagttcaaacattgctgagcatccaggattcatgaaaacaggtgaatgcttgagatgcatgttctggaataaccttggttgcatccattttgccatgagcaagcacaatttgggaatattctactttaaaaaggctctgcaagagaatgacaatgtctgtgcacagctcagtgcaggtagcactgatccaggtaaaaaattttcaggaagacccatgtgtacgttactaaccaataagagatatgagttgctgtataactgtggaattcagcttcttcacattggaaggcctcttgctgccttcgaatgtctgattgaagctgttcaggtttatcatgcaaatcctcgcctctggctacggctggctgaatgctgcattgctgccaataagggggtga

SEQ ID NO: 115209 - DNA, 687 bp, Homo sapiens
  Payload ID: 2497
  Gene Symbol: CNOT10
  Gene Name: CCR4-NOT transcription complex, subunit 10
  ENST ID: ENST00000430408
  CDS Start-End: 1-687
cctgtagccagtatggagtttgcagccatatgtctcagaaatgccttgttgctgctacctgaagaacagcaagatccaaagcaggaaaatggggctaaaaatagtaatcaattaggtgggaacacagagagcagcgaaagcagtgaaacttgcagcagtaaaagccatgatggagataaattcattccagctccaccttcttctccattgagaaaacaggaattagaaaacttaaagtgctccatacttgcttgcagtgcctacgtggctctggctttgggtgataacctcatggctttgaatcatgcagataaacttcttcagcagcccaagctgtcaggatctcttaagtttttgggacatttatatgctgcagaagccctcatctctctcgacagaatatctgatgccattactcacttgaacccggagaatgtcactgatgtctccttagggatctcttcaaatgagcaggaccaagctggtaagcgggcccctcagtgctaccccagttccgtcaactctgccaggactgtgatgctgttcaaccttggcagcgcttactgcctgaggagcgaatatgacaaagcccgaaagtgtctccaccaggcggcttcaatgatccatcctaaagaggtgccccctgaggccatcttgctggcagtctaccttgaactgcagaatggt

SEQ ID NO: 115210 - DNA, 2760 bp, Homo sapiens
  Payload ID: 2497
  Gene Symbol: CNOT10
  Gene Name: CCR4-NOT transcription complex, subunit 10
  Uniprot ID: Q9H9A5
  ENST ID: ENST00000454516
  CDS Start-End: 86-2500
agttaactgatgattttcagttttgaaaacgtggtgcatttcttttctgcttagttcaaacctaaaggcaattgtttatttagaaatgaagtctattggtgtaaagactgtcaaggtttgtgggtcaaagagctctgtacgcatagaaggtcagccatgttcattaggccagagtagaaggaaagtcaagcttatgggtgaacggtcgtatactctttcaattggcaacggagactacttttgggcaaataaagaaatgctgtgggattatgtgcagactctgtctgatcagggagcagagaaacatgaaggcacaggtcagtcctctgggatcactgatcaagagaaggagttatccaccaatgctttccaagctttcacatctggaaattatgatgcctgtctacaacaccttgcctgtctacaagatataaacaaagatgattataaaataattttgaatacagcagtagctgagttttttaaaagtaaccaaacaacaacagataatttgagacaaacacttaaccagctgaagaatcaggtccactcagctgttgaagaaatggatggattagatgatgttgaaaacagcatgttgtactataatcaagcagtcattctttatcatctgcggcagtatacagaagccatatcagttggtgaaaaactttatcagttcatagagccttttgaagaaaaatttgcccaagcagtgtgttttttgcttgtagacctgtatatattaacctaccaagctgagaaagctttgcatcttcttgctgtcctagaaaaaatgatttcacagggtaacaataacaaaaatggaaagaatgagactggtaataacaacaacaaagatggatctaatcataaagctgaaagtggagctctaatagaagctgcaaaatcaaagatacatcagtacaaagtacgagcttatatccaaatgaagtctctgaaagcatgtaaaagggaaatcaagtcagtcatgaatacagctggaaattccgcaccctctctctttcttaaaagcaattttgagtacttaagaggtaattatcgaaaagccgtgaagctattaaatagttcaaacattgctgagcatccaggattcatgaaaacaggtgaatgcttgagatgcatgttctggaataaccttggttgcatccattttgccatgagcaagcacaatttgggaatattctactttaaaaaggctctgcaagagaatgacaatgtctgtgcacagctcagtgcaggtagcactgatccaggtaaaaaattttcaggaagacccatgtgtacgttactaaccaataagagatatgagttgctgtataactgtggaattcagcttcttcacattggaaggcctcttgctgccttcgaatgtctgattgaagctgttcaggtttatcatgcaaatcctcgcctctggctacggctggctgaatgctgcattgctgccaataaggggacttctgaacaagaaactaaaggccttcccagcaaaaaaggaattgtacagtctattgttggtcaaggctatcatcgtaaaatagttttggcatcacagtctatacagaatactgtttataatgatgggcagtcttcggccattcctgtagccagtatggagtttgcagccatatgtctcagaaatgccttgttgctgctacctgaagaacagcaagatccaaagcaggaaaatggggctaaaaatagtaatcaattaggtgggaacacagagagcagcgaaagcagtgaaacttgcagcagtaaaagccatgatggagataaattcattccagctccaccttcttctccattgagaaaacaggaattagaaaacttaaagtgctccatacttgcttgcagtgcctacgtggctctggctttgggtgataacctcatggctttgaatcatgcagataaacttcttcagcagcccaagctgtcaggatctcttaagtttttgggacatttatatgctgcagaagccctcatctctctcgacagaatatctgatgccattactcacttgaacccggagaatgtcactgatgtctccttagggatctcttcaaatgagcaggaccaaggatcagacaaaggtgaaaatgaagcaatggaatcctctggtaagcgggcccctcagtgctaccccagttccgtcaactctgccaggactgtgatgctgttcaaccttggcagcgcttactgcctgaggagcgaatatgacaaagcccgaaagtgtctccaccaggcggcttcaatgatccatcctaaagaggtgccccctgaggccatcttgctggcagtctaccttgaactgcagaatggtaatactcagctggccttacagatcatcaaaaggaatcagctgctccctgcagtgaaaacacactctgaagtgagaaagaagccagtgtttcagcctgtccacccgatccagcccatccaaatgccggctttcaccactgtgcagagaaagtgatacttcacttttggaaaactgttacctgagacccaggggagaatttactggccattttagttgtatcacagcagaatgaataaaagatggtgaaggctgttaattttgagtcaattctacccctgacatttggccaaaagcttacttaaaattaaggatttactaagtcatcatcagctgtttttcttaatttcagccagactattaattttgagccattatgtaatatatgccataggcaattaaaacataattttatc

SEQ ID NO: 115211 - DNA, 2290 bp, Homo sapiens
  Payload ID: 2497
  Gene Symbol: CNOT10
  Gene Name: CCR4-NOT transcription complex, subunit 10
  ENST ID: ENST00000435630
  CDS Start-End: 242-2071
gtgtatggcgggaggctgtggcggtcccttggtggggaagctgttgctgttgctagacgacgggaactagctctcgtcacttcctcagcccgccgtctgcccactcctctagccggaacctgggggcccggagccggggtaggcacagagttgtcctcggaggtccaggacagcggccagcccggcggcgggagtcagggccacgccacctgcagggaagaacccgagtcgaagcgggaagatggctgcagacaagcctgcagatcagggagcagagaaacatgaaggcacaggtcagtcctctgggatcactgatcaagagaaggagttatccaccaatgctttccaagctttcacagtccactcagctgttgaagaaatggatggattagatgatgttgaaaacagcatgttgtactataatcaagcagtcattctttatcatctgcggcagtatacagaagccatatcagttggtgaaaaactttatcagttcatagagccttttgaagaaaaatttgcccaagcagtgtgttttttgcttgtagacctgtatatattaacctaccaagctgagaaagctttgcatcttcttgctgtcctagaaaaaatgatttcacagggtaacaataacaaaaatggaaagaatgagactggtaataacaacaacaaagatggatctaatcataaagctgaaagtggagctctaatagaagctgcaaaatcaaagatacatcagtacaaagtacgagcttatatccaaatgaagtctctgaaagcatgtaaaagggaaatcaagtcagtcatgaatacagctggaaattccgcaccctctctctttcttaaaagcaattttgagtacttaagaggtaattatcgaaaagccgtgaagctattaaatagttcaaacattgctgagcatccaggattcatgaaaacaggtgaatgcttgagatgcatgttctggaataaccttggttgcatccattttgccatgagcaagcacaatttgggaatattctactttaaaaaggctctgcaagagaatgacaatgtctgtgcacagctcagtgcaggtagcactgatccaggtaaaaaattttcaggaagacccatgtgtacgttactaaccaataagagatatgagttgctgtataactgtggaattcagcttcttcacattggaaggcctcttgctgccttcgaatgtctgattgaagctgttcaggtttatcatgcaaatcctcgcctctggctacggctggctgaatgctgcattgctgccaataaggggacttctgaacaagaaactaaaggccttcccagcaaaaaaggaattgtacagtctattgttggtcaaggctatcatcgtaaaatagttttggcatcacagtctatacagaatactgtttataatgatgggcagtcttcggccattcctgtagccagtatggagtttgcagccatatgtctcagaaatgccttgttgctgctacctgaagaacagcaagatccaaagcaggaaaatggggctaaaaatagtaatcaattaggtgggaacacagagagcagcgaaagcagtgaaacttgcaggtgctccatacttgcttgcagtgcctacgtggctctggctttgggtgataacctcatggctttgaatcatgcagataaacttcttcagcagcccaagctgtcaggatctcttaagtttttgggacatttatatgctgcagaagccctcatctctctcgacagaatatctgatgccattactcacttgaacccggagaatgtcactgatgtctccttagggatctcttcaaatgagcaggaccaaggatcagacaaaggtgaaaatgaagcaatggaatcctctggtaagcgggcccctcagtgctaccccagttccgtcaactctgccaggactgtgatgctgttcaaccttggcagcgcttactgcctgaggagcgaatatgacaaagcccgaaagtgtctccaccaggcacagtggctcatgcctcccagcactttgggaggccgaggcaggcggatcatgaggtcaggagtttgagaccagcctggccaatatggtgaaaccccatctctactaaaaatacaaaaattagccaggtaatactcagctggccttacagatcatcaaaaggaatcagctgctccctgcagtgaaaacacactctgaagtgagaaagaagccagtgtttcagcctgtccacccgatccagcccatccaaatgccggctttcaccactgtgcagagaaagtgatactt

SEQ ID NO: 115212 - DNA, 2096 bp, Homo sapiens
  Payload ID: 2497
  Gene Symbol: CNOT10
  Gene Name: CCR4-NOT transcription complex, subunit 10
  ENST ID: ENST00000416457
  CDS Start-End: 1-632
attatgatgcctgtctacaacaccttgcctgtctacaagatataaacaaagatgattataaaataattttgaatacagcagtagctgagttttttaaaagtaaccaaacaacaacagataatttgagacaaacacttaaccagctgaagaatcaggtccactcagctgttgaagaaatggatggattagatgatgttgaaaacagcatgttgtactataatcaagcagtcattctttatcatctgcggcagtatacagaagccatatcagttggtgaaaaactttatcagttcatagagccttttgaagaaaaatttgcccaagcagtgtgttttttgcttgtagacctgtatatattaacctaccaagctgagaaagctttgcatcttcttgctgtcctagaaaaaatgatttcacagggtaacaataacaaaaatggaaagaatgagactggtaataacaacaacaaagatggatctaatcataaagctgaaagtggagctctaatagaagctgcaaaatcaaagatacatcagtacaaagtacgagcttatatccaaatgaagtctctgaaagcatgtaaaagggaaatcaagtcagtcatgaatacagctggaaatgtgaatgcttgagatgcatgttctggaataaccttggttgcatccattttgccatgagcaagcacaatttgggaatattctactttaaaaaggctctgcaagagaatgacaatgtctgtgcacagctcagtgcaggtagcactgatccaggtaaaaaattttcaggaagacccatgtgtacgttactaaccaataagagatatgagttgctgtataactgtggaattcagcttcttcacattggaaggcctcttgctgccttcgaatgtctgattgaagctgttcaggtttatcatgcaaatcctcgcctctggctacggctggctgaatgctgcattgctgccaataaggggacttctgaacaagaaactaaaggccttcccagcaaaaaaggaattgtacagtctattgttggtcaaggctatcatcgtaaaatagttttggcatcacagtctatacagaatactgtttataatgatgggcagtcttcggccattcctgtagccagtatggagtttgcagccatatgtctcagaaatgccttgttgctgctacctgaagaacagcaagatccaaagcaggaaaatggggctaaaaatagtaatcaattaggtgggaacacagagagcagcgaaagcagtgaaacttgcagcagtaaaagccatgatggagataaattcattccagctccaccttcttctccattgagaaaacaggaattagaaaacttaaagtgctccatacttgcttgcagtgcctacgtggctctggctttgggtgataacctcatggctttgaatcatgcagataaacttcttcagcagcccaagctgtcaggatctcttaagtttttgggacatttatatgctgcagaagccctcatctctctcgacagaatatctgatgccattactcacttgaacccggagaatgtcactgatgtctccttagggatctcttcaaatgagcaggaccaaggatcagacaaaggtgaaaatgaagcaatggaatcctctggtaagcgggcccctcagtgctaccccagttccgtcaactctgccaggactgtgatgctgttcaaccttggcagcgcttactgcctgaggagcgaatatgacaaagcccgaaagtgtctccaccaggcggcttcaatgatccatcctaaagaggtgccccctgaggccatcttgctggcagtctaccttgaactgcagaatggtaatactcagctggccttacagatcatcaaaaggaatcagctgctccctgcagtgaaaacacactctgaagtgagaaagaagccagtgtttcagcctgtccacccgatccagcccatccaaatgccggctttcaccactgtgcagagaaagtgatacttcacttttggaaaactgttacctgagacccaggggagaatttactggccattttagttgtatcacagcagaatgaataaaagatggtgaaggctgttaa

SEQ ID NO: 115213 - DNA, 2599 bp, Homo sapiens
  Payload ID: 2498
  Gene Symbol: CNOT11
  Gene Name: CCR4-NOT transcription complex, subunit 11
  Uniprot ID: Q9UKZ1
  ENST ID: ENST00000289382
  CDS Start-End: 164-1696
cctcgctttcgctgggcgctgtccctctccgcggcggtctggtttccccgacgtgttttgtttgcgacgctgtcgtgtaacagcgcgctttacggccgcggggacggagcgagccggcgccagggcccctcgggccgggaagaggggaaggggagcgaggttgatgcccggcggaggggcgagcgcggcgtctggccggcttctcaccgccgcggagcaaagagggtcccgggaagcggcagggtcggcgtccaggagcggcttcgggggctccggcggcggcagaggcggagcaagcggccccgggtccgggagcggaggcccggggggccccgcgggcaggatgagcttgaccccgaaggagctctcgagcctgctgagcatcatatcggaggaggcgggcggcggcagcaccttcgagggcctgtccaccgccttccaccactacttcagcaaggccgaccacttccgcctgggctcggtgctcgtcatgctgctccagcagcccgacctgctgcctagcgcggcgcagcgcctcacggcgctctacctgctctgggagatgtaccgcaccgagccgctggccgccaaccccttcgccgccagcttcgcgcacctgctcaaccccgcgccgcccgcccgcggcggccaggaacccgaccgccctccgctctcaggatttttacctcctataactccaccagaaaagttttttctttcccagctgatgctggcacccccacgggaactcttcaaaaagacgcctcgccagattgcactgatggacgttggaaacatgggccagtctgtggacattagtgggcttcagttagccttggccgaacgccaatctgaattgccaacgcaaagcaaagcgagcttccccagtattctcagtgacccagacccggattcttctaattctggatttgacagctcagttgcctctcagatcacagaagctttagtcagcggaccaaagccacctattgaaagccattttcgaccagagtttattcgtccaccgcctccactccacatttgtgaggatgaacttgcttggctaaaccccacggagcctgaccacgcgatccagtgggataaatcgatgtgtgttaagaatagcactggtgtggagatcaaacgaataatggccaaagccttcaaaagccccttatcctctccccaacaaacacagctacttggtgagttggaaaaagaccccaaacttgtctaccatattggcctcaccccagccaaacttcctgaccttgtggaaaacaaccctttagtcgctatagaaatgttgctgaaattaatgcagtcaagccagatcactgagtatttctctgtcctggtcaatatggacatgtctttacattcaatggaagttgtaaatcgactaactacagctgttgatctacctcctgaatttattcacctttatatatcaaattgcatctctacttgtgaacagattaaggataaatatatgcagaatcggttggtgcgtcttgtgtgtgtgtttctccaatccttgatccgtaacaaaattattaatgtacaggatttgtttatagaagtgcaggcattctgtattgaattcagtaggatacgagaagctgctggtcttttccggttgttgaagacattggatactggggaaacaccttctgagaccaaaatgtcaaaataatacctcatcagaaccatcccatccattcactgttcagctgtactgtgatttagtttttacaccgttaaaaccctgagtggattgcttggtttaatgcatataaacagtactttatctacttaaagcaaagttttgctttcttgaatgactttttctgtgagatgaatttttgataagaactagggaaaacatgtcttttaggtgtcttgctgatgactatccataggaggaatggctatcccaaaaaaagttccgcaaaaaagtagatgagtttcttttttttttaagcactaaagaacaaaatgcatttttcattaatacaggcttctgatgaaccaggaatcctgttttcgtaaagttccaatgttgatgagagtaaattcttaagcatttgtcctagaggtgaaagcagctgaatgtttctgaaccatcaagaggcaaacaaacaggagtttgtttcttgaacctgcttatgcacacagctcttaactcctcatgaggcacacagctcttaactcctgatgaaccaaggatttactcataactttctccttgtcatggaggcttaatagacaacagaataaatgcatttcttgggcctcttataaacttgggaattcttagaaagctgcttctattaccaggctgtaatagctggtatagttttttttttttctcttaagatgttctgttattagtctgagacagccatttttttgttttaaggaaaaatatcagtcagtgctccgggaggtaatttcctgtggggtctgcaccctcctgtctgggtggtggatgtgggtttgagaagtaggagagcagggtggtaccgtgtgggctcttaccctttatgtgattttggacaacagtgccttccattaaagttctttttatcaactgtta

SEQ ID NO: 115214 - DNA, 552 bp, Homo sapiens
  Payload ID: 2498
  Gene Symbol: CNOT11
  Gene Name: CCR4-NOT transcription complex, subunit 11
  ENST ID: ENST00000420107
  CDS Start-End: 1-382
cactggtgtggagatcaaacgaataatggccaaagccttcaaaagccccttatcctctccccaacaaacacagctacttggtgagttggaaaaagaccccaaacttgtctaccatattggcctcaccccagccaaacttcctgaccttgtggaaaacaaccctttagtcgctatagaaatgttgctgaaattaatgcagtcaagccagatcactgagtatttctctgtcctggtcaatatggacatgtctttacattcaatggaagttgtaaatcgactaactacagctgttgatctacctcctgaatttattcacctttatatatcaaattgcatctctacttgtgaacagattaaggataaatatatgcaggtaatataaatttttgtaaattttataaatggctgccaggaaaatgagcagactaacatttttttttttcctttttcagaatcggttggtgcgtcttgtgtgtgtgtttctccaatccttgatccgtaacaaaattattaatgtacaggatttgtttatagaagtgcaggcattctgta

SEQ ID NO: 115215 - DNA, 3282 bp, Homo sapiens
  Payload ID: 2499
  Gene Symbol: CNOT2
  Gene Name: CCR4-NOT transcription complex, subunit 2
  Uniprot ID: Q9NZN8
  ENST ID: ENST00000229195
  CDS Start-End: 583-2205
acaaacacaaacacaaacacgaacacgaacacgctcagcgtccccggggagggcggactgaagccacctcaccattcatcgcccctggaccccgcagtccccctcggactcagggccagagccttctgcgaagcaacctagccccagggaaacggtagcggccgcagaagccccgctctctgtaacggccgcggaggagcagcaagcctccctgtgagtcggtgggagacaagacggagcggcggtaagggcggtagggaagtgaagcgcctctctccaccttgttagaagcgcgctgaaagcggcctgcctacccaccccatcgctgccgttttgcagtcgtcgctcccaccttccgctgccgcctggagggaagccggagcgacgggggtcacggcggcggtcagagggtaaaggtcttgctcccagcagcctccgcggtggatacgtcgccatcttggatccgcgggacaagaaaattcatgcgagggagacgtggtgggcggtccttcctgtgacacgacccttgagtgacagttctatttgattgcctccggtactgtgaggaaaggacacgactctatggtgaggactgatggacatacattatctgagaaaagaaactaccaggtgacaaacagcatgtttggtgcttcaagaaagaagtttgtagagggggtcgacagtgactaccatgacgaaaacatgtactacagccagtcttctatgtttccacatcggtcagaaaaagatatgctggcatcaccatctacatcaggtcagctgtctcagtttggggcaagtttatacgggcaacaaagtgcactaggccttccaatgagggggatgagcaacaatacccctcagttaaatcgcagcttatcacaaggcactcagttaccgagccacgtcacgccaacaacaggggtaccaacaatgtcacttcacacgcctccatctccaagcaggggtattttgcctatgaatcctaggaatatgatgaaccactcccaggttggtcagggcattggaattcctagcaggacaaatagcatgagcagttcagggttaggtagccccaacagaagctcgccaagcataatatgtatgccaaagcagcagccttctcgacagccttttactgtgaacagtatgtctggatttggaatgaacaggaatcaggcatttggaatgaataactccttatcaagtaacatttttaatggaacagacggaagtgaaaatgtgacaggattggacctttcagatttcccagcattagcagaccgaaacaggagggaaggaagtggtaacccaactccattaataaaccccttggctggaagagctccttatgttggaatggtaacaaaaccagcaaatgaacaatcccaggacttctcaatacacaatgaagattttccagcattaccaggctccagctataaagatccaacatcaagtaatgatgacagtaaatctaatttgaatacatctggcaagacaacttcaagtacagatggacccaaattccctggagataaaagttcaacaacacaaaataataaccagcagaaaaaagggatccaggtgttacctgatggtcgggttactaacattcctcaagggatggtgacggaccaatttggaatgattggcctgttaacatttatcagggcagcagagacagacccaggaatggtacatcttgcattaggaagtgacttaacaacattaggcctcaatctgaactctcctgaaaatctctaccccaaatttgcgtcaccctgggcatcttcaccttgtcgacctcaagacatagacttccatgttccatctgagtacttaacgaacattcacattagggataagctggctgcaataaaacttggccgatatggtgaagaccttctcttctatctctattacatgaatggaggagacgtattacaacttttagctgcagtggagctttttaaccgtgattggagataccacaaagaagaacgagtatggattaccagggcaccaggcatggagccaacaatgaaaaccaatacctatgagaggggaacatattacttctttgactgtcttaactggaggaaagtagctaaggagttccatctggaatatgacaaattagaagaacggcctcacctgccatccaccttcaactacaaccctgctcagcaagccttctaaaaaaaaaaaaaaaaaaaaaaaaagacttcccttttcttggggtatggctgtctcagcacaatactcaacataactgcagaactgatgtggctcaggcaccctggttttaattccttgaggatctggcaattggcttacgcaaaaggtcaccatttgaggtcctgccttactaattatgtgctgcccaacaactaaatttgtaatttgtttttctctagtttgagcagggtctgaattttttcatttatttccttttttgccagcagacagacttgagtctgtaaagacaagcaaatacactgacagaagtttaccatagtttctaaaatgtaaaaaagaaaacccccaaaagactcaagaaaattagaccacaaattttgcattgttcattgtagcactattggtaataaaataacaaatgtttgtgcatttttatgtgaagatccttctcgtatttcatttggaaagatgagcaagaggtctgcttccttcattttacttccccttctgtttttgaaaggcagtttcgccaagcttaatgcaagaatatctgactgtttagaagaaagatattgccacaatctctggatggttttccagggttgtgttattactgagcttcatctttccagaatgagcaaaacactgtccagtctttgttacgattttgtaataaatgtgtacattttttttaaatttttggacatcacatgaataaaggtatgtatgtacgaatgtgtatatattatatatatgacatctattttggaaaatgtttgccctgctgtacctcatttttaggaggtgtgcatggatgcaatatatgaaaatgggacattctggaactgctggtcaggggactttgtcgccctgtgcactaaaagggccagattttcagcagccaaggacatccatacccaagtgaatgtgatgggacttaaaagaagtgaactgagacaattcactctggctgtttgaacagcagcgtttcataggaagagaaaaaaagatcaatcttgtattttctgaccacataaaggcttcttctctttgtaataaagtagaaaagctctcctc

SEQ ID NO: 115216 - DNA, 3152 bp, Homo sapiens
  Payload ID: 2499
  Gene Symbol: CNOT2
  Gene Name: CCR4-NOT transcription complex, subunit 2
  Uniprot ID: Q9NZN8
  ENST ID: ENST00000418359
  CDS Start-End: 452-2074
agcgtccccggggagggcggactgaagccacctcaccattcatcgcccctggaccccgcagtccccctcggactcagggccagagccttctgcgaagcaacctagccccagggaaacggtagcggccgcagaagccccgctctctgtaacggccgcggaggagcagcaagcctccctgtgagtcggtgggagacaagacggagcggcgtcgtcgctcccaccttccgctgccgcctggagggaagccggagcgacgggggtcacggcggcggtcagagggtaaaggtcttgctcccagcagcctccgcggtggatacgtcgccatcttggatccgcgggacaagaaaattcatgcgagggagacgtggtgggcggtccttcctgtgacacgacccttgagtgacagttctatttgattgcctccggtactgtgaggaaaggacacgactctatggtgaggactgatggacatacattatctgagaaaagaaactaccaggtgacaaacagcatgtttggtgcttcaagaaagaagtttgtagagggggtcgacagtgactaccatgacgaaaacatgtactacagccagtcttctatgtttccacatcggtcagaaaaagatatgctggcatcaccatctacatcaggtcagctgtctcagtttggggcaagtttatacgggcaacaaagtgcactaggccttccaatgagggggatgagcaacaatacccctcagttaaatcgcagcttatcacaaggcactcagttaccgagccacgtcacgccaacaacaggggtaccaacaatgtcacttcacacgcctccatctccaagcaggggtattttgcctatgaatcctaggaatatgatgaaccactcccaggttggtcagggcattggaattcctagcaggacaaatagcatgagcagttcagggttaggtagccccaacagaagctcgccaagcataatatgtatgccaaagcagcagccttctcgacagccttttactgtgaacagtatgtctggatttggaatgaacaggaatcaggcatttggaatgaataactccttatcaagtaacatttttaatggaacagacggaagtgaaaatgtgacaggattggacctttcagatttcccagcattagcagaccgaaacaggagggaaggaagtggtaacccaactccattaataaaccccttggctggaagagctccttatgttggaatggtaacaaaaccagcaaatgaacaatcccaggacttctcaatacacaatgaagattttccagcattaccaggctccagctataaagatccaacatcaagtaatgatgacagtaaatctaatttgaatacatctggcaagacaacttcaagtacagatggacccaaattccctggagataaaagttcaacaacacaaaataataaccagcagaaaaaagggatccaggtgttacctgatggtcgggttactaacattcctcaagggatggtgacggaccaatttggaatgattggcctgttaacatttatcagggcagcagagacagacccaggaatggtacatcttgcattaggaagtgacttaacaacattaggcctcaatctgaactctcctgaaaatctctaccccaaatttgcgtcaccctgggcatcttcaccttgtcgacctcaagacatagacttccatgttccatctgagtacttaacgaacattcacattagggataagctggctgcaataaaacttggccgatatggtgaagaccttctcttctatctctattacatgaatggaggagacgtattacaacttttagctgcagtggagctttttaaccgtgattggagataccacaaagaagaacgagtatggattaccagggcaccaggcatggagccaacaatgaaaaccaatacctatgagaggggaacatattacttctttgactgtcttaactggaggaaagtagctaaggagttccatctggaatatgacaaattagaagaacggcctcacctgccatccaccttcaactacaaccctgctcagcaagccttctaaaaaaaaaaaaaaaaaaaaaaaaagacttcccttttcttggggtatggctgtctcagcacaatactcaacataactgcagaactgatgtggctcaggcaccctggttttaattccttgaggatctggcaattggcttacgcaaaaggtcaccatttgaggtcctgccttactaattatgtgctgcccaacaactaaatttgtaatttgtttttctctagtttgagcagggtctgaattttttcatttatttccttttttgccagcagacagacttgagtctgtaaagacaagcaaatacactgacagaagtttaccatagtttctaaaatgtaaaaaagaaaacccccaaaagactcaagaaaattagaccacaaattttgcattgttcattgtagcactattggtaataaaataacaaatgtttgtgcatttttatgtgaagatccttctcgtatttcatttggaaagatgagcaagaggtctgcttccttcattttacttccccttctgtttttgaaaggcagtttcgccaagcttaatgcaagaatatctgactgtttagaagaaagatattgccacaatctctggatggttttccagggttgtgttattactgagcttcatctttccagaatgagcaaaacactgtccagtctttgttacgattttgtaataaatgtgtacattttttttaaatttttggacatcacatgaataaaggtatgtatgtacgaatgtgtatatattatatatatgacatctattttggaaaatgtttgccctgctgtacctcatttttaggaggtgtgcatggatgcaatatatgaaaatgggacattctggaactgctggtcaggggactttgtcgccctgtgcactaaaagggccagattttcagcagccaaggacatccatacccaagtgaatgtgatgggacttaaaagaagtgaactgagacaattcactctggctgtttgaacagcagcgtttcataggaagagaaaaaaagatcaatcttgtattttctgaccacataaaggcttcttctctttgtaataaagtagaaaagctctcctca

SEQ ID NO: 115217 - DNA, 2360 bp, Homo sapiens
  Payload ID: 2499
  Gene Symbol: CNOT2
  Gene Name: CCR4-NOT transcription complex, subunit 2
  ENST ID: ENST00000552599
  CDS Start-End: 1-559
tccaacatcaagtaatgatgacagtaaatctaatttgaatacatctggcaagacaacttcaagtacagatggacccaaattccctggagataaaagttcaacaacacaaaataataaccagcagaaaaaagggatccaggtgttacctgatggtcgggttactaacattcctcaagggatggtgacggaccaatttggaatgattggcctgttaacatttatcagggcagcagagacagacccaggaatggtacatcttgcattaggaagtgacttaacaacattaggcctcaatctgaactctcctgaaaatctctaccccaaatttgcgtcaccctgggcatcttcaccttgtcgacctcaagacatagacttccatgttccatctgagtacttaacgaacattcacattagggataagctggctgcaataaaacttggccgatatggtgaagaccttctcttctatctctattacatgaatggaggagacgtattacaacttttagctgcagtggagctgtatgttcaaagtattttaatcacttttgtattatagtggatcttgactatgctgaaaacatctttaagtgatgatggctatctttaaatggaactatttctccatcaagaaatttatttttacattattaaagtgaatttaatttagattaaaaccgtatcttaaccatggcttcataatctatatacctaaaaagaatttcaaacttaatgctgaagctgggtgcagtggctcacacttgtaatcccagcactttggtgaggtggacagatcacttgaggccagaagttagggacagcctgggcaacacagcaaaccacatttctacaaaaaataaaggaaaatattagctaggtgtggtggcacacatctatatagtcctagctacttgggaggctacagcaggaggatcgcttgagcccaggagtttgaggtgtcagtgagctatgattgtgccattgcactctagtgtggctgacagtgcaagaccctgtctctaaaaataactaataagtgccaaatttgtaagaagacagaattgacataactcatggatttggtgaatctaatttttgtaaatatgtgaattatatgatattcatgactatgttttttattccttgtggaaccatatgtataaataattcgatactgaatttaatcatttcataaacattattacttataagcaaggcagtgtgcatatttgttgtacgttttgaagtgctgattaaagtccacattttcattatcagcagtctattggccagtttaaacaaatattaatgtaaagaaattggttcattgatattttttccctgagcagttctgtatttacctgatgctctaaaattaagttttctgtcgttactcaaatgtacagttggcaacacattttgttatcaatagacaattatgtttactatagagtaaactattagtaattatttatgaccttatgattgggagaccttttcacaaatttaagtatttcataacatttctaataacatttctataaatggctttggatcaaatagtttaaagtatataattcagtatgttgataatgaattgtttcgtttcatttcacaactgagaggatttttcccttatgtttttccttcatttttgtgagaatagagattattacctgttgttccttttaattgttcataagtaaataaatacattcaggcactcattcatctatcactggcagttctgttttcatattttatttatgtcttaaaaactacctcatgacgttggtaggaaagcatttctttacatggaggtttattttgtgggacattacctcctctggatgttacttcctcagtttacaagtagtgtaaattctcattgattcttttatgaattgtaatggattttctcttagcttttgagaatttagaatctgaaatttgaataaaaagtaaatatattcagtataatttttcaaaatgctctagtttcaagatagttaaaaaattatgtggaatttacataattaattcaaatatagtttgtatttagttccttatcaaataatgcaaatagttggagatacctcaatttcttttgagtgttaagaagagcaagaaaggagtgaagtttttgcaacacattgtgtctttatttggtctgcctatgtttttatcacattgcttataaaacttttaaaatccttgtttgtataaaaagtttctttagttaaataaaagtgtgtgtattaattagtgtgccttctggacaaattaagaaatattttttctatatttcaatgcggttgtatttaataacttataataaatgagtaggaagcattcatatt

SEQ ID NO: 115218 - DNA, 1071 bp, Homo sapiens
  Payload ID: 2499
  Gene Symbol: CNOT2
  Gene Name: CCR4-NOT transcription complex, subunit 2
  ENST ID: ENST00000552915
  CDS Start-End: 144-1071
ggtggatacgtcgccatcttggatccgcgggacaagaaaattcatgcgagggagacgtggtgggcggtccttcctgtgacacgacccttgagtgacagttctatttgattgcctccggtactgtgaggaaaggacacgactctatggtgaggactgatggacatacattatctgagaaaagaaactaccaggtgacaaacagcatgtttggtgcttcaagaaagaagtttgtagagggggtcgacagtgactaccatgacgaaaacatgtactacagccagtcttctatgtttccacatcggtcagaaaaagatatgctggcatcaccatctacatcaggtcagctgtctcagtttggggcaagtttatacgggcaacaaagtgcactaggccttccaatgagggggatgagcaacaatacccctcagttaaatcgcagcttatcacaaggcactcagttaccgagccacgtcacgccaacaacaggggtaccaacaatgtcacttcacacgcctccatctccaagcagtatgtctggatttggaatgaacaggaatcaggcatttggaatgaataactccttatcaagtaacatttttaatggaacagacggaagtgaaaatgtgacaggattggacctttcagatttcccagcattagcagaccgaaacaggagggaaggaagtggtaacccaactccattaataaaccccttggctggaagagctccttatgttggaatggtaacaaaaccagcaaatgaacaatcccaggacttctcaatacacaatgaagattttccagcattaccaggctccagctataaagatccaacatcaagtaatgatgacagtaaatctaatttgaatacatctggcaagacaacttcaagtacagatggacccaaattccctggagataaaagttcaacaacacaaaataataaccagcagaaaaaagggatccaggtgttacctgatggtcgggttactaacattcctcaagggatggtgacggaccaatttggaatgattggcctgttaacatttatcagggcagcagagacagacc

SEQ ID NO: 115219 - DNA, 587 bp, Homo sapiens
  Payload ID: 2499
  Gene Symbol: CNOT2
  Gene Name: CCR4-NOT transcription complex, subunit 2
  ENST ID: ENST00000551710
  CDS Start-End: 1-315
ccatctgagtacttaacgaacattcacattagggataagctggctgcaataaaacttggccgatatggtgaagaccttctcttctatctctattacatgaatggaggagacgtattacaacttttagctgcagtggagctttttaaccgtgattggagataccacaaagaagaacgagtatggattaccagggcaccaggcatggagccaacaatgaaaaccaatacctatgagaggggaacatattacttctttgactgtcttaactggaggaaagtagctaaggtatatttctttccatgtgcaaatgtataaatctaaacttgaaaaaagaagtgtcctcttttatctgtttataagtaccaatacatccagttccagtaatgtgccacatatttgccaactgtttaattccatctccttggcttgacactcttagaagagtgtcccaaaacaattggtttcactgatagttacattattgaatttggtaagaggttttgtaattttgcataagccttggtaacatttgaaatattttttgtgtctactgctttgtaaaataaagatactctcttgcaacccca

SEQ ID NO: 115220 - DNA, 464 bp, Homo sapiens
  Payload ID: 2499
  Gene Symbol: CNOT2
  Gene Name: CCR4-NOT transcription complex, subunit 2
  ENST ID: ENST00000549709
  CDS Start-End: 1-139
tctctaccccaaatttgcgtcaccctgggcatcttcaccttgtcgacctcaagacatagacttccatgttccatctgagtacttaacgaacattcacattagggataagttatttttctttttcagctggctgcaataaaacttggccgatatggtgaagaccttctcttctatctctattacatgaatggaggagacgtattacaacttttagctgcagtggagctttttaaccgtgattggagataccacaaagaagaacgagtatggattaccagggcaccaggcatggagccaacaatgaaaaccaatacctatgagaggggaacatattacttctttgactgtcttaactggaggaaagtagctaaggagttccatctggaatatgacaaattagaagaacggcctcacctgccatccaccttcaactacaaccctgctcagcaagccttctaaaaaaa

SEQ ID NO: 115221 - DNA, 964 bp, Homo sapiens
  Payload ID: 2499
  Gene Symbol: CNOT2
  Gene Name: CCR4-NOT transcription complex, subunit 2
  ENST ID: ENST00000550641
  CDS Start-End: 376-964
atcttggatccgcgggacaagaaaattcatgcgagggagacgtggtgggcggtccttcctgtgacacgacccttgagtgacagttctatttgattgcctccggtactgtgaggaaaggacacgactctatggtgaggactgatggacatacattatctgagaaaagaaactaccagtaaagacggggtttcaccgtgttagccaggatggtctcgatctcctgacttcatgatccgcctgccttggcctcccaaagtgcttggattacaggcgtgagccaccgcacctggccgcaaagttatcttttaagaggttatcttaggtcttgcgtggagtctaggatgatagcactgatggtggcaggtgacaaacagcatgtttggtgcttcaagaaagaagtttgtagagggggtcgacagtgactaccatgacgaaaacatgtactacagccagtcttctatgtttccacatcggtcagaaaaagatatgctggcatcaccatctacatcaggtcagctgtctcagtttggggcaagtttatacgggcaacaaagtgcactaggccttccaatgagggggatgagcaacaatacccctcagttaaatcgcagcttatcacaaggcactcagttaccgagccacgtcacgccaacaacaggggtaccaacaatgtcacttcacacgcctccatctccaagcaggggtattttgcctatgaatcctaggaatatgatgaaccactcccaggttggtcagggcattggaattcctagcaggacaaatagcatgagcagttcagggttaggtagccccaacagaagctcgccaagcataatatgtatgccaaagcagcagccttctcgacagccttttactgtgaacagtatgtctggatttggaatgaacaggaatcaggcatttggaatgaataactccttatcaagtaacatttttaatggaacag

SEQ ID NO: 115222 - DNA, 536 bp, Homo sapiens
  Payload ID: 2499
  Gene Symbol: CNOT2
  Gene Name: CCR4-NOT transcription complex, subunit 2
  ENST ID: ENST00000548741
  CDS Start-End: 139-249
atacgtcgccatcttggatccgcgggacaagaaaattcatgcgagggagacgtggtgggcggtccttcctgtgacacgacccttgagtgacagttctatttgattgcctccggtactgtgaggaaaggacacgactctatggtgaggactgatggacatacattatctgagaaaagaaactaccagagcggaagaatcccatcgtttatcatgttctggttggactttcttactgtttgctggagttgaacttcagagctatggcgtcaaccctgctgtaatatctcaggggagctcctagggtggggctggtgccatggctcaccctccaacctttccttcttcacttcagcctccagctctgagctttccaatccccagagtagcaaatgttgaaagaagttgcacaggctttggtatcaggatgatgctggcctcataaaatgaattagggaggattccctctttttctatttattggaatagtttcagaaggaatggtaccagctcctccttgtacctctggtagaattcgg

SEQ ID NO: 115223 - DNA, 726 bp, Homo sapiens
  Payload ID: 2499
  Gene Symbol: CNOT2
  Gene Name: CCR4-NOT transcription complex, subunit 2
  ENST ID: ENST00000546673
  CDS Start-End: 1-548
gtacagatggacccaaattccctggagataaaagttcaacaacacaaaataataaccagcagaaaaaagggatccaggtgttacctgatggtcgggttactaacattcctcaagggatggtgacggaccaatttggaatgattggcctgttaacatttatcagggcagcagagacagacccaggaatggtacatcttgcattaggaagtgacttaacaacattaggcctcaatctgaactctcctgaaaatctctaccccaaatttgcgtcaccctgggcatcttcaccttgtcgacctcaagacatagacttccatgttccatctgagtacttaacgaacattcacattagggataagctggctgcaataaaacttggccgatatggtgaagaccttctcttctatctctattacatgaatggaggagacgtattacaacttttagctgcagtggagctgtatgttcaaattttaaccgtgattggagataccacaaagaagaacgagtatggattaccagggcaccaggcatggagccaacaatgaaaaccaatacctatgagaggggaacatattacttctttgactgtcttaactggaggaaagtagctaaggagttccatctggaatatgacaaattagaagaacggcctcacctgccatccaccttcaactacaaccctgctcagcaagccttctaaaaaaaaaaaaaaaaaaaaaaaaa

SEQ ID NO: 115224 - DNA, 783 bp, Homo sapiens
  Payload ID: 2499
  Gene Symbol: CNOT2
  Gene Name: CCR4-NOT transcription complex, subunit 2
  ENST ID: ENST00000552319
  CDS Start-End: 167-331
gtcttgctcccagcagcctccgcggtggatacgtcgccatcttggatccgcgggacaagaaaattcatgcgagggagacgtggtgggcggtccttcctgtgacacgacccttgagtgacagttctatttgattgcctccggtactgtgaggaaaggacacgactctatggtgaggactgatggacatacattatctgagaaaagaaactaccagcctccagctctgagctttccaatccccagagtagcaaatgttgaaagaagttgcacaggtgacaaacagcatgtttggtgcttcaagaaagaagtttgtagagggggtcgacagtgactaccatgacgaaaacatgtactacagccagtcttctatgtttccacatcggtcagaaaaagatatgctggcatcaccatctacatcaggtcagctgtctcagtttggggcaagtttatacgggcaacaaagtgcactaggccttccaatgagggggatgagcaacaatacccctcagttaaatcgcagcttatcacaaggcactcagttaccgagccacgtcacgccaacaacaggggtaccaacaatgtcacttcacacgcctccatctccaagcaggggtattttgcctatgaatcctaggaatatgatgaaccactcccaggttggtcagggcattggaattcctagcaggacaaatagcatgagcagttcagggttaggtagccccaacagaagctcgccaagcataatatgtatgccaaagcagcagccttctcgacagcctttta

SEQ ID NO: 115225 - DNA, 993 bp, Homo sapiens
  Payload ID: 2499
  Gene Symbol: CNOT2
  Gene Name: CCR4-NOT transcription complex, subunit 2
  ENST ID: ENST00000550160
  CDS Start-End: 165-993
cttgctcccagcagcctccgcggtggatacgtcgccatcttggatccgcgggacaagaaaattcatgcgagggagacgtggtgggcggtccttcctgtgacacgacccttgagtgacagttctatttgattgcctccggtactgtgaggaaaggacacgactctatggtgaggactgatggacatacattatctgagaaaagaaactaccaggtgacaaacagcatgtttggtgcttcaagaaagaagtttgtagagggggtcgacagtgactaccatgacgaaaacatgtactacagccagtcttctatgtttccacatcggtcagaaaaagatatgctggcatcaccatctacatcaggtcagctgtctcagtttggggcaagtttatacgggcaacaaaacggaagtgaaaatgtgacaggattggacctttcagatttcccagcattagcagaccgaaacaggagggaaggaagtggtaacccaactccattaataaaccccttggctggaagagctccttatgttggaatggtaacaaaaccagcaaatgaacaatcccaggacttctcaatacacaatgaagattttccagcattaccaggctccagctataaagatccaacatcaagtaatgatgacagtaaatctaatttgaatacatctggcaagacaacttcaagtacagatggacccaaattccctggagataaaagttcaacaacacaaaataataaccagcagaaaaaagggatccaggtgttacctgatggtcgggttactaacattcctcaagggatggtgacggaccaatttggaatgattggcctgttaacatttatcagggcagcagagacagacccaggaatggtacatcttgcattaggaagtgacttaacaacattaggcctcaatctgaactctcctgaaaatctctaccccaaatttgcgtcaccctgggcatcttcaccttgtcgacctcaagacatag

SEQ ID NO: 115226 - DNA, 571 bp, Homo sapiens
  Payload ID: 2499
  Gene Symbol: CNOT2
  Gene Name: CCR4-NOT transcription complex, subunit 2
  ENST ID: ENST00000547867
  CDS Start-End: 368-571
agggagacgtggtgggcggtccttcctgtgacacgacccttgagtgacagttctatttgattgcctccggtactgtgaggaaaggacacgactctatggtgaggactgatggacatacattatctgagaaaagaaactaccagtaaagacggggtttcaccgtgttagccaggatggtctcgatctcctgacttcatgatccgcctgccttggcctcccaaagtgcttggattacaggcgtgagccaccgcacctggccgcaaagttatcttttaagaggttatcttaggtcttgcgtggagtctaggatgatagcactgatggtggcagcctccagctctgagctttccaatccccagagtagcaaatgttgaaagaagttgcacaggtgacaaacagcatgtttggtgcttcaagaaagaagtttgtagagggggtcgacagtgactaccatgacgaaaacatgtactacagccagtcttctatgtttccacatcggtcagaaaaagatatgctggcatcaccatctacatcaggtcagctgtctcagtttggggcaagtttatacggg

SEQ ID NO: 115227 - DNA, 355 bp, Homo sapiens
  Payload ID: 2499
  Gene Symbol: CNOT2
  Gene Name: CCR4-NOT transcription complex, subunit 2
  ENST ID: ENST00000548338
  CDS Start-End: 1-298
acatcttgcattaggaagtgacttaacaacattaggcctcaatctgaactctcctgaaaatctctaccccaaatttgcgtcaccctgggcatcttcaccttgtcgacctcaagacatagacttccatgttccatctgagtacttaacgaacattcacattagggataagctggctgcaataaaacttggccgatatggtgaagaccttctcttctatctctattacatgaatggaggagacgtattacaacttttagctgcagtggagctgagttccatctggaatatgacaaattagaagaacggcctcacctgccatccaccttcaactacaaccctgctcagcaagccttct

SEQ ID NO: 115228 - DNA, 4753 bp, Homo sapiens
  Payload ID: 2499
  Gene Symbol: CNOT2
  Gene Name: CCR4-NOT transcription complex, subunit 2
  Uniprot ID: Q9NZN8
  ENST ID: ENST00000551483
  CDS Start-End: 4156-4731
gtcaacaaagtaatcttgagataacagttactgtttgagattcttacagttgtgaaatttggagaaaactaaaaattaattgggaagtggcaaaataaattgaaaatggtaaaacaaaaattaaaagctatagcgcaggctaaaaggacggtagaaagttttcttcaaaaattaagaacccaaggttataagaatactaaaaagttaagaaattgagatgattaaaatagacaaagtagagaagttgggttaaattttaatttttaaaggaagccagctgattgttttaacttaaaatgaacaaaaatacatttaatttattctatatatatttattgagcgcctactgtgtaataggtaatataaacttctgggctttgtatcatatttctatatttcctatccatttaccatatatgggaaccctactgccaccctgttgtaccccaccctcaaaatgcgcacatgcgcacgcacacacgtttgtatatgaaagcggtcaattacaggtggaagtcctcagggcttctgcttcactgcctgtgcctcagctatatctttctggccatttgcaggaggcactatcattgtcaccatttgtgtgtaaccgaagcttcaagcattctagatataacctccatctgagcataatgaaaagacaagttatatcgtaacaatctccctcttgttagctcacaagctataattttaggttaccatcttccatgggggaaatatatgctttttattctctttgttacatctctaggatttggggtttctattatgctggttgcgtattcctttgctaaattgttcatggaattctttgacatgaaatcaatctgcaagtatcttttgagcacctacatacacctagtacagtgccgtgcattatttaggaagaaggcgcaatcatttcgaattatattatggttggtttttataatctcttaaaaaatatttgtagaatcaataaccagtgtcctttcttattatttagacggaagtgaaaatgtgacaggattggacctttcagatttcccagcattagcagaccgaaacaggagggaaggaagtggtaacccaactccattaataaaccccttggctggaagagctccttatggtaattaagctttttaatgatggccagtagaaagtttccattgtatgtgcacacacatatacatttacatgtacgtatacatatgcttgtgtgtgtacacatgtatgtttgcattttctaatcaggttagtgtaattttttcagaattgatatattagaagtgatttttcttcccagaataccatgatagcaaagttaaatgggaaaactttgtacaaaaacccaagaggaagtcctcattggtattcagaagttattttcttctgttatccctgccttagtttaccttaagtgttttattttgtggtctgccttttctctccttaattgatcacacattttttcaaaataatatattcctggtgattaataatgactgactatacattgaagatgtttttctgagccaaggtttttctcaacctccacactgttgacatttgggccaggtaattctttgtagagaggagatgtggggggctattgtgtttatacagaatgttaagcaatattcctggccttggcctacaagatgctagtagcactttctgtttctaacccccatagcctctattgtgacagacacaaatgttttcagacattggcagatgtcacctggggaaaaaaaattgccccctgttgaaaaccattgctcatgggtcatgtatagcttatgcagactcttggtctccgttaatatccttcatcaccctttttcactgtctctaatagataagaaatttggctaatcagggataaatggaaataaaggaggggaaacatatgcaataacaatataacaatgtagatatgaaaattctgtgacagcaatgtagctatactatttttatcacatagtttttttcttttgggaaaacctgatagagaccagtaacaaaacggtgaatttaaaagaatcagttcatccattattttaagatagaattaatatttgatcacattttcaaccaagaaggatttctgtgccattcagatatgaatacaaataacagtatatgaagaagggaaacatttattgtttatattctaaagtttccaaattagtctccccaaaataaaaaaaaaaatgatctgccctggaagttgagtacctagctacttgattctcagttcagactctaatgtttttaacctttcctcataggtccattttttcatccctttaatcattcccgttgctctccttggaccatctctagtttctccatatcgttcttgaattgtggagccccaaactggatattgttctccaataagggcccgactaatgccaagtatagtgggaggattatttcccagttcttgcatgttttacatctataacatggagtccaagaaaatctgaaataatatggagttgttttataattgattgcaatttgctcactctgtaagtcgctttcaagtagaatactgacatattcttttaaattttattttgttcatttgtatttgagagttaactggtatttataatatctagtcaaatatttaaataaaacaagcttttaaaccaaaattgttaataattaatccaatatcaaattaaatttttaagcacctacgcatgacatggattactgttgatttcccttgtattattttgtatgttgagttattaatcagtaaatgaaaatttagttcttcattgttaccctggatactaattttttgaagtacgctttcatagcattaaaaaaaagaaaccttttggtgtattatcatgaggaaagttaactttataatctgtagcaaaatatcataaatatcaattgcaattctccggattattttcattacatagttggaatggtaacaaaaccagcaaatgaacaatcccaggacttctcaatacacaatgaagattttccagcattaccaggctccagctataaagatccaacatcaagtaatgatgacagtaaatctgtaagtaactgagaagtgtgtatgtgagtgatgtagtttttcccttcagatttctcttatattaacaattacttactaaatactattacaaaactgttttatcttgatatctgtaataacctaacttctgaagaatgtggaaaagctttataacttagaagatagcctatttttttcctatttcatataggtttgcaaatttctgttgaacttctcagagttaatttagacttttattgtagtccctgtcagctggatcccatgaagtttgataatatagccttctaaggagctgtgtttttcttgagtaagttttctccttgaagaatttatacacatttttatacctgtgttgattcaaccaactcagcttcttctttctgacttaacaaatatgtttatttcttccacatttcactgaaaatagcttttctctgtgtgtgatgggagtttatatattattaaaataattgataaagaagatcggtaagaattaaaataagtacaaagttttaaagcttgtatgtctaacttatcttcaaggtagctttggtgattttaggtaatatactatatttagtttctcttttacatgaaagcattgaggagtgtaacttcaagtgtatcccaaagcataaagacctgagaaagagatagatttttttttttctgtgactgaagatctgagataaataagatattttcccttgatttctttttctttaaatactcaaatgtggatgatataggatttatttgtataccatggaacaatgatggaaacaattttctatagaacttgaaaaacaggtaataatttaactaccaatttaaatgtaataaagaataaatagcaaggtattaatatgtgaacttgaatttgtatacttaacaaattttaatgtcacatttaatttttttcatgctagaatttgaatacatctggcaagacaacttcaagtacagatggacccaaattccctggagataaaagttcaacaacacaaaataataaccagcagaaaaaagggatccaggtgttacctgatggtcgggttactaacattcctcaagggatggtgacggaccaatttggaatgattggcctgttaacatttatcagggcagcagagacagacccaggaatggtacatcttgcattaggaagtgacttaacaacattaggcctcaatctgaactctcctgaaaatctctaccccaaatttgcgtcaccctgggcatcttcaccttgtcgacctcaagacatagacttccatgttccatctgagtacttaacgaacattcacattagggataagctggctgcaataaaacttggccgatatggtgaagaccttctcttctatctctattacatgaatggaggagacgtattacaacttttagctgcagtggagctttttaaccgtgattggagataccacaaagaagaacgagtatggattaccagggcaccaggcatggagccaacaatgaaaaccaatacctatgagaggggaacatattacttctttgactgtcttaactggaggaaagtagctaaggagttccatctggaatatgacaaattagaagaacggcctcacctgccatccaccttcaactacaaccctgctcagcaagccttctaaaaaaaaaaaaaaaaaaaaaaaa

SEQ ID NO: 115229 - DNA, 576 bp, Homo sapiens
  Payload ID: 2499
  Gene Symbol: CNOT2
  Gene Name: CCR4-NOT transcription complex, subunit 2
  ENST ID: ENST00000553020
  CDS Start-End: 128-238
tcttggatccgcgggacaagaaaattcatgcgagggagacgtggtgggcggtccttcctgtgacacgacccttgagtgacagttctatttgattgcctccggtactgtgaggaaaggacacgactctatggtgaggactgatggacatacattatctgagaaaagaaactaccagagcggaagaatcccatcgtttatcatgttctggttggactttcttactgtttgctggagttgaacttcagagctatggcgtcaaccctgctgtaatatctcaggggagctcctagggtggggctggtgccatggctcaccctccaacctttccttcttcacttcagcctccagctctgagctttccaatccccagagtagcaaatgttgaaagaagttgcacaggtgacaaacagcatgtttggtgcttcaagaaagaagtttgtagagggggtcgacagtgactaccatgacgaaaacatgtactacagccagtcttctatgtttccacatcggtcagaaaaagatatgctggcatcaccatctacatcaggtcagctgtctcagtttggggcaagttta

SEQ ID NO: 115230 - DNA, 2288 bp, Homo sapiens
  Payload ID: 2499
  Gene Symbol: CNOT2
  Gene Name: CCR4-NOT transcription complex, subunit 2
  Uniprot ID: Q9NZN8
  ENST ID: ENST00000551043
  CDS Start-End: 668-2288
gctgtactcgggccgctgcagcagcagcagctccagatcctaggcccggtcccatccgcgagtggtggggcttccccagactccactcccctaggctcccgccagcgcggaggagccgctgccgccgcgctgcttcctgggggagaagagaaggcggcagcggccgtggccgtggccgacgagctcgagcccgctttagacggctctgccgccttcccggcagctggtgctgtctgtggcttcttaccttctctcaatacacgtatatcatctgccagttatgtgtatttctgttagtgtgtttgcaagtgtcagatgggagacactggactggctaacgggtgtcaggatcctgcaggccctgggataccgaaggctgtgcatggtggagggagaaggaatgcaactgcgatgccgcctctgccaccgcaccaggaaggtgaagcttccgtagtgtcgtagactgagtccggatgatcctggggcggcggaggaaccacagacgcttctgtctgtgaagttgcaagtcctgggtttctacttccgcaggggcctctccaccttttgctgtcagggagacgtggtgggcggtccttcctgtgacacgacccttgagtgacagttctatttgattgcctccggtactgtgaggaaaggacacgactctatggtgaggactgatggacatacattatctgagaaaagaaactaccaggtgacaaacagcatgtttggtgcttcaagaaagaagtttgtagagggggtcgacagtgactaccatgacgaaaacatgtactacagccagtcttctatgtttccacatcggtcagaaaaagatatgctggcatcaccatctacatcaggtcagctgtctcagtttggggcaagtttatacgggcaacaaagtgcactaggccttccaatgagggggatgagcaacaatacccctcagttaaatcgcagcttatcacaaggcactcagttaccgagccacgtcacgccaacaacaggggtaccaacaatgtcacttcacacgcctccatctccaagcaggggtattttgcctatgaatcctaggaatatgatgaaccactcccaggttggtcagggcattggaattcctagcaggacaaatagcatgagcagttcagggttaggtagccccaacagaagctcgccaagcataatatgtatgccaaagcagcagccttctcgacagccttttactgtgaacagtatgtctggatttggaatgaacaggaatcaggcatttggaatgaataactccttatcaagtaacatttttaatggaacagacggaagtgaaaatgtgacaggattggacctttcagatttcccagcattagcagaccgaaacaggagggaaggaagtggtaacccaactccattaataaaccccttggctggaagagctccttatgttggaatggtaacaaaaccagcaaatgaacaatcccaggacttctcaatacacaatgaagattttccagcattaccaggctccagctataaagatccaacatcaagtaatgatgacagtaaatctaatttgaatacatctggcaagacaacttcaagtacagatggacccaaattccctggagataaaagttcaacaacacaaaataataaccagcagaaaaaagggatccaggtgttacctgatggtcgggttactaacattcctcaagggatggtgacggaccaatttggaatgattggcctgttaacatttatcagggcagcagagacagacccaggaatggtacatcttgcattaggaagtgacttaacaacattaggcctcaatctgaactctcctgaaaatctctaccccaaatttgcgtcaccctgggcatcttcaccttgtcgacctcaagacatagacttccatgttccatctgagtacttaacgaacattcacattagggataagctggctgcaataaaacttggccgatatggtgaagaccttctcttctatctctattacatgaatggaggagacgtattacaacttttagctgcagtggagctttttaaccgtgattggagataccacaaagaagaacgagtatggattaccagggcaccaggcatggagccaacaatgaaaaccaatacctatgagaggggaacatattacttctttgactgtcttaactggaggaaagtagctaaggagttccatctggaatatgacaaattagaagaacggcctcacctgccatccaccttcaactacaaccctgctcagcaagccttct

SEQ ID NO: 115231 - DNA, 571 bp, Homo sapiens
  Payload ID: 2499
  Gene Symbol: CNOT2
  Gene Name: CCR4-NOT transcription complex, subunit 2
  ENST ID: ENST00000551661
  CDS Start-End: 156-386
agcagcctccgcggtggatacgtcgccatcttggatccgcgggacaagaaaattcatgcgagggagacgtggtgggcggtccttcctgtgacacgacccttgagtgacagttctatttgattgcctccggtactgtgaggaaaggacacgactctatggtgaggactgatggacatacattatctgagaaaagaaactaccagcctccagctctgagctttccaatccccagagtagcaaatgttgaaagaagttgcacagacgtggtctcactctgtcacccaggctggactgcagtggcgtcatcttggctcactgcaacctccgcctcccaagttcaagtgattctcctgcctcggcctccaagtagctgggactacaggtgacaaacagcatgtttggtgcttcaagaaagaagtttgtagagggggtcgacagtgactaccatgacgaaaacatgtactacagccagtcttctatgtttccacatcggtcagaaaaagatatgctggcatcaccatctacatcaggtcagctgtctcagtttggggcaagtttatacgggcaacaa

SEQ ID NO: 115232 - DNA, 747 bp, Homo sapiens
  Payload ID: 2499
  Gene Symbol: CNOT2
  Gene Name: CCR4-NOT transcription complex, subunit 2
  ENST ID: ENST00000550194
  CDS Start-End: 96-747
agggagacgtggtgggcggtccttcctgtgacacgacccttgagtgacagttctatttgattgcctccggtactgtgaggaaaggacacgactctatggtgaggactgatggacatacattatctgagaaaagaaactaccaggtgacaaacagcatgtttggtgcttcaagaaagaagtttgtagagggggtcgacagtgactaccatgacgaaaacatgtactacagccagtcttctatgtttccacatcggtcagaaaaagatatgctggcatcaccatctacatcaggtcagctgtctcagtttggggcaagtttatacgggcaacaaagtgcactaggccttccaatgagggggatgagcaacaatacccctcagttaaatcgcagcttatcacaaggcactcagttaccgagccacgtcacgccaacaacaggggtaccaacaatgtcacttcacacgcctccatctccaagcaggggtattttgcctatgaatcctaggaatatgatgaaccactcccaggttggtcagggcattggaattcctagcaggacaaatagcatgagcagttcagggttaggtagccccaacagaagctcgccaagcataatatgtatgccaaagcagcagccttctcgacagccttttactgtgaacaggaatcaggcatttggaatgaataactccttatcaagtaacatttttaatggaacagacggaagtgaaaatgtgacaggattgg

SEQ ID NO: 115233 - DNA, 1085 bp, Homo sapiens
  Payload ID: 2499
  Gene Symbol: CNOT2
  Gene Name: CCR4-NOT transcription complex, subunit 2
  ENST ID: ENST00000549750
  CDS Start-End: 538-1085
gtcgctgtactcgggccgctgcagcagcagcagctccagatcctaggcccggtcccatccgcgagtggtggggcttccccagactccactcccctaggctcccgccagcgcggaggagccgctgccgccgcgctgcttcctgggggagaagagaaggcggcagcggccgtggccgtggccgacgagctcgagcccgctttagacggctctgccgccttcccggcagctggtgctgtctgtggcttcttaccttctctcaatacacgtatatcatctgccagttatgtgtatttctgttagtgtgtttgcaagtgtcagatgggagacactggactggctaacgggtgtcaggatcctgcaggccctgggataccgaaggctgtgcatggtggagggagaaggaatgcaactgcgatgccgcctctgccaccgcaccaggaagagggagacgtggtgggcggtccttcctgtgacacgacccttgagtgacagttctatttgattgcctccggtactgtgaggaaaggacacgactctatggtgaggactgatggacatacattatctgagaaaagaaactaccaggtgacaaacagcatgtttggtgcttcaagaaagaagtttgtagagggggtcgacagtgactaccatgacgaaaacatgtactacagccagtcttctatgtttccacatcggtcagaaaaagatatgctggcatcaccatctacatcaggtcagctgtctcagtttggggcaagtttatacgggcaacaaagtgcactaggccttccaatgagggggatgagcaacaatacccctcagttaaatcgcagcttatcacaaggcactcagttaccgagccacgtcacgccaacaacaggggtaccaacaatgtcacttcacacgcctccatctccaagcaggggtattttgcctatgaatcctaggaatatgatgaaccactcccaggttggtcagggcattggaattcctagcaggacaaatagcatgagcagttcagggttaggtagccccaacagaagctcgccaagcataatatgtatgccaaagcagcagccttctcg

SEQ ID NO: 115234 - DNA, 2549 bp, Homo sapiens
  Payload ID: 2499
  Gene Symbol: CNOT2
  Gene Name: CCR4-NOT transcription complex, subunit 2
  ENST ID: ENST00000548159
  CDS Start-End: 956-2549
gtgtatgggggtggtggtggaccggacgtaaagcgtcgctgtactcgggccgctgcagcagcagcagctccagatcctaggcccggtcccatccgcgagtggtggggcttccccagactccactcccctaggctcccgccagcgcggaggagccgctgccgccgcgctgcttcctgggggagaagagaaggcggcagcggccgtggccgtggccgacgagctcgagcccgctttagacggctctgccgccttcccggcagctggtgctgtctgtggcttcttaccttctctcaatacacgtatatcatctgccagttatgtgtatttctgttagtgtgtttgcaagtgtcagatgggagacactggactggctaacgggtgtcaggatcctgcaggccctgggataccgaaggctgtgcatggtggagggagaaggaatgcaactgcgatgccgcctctgccaccgcaccaggaaggtgaagcttccgtagtgtcgtagactgagtccggatgatcctggggcggcggaggaaccacagacgcttctgtctgtgaagttgcaagtcctgggtttctacttccgcaggggcctctccaccttttgctgtcagggagacgtggtgggcggtccttcctgtgacacgacccttgagtgacagttctatttgattgcctccggtactgtgaggaaaggacacgactctatggtgaggactgatggacatacattatctgagaaaagaaactaccagagcggaagaatcccatcgtttatcatgttctggttggactttcttactgtttgctggagttgaacttcagagctatggcgtcaaccctgctgtaatatctcaggggagctcctagggtggggctggtgccatggctcaccctccaacctttccttcttcacttcagcctccagctctgagctttccaatccccagagtagcaaatgttgaaagaagttgcacaggtgacaaacagcatgtttggtgcttcaagaaagaagtttgtagagggggtcgacagtgactaccatgacgaaaacatgtactacagccagtcttctatgtttccacatcggtcagaaaaagatatgctggcatcaccatctacatcaggtcagctgtctcagtttggggcaagtttatacgggcaacaaagtgcactaggccttccaatgagggggatgagcaacaatacccctcagttaaatcgcagcttatcacaaggcactcagttaccgagccacgtcacgccaacaacaggggtaccaacaatgtcacttcacacgcctccatctccaagcaggggtattttgcctatgaatcctaggaatatgatgaaccactcccaggttggtcagggcattggaattcctagcaggacaaatagcatgagcagttcagggttaggtagccccaacagaagctcgccaagcataatatgtatgccaaagcagcagccttctcgacagccttttactgtgaacagtatgtctggatttggaatgaacaggaatcaggcatttggaatgaataactccttatcaagtaacatttttaatggaacagacggaagtgaaaatgtgacaggattggacctttcagatttcccagcattagcagaccgaaacaggagggaaggaagtggtaacccaactccattaataaaccccttggctggaagagctccttatgttggaatggtaacaaaaccagcaaatgaacaatcccaggacttctcaatacacaatgaagattttccagcattaccaggctccagctataaagatccaacatcaagtaatgatgacagtaaatctaatttgaatacatctggcaagacaacttcaagtacagatggacccaaattccctggagataaaagttcaacaacacaaaataataaccagcagaaaaaagggatccaggtgttacctgatggtcgggttactaacattcctcaagggatggtgacggaccaatttggaatgattggcctgttaacatttatcagggcagcagagacagacccaggaatggtacatcttgcattaggaagtgacttaacaacattaggcctcaatctgaactctcctgaaaatctctaccccaaatttgcgtcaccctgggcatcttcaccttgtcgacctcaagacatagacttccatgttccatctgagtacttaacgaacattcacattagggataagctggctgcaataaaacttggccgatatggtgaagaccttctcttctatctctattacatgaatggaggagacgtattacaacttttagctgcagtggagctttttaaccgtgattggagataccacaaagaagaacgagtatggattaccagggcaccaggcatggagccaacaatgaaaaccaatacctatgagaggggaacatattacttctttgactgtcttaactggaggaaagtagctaaggagttccatctggaatatgacaaattagaagaacggcctcacctgccatccaccttcaactacaaccctgctcagcaagccttct

SEQ ID NO: 115235 - DNA, 618 bp, Homo sapiens
  Payload ID: 2499
  Gene Symbol: CNOT2
  Gene Name: CCR4-NOT transcription complex, subunit 2
  ENST ID: ENST00000551132
  CDS Start-End: 374-618
agcctccgcggtggatacgtcgccatcttggatccgcgggacaagaaaattcatgcgagggagacgtggtgggcggtccttcctgtgacacgacccttgagtgacagttctatttgattgcctccggtactgtgaggaaaggacacgactctatggtgaggactgatggacatacattatctgagaaaagaaactaccaggctttggtatcaggatgatgctggcctcataaaatgaattagggaggattccctctttttctatttattggaatagtttcagaaggaatggtaccagctcctccttgtacctctggtagaattcggctgtgaatccatctggtcctggatttttttggttggtgacaaacagcatgtttggtgcttcaagaaagaagtttgtagagggggtcgacagtgactaccatgacgaaaacatgtactacagccagtcttctatgtttccacatcggtcagaaaaagatatgctggcatcaccatctacatcaggtcagctgtctcagtttggggcaagtttatacgggcaacaaagtgcactaggccttccaatgagggggatgagcaacaatacccctcagttaaatcgcagcttatcaca

SEQ ID NO: 115236 - DNA, 643 bp, Homo sapiens
  Payload ID: 2499
  Gene Symbol: CNOT2
  Gene Name: CCR4-NOT transcription complex, subunit 2
  ENST ID: ENST00000548599
  CDS Start-End: 96-284
agggagacgtggtgggcggtccttcctgtgacacgacccttgagtgacagttctatttgattgcctccggtactgtgaggaaaggacacgactctatggtgaggactgatggacatacattatctgagaaaagaaactaccaggtgacaaacagcatgtttggtgcttcaagaaagaagtttgtagagggggtcgacagtgactaccatgacgaaaacatgtactacagccagtcttctatgtttccacatcggtcagaaaaagatacggaagtgaaaatgtgacaggattggacctttcagatttcccagcattagcagaccgaaacaggagggaaggaagtggtaacccaactccattaataaaccccttggctggaagagctccttatgttggaatggtaacaaaaccagcaaatgaacaatcccaggacttctcaatacacaatgaagattttccagcattaccaggctccagctataaagatccaacatcaagtaatgatgacagtaaatctaatttgaatacatctggcaagacaacttcaagtacagatggacccaaattccctggagataaaagttcaacaacacaaaataataaccagcagaaaaaagggatccaggtgttacctgatggtggg

SEQ ID NO: 115237 - DNA, 895 bp, Homo sapiens
  Payload ID: 2499
  Gene Symbol: CNOT2
  Gene Name: CCR4-NOT transcription complex, subunit 2
  ENST ID: ENST00000552483
  CDS Start-End: 463-895
gtcgccatcttggatccgcgggacaagaaaattcatgcgagggagacgtggtgggcggtccttcctgtgacacgacccttgagtgacagttctatttgattgcctccggtactgtgaggaaaggacacgactctatggtgaggactgatggacatacattatctgagaaaagaaactaccagagacagggtctcactatgttgcccaggcttgtcaagtgatcctcccacctcagcctctcaagatgctgggattacagagcggaagaatcccatcgtttatcatgttctggttggactttcttactgtttgctggagttgaacttcagagctatggcgtcaaccctgctgtaatatctcaggggagctcctagggtggggctggtgccatggctcaccctccaacctttccttcttcacttcagcctccagctctgagctttccaatccccagagtagcaaatgttgaaagaagttgcacaggtgacaaacagcatgtttggtgcttcaagaaagaagtttgtagagggggtcgacagtgactaccatgacgaaaacatgtactacagccagtcttctatgtttccacatcggtcagaaaaagatatgctggcatcaccatctacatcaggtcagctgtctcagtttggggcaagtttatacgggcaacaaaacggaagtgaaaatgtgacaggattggacctttcagatttcccagcattagcagaccgaaacaggagggaaggaagtggtaacccaactccattaataaaccccttggctggaagagctccttatgttggaatggtaacaaaaccagcaaatgaacaatcccaggacttctcaatacacaatgaagattttccagcattaccaggctccagctataaagatc

SEQ ID NO: 115238 - DNA, 677 bp, Homo sapiens
  Payload ID: 2499
  Gene Symbol: CNOT2
  Gene Name: CCR4-NOT transcription complex, subunit 2
  ENST ID: ENST00000551873
  CDS Start-End: 284-677
agggagacgtggtgggcggtccttcctgtgacacgacccttgagtgacagttctatttgattgcctccggtactgtgaggaaaggacacgactctatggtgaggactgatggacatacattatctgagaaaagaaactaccaggtgacaaacagcatgtttggtgcttcaagaaagaagtttgtagagggggtcgacagtgactaccatgacgaaaacatgtactacagccagtcttctatgtttccacatcggtcagaaaaagatgtgcactaggccttccaatgagggggatgagcaacaatacccctcagttaaatcgcagcttatcacaaggcactcagttaccgagccacgtcacgccaacaacaggggtaccaacaatgtcacttcacacgcctccatctccaagcaggggtattttgcctatgaatcctaggaatatgatgaaccactcccaggttggtcagggcattggaattcctagcaggacaaatagcatgagcagttcagggttaggtagccccaacagaagctcgccaagcataatatgtatgccaaagcagcagccttctcgacagccttttactgtgaacagtatgtctggatttggaatgaacaggaatcaggcatttggaatgaataactccttatcaagtaacatttttaatggaacag

SEQ ID NO: 115239 - DNA, 582 bp, Homo sapiens
  Payload ID: 2499
  Gene Symbol: CNOT2
  Gene Name: CCR4-NOT transcription complex, subunit 2
  ENST ID: ENST00000547780
  CDS Start-End: 506-582
aaacacaaacacgaacacgaacacgctcagcgtccccggggagggcggactgaagccacctcaccattcatcgcccctggaccccgcagtccccctcggactcagggccagagccttctgagcagcaagcctccctgtgagtcggtgggagacaagacggagcggcggtaagggcggtagggaagtgaagcgcctctctccaccttgttagaagcgcgctgaaagcggcctgcctacccaccccatcgctgccgttttgcagtcgtcgctcccaccttccgctgccgcctggagggaagccggagcgacgggggtcacggcggcggtcagagggtaaaggtcttgctcccagcagcctccgcggtggatacgtcgccatcttggatccgcgggacaagaaaattcatgcgagggagacgtggtgggcggtccttcctgtgacacgacccttgagtgacagttctatttgattgcctccggtactgtgaggaaaggacacgactctatggtgaggactgatggacatacattatctgagaaaagaaactaccaggtgacaaacagcatgtttggtgcttcaag

SEQ ID NO: 115240 - DNA, 1545 bp, Homo sapiens
  Payload ID: 2499
  Gene Symbol: CNOT2
  Gene Name: CCR4-NOT transcription complex, subunit 2
  ENST ID: ENST00000552231
  CDS Start-End: 583-1545
acaaacacaaacacaaacacgaacacgaacacgctcagcgtccccggggagggcggactgaagccacctcaccattcatcgcccctggaccccgcagtccccctcggactcagggccagagccttctgcgaagcaacctagccccagggaaacggtagcggccgcagaagccccgctctctgtaacggccgcggaggagcagcaagcctccctgtgagtcggtgggagacaagacggagcggcggtaagggcggtagggaagtgaagcgcctctctccaccttgttagaagcgcgctgaaagcggcctgcctacccaccccatcgctgccgttttgcagtcgtcgctcccaccttccgctgccgcctggagggaagccggagcgacgggggtcacggcggcggtcagagggtaaaggtcttgctcccagcagcctccgcggtggatacgtcgccatcttggatccgcgggacaagaaaattcatgcgagggagacgtggtgggcggtccttcctgtgacacgacccttgagtgacagttctatttgattgcctccggtactgtgaggaaaggacacgactctatggtgaggactgatggacatacattatctgagaaaagaaactaccaggtgacaaacagcatgtttggtgcttcaagaaagaagtttgtagagggggtcgacagtgactaccatgacgaaaacatgtactacagccagtcttctatgtttccacatcggtcagaaaaagatatgctggcatcaccatctacatcaggtcagctgtctcagtttggggcaagtttatacgggcaacaaagtgcactaggccttccaatgagggggatgagcaacaatacccctcagttaaatcgcagcttatcacaaggcactcagttaccgagccacgtcacgccaacaacaggggtaccaacaatgtcacttcacacgcctccatctccaagcaggggtattttgcctatgaatcctaggaatatgatgaaccactcccaggttggtcagggcattggaattcctagcaggacaaatagcatgagcagttcagggttaggtagccccaacagaagctcgccaagcataatatgtatgccaaagcagcagccttctcgacagccttttactgtgaacagtatgtctggatttggaatgaacaggaatcaggcatttggaatgaataactccttatcaagtaacatttttaatggaacagacggaagtgaaaatgtgacaggattggacctttcagatttcccagcattagcagaccgaaacaggagggaaggaagtggtaacccaactccattaataaaccccttggctggaagagctccttatgttggaatggtaacaaaaccagcaaatgaacaatcccaggacttctcaatacacaatgaagattttccagcattaccaggctccagctataaagatccaacatcaagtaatgatgacagtaaatctaatttgaatacatctggcaagacaacttcaagtacagatggacccaaattccctggagataaa

SEQ ID NO: 115241 - DNA, 1682 bp, Homo sapiens
  Payload ID: 2499
  Gene Symbol: CNOT2
  Gene Name: CCR4-NOT transcription complex, subunit 2
  ENST ID: ENST00000552151
  CDS Start-End: 1-457
cgaaaacatgtactacagccagtcttctatgtttccacatcggtcagaaaaagatatgctggcatcaccatctacatcaggtcagctgtctcagtttggggcaagtttatacgggcaacaaagtgcactaggccttccaatgagggggatgagcaacaatacccctcagttaaatcgcagcttatcacaaggcactcagttaccgagccacgtcacgccaacaacaggggtaccaacaatgtcacttcacacgcctccatctccaagcaggggtattttgcctatgaatcctaggaatatgatgaaccactcccaggttggtcagggcattggaattcctagcaggacaaatagcatgagcagttcagggttaggtagccccaacagaagctcgccaagcataatatgtatgccaaagcagcagccttctcgacagccttttactgtgaacaggtaagatgtttattgatactgtgtataattgtctttctgggtatactcagatttgccttttcatattttcactttgttcttgaggtgtggcttctctctaataagtgtgtttcatcatgcatttatgtccaaagattctgttacccatcacaaaacgatacgttttcttgaaaatcaggttgattttggaaagcacattaaaacattttgttgttgtggttgttagaaaaggattgttcttggattcgccaccaggcaaattttggttgatatgtcctctctttataaaataagttgattacctgtgtggtaagagttctaggtttatgaatagaactggagacatgtttgactattactactttgctttagttatactttgagtaccttctcaagtaagatttggttttgtgcattggagacttaccaacaaaagactttttaagatcacatctatagtatttgaaaaccgtatcatgtttagggattcaaaacaaaaaaacgggtttttgtactttttcacttctctttgtactgtctgttgcatatactttgcgaataagaggagttactcattttgttaggattttcaagctgtttgggtaatttgtatgagaattatgtctgaaatataacactttcttgcaaaagtagtatttaagcttgattgcctacatgtatatatatgtattttttaaatggagaaatgtaggggcaaaactaccttgatctagttgttatcatcatacctgtttgattcactttattctgtctagtaaaatctgaattaaaataggtttagcacatttactgtttaatcctcattccataaactccaggttttgcttttatttagatatctataattttactgctcttttaaattttaaaaaacttatttgtgaagggttatcaaaattctcatctccttgatacctttctaaccttatatctttatcataactttatcatatctttgtgcgttctcatagtattgggcattgaatgtataaatttttacctttccatagtttttcacattttgtttttaaaatacactttgcttaaattgtcaatgtaacatggatctctaaaaccctgcttatttctactattgacagattgtatttattataaattgttttcatctctgagcacttattccatgtttgatggtacctgtaatagcatcagcaattctaatatgctattaaacaaaaatttccatt

SEQ ID NO: 115242 - DNA, 2852 bp, Homo sapiens
  Payload ID: 2500
  Gene Symbol: CNOT3
  Gene Name: CCR4-NOT transcription complex, subunit 3
  Uniprot ID: O75175
  ENST ID: ENST00000221232
  CDS Start-End: 317-2578
gaagagaggaggggaggcctcctccgccgccgccatcttggaccgggcccggtcagcttccgcggagccatcggcagacgccgcggcctcccttgagccccgacccccgtcgtcagaacaaccccgggcccactcccccaaccccacttccgcttcgcgccgctatcgcgatagcgcccgggcccggggcgcgagaaaaaggcggcgggcgctcgcctcccccgcctgtcgcgatacgctcctcagcggcggcgccagctcctgtgcgtccgtctccaagagagtatgaagagagtgcgtctgtagggcagggaagatggcggacaagcgcaaactccaaggtgagattgatcgctgcctcaagaaggtgtccgagggcgtggagcagtttgaagatatttggcagaagctccacaatgcagccaacgcgaaccagaaagaaaagtatgaggctgacctaaagaaggagattaagaagctacaacggctgagggaccaaatcaagacatgggtagcgtccaacgagatcaaggacaagaggcagcttatagacaaccgcaagctcattgagacgcaaatggaacggttcaaagttgtggaacgagagaccaaaaccaaagcttacagcaaagagggcctgggcctggcccagaaggtagatcctgcccagaaggagaaggaagaggttggccagtggctcacgaataccatcgacacgctcaacatgcaggtggaccagtttgagagtgaagtggagtcactgtcagtgcagacacgcaagaagaagggcgacaaggataagcaggaccggattgagggcttgaagcggcacatcgagaagcaccgctaccacgtgcgcatgctagagaccatcctgcgcatgctggacaatgactccatcctcgttgacgccatccgcaagatcaaggacgacgttgagtactatgttgactcatcccaggaccccgacttcgaggagaacgagtttctctacgatgacctggacctcgaggacattccacaggcgctggtcgccacctccccccccagccacagccacatggaggatgagatcttcaaccagtccagcagcacgcccacctcaaccacctccagctctcccatcccgcccagcccagccaactgtaccacggaaaactctgaagatgataagaagaggggacgttccacagacagtgaagtcagccagtctccagccaaaaacggctccaagcctgtccacagcaaccagcaccctcagtccccagctgtgccgcccacctacccctccggccccccgcctgctgcctctgccttgagcaccactcctggcaacaatggggtccccgcccccgcagcacccccaagtgccctgggccccaaggccagtccagctcccagccacaactcgggcacccctgctccctatgcccaggctgtggccccaccagctcccagtgggcccagcacgacccagccccggccccccagcgtccagcctagcggaggcggaggcggcggcagcggaggcggagggagcagcagcagtagtaacagcagtgccggtggaggggctggcaagcagaatggcgccaccagttacagctcagttgtggcagacagcccggcagaggtggctttgagcagcagtgggggcaacaatgccagcagccaggccttgggccccccttccggcccccacaacccacctcccagcacctcgaaggaacccagtgcggcagccccaacgggggctgggggcgtggccccaggctcagggaacaactcagggggacccagcctcctggtgccactgcctgtgaatcctcccagctccccaacgcccagcttcagtgatgccaaggcagccggtgccctgctcaatgggcctccacagttcagcaccgccccagaaatcaaggcccctgagcctctgagctccttgaagtccatggcggaacgggcagccatcagctctggcattgaggaccctgtgccaacgctgcacctgaccgagcgagacatcatcctgagcagtacatcagcacctccggcctcagcccagccgcccctgcagctgtcagaggtgaacataccgctgtcgctgggtgtctgtccactgggccctgtgcccctcaccaaggagcagctctatcagcaggccatggaagaggccgcctggcaccacatgcctcacccctctgactctgagcgtattcggcagtacctcccccggaacccctgtccgacgcccccctaccaccaccagatgccacccccacactcggacactgtggaattctaccagcgcctgtcgaccgagacactcttcttcatcttctactatctggagggcactaaggcacagtatctggcagccaaggccctaaagaagcagtcatggcgattccacaccaagtacatgatgtggttccagaggcacgaggagcccaagaccatcactgacgagtttgagcagggcacctacatctactttgactacgagaagtggggccagcggaagaaggaaggcttcacctttgagtaccgctacctggaggaccgggacctccagtgacaccggcccctccctctacccacccccttcccccgcatgctgatccccctgcccaggtgagggccctgccctggaagactggagggaggccccaagccacggggcatccccctctcccaggaagcagggagggggccgggaggttttcctctcagccccaccctgggggcccgggggcgagggctgccccctcctcccctccccagtgagggacattttttggtaaacctattttcattttggaaaatatttatgaataaatagttttatatga

SEQ ID NO: 115243 - DNA, 4118 bp, Homo sapiens
  Payload ID: 2500
  Gene Symbol: CNOT3
  Gene Name: CCR4-NOT transcription complex, subunit 3
  Uniprot ID: O75175
  ENST ID: ENST00000358389
  CDS Start-End: 1584-3845
aaattctccctgggggtaaggtaccagccctgtcctttgtgggcttcttgttctaaagcatatccgtcccatatggttgctgctagtcacatgtggtgattagtaactagttaaaaatgaaaaattcagttcctccattacacttgccacatttcagatgttcagtggccaacagatatgcgcaaatagagtgtttccagcattgcaaagttctgttggatagcactgtttgccagatgttcccttctttgtgggtgaggactcttttggtgtgacttccctctgtattgaggctcttgttcctcagtatggggctgtttctgtctttacagtaagtgactactccagggttccctgccctgcacacgtagagtgggagcggcccgtggatcccagggaactgtgcttttcattgtaggccccctccctggaggggaagagggcaatctccgctggtatctcagaagtcttcttctgaggcataagcctctcttcccagggctcccctggtctcgctgtcaggccctaaggtatgtcttcccttggactaaagctccttggaactcccttttgacctcagtcttctctgggttccaggtaacttcctttaaaataaagacgctcctctcttgaagttttgggttcctgccctgatggtctatgtctccctgactctaaattaccaatccacttgctatgggattcctccgtgagtgcagatcggctccctcacagctgcggtacctttgcaccctcttatcttagtaagatttctgtcttctcccaggtctctcttgggtactgccttctgcccccaaatctctaagccttcttggtattagcttctttgggttaggagtgttatttccttttggtttaaggatcctgctctggaataaatgtcttggtggtttgagtcccttctacttggcattcagccctgtctgcatgagcgggttcagctcttcacagctttcggcatctctgctcgccgtcgttttcccccacccccaatctttcttctcctacctacagcttacacacacacacacacacgcccttctctgtgagctgccagtttcatttgtctcctgacttgtctgagggatgacctctcctagccacctctgcccagcccctctgagtaggaagtgtgatctccagggctaatgcctccatcccagtcatcagctgtgtgcagcatgactgtcctgctctgaaaaacctttttgagtgtattctggggagaaggtactccatgctctaggaattttccacttcctgagtcagaggcacacaaaaaagtatgtaacttttcttgtttcaacaaacttatggggtcccctgttggccagacactatgctgggcagtcaagcgagcatcaggagaactggggctggtctcttgtcagatagcaaatgcttcttctctttaccagtcccacctacctcactatgctgactaggtccatgtctctgggtttttaccagccagggaatacgtgttaattcctctccaatctctcctagcagcgtccgtctccaagagagtatgaagagagtgcgtctgtagggcagggaagatggcggacaagcgcaaactccaaggtgagattgatcgctgcctcaagaaggtgtccgagggcgtggagcagtttgaagatatttggcagaagctccacaatgcagccaacgcgaaccagaaagaaaagtatgaggctgacctaaagaaggagattaagaagctacaacggctgagggaccaaatcaagacatgggtagcgtccaacgagatcaaggacaagaggcagcttatagacaaccgcaagctcattgagacgcaaatggaacggttcaaagttgtggaacgagagaccaaaaccaaagcttacagcaaagagggcctgggcctggcccagaaggtagatcctgcccagaaggagaaggaagaggttggccagtggctcacgaataccatcgacacgctcaacatgcaggtggaccagtttgagagtgaagtggagtcactgtcagtgcagacacgcaagaagaagggcgacaaggataagcaggaccggattgagggcttgaagcggcacatcgagaagcaccgctaccacgtgcgcatgctagagaccatcctgcgcatgctggacaatgactccatcctcgttgacgccatccgcaagatcaaggacgacgttgagtactatgttgactcatcccaggaccccgacttcgaggagaacgagtttctctacgatgacctggacctcgaggacattccacaggcgctggtcgccacctccccccccagccacagccacatggaggatgagatcttcaaccagtccagcagcacgcccacctcaaccacctccagctctcccatcccgcccagcccagccaactgtaccacggaaaactctgaagatgataagaagaggggacgttccacagacagtgaagtcagccagtctccagccaaaaacggctccaagcctgtccacagcaaccagcaccctcagtccccagctgtgccgcccacctacccctccggccccccgcctgctgcctctgccttgagcaccactcctggcaacaatggggtccccgcccccgcagcacccccaagtgccctgggccccaaggccagtccagctcccagccacaactcgggcacccctgctccctatgcccaggctgtggccccaccagctcccagtgggcccagcacgacccagccccggccccccagcgtccagcctagcggaggcggaggcggcggcagcggaggcggagggagcagcagcagtagtaacagcagtgccggtggaggggctggcaagcagaatggcgccaccagttacagctcagttgtggcagacagcccggcagaggtggctttgagcagcagtgggggcaacaatgccagcagccaggccttgggccccccttccggcccccacaacccacctcccagcacctcgaaggaacccagtgcggcagccccaacgggggctgggggcgtggccccaggctcagggaacaactcagggggacccagcctcctggtgccactgcctgtgaatcctcccagctccccaacgcccagcttcagtgatgccaaggcagccggtgccctgctcaatgggcctccacagttcagcaccgccccagaaatcaaggcccctgagcctctgagctccttgaagtccatggcggaacgggcagccatcagctctggcattgaggaccctgtgccaacgctgcacctgaccgagcgagacatcatcctgagcagtacatcagcacctccggcctcagcccagccgcccctgcagctgtcagaggtgaacataccgctgtcgctgggtgtctgtccactgggccctgtgcccctcaccaaggagcagctctatcagcaggccatggaagaggccgcctggcaccacatgcctcacccctctgactctgagcgtattcggcagtacctcccccggaacccctgtccgacgcccccctaccaccaccagatgccacccccacactcggacactgtggaattctaccagcgcctgtcgaccgagacactcttcttcatcttctactatctggagggcactaaggcacagtatctggcagccaaggccctaaagaagcagtcatggcgattccacaccaagtacatgatgtggttccagaggcacgaggagcccaagaccatcactgacgagtttgagcagggcacctacatctactttgactacgagaagtggggccagcggaagaaggaaggcttcacctttgagtaccgctacctggaggaccgggacctccagtgacaccggcccctccctctacccacccccttcccccgcatgctgatccccctgcccaggtgagggccctgccctggaagactggagggaggccccaagccacggggcatccccctctcccaggaagcagggagggggccgggaggttttcctctcagccccaccctgggggcccgggggcgagggctgccccctcctcccctccccagtgagggacattttttggtaaacctattttcattttggaaaatatttatgaataaatagttttatatg

SEQ ID NO: 115244 - DNA, 1125 bp, Homo sapiens
  Payload ID: 2500
  Gene Symbol: CNOT3
  Gene Name: CCR4-NOT transcription complex, subunit 3
  ENST ID: ENST00000440571
  CDS Start-End: 1-1125
accgcaagctcattgagacgcaaatggaacggttcaaagttgtggaacgagagaccaaaaccaaagcttacagcaaagagggcctgggcctggcccagaaggtagatcctgcccagaaggagaaggaagaggttggccagtggctcacgaataccatcgacacgctcaacatgcaggtggaccagtttgagagtgaagtggagtcactgtcagtgcagacacgcaagaagaagggcgacaaggatcagaagcaggaccggattgagggcttgaagcggcacatcgagaagcaccgctaccacgtgcgcatgctagagaccatcctgcgcatgctggacaatgactccatcctcgttgacgccatccgcaagatcaaggacgacgttgagtactatgttgactcatcccaggaccccgacttcgaggagaacgagtttctctacgatgacctggacctcgaggacattccacaggcgctggtcgccacctccccccccagccacagccacatggaggatgagatcttcaaccagtccagcagcacgcccacctcaaccacctccagctctcccatcccgcccagcccagccaactgtaccacggaaaactctgaagatgataagaagaggggacgttccacagacagtgaagtcagccagtctccagccaaaaacggctccaagcctgtccacagcaaccagcaccctcagtccccagctgtgccgcccacctacccctccggccccccgcctgctgcctctgccttgagcaccactcctggcaacaatggggtccccgcccccgcagcacccccaagtgccctgggccccaaggccagtccagctcccagccacaactcgggcacccctgctccctatgcccaggctgtggccccaccagctcccagtgggcccagcacgacccagccccggccccccagcgtccagcctagcggaggcggaggcggcggcagcggaggcggagggagcagcagcagtagtaacagcagtgccggtggaggggctggcaagcagaatggcgccaccagttacagctcagttgtggcagacagcccggcagaggtggctttgagcagcagtgggggcaacaatgccagcagccagg

SEQ ID NO: 115245 - DNA, 1269 bp, Homo sapiens
  Payload ID: 2500
  Gene Symbol: CNOT3
  Gene Name: CCR4-NOT transcription complex, subunit 3
  ENST ID: ENST00000457463
  CDS Start-End: 1-865
gaaggaacccagtgcggcagccccaacgggggctgggggcgtggccccaggctcagggaacaactcagggggacccagcctcctggtgccactgcctgtgaatcctcccagctccccaacgcccagcttcagtgatgccaaggcagccggtgccctgctcaatgggcctccacagttcagcaccgccccagaaatcaaggcccctgagcctctgagctccttgaagtccatggcggaacgggcagccatcagctctggcattgaggaccctgtgccaacgctgcacctgaccgagcgagacatcatcctgagcagtacatcagcacctccggcctcagcccagccgcccctgcagctgtcagaggtgaacataccgctgtcgctgggtgtctgtccactgggccctgtgcccctcaccaaggagcagctctatcagcaggccatggaagaggccgcctggcaccacatgcctcacccctctgactctgagcgtattcggcagtacctcccccggaacccctgtccgacgcccccctaccaccaccagatgccacccccacactcggacactgtggaattctaccagcgcctgtcgaccgagacactcttcttcatcttctactatctggagggcactaaggcacagtatctggcagccaaggccctaaagaagcagtcatggcgattccacaccaagtacatgatgtggttccagaggcacgaggagcccaagaccatcactgacgagtttgagcagctggcgcagtccctcagcctgaccaagtactcctccctctggctgtctgctcagcctggaacaccgccctctcatcctccacttggccagctcctaggcctcctgtaggtctcagcccaaatgtcccttcctcaaagaaaccttcctggagccacccagcccagtgcctcccctttgcagtgctgggcacactcgcctggggtgtgggattttcccagtatgtgtccctgcaccaggctgtgggctctgctgccgagggaccttgatggcccccacttcacctccaggtcccagcactcagcagggcaggggctcagtgcggaaactattttttttgaatgggcttctcaagttctaatactgggaaattcctgctgcttgcaaacactctggaaccaacctacctgggtttcagcccagtccagctgggcgactctaggcaagtcactcgaacctctgtgtctcaattaacttatctgtaaaaatggggggaagaccacctacctaatgca

SEQ ID NO: 115246 - DNA, 2765 bp, Homo sapiens
  Payload ID: 2500
  Gene Symbol: CNOT3
  Gene Name: CCR4-NOT transcription complex, subunit 3
  ENST ID: ENST00000447684
  CDS Start-End: 343-2058
gcaaatggaacggttcaaagttgtggaacgagagaccaaaaccaaagcttacagcaaagagggcctgggcctggcccagaaggtagatcctgcccagaaggagaaggaagaggttggccagtggctcacgaataccatcgacacgctcaacatgcaggtggaccagtttgagagtgaagtggagtcactgtcagtgcagacacgcaagaagaagggcgacaaggatgaggggccaagcaggtgctctgcagcccctgagcctggccctgggctcgccagcagaagcaggaccggattgagggcttgaagcggcacatcgagaagcaccgctaccacgtgcgcatgctagagaccatcctgcgcatgctggacaatgactccatcctcgttgacgccatccgcaagatcaaggacgacgttgagtactatgttgactcatcccaggaccccgacttcgaggagaacgagtttctctacgatgacctggacctcgaggacattccacaggcgctggtcgccacctccccccccagccacagccacatggaggatgagatcttcaaccagtccagcagcacgcccacctcaaccacctccagctctcccatcccgcccagcccagccaactgtaccacggaaaactctgaagatgataagaagaggggacgttccacagacagtgaagtcagccagtctccagccaaaaacggctccaagcctgtccacagcaaccagcaccctcagtccccagctgtgccgcccacctacccctccggccccccgcctgctgcctctgccttgagcaccactcctggcaacaatggggtccccgcccccgcagcacccccaagtgccctgggccccaaggccagtccagctcccagccacaactcgggcacccctgctccctatgcccaggctgtggccccaccagctcccagtgggcccagcacgacccagccccggccccccagcgtccagcctagcggaggcggaggcggcggcagcggaggcggagggagcagcagcagtagtaacagcagtgccggtggaggggctggcaagcagaatggcgccaccagttacagctcagttgtggcagacagcccggcagaggtggctttgagcagcagtgggggcaacaatgccagcagccaggccttgggccccccttccggcccccacaacccacctcccagcacctcgaaggaacccagtgcggcagccccaacgggggctgggggcgtggccccaggctcagggaacaactcagggggacccagcctcctggtgccactgcctgtgaatcctcccagctccccaacgcccagcttcagtgatgccaaggcagccggtgccctgctcaatgggcctccacagttcagcaccgccccagaaatcaaggcccctgagcctctgagctccttgaagtccatggcggaacgggcagccatcagctctggcattgaggaccctgtgccaacgctgcacctgaccgagcgagacatcatcctgagcagtacatcagcacctccggcctcagcccagccgcccctgcagctgtcagaggtgaacataccgctgtcgctgggtgtctgtccactgggccctgtgcccctcaccaaggagcagctctatcagcaggccatggaagaggccgcctggcaccacatgcctcacccctctgactctgagcgtattcggcagtacctcccccggaacccctgtccgacgcccccctaccaccaccagatgccacccccacactcggacactgtggaattctaccagcgcctgtcgaccgagacactcttcttcatcttctactatctggagcccagagatgttagaactgcttgggttgacagcgaggctggtccactgaggcacacctcagccccgcttccagttgcccactggctcacccgcggcccctccccagccctgctccagcagccccagtctaggccgaccccactctgctcattggcacattctcaggcctccctggagaccactggggagctgtccagccccctcccaaccccacttctctgaaagcaattttcacctcctgtctcattttccttctcctgatcagcattggtatgttctgtgcccccagccccatctccaagaggattgtccagcccaactgtggtctgtggcgggggccggggttcagccctgatgtcctgccccattcccctggctccccacccagtttgggggccccctgatccccctctccactgttcctcccccagggcactaaggcacagtatctggcagccaaggccctaaagaagcagtcatggcgattccacaccaagtacatgatgtggttccagaggcacgaggagcccaagaccatcactgacgagtttgagcagggcacctacatctactttgactacgagaagtggggccagcggaagaaggaaggcttcacctttgagtaccgctacctggaggaccgggacctccagtgacaccggcccctccctctacccacccccttcccccgcatgctgatccccctgcccaggtgagggccctgccctggaagactggagggaggccccaagccacggggcatccccctctcccaggaagcagggagggggccgggaggttttcctctcagccccaccctgggggcccgggggcgagggctgccccctcctcccctccccagtgagggacattttttggtaaacctattttcattttggaaaatatttatgaataaatagttttatatg

SEQ ID NO: 115247 - DNA, 541 bp, Homo sapiens
  Payload ID: 2500
  Gene Symbol: CNOT3
  Gene Name: CCR4-NOT transcription complex, subunit 3
  ENST ID: ENST00000471126
  CDS Start-End: 1-267
gcacagtatctggcagccaaggccctaaagaagcagtcatggcgattccacaccaagtacatgatgtggttccagaggcacgaggagcccaagaccatcactgacgagtttgagcagatcccagaccacctcctcgtccactcactgaccgccttctcccccggccagggcacctacatctactttgactacgagaagtggggccagcggaagaaggaaggcttcacctttgagtaccgctacctggaggaccgggacctccagtgacaccggcccctccctctacccacccccttcccccgcatgctgatccccctgcccaggtgagggccctgccctggaagactggagggaggccccaagccacggggcatccccctctcccaggaagcagggagggggccgggaggttttcctctcagccccaccctgggggcccgggggcgagggctgccccctcctcccctccccagtgagggacattttttggtaaacctattttcattttggaaaatatttatgaataaatagttttatatga

SEQ ID NO: 115248 - DNA, 2765 bp, Homo sapiens
  Payload ID: 2500
  Gene Symbol: CNOT3
  Gene Name: CCR4-NOT transcription complex, subunit 3
  Uniprot ID: O75175
  ENST ID: ENST00000616102
  CDS Start-End: 343-2058
gcaaatggaacggttcaaagttgtggaacgagagaccaaaaccaaagcttacagcaaagagggcctgggcctggcccagaaggtagatcctgcccagaaggagaaggaagaggttggccagtggctcacgaataccatcgacacgctcaacatgcaggtggaccagtttgagagtgaagtggagtcactgtcagtgcagacacgcaagaagaagggcgacaaggatgaggggccaagcaggtgctctgcagcccctgagcctggccctgggctcgccagcagaagcaggaccggattgagggcttgaagcggcacatcgagaagcaccgctaccacgtgcgcatgctagagaccatcctgcgcatgctggacaatgactccatcctcgttgacgccatccgcaagatcaaggacgacgttgagtactatgttgactcatcccaggaccccgacttcgaggagaacgagtttctctacgatgacctggacctcgaggacattccacaggcgctggtcgccacctcccctcccagccacagccacatggaggatgagatcttcaaccagtccagcagcacgcccacctcaaccacctccagctctcccatcccgcccagcccagccaactgtaccacggaaaactctgaagatgataagaagaggggacgttccacagacagtgaagtcagccagtctccagccaaaaacggctccaagcctgtccacagcaaccagcaccctcagtccccagctgtgccgcccacctacccctccggccccccgcctgctgcctctgccttgagcaccactcctggcaacaatggggtccccgcccccgcagcacccccaagtgccctgggccccaaggccagtccagctcccagccacaactcgggcacccctgctccctatgcccaggctgtggccccaccagctcccagtgggcccagcacgacccagccccggccccccagcgtccagcctagcggaggcggaggcggcggcagcggaggtggagggagcagcagcagtagtaacagcagtgccggtggaggggctggcaagcagaatggcgccaccagttacagctcagttgtggcagacagcccggcagaggtggctttgagcagcagtgggggcaacaatgccagcagccaggccttgggccccccttccggcccccacaacccacctcccagcacctcgaaggaacccagtgcggcagccccaacgggggctgggggcgtggccccaggctcagggaacaactcagggggacccagcctcctggtgccactgcctgtgaatcctcccagctccccaacgcccagcttcagtgatgccaaggcagccggtgccctgctcaatgggcctccacagttcagcaccgccccagaaatcaaggcccctgagcctctgagctccttgaagtccatggcggaacgggcagccatcagctctggcattgaggaccctgtgccaacgctgcacctgaccgagcgagacatcatcctgagcagtacatcagcacctccggcctcagcccagccgcccctgcagctgtcagaggtgaacataccgctgtcgctgggtgtctgtccactgggccctgtgcccctcaccaaggagcagctctatcagcaggccatggaagaggccgcctggcaccacatgcctcacccctctgactctgagcgtattcggcagtacctcccccggaacccctgtccgacgcccccctaccaccaccagatgccacccccacactcggacactgtggaattctaccagcgcctgtcgaccgagacactcttcttcatcttctactatctggagcccagagatgttagaactgcttgggttgacagcgaggctggtccactgaggcacacctcagccccgcttccagttgcccactggctcacccgcggcccctccccagccctgctccagcagccccagtctaggccgaccccactctgctcatcggcacattctcaggcctccctggagaccactggggagctgtccagccccctcccaaccccacttctctgaaagcaattttcacctcctgtctcattttccttctcctgatcagcattggtatgttctgtgcccccagccccatctccaagaggattgtccagcccaactgtggtctgtggcgggggccggggttcagccctgatgtcctgccccattcccctggctccccacccagtttgggggccccctgatccccctctccactgttcctcccccagggcactaaggcacagtatctggcagccaaggccctaaagaagcagtcatggcgattccacaccaagtacatgatgtggttccagaggcacgaggagcccaagaccatcactgacgagtttgagcagggcacctacatctactttgactacgagaagtggggccagcggaagaaggaaggcttcacctttgagtaccgctacctggaggaccgggacctccagtgacaccggcccctccctctacccacccccttcccccgcatgctgatccccctgcccaggtgagggccctgccctggaagactggagggaggccccaagccacggggcatccccctctcccaggaagcagggagggggccgggaggttttcctctcagccccaccctgggggcccgggggcgagggctgccccctcctcccctccccagtgagggacattttttggtaaacctattttcattttggaaaatatttatgaataaatagttttatatg

SEQ ID NO: 115249 - DNA, 2765 bp, Homo sapiens; identical to SEQ ID NO: 115248
  Payload ID: 2500
  Gene Symbol: CNOT3
  Gene Name: CCR4-NOT transcription complex, subunit 3
  ENST ID: ENST00000619347
  CDS Start-End: 343-2058

SEQ ID NO: 115250 - DNA, 2765 bp, Homo sapiens; identical to SEQ ID NO: 115248
  Payload ID: 2500
  Gene Symbol: CNOT3
  Gene Name: CCR4-NOT transcription complex, subunit 3
  Uniprot ID: O75175
  ENST ID: ENST00000613636
  CDS Start-End: 343-2058

SEQ ID NO: 115251 - DNA, 4138 bp, Homo sapiens
  Payload ID: 2500
  Gene Symbol: CNOT3
  Gene Name: CCR4-NOT transcription complex, subunit 3
  ENST ID: ENST00000622131
  CDS Start-End: 1604-3865
aaattctccctgggggtaaggtaccagccctgtcctttatgggcttcttgttctaaagcatatccgtcccatatggttgctgctagtcacatgtggtgattagtaactagttaaaaatgaaaaattcagttcctccattacacttgccacatttcagatgttcagtggccaacagatatgcgcaaatagagtgtttccagcattgcaaagttctgttggatagcactgtttgccagatgttcccttctttgtgggtgaggactcttttggtgtgacttccctctgtattgaggctcttgttcctcagtatggggctgtttctgtctttacagtaagtgactactccagggttccctgccctgcacacgtagagtgggagcggcccgtggatcccagggaactgtgcttttcattgtaggccccctccctggaggggaagagggcaatctccgctggtatctcagaagtcttcttctgaggcataagcctctcttcccagggctcccctggtctcgctgtcaggccctaaggtatgtcttcccttggactaaagctccttggaactcccttttgacctcagtcttctctgggttccaggtaacttcctttaaaataaagacgctcctctcttgaagttttgggttcctgccctgatggtctatgtctccctgactctaaattaccaatccacttgctatgggattcctccatgagtgcagatcggctccctcacagctgcggtacctttgcaccctcttatcttagtaagatttctgtcttctcccaggtctctcttgggtactgccttctgcccccaaatctctaagccttcttggtattagcttctttgggttaggagtgttatttccttttggtttaaggatcctgctctggaataaatgtcttggtggtttgagtcccttctacttggcattcagccctgtctgcatgagcgggttcagctcttcacagctttcggcatctctgctcgccgtcgttttcccccacccccaatctttcttctcctacctacagcttacacacacacacacacacacacacacacacacacacacgcccttctctgtgagctgccagtttcatttgtctcctgacttgtctgagggatgacctctcctagccacctctgcccagcccctctgagtaggaagtgtgatttccagggctaatgcctccatcccagtcatcagctgtgtgcagcatgactgtcctgctctgaaaaacctttttgagtgtattctggggagaaggtactccatgctctaggaattttccacttcctgagtcagaggcacacaaaaaagtatgtaacttttcttgtttcaacaaacttatggggtcccctgttggccagacactatgctgggcagtcaagcgagcatcaggagaactggggctggtctcttgtcagatagcaaatgcttcttctctttaccagtcccacctacctcactatgctgactaggtccatgtctctgggtttttaccagccagggaatacgtgttaattcctctccaatctctcctagcagcgtccgtctccaagagagtatgaagagagtgcgtctgtagggcagggaagatggcggacaagcgcaaactccaaggtgagattgatcgctgcctcaagaaggtgtccgagggcgtggagcagtttgaagatatttggcagaagctccacaatgcagccaacgcgaaccagaaagaaaagtatgaggctgacctaaagaaggagattaagaagctacaacggctgagggaccaaatcaagacatgggtagcgtccaacgagatcaaggacaagaggcagcttatagacaaccgcaagctcattgagacgcaaatggaacggttcaaagttgtggaacgagagaccaaaaccaaagcttacagcaaagagggcctgggcctggcccagaaggtagatcctgcccagaaggagaaggaagaggttggccagtggctcacgaataccatcgacacgctcaacatgcaggtggaccagtttgagagtgaagtggagtcactgtcagtgcagacacgcaagaagaagggcgacaaggataagcaggaccggattgagggcttgaagcggcacatcgagaagcaccgctaccacgtgcgcatgctagagaccatcctgcgcatgctggacaatgactccatcctcgttgacgccatccgcaagatcaaggacgacgttgagtactatgttgactcatcccaggaccccgacttcgaggagaacgagtttctctacgatgacctggacctcgaggacattccacaggcgctggtcgccacctcccctcccagccacagccacatggaggatgagatcttcaaccagtccagcagcacgcccacctcaaccacctccagctctcccatcccgcccagcccagccaactgtaccacggaaaactctgaagatgataagaagaggggacgttccacagacagtgaagtcagccagtctccagccaaaaacggctccaagcctgtccacagcaaccagcaccctcagtccccagctgtgccgcccacctacccctccggccccccgcctgctgcctctgccttgagcaccactcctggcaacaatggggtccccgcccccgcagcacccccaagtgccctgggccccaaggccagtccagctcccagccacaactcgggcacccctgctccctatgcccaggctgtggccccaccagctcccagtgggcccagcacgacccagccccggccccccagcgtccagcctagcggaggcggaggcggcggcagcggaggtggagggagcagcagcagtagtaacagcagtgccggtggaggggctggcaagcagaatggcgccaccagttacagctcagttgtggcagacagcccggcagaggtggctttgagcagcagtgggggcaacaatgccagcagccaggccttgggccccccttccggcccccacaacccacctcccagcacctcgaaggaacccagtgcggcagccccaacgggggctgggggcgtggccccaggctcagggaacaactcagggggacccagcctcctggtgccactgcctgtgaatcctcccagctccccaacgcccagcttcagtgatgccaaggcagccggtgccctgctcaatgggcctccacagttcagcaccgccccagaaatcaaggcccctgagcctctgagctccttgaagtccatggcggaacgggcagccatcagctctggcattgaggaccctgtgccaacgctgcacctgaccgagcgagacatcatcctgagcagtacatcagcacctccggcctcagcccagccgcccctgcagctgtcagaggtgaacataccgctgtcgctgggtgtctgtccactgggccctgtgcccctcaccaaggagcagctctatcagcaggccatggaagaggccgcctggcaccacatgcctcacccctctgactctgagcgtattcggcagtacctcccccggaacccctgtccgacgcccccctaccaccaccagatgccacccccacactcggacactgtggaattctaccagcgcctgtcgaccgagacactcttcttcatcttctactatctggagggcactaaggcacagtatctggcagccaaggccctaaagaagcagtcatggcgattccacaccaagtacatgatgtggttccagaggcacgaggagcccaagaccatcactgacgagtttgagcagggcacctacatctactttgactacgagaagtggggccagcggaagaaggaaggcttcacctttgagtaccgctacctggaggaccgggacctccagtgacaccggcccctccctctacccacccccttcccccgcatgctgatccccctgcccaggtgagggccctgccctggaagactggagggaggccccaagccacggggcatccccctctcccaggaagcagggagggggccgggaggttttcctctcagccccaccctgggggcccgggggcgagggctgccccctcctcccctccccagtgagggacattttttggtaaacctattttcattttggaaaatatttatgaataaatagttttatatg

SEQ ID NO: 115252 - DNA, 1269 bp, Homo sapiens
  Payload ID: 2500
  Gene Symbol: CNOT3
  Gene Name: CCR4-NOT transcription complex, subunit 3
  ENST ID: ENST00000615532
  CDS Start-End: 1-865
gaaggaacccagtgcggcagccccaacgggggctgggggcgtggccccaggctcagggaacaactcagggggacccagcctcctggtgccactgcctgtgaatcctcccagctccccaacgcccagcttcagtgatgccaaggcagccggtgccctgctcaatgggcctccacagttcagcaccgccccagaaatcaaggcccctgagcctctgagctccttgaagtccatggcggaacgggcagccatcagctctggcattgaggaccctgtgccaacgctgcacctgaccgagcgagacatcatcctgagcagtacatcagcacctccggcctcagcccagccgcccctgcagctgtcagaggtgaacataccgctgtcgctgggtgtctgtccactgggccctgtgcccctcaccaaggagcagctctatcagcaggccatggaagaggccgcctggcaccacatgcctcacccctctgactctgagcgtattcggcagtacctcccccggaacccctgtccgacgcccccctaccaccaccagatgccacccccacactcggacactgtggaattctaccagcgcctgtcgaccgagacactcttcttcatcttctactatctggagggcactaaggcacagtatctggcagccaaggccctaaagaagcagtcatggcgattccacaccaagtacatgatgtggttccagaggcacgaggagcccaagaccatcactgacgagtttgagcagctggcgcagtccctcagcctgaccaagtactcctccctctggctgtctgctcagcctggaacaccgccctctcatcctccacttggccagctcctaggcctcctgtaggtctcagcccaaatgtcccttcctcaaagaaaccttcctggagccacccagcccagtgcctcccctttgcagtgctgggcacactcgcttggggtgtgggattttcccagtatgtgtccctgcaccaggctgtgggctctgctgccgagggaccttgatggcccccacttcacctccaggtcccagcactcagcagggcaggggctcagtgccgaaactattttttttgaatgggcttctcaagttctaatactgggaaattcctgctgcttgcaaacactctggaaccaacctacctgggtttcagcccagtccagctgggcgactctaggcaagtcactcgaacctctgtgtctcaattaacttatctgtaaaaatggggggaagaccacctacctaatgca

SEQ ID NO: 115253 - DNA, 2765 bp, Homo sapiens; identical to SEQ ID NO: 115248
  Payload ID: 2500
  Gene Symbol: CNOT3
  Gene Name: CCR4-NOT transcription complex, subunit 3
  Uniprot ID: O75175
  ENST ID: ENST00000622193
  CDS Start-End: 343-2058

SEQ ID NO: 115254 - DNA, 4138 bp, Homo sapiens; identical to SEQ ID NO: 115251
  Payload ID: 2500
  Gene Symbol: CNOT3
  Gene Name: CCR4-NOT transcription complex, subunit 3
  ENST ID: ENST00000620419
  CDS Start-End: 1604-3865

SEQ ID NO: 115255 - DNA, 2765 bp, Homo sapiens; identical to SEQ ID NO: 115248
  Payload ID: 2500
  Gene Symbol: CNOT3
  Gene Name: CCR4-NOT transcription complex, subunit 3
  ENST ID: ENST00000611667
  CDS Start-End: 343-2058

SEQ ID NO: 115256 - DNA, 2852 bp, Homo sapiens
  Payload ID: 2500
  Gene Symbol: CNOT3
  Gene Name: CCR4-NOT transcription complex, subunit 3
  Uniprot ID: O75175
  ENST ID: ENST00000617982
  CDS Start-End: 317-2578
gaagagaggaggggaggcctcctccgccgccgccatcttggaccgggcccggtcagcttccgcggagccatcggcagacgccgcggcctcccttgagccccgacccccgtcgtcagaacaaccccgggcccactcccccaaccccacttccgcttcgcgccgctatcgcgatagcgcccgggcccggggcgcgagaaaaaggcggcgggcgctcgcctcccccgcctgtcgcgatacgctcctcagcggcggcgccagctcctgtgcgtccgtctccaagagagtatgaagagagtgcgtctgtagggcagggaagatggcggacaagcgcaaactccaaggtgagattgatcgctgcctcaagaaggtgtccgagggcgtggagcagtttgaagatatttggcagaagctccacaatgcagccaacgcgaaccagaaagaaaagtatgaggctgacctaaagaaggagattaagaagctacaacggctgagggaccaaatcaagacatgggtagcgtccaacgagatcaaggacaagaggcagcttatagacaaccgcaagctcattgagacgcaaatggaacggttcaaagttgtggaacgagagaccaaaaccaaagcttacagcaaagagggcctgggcctggcccagaaggtagatcctgcccagaaggagaaggaagaggttggccagtggctcacgaataccatcgacacgctcaacatgcaggtggaccagtttgagagtgaagtggagtcactgtcagtgcagacacgcaagaagaagggcgacaaggataagcaggaccggattgagggcttgaagcggcacatcgagaagcaccgctaccacgtgcgcatgctagagaccatcctgcgcatgctggacaatgactccatcctcgttgacgccatccgcaagatcaaggacgacgttgagtactatgttgactcatcccaggaccccgacttcgaggagaacgagtttctctacgatgacctggacctcgaggacattccacaggcgctggtcgccacctcccctcccagccacagccacatggaggatgagatcttcaaccagtccagcagcacgcccacctcaaccacctccagctctcccatcccgcccagcccagccaactgtaccacggaaaactctgaagatgataagaagaggggacgttccacagacagtgaagtcagccagtctccagccaaaaacggctccaagcctgtccacagcaaccagcaccctcagtccccagctgtgccgcccacctacccctccggccccccgcctgctgcctctgccttgagcaccactcctggcaacaatggggtccccgcccccgcagcacccccaagtgccctgggccccaaggccagtccagctcccagccacaactcgggcacccctgctccctatgcccaggctgtggccccaccagctcccagtgggcccagcacgacccagccccggccccccagcgtccagcctagcggaggcggaggcggcggcagcggaggtggagggagcagcagcagtagtaacagcagtgccggtggaggggctggcaagcagaatggcgccaccagttacagctcagttgtggcagacagcccggcagaggtggctttgagcagcagtgggggcaacaatgccagcagccaggccttgggccccccttccggcccccacaacccacctcccagcacctcgaaggaacccagtgcggcagccccaacgggggctgggggcgtggccccaggctcagggaacaactcagggggacccagcctcctggtgccactgcctgtgaatcctcccagctccccaacgcccagcttcagtgatgccaaggcagccggtgccctgctcaatgggcctccacagttcagcaccgccccagaaatcaaggcccctgagcctctgagctccttgaagtccatggcggaacgggcagccatcagctctggcattgaggaccctgtgccaacgctgcacctgaccgagcgagacatcatcctgagcagtacatcagcacctccggcctcagcccagccgcccctgcagctgtcagaggtgaacataccgctgtcgctgggtgtctgtccactgggccctgtgcccctcaccaaggagcagctctatcagcaggccatggaagaggccgcctggcaccacatgcctcacccctctgactctgagcgtattcggcagtacctcccccggaacccctgtccgacgcccccctaccaccaccagatgccacccccacactcggacactgtggaattctaccagcgcctgtcgaccgagacactcttcttcatcttctactatctggagggcactaaggcacagtatctggcagccaaggccctaaagaagcagtcatggcgattccacaccaagtacatgatgtggttccagaggcacgaggagcccaagaccatcactgacgagtttgagcagggcacctacatctactttgactacgagaagtggggccagcggaagaaggaaggcttcacctttgagtaccgctacctggaggaccgggacctccagtgacaccggcccctccctctacccacccccttcccccgcatgctgatccccctgcccaggtgagggccctgccctggaagactggagggaggccccaagccacggggcatccccctctcccaggaagcagggagggggccgggaggttttcctctcagccccaccctgggggcccgggggcgagggctgccccctcctcccctccccagtgagggacattttttggtaaacctattttcattttggaaaatatttatgaataaatagttttatatga

SEQ ID NO: 115257 - DNA, 2778 bp, Homo sapiens
  Payload ID: 2500
  Gene Symbol: CNOT3
  Gene Name: CCR4-NOT transcription complex, subunit 3
  ENST ID: ENST00000614542
  CDS Start-End: 1-319
gctcattgagacgcaaatggaacggttcaaagttgtggaacgagagaccaaaaccaaagcttacagcaaagagggcctgggcctggcccagaaggtagatcctgcccagaaggagaaggaagaggttggccagtggctcacgaataccatcgacacgctcaacatgcaggtggaccagtttgagagtgaagtggagtcactgtcagtgcagacacgcaagaagaagggcgacaaggatgaggggccaagcaggtgctctgcagcccctgagcctggccctgggctcgccagcagaagcaggaccggattgagggcttgaagcggcacatcgagaagcaccgctaccacgtgcgcatgctagagaccatcctgcgcatgctggacaatgactccatcctcgttgacgccatccgcaagatcaaggacgacgttgagtactatgttgactcatcccaggaccccgacttcgaggagaacgagtttctctacgatgacctggacctcgaggacattccacaggcgctggtcgccacctcccctcccagccacagccacatggaggatgagatcttcaaccagtccagcagcacgcccacctcaaccacctccagctctcccatcccgcccagcccagccaactgtaccacggaaaactctgaagatgataagaagaggggacgttccacagacagtgaagtcagccagtctccagccaaaaacggctccaagcctgtccacagcaaccagcaccctcagtccccagctgtgccgcccacctacccctccggccccccgcctgctgcctctgccttgagcaccactcctggcaacaatggggtccccgcccccgcagcacccccaagtgccctgggccccaaggccagtccagctcccagccacaactcgggcacccctgctccctatgcccaggctgtggccccaccagctcccagtgggcccagcacgacccagccccggccccccagcgtccagcctagcggaggcggaggcggcggcagcggaggtggagggagcagcagcagtagtaacagcagtgccggtggaggggctggcaagcagaatggcgccaccagttacagctcagttgtggcagacagcccggcagaggtggctttgagcagcagtgggggcaacaatgccagcagccaggccttgggccccccttccggcccccacaacccacctcccagcacctcgaaggaacccagtgcggcagccccaacgggggctgggggcgtggccccaggctcagggaacaactcagggggacccagcctcctggtgccactgcctgtgaatcctcccagctccccaacgcccagcttcagtgatgccaaggcagccggtgccctgctcaatgggcctccacagttcagcaccgccccagaaatcaaggcccctgagcctctgagctccttgaagtccatggcggaacgggcagccatcagctctggcattgaggaccctgtgccaacgctgcacctgaccgagcgagacatcatcctgagcagtacatcagcacctccggcctcagcccagccgcccctgcagctgtcagaggtgaacataccgctgtcgctgggtgtctgtccactgggccctgtgcccctcaccaaggagcagctctatcagcaggccatggaagaggccgcctggcaccacatgcctcacccctctgactctgagcgtattcggcagtacctcccccggaacccctgtccgacgcccccctaccaccaccagatgccacccccacactcggacactgtggaattctaccagcgcctgtcgaccgagacactcttcttcatcttctactatctggagcccagagatgttagaactgcttgggttgacagcgaggctggtccactgaggcacacctcagccccgcttccagttgcccactggctcacccgcggcccctccccagccctgctccagcagccccagtctaggccgaccccactctgctcatcggcacattctcaggcctccctggagaccactggggagctgtccagccccctcccaaccccacttctctgaaagcaattttcacctcctgtctcattttccttctcctgatcagcattggtatgttctgtgcccccagccccatctccaagaggattgtccagcccaactgtggtctgtggcgggggccggggttcagccctgatgtcctgccccattcccctggctccccacccagtttgggggccccctgatccccctctccactgttcctcccccagggcactaaggcacagtatctggcagccaaggccctaaagaagcagtcatggcgattccacaccaagtacatgatgtggttccagaggcacgaggagcccaagaccatcactgacgagtttgagcagggcacctacatctactttgactacgagaagtggggccagcggaagaaggaaggcttcacctttgagtaccgctacctggaggaccgggacctccagtgacaccggcccctccctctacccacccccttcccccgcatgctgatccccctgcccaggtgagggccctgccctggaagactggagggaggccccaagccacggggcatccccctctcccaggaagcagggagggggccgggaggttttcctctcagccccaccctgggggcccgggggcgagggctgccccctcctcccctccccagtgagggacattttttggtaaacctattttcattttggaaaatatttatgaataaatagttttatatga

SEQ ID NO: 115258 - DNA, 2886 bp, Homo sapiens
  Payload ID: 2500
  Gene Symbol: CNOT3
  Gene Name: CCR4-NOT transcription complex, subunit 3
  ENST ID: ENST00000610883
  CDS Start-End: 325-2586
agagacgagaagagaggaggggaggcctcctccgccgccgccatcttggaccgggcccggtcagcttccgcggagccatcggcagacgccgcggcctcccttgagccccgacccccgtcgtcagaacaaccccgggcccactcccccaaccccacttccgcttcgcgccgctatcgcgatagcgcccgggcccggggcgcgagaaaaaggcggcgggcgctcgcctcccccgcctgtcgcgatacgctcctcagcggcggcgccagctcctgtgcgtccgtctccaagagagtatgaagagagtgcgtctgtagggcagggaagatggcggacaagcgcaaactccaaggtgagattgatcgctgcctcaagaaggtgtccgagggcgtggagcagtttgaagatatttggcagaagctccacaatgcagccaacgcgaaccagaaagaaaagtatgaggctgacctaaagaaggagattaagaagctacaacggctgagggaccaaatcaagacatgggtagcgtccaacgagatcaaggacaagaggcagcttatagacaaccgcaagctcattgagacgcaaatggaacggttcaaagttgtggaacgagagaccaaaaccaaagcttacagcaaagagggcctgggcctggcccagaaggtagatcctgcccagaaggagaaggaagaggttggccagtggctcacgaataccatcgacacgctcaacatgcaggtggaccagtttgagagtgaagtggagtcactgtcagtgcagacacgcaagaagaagggcgacaaggataagcaggaccggattgagggcttgaagcggcacatcgagaagcaccgctaccacgtgcgcatgctagagaccatcctgcgcatgctggacaatgactccatcctcgttgacgccatccgcaagatcaaggacgacgttgagtactatgttgactcatcccaggaccccgacttcgaggagaacgagtttctctacgatgacctggacctcgaggacattccacaggcgctggtcgccacctcccctcccagccacagccacatggaggatgagatcttcaaccagtccagcagcacgcccacctcaaccacctccagctctcccatcccgcccagcccagccaactgtaccacggaaaactctgaagatgataagaagaggggacgttccacagacagtgaagtcagccagtctccagccaaaaacggctccaagcctgtccacagcaaccagcaccctcagtccccagctgtgccgcccacctacccctccggccccccgcctgctgcctctgccttgagcaccactcctggcaacaatggggtccccgcccccgcagcacccccaagtgccctgggccccaaggccagtccagctcccagccacaactcgggcacccctgctccctatgcccaggctgtggccccaccagctcccagtgggcccagcacgacccagccccggccccccagcgtccagcctagcggaggcggaggcggcggcagcggaggtggagggagcagcagcagtagtaacagcagtgccggtggaggggctggcaagcagaatggcgccaccagttacagctcagttgtggcagacagcccggcagaggtggctttgagcagcagtgggggcaacaatgccagcagccaggccttgggccccccttccggcccccacaacccacctcccagcacctcgaaggaacccagtgcggcagccccaacgggggctgggggcgtggccccaggctcagggaacaactcagggggacccagcctcctggtgccactgcctgtgaatcctcccagctccccaacgcccagcttcagtgatgccaaggcagccggtgccctgctcaatgggcctccacagttcagcaccgccccagaaatcaaggcccctgagcctctgagctccttgaagtccatggcggaacgggcagccatcagctctggcattgaggaccctgtgccaacgctgcacctgaccgagcgagacatcatcctgagcagtacatcagcacctccggcctcagcccagccgcccctgcagctgtcagaggtgaacataccgctgtcgctgggtgtctgtccactgggccctgtgcccctcaccaaggagcagctctatcagcaggccatggaagaggccgcctggcaccacatgcctcacccctctgactctgagcgtattcggcagtacctcccccggaacccctgtccgacgcccccctaccaccaccagatgccacccccacactcggacactgtggaattctaccagcgcctgtcgaccgagacactcttcttcatcttctactatctggagggcactaaggcacagtatctggcagccaaggccctaaagaagcagtcatggcgattccacaccaagtacatgatgtggttccagaggcacgaggagcccaagaccatcactgacgagtttgagcagggcacctacatctactttgactacgagaagtggggccagcggaagaaggaaggcttcacctttgagtaccgctacctggaggaccgggacctccagtgacaccggcccctccctctacccacccccttcccccgcatgctgatccccctgcccaggtgagggccctgccctggaagactggagggaggccccaagccacggggcatccccctctcccaggaagcagggagggggccgggaggttttcctctcagccccaccctgggggcccgggggcgagggctgccccctcctcccctccccagtgagggacattttttggtaaacctattttcattttggaaaatatttatgaataaatagttttatatgacggctggcagcagcggcctctcctgt

SEQ ID NO: 115259 - DNA, 2765 bp, Homo sapiens; identical to SEQ ID NO: 115248
  Payload ID: 2500
  Gene Symbol: CNOT3
  Gene Name: CCR4-NOT transcription complex, subunit 3
  ENST ID: ENST00000610829
  CDS Start-End: 343-2058

SEQ ID NO: 115260 - DNA, 2886 bp, Homo sapiens; identical to SEQ ID NO: 115258
  Payload ID: 2500
  Gene Symbol: CNOT3
  Gene Name: CCR4-NOT transcription complex, subunit 3
  ENST ID: ENST00000612924
  CDS Start-End: 325-2586

SEQ ID NO: 115261 - DNA, 4138 bp, Homo sapiens; identical to SEQ ID NO: 115251
  Payload ID: 2500
  Gene Symbol: CNOT3
  Gene Name: CCR4-NOT transcription complex, subunit 3
  Uniprot ID: O75175
  ENST ID: ENST00000615030
  CDS Start-End: 1604-3865

SEQ ID NO: 115262 - DNA, 695 bp, Homo sapiens
  Payload ID: 2500
  Gene Symbol: CNOT3
  Gene Name: CCR4-NOT transcription complex, subunit 3
  ENST ID: ENST00000616264
  CDS Start-End: 1-291
gaattctaccagcgcctgtcgaccgagacactcttcttcatcttctactatctggagggcactaaggcacagtatctggcagccaaggccctaaagaagcagtcatggcgattccacaccaagtacatgatgtggttccagaggcacgaggagcccaagaccatcactgacgagtttgagcagctggcgcagtccctcagcctgaccaagtactcctccctctggctgtctgctcagcctggaacaccgccctctcatcctccacttggccagctcctaggcctcctgtaggtctcagcccaaatgtcccttcctcaaagaaaccttcctggagccacccagcccagtgcctcccctttgcagtgctgggcacactcgcctggggtgtgggattttcccagtatgtgtccctgcaccaggctgtgggctctgctgccgagggaccttgatggcccccacttcacctccaggtcccagcactcagcagggcaggggctcagtgccgaaactattttttttgaatgggcttctcaagttctaatactgggaaattcctgctgcttgcaaacactctggaaccaacctacctgggtttcagcccagtccagctgggcgactctaggcaagtcactcgaacctctgtgtctcaattaacttatctgtaaaaatggggggaagaccacctacctaatgca

SEQ ID NO: 115263 - DNA, 2886 bp, Homo sapiens; identical to SEQ ID NO: 115258
  Payload ID: 2500
  Gene Symbol: CNOT3
  Gene Name: CCR4-NOT transcription complex, subunit 3
  ENST ID: ENST00000616910
  CDS Start-End: 325-2586

SEQ ID NO: 115264 - DNA, 2886 bp, Homo sapiens; identical to SEQ ID NO: 115258
  Payload ID: 2500
  Gene Symbol: CNOT3
  Gene Name: CCR4-NOT transcription complex, subunit 3
  ENST ID: ENST00000620573
  CDS Start-End: 325-2586

SEQ ID NO: 115265 - DNA, 1125 bp, Homo sapiens
  Payload ID: 2500
  Gene Symbol: CNOT3
  Gene Name: CCR4-NOT transcription complex, subunit 3
  ENST ID: ENST00000612729
  CDS Start-End: 1-1125
accgcaagctcattgagacgcaaatggaacggttcaaagttgtggaacgagagaccaaaaccaaagcttacagcaaagagggcctgggcctggcccagaaggtagatcctgcccagaaggagaaggaagaggttggccagtggctcacgaataccatcgacacgctcaacatgcaggtggaccagtttgagagtgaagtggagtcactgtcagtgcagacacgcaagaagaagggcgacaaggatcagaagcaggaccggattgagggcttgaagcggcacatcgagaagcaccgctaccacgtgcgcatgctagagaccatcctgcgcatgctggacaatgactccatcctcgttgacgccatccgcaagatcaaggacgacgttgagtactatgttgactcatcccaggaccccgacttcgaggagaacgagtttctctacgatgacctggacctcgaggacattccacaggcgctggtcgccacctcccctcccagccacagccacatggaggatgagatcttcaaccagtccagcagcacgcccacctcaaccacctccagctctcccatcccgcccagcccagccaactgtaccacggaaaactctgaagatgataagaagaggggacgttccacagacagtgaagtcagccagtctccagccaaaaacggctccaagcctgtccacagcaaccagcaccctcagtccccagctgtgccgcccacctacccctccggccccccgcctgctgcctctgccttgagcaccactcctggcaacaatggggtccccgcccccgcagcacccccaagtgccctgggccccaaggccagtccagctcccagccacaactcgggcacccctgctccctatgcccaggctgtggccccaccagctcccagtgggcccagcacgacccagccccggccccccagcgtccagcctagcggaggcggaggcggcggcagcggaggtggagggagcagcagcagtagtaacagcagtgccggtggaggggctggcaagcagaatggcgccaccagttacagctcagttgtggcagacagcccggcagaggtggctttgagcagcagtgggggcaacaatgccagcagccagg

SEQ ID NO: 115266 - DNA, 2765 bp, Homo sapiens; identical to SEQ ID NO: 115248
  Payload ID: 2500
  Gene Symbol: CNOT3
  Gene Name: CCR4-NOT transcription complex, subunit 3
  ENST ID: ENST00000617218
  CDS Start-End: 343-2058

SEQ ID NO: 115267 - DNA, 4138 bp, Homo sapiens; identical to SEQ ID NO: 115251
  Payload ID: 2500
  Gene Symbol: CNOT3
  Gene Name: CCR4-NOT transcription complex, subunit 3
  ENST ID: ENST00000613752
  CDS Start-End: 1604-3865

SEQ ID NO: 115268 - DNA, 4138 bp, Homo sapiens; identical to SEQ ID NO: 115251
  Payload ID: 2500
  Gene Symbol: CNOT3
  Gene Name: CCR4-NOT transcription complex, subunit 3
  Uniprot ID: O75175
  ENST ID: ENST00000618405
  CDS Start-End: 1604-3865

SEQ ID NO: 115269 - DNA, 555 bp, Homo sapiens
  Payload ID: 2500
  Gene Symbol: CNOT3
  Gene Name: CCR4-NOT transcription complex, subunit 3
  ENST ID: ENST00000619316
  CDS Start-End: 1-282
gaattctaccagcgcctgtcgaccgagacactcttcttcatcttctactatctggagggcactaaggcacagtatctggcagccaaggccctaaagaagcagtcatggcgattccacaccaagtacatgatgtggttccagaggcacgaggagcccaagaccatcactgacgagtttgagcagggcacctacatctactttgactacgagaagtggggccagcggaagaaggaaggcttcacctttgagtaccgctacctggaggaccgggacctccagtgacaccggcccctccctctacccacccccttcccccgcatgctgatccccctgcccaggtgagggccctgccctggaagactggagggaggccccaagccacggggcatccccctctcccaggaagcagggagggggccgggaggttttcctctcagccccaccctgggggcccgggggcgagggctgccccctcctcccctccccagtgagggacattttttggtaaacctattttcattttggaaaatatttatgaataaatagttttatatg

SEQ ID NO: 115270 - DNA, 2886 bp, Homo sapiens; identical to SEQ ID NO: 115258
  Payload ID: 2500
  Gene Symbol: CNOT3
  Gene Name: CCR4-NOT transcription complex, subunit 3
  Uniprot ID: O75175
  ENST ID: ENST00000620060
  CDS Start-End: 325-2586

SEQ ID NO: 115271 - DNA, 2778 bp, Homo sapiens
  Payload ID: 2500
  Gene Symbol: CNOT3
  Gene Name: CCR4-NOT transcription complex, subunit 3
  ENST ID: ENST00000613073
  CDS Start-End: 1-319
gctcattgagacgcaaatggaacggttcaaagttgtggaacgagagaccaaaaccaaagcttacagcaaagagggcctgggcctggcccagaaggtagatcctgcccagaaggagaaggaagaggttggccagtggctcacgaataccatcgacacgctcaacatgcaggtggaccagtttgagagtgaagtggagtcactgtcagtgcagacacgcaagaagaagggcgacaaggatgaggggccaagcaggtgctctgcagcccctgagcctggccctgggctcgccagcagaagcaggaccggattgagggcttgaagcggcacatcgagaagcaccgctaccacgtgcgcatgctagagaccatcctgcgcatgctggacaatgactccatcctcgttgacgccatccgcaagatcaaggacgacgttgagtactatgttgactcatcccaggaccccgacttcgaggagaacgagtttctctacgatgacctggacctcgaggacattccacaggcgctggtcgccacctccccccccagccacagccacatggaggatgagatcttcaaccagtccagcagcacgcccacctcaaccacctccagctctcccatcccgcccagcccagccaactgtaccacggaaaactctgaagatgataagaagaggggacgttccacagacagtgaagtcagccagtctccagccaaaaacggctccaagcctgtccacagcaaccagcaccctcagtccccagctgtgccgcccacctacccctccggccccccgcctgctgcctctgccttgagcaccactcctggcaacaatggggtccccgcccccgcagcacccccaagtgccctgggccccaaggccagtccagctcccagccacaactcgggcacccctgctccctatgcccaggctgtggccccaccagctcccagtgggcccagcacgacccagccccggccccccagcgtccagcctagcggaggcggaggcggcggcagcggaggcggagggagcagcagcagtagtaacagcagtgccggtggaggggctggcaagcagaatggcgccaccagttacagctcagttgtggcagacagcccggcagaggtggctttgagcagcagtgggggcaacaatgccagcagccaggccttgggccccccttccggcccccacaacccacctcccagcacctcgaaggaacccagtgcggcagccccaacgggggctgggggcgtggccccaggctcagggaacaactcagggggacccagcctcctggtgccactgcctgtgaatcctcccagctccccaacgcccagcttcagtgatgccaaggcagccggtgccctgctcaatgggcctccacagttcagcaccgccccagaaatcaaggcccctgagcctctgagctccttgaagtccatggcggaacgggcagccatcagctctggcattgaggaccctgtgccaacgctgcacctgaccgagcgagacatcatcctgagcagtacatcagcacctccggcctcagcccagccgcccctgcagctgtcagaggtgaacataccgctgtcgctgggtgtctgtccactgggccctgtgcccctcaccaaggagcagctctatcagcaggccatggaagaggccgcctggcaccacatgcctcacccctctgactctgagcgtattcggcagtacctcccccggaacccctgtccgacgcccccctaccaccaccagatgccacccccacactcggacactgtggaattctaccagcgcctgtcgaccgagacactcttcttcatcttctactatctggagcccagagatgttagaactgcttgggttgacagcgaggctggtccactgaggcacacctcagccccgcttccagttgcccactggctcacccgcggcccctccccagccctgctccagcagccccagtctaggccgaccccactctgctcattggcacattctcaggcctccctggagaccactggggagctgtccagccccctcccaaccccacttctctgaaagcaattttcacctcctgtctcattttccttctcctgatcagcattggtatgttctgtgcccccagccccatctccaagaggattgtccagcccaactgtggtctgtggcgggggccggggttcagccctgatgtcctgccccattcccctggctccccacccagtttgggggccccctgatccccctctccactgttcctcccccagggcactaaggcacagtatctggcagccaaggccctaaagaagcagtcatggcgattccacaccaagtacatgatgtggttccagaggcacgaggagcccaagaccatcactgacgagtttgagcagggcacctacatctactttgactacgagaagtggggccagcggaagaaggaaggcttcacctttgagtaccgctacctggaggaccgggacctccagtgacaccggcccctccctctacccacccccttcccccgcatgctgatccccctgcccaggtgagggccctgccctggaagactggagggaggccccaagccacggggcatccccctctcccaggaagcagggagggggccgggaggttttcctctcagccccaccctgggggcccgggggcgagggctgccccctcctcccctccccagtgagggacattttttggtaaacctattttcattttggaaaatatttatgaataaatagttttatatga

SEQ ID NO: 115272 - DNA, 2886 bp, Homo sapiens; identical to SEQ ID NO: 115258
  Payload ID: 2500
  Gene Symbol: CNOT3
  Gene Name: CCR4-NOT transcription complex, subunit 3
  ENST ID: ENST00000619854
  CDS Start-End: 325-2586

SEQ ID NO: 115273 - DNA, 2765 bp, Homo sapiens; identical to SEQ ID NO: 115248
  Payload ID: 2500
  Gene Symbol: CNOT3
  Gene Name: CCR4-NOT transcription complex, subunit 3
  ENST ID: ENST00000614598
  CDS Start-End: 343-2058

SEQ ID NO: 115274 - DNA, 4138 bp, Homo sapiens; identical to SEQ ID NO: 115251
  Payload ID: 2500
  Gene Symbol: CNOT3
  Gene Name: CCR4-NOT transcription complex, subunit 3
  ENST ID: ENST00000613528
  CDS Start-End: 1604-3865

SEQ ID NO: 115275 - DNA, 4138 bp, Homo sapiens; identical to SEQ ID NO: 115251
  Payload ID: 2500
  Gene Symbol: CNOT3
  Gene Name: CCR4-NOT transcription complex, subunit 3
  Uniprot ID: O75175
  ENST ID: ENST00000620970
  CDS Start-End: 1604-3865

SEQ ID NO: 115276 - DNA, 4138 bp, Homo sapiens; identical to SEQ ID NO: 115251
  Payload ID: 2500
  Gene Symbol: CNOT3
  Gene Name: CCR4-NOT transcription complex, subunit 3
  ENST ID: ENST00000619567
  CDS Start-End: 1604-3865

SEQ ID NO: 115277 - DNA, 2886 bp, Homo sapiens; identical to SEQ ID NO: 115258
  Payload ID: 2500
  Gene Symbol: CNOT3
  Gene Name: CCR4-NOT transcription complex, subunit 3
  ENST ID: ENST00000611252
  CDS Start-End: 325-2586

SEQ ID NO: 115278 - DNA, 541 bp, Homo sapiens; identical to SEQ ID NO: 115247
  Payload ID: 2500
  Gene Symbol: CNOT3
  Gene Name: CCR4-NOT transcription complex, subunit 3
  ENST ID: ENST00000613028
  CDS Start-End: 1-267

SEQ ID NO: 115279 - DNA, 555 bp, Homo sapiens; identical to SEQ ID NO: 115269
  Payload ID: 2500
  Gene Symbol: CNOT3
  Gene Name: CCR4-NOT transcription complex, subunit 3
  ENST ID: ENST00000618717
  CDS Start-End: 1-282

SEQ ID NO: 115280 - DNA, 2886 bp, Homo sapiens; identical to SEQ ID NO: 115258
  Payload ID: 2500
  Gene Symbol: CNOT3
  Gene Name: CCR4-NOT transcription complex, subunit 3
  Uniprot ID: O75175
  ENST ID: ENST00000616359
  CDS Start-End: 325-2586

SEQ ID NO: 115281 - DNA, 2765 bp, Homo sapiens; identical to SEQ ID NO: 115248
  Payload ID: 2500
  Gene Symbol: CNOT3
  Gene Name: CCR4-NOT transcription complex, subunit 3
  ENST ID: ENST00000619557
  CDS Start-End: 343-2058

SEQ ID NO: 115282 - DNA, 695 bp, Homo sapiens
  Payload ID: 2500
  Gene Symbol: CNOT3
  Gene Name: CCR4-NOT transcription complex, subunit 3
  ENST ID: ENST00000622080
  CDS Start-End: 1-291
gaattctaccagcgcctgtcgaccgagacactcttcttcatcttctactatctggagggcactaaggcacagtatctggcagccaaggccctaaagaagcagtcatggcgattccacaccaagtacatgatgtggttccagaggcacgaggagcccaagaccatcactgacgagtttgagcagctggcgcagtccctcagcctgaccaagtactcctccctctggctgtctgctcagcctggaacaccgccctctcatcctccacttggccagctcctaggcctcctgtaggtctcagcccaaatgtcccttcctcaaagaaaccttcctggagccacccagcccagtgcctcccctttgcagtgctgggcacactcgcttggggtgtgggattttcccagtatgtgtccctgcaccaggctgtgggctctgctgccgagggaccttgatggcccccacttcacctccaggtcccagcactcagcagggcaggggctcagtgccgaaactattttttttgaatgggcttctcaagttctaatactgggaaattcctgctgcttgcaaacactctggaaccaacctacctgggtttcagcccagtgcagctgggcgactctaggcaagtcactcgaacctctgtgtctcaattaacttatctgtaaaaatggggggaagaccacctacctaatgca

SEQ ID NO: 115283 - DNA, 4138 bp, Homo sapiens; identical to SEQ ID NO: 115251
  Payload ID: 2500
  Gene Symbol: CNOT3
  Gene Name: CCR4-NOT transcription complex, subunit 3
  ENST ID: ENST00000614649
  CDS Start-End: 1604-3865

SEQ ID NO: 115284 - DNA, 3783 bp, Homo sapiens
  Payload ID: 2501
  Gene Symbol: CNOT4
  Gene Name: CCR4-NOT transcription complex, subunit 4
  Uniprot ID: O95628
  ENST ID: ENST00000315544
  CDS Start-End: 332-2059
agcgtgcgcctgcgcacgggaggccggaggagtcttaccctaatgtaagatggtggcccgtctggctgtggaacccaccgaaagctgagagtctctctctcagccgtaaaggtcggactcgctgaagcaatcaggcccggttctgaagagttttttccccgacgctcgttcggtggtttcttgtgaggacgcggcagcccgtggagtcggctgagggaaaagcgaggcaaggcaggcgggtcgtcaaagtcctacattttagctttcagtgctgaacttccttctcccttaaattattataaacttttgctgctgtttaataaacgtgaagatgtctcgcagtcctgatgcgaaggaagaccctgtggagtgccctctttgcatggagcccttggagatagatgatatcaactttttcccttgcacctgtggctaccagatttgccgattttgttggcatcgaattcgcactgatgaaaatgggctttgtcctgcatgtagaaagccatatccagaagacccagcagtttataaaccactctcccaggaagagctgcaaaggataaagaatgagaaaaaacagaaacaaaatgagagaaaacagaaaatatcagaaaatcgcaaacatttggctagtgtacgtgtcgtacaaaaaaacctcgtctttgttgtaggtttatctcagcgcctagcagacccagaggttttaaaacgaccagaatattttgggaagtttggtaaaatacataaagttgtcatcaataatagcacatcatatgcaggctcacagggtccaagtgccagtgcttatgtaacctatatccggtcagaagacgctctcagagccatacagtgtgtcaacaatgtggtagtagatggcagaacacttaaggcatctctaggtacaacaaaatactgcagttacttcttaaagaatatgcagtgtccaaaacctgactgcatgtatcttcatgaattgggggatgaggcggccagcttcacaaaagaggaaatgcaggcgggtaaacaccaagaatatgaacagaagctacttcaagaattatataaattaaatcccaattttcttcagctatctacgggttcagttgataaaaataagaacaaagtgacaccactgcagaggtacgatacccccattgacaaaccttcagattctctcagtatagggaacggtgataattcccagcagatatctaacagtgatacgccttcaccaccacctggtttgtcaaaatccaatccagtcatccccatcagttcatccaatcacagtgcacggtccccttttgaaggggcagtaacagagtcacagtcgttattctcagacaattttcgccatcccaaccctatcccaagtgggcttcctcctttccccagctccccacagacatccagtgactggcctacagcaccagaaccacagagcctcttcacatcagaaacaatcccagtatcatcctctacagactggcaagcagcttttggctttggttcttctaaacaaccagaggatgacttgggttttgatcccttcgatgtcactcgaaaagccttagcagacctgattgagaaggaactgtccgttcaagaccaaccttccctttcgcccacatctcttcagaactcctcttcacacactacaaccgccaaaggtccaggctctggattcctgcatcctgctgcagctacaaatgccaattctctcaatagtaccttttcagtcttgccccagaggttccctcaatttcagcagcaccgagcggtttataattcattcagttttccaggccaggcagcccgctatccttggatggcctttccacgcaatagcatcatgcacttgaaccacacagcaaaccccacctcaaatagtaatttcttggacttgaatctcccgccacagcacaacacaggtctgggagggatccctgtagcaggggaagaagaggtgaaggtttcgaccatgccactgtcaacctcttcccattcattacaacaaggacagcagcctacaagtctccacactactgtggcctgacaacagaactgagaggagaggattagactctggggtgcttgcatgggcaactggatttttgcatgattcctttatgattttgcttttaatgtatacacccagaagagccaatataaacgttcctcatgcctacagctagcgtgttacctcatagttgttgaagtatttcttcattaggcctttaacataatttattagtgtaataattttggcattgtttctcatgagtgatactatttctaactcataaaaataaacttgtagtactaagatcccaggtgagattagctagaattgttgttattttggctctattattgaaaaattatacaaaggtaatggtagtatcttgttttctggtttgtgaaaaaataatatcctaatctcctgaaaaatttgcaaattaacaagataatgtctattgcattctttgaatacttgagaagaaagaatacatataaaacaaaattggtggtgtcatttaatgctcagaaggatattgttggcgattgtttttagttgtctagatttatatcctataatatgcattacatgtgtagaaactgttttgttctctctcttttgcacttttgcactttctttttgaatggttgttaattatgcatagatggttaaaagataattattgtagcctaaatgcaatataatctcttttctaatgcactgcctagtataccaggaaatgcctcaaaaacagaacttcagtttatagttgacttatctgaaacttgaatacggagtaaacattgtatgtgaaaagcaaccatagtagtgtaacattgttactgaacaaacagtaattctgtgggatattgttttggaaatttcattgtttaataattaaaatgtgataataagataatattataagtacctgaccagaatgagactaaggcagaagagaagagattggatgtcctctaaaattaggccacctaaattgtaacagataattttaatcaagagaatagtggagtactttattaggacataatgtgaagtgatatttctgaaaacacatttcttgaaatagttttaaaactgataataaaggaaaagaaactgtacttagtttggagcagtggacaaaagctgattcagaaaacatgaccatattctgcctacatgaagcatctgggaagaaagggaaagtcacacctcctcttgagattttaaccattatgataaaaggtatgctttaatttgttaaaaaaaaaagtatgaaaggggataatgtgaatacaaaaaagaagcctagagattgaaaataataataatagaacatgttattaggagatggtacttaatgtcatgttggagttggagttttcaaggttacctctatataaaattggattattttctgttagatataatgtgacaaattaaatgactttatcccaaggtacagtgaggtaaacaaaaatctattcttagatatccttagatttggttaactgaggctgtagaagcagcgaattgtctagccatttaagttatttttgtaaaattcagcataaacatcaatctctaatttctatctagaagtgactttaagacattacaagaacattgccaatttggaaaatgccaataaaatactgtagacttattaatattgtagacttattatcagtcttttactatagcttaatttaattatggttttcatttttactgtaagaggccaagacttcacttat

SEQ ID NO: 115285 - DNA, 2594 bp, Homo sapiens
  Payload ID: 2501
  Gene Symbol: CNOT4
  Gene Name: CCR4-NOT transcription complex, subunit 4
  ENST ID: ENST00000356162
  CDS Start-End: 1081-1608
gttgtcatcaataatagcacatcatatgcaggctcacagggtccaagtgccagtgcttatgtaacctatatccggtcagaagacgctctcagagccatacagtgtgtcaacaatgtggtagtagatggcagaacacttaaggcatctctaggtacaacaaaatactgcagttacttcttaaagaatatgcagtgtccaaaacctgactgcatgtatcttcatgaattgggggatgaggcggccagcttcacaaaagaggaaatgcaggcgggtaaacaccaagaatatgaacagaagctacttcaagaattatataaattaaatcccaattttcttcagctatctacgggttcagttgataaaaataagaacaaagtgacaccactgcagaggtacgatacccccattgacaaaccttcagattctctcagtatagggaacggtgataattcccagcagatatctaacagtgatacgccttcaccaccacctggtttgtcaaaatccaatccagtcatccccatcagttcatccaatcacagtgcacggtccccttttgaaggggcagtaacagagtcacagtcgttattctcagacaattttcgccatcccaaccctatcccaagtgggcttcctcctttccccagctccccacagacatccagtgactggcctacagcaccagaaccacagagcctcttcacatcagaaacaatcccagtatcatcctctacagactggcaagcagcttttggctttggttcttctaaacaaccagaggatgacttgggttttgatcccttcgatgtcactcgaaaagccttagcagacctgattgagaaggaactgtccgttcaagaccaaccttccctttcgcccacatctcttcagaactcctcttcacacactacaaccgccaaaggtccaggctctggattcctgcatcctgctgcagctacaaatgccaattctctcaatagtaccttttcagtcttgccccagaggttccctcaatttcagcagcaccgagcggtttataattcattcagttttccaggccaggcagcccgctatccttggatggcctttccacgcaatagcatcatgcacttgaaccacacagcaaaccccacctcaaatagtaatttcttggacttgaatctcccgccacagcacaacacaggtctgggagggatccctgtagcaggtattccagcgtcttcaggaaacagtttagactctcttcaagatgacaatcctccacactggctaaaatcccttcaggccctcacagagatggacggcccagcgctgctccatcacagacccaccacagcgccccttcagcacacagatcccgctgcacagagccagttggaatccctaccctcctccttcaaacccttccagcttccactccccacccccaggctttcagacagccttcagaccccccagcaaaacccccacagatttactacagagttcaacactggaccgccattaggcaaagaggagcaaccattagaaaatgcaggatttgtcccactctgttttctccctctcagcccaccacccacagctcccttctcatctcttatgttctgaagaatccagtacctgatcaattttttttctccctaaccccagatgcaatgcgatcacagggtcattaccatctctttattaattgtaaaaatttttgttgatccagcatttgagtgacactgttgaatgtttctaaaaatgcctttttaaggagagaaaaaaaaatcaaagggcagtctcaatacttagaaaattattgtttgtctgttgcgcataataatgacataatctgcttagcagaaaatgacgattaatctataggaaagctcaagtaaatgcattatcaactgcagaagtttgaaaaccaggttcatttacgtgagattgctaaatgcatgggggaaagcagtggtcctagcatccatcttgtattcagcttatcattattgcagggaaaatgcttttaatttaaattaatttttaattcttttggcaagttgatggcaaggacttgattgtgtcattaagcaaaagaatgtattggaagttgatggaaagacaaattcatctgtagtagtaactggccgattgctaaagagttcataaggaggtgagaagtaatttttttaaaggagaaaaattttttggctttagatttaaagtaaattgaaatgttttaaagaaaaaagtattcacagatttaatacctattaataatataagagctgaaatgtaagtcatttcttcagtccttctcctctgtcggaatcttttttgttttaccataaattcacctgacgagggcactctgagatagcactgctctggggccatctgatcaccatcgggagcaaatctctgacctccttgcctgcagcttttacttaaccctgtagtttctggacgtttgtgcagtattgaaaagacaggagaaaagaaaacagaaacctggttataacctgacgctaaaactaaaaacaaggaaatgtacctctttcttcagaattaaaactaaaatcttaaataaaacagaaaacttgatggtg

SEQ ID NO: 115286 - DNA, 2215 bp, Homo sapiens
  Payload ID: 2501
  Gene Symbol: CNOT4
  Gene Name: CCR4-NOT transcription complex, subunit 4
  Uniprot ID: O95628
  ENST ID: ENST00000361528
  CDS Start-End: 296-2215
accctaatgtaagatggtggcccgtctggctgtggaacccaccgaaagctgagagtctctctctcagccgtaaaggtcggactcgctgaagcaatcaggcccggttctgaagagttttttccccgacgctcgttcggtggtttcttgtgaggacgcggcagcccgtggagtcggctgagggaaaagcgaggcaaggcaggcgggtcgtcaaagtcctacattttagctttcagtgctgaacttccttctcccttaaattattataaacttttgctgctgtttaataaacgtgaagatgtctcgcagtcctgatgcgaaggaagaccctgtggagtgccctctttgcatggagcccttggagatagatgatatcaactttttcccttgcacctgtggctaccagatttgccgattttgttggcatcgaattcgcactgatgaaaatgggctttgtcctgcatgtagaaagccatatccagaagacccagcagtttataaaccactctcccaggaagagctgcaaaggataaagaatgagaaaaaacagaaacaaaatgagagaaaacagaaaatatcagaaaatcgcaaacatttggctagtgtacgtgtcgtacaaaaaaacctcgtctttgttgtaggtttatctcagcgcctagcagacccagaggttttaaaacgaccagaatattttgggaagtttggtaaaatacataaagttgtcatcaataatagcacatcatatgcaggctcacagggtccaagtgccagtgcttatgtaacctatatccggtcagaagacgctctcagagccatacagtgtgtcaacaatgtggtagtagatggcagaacacttaaggcatctctaggtacaacaaaatactgcagttacttcttaaagaatatgcagtgtccaaaacctgactgcatgtatcttcatgaattgggggatgaggcggccagcttcacaaaagaggaaatgcaggcgggtaaacaccaagaatatgaacagaagctacttcaagaattatataaattaaatcccaattttcttcagctatctacgggttcagttgataaaaataagaacaaagtgacaccactgcagagccccattgacaaaccttcagattctctcagtatagggaacggtgataattcccagcagatatctaacagtgatacgccttcaccaccacctggtttgtcaaaatccaatccagtcatccccatcagttcatccaatcacagtgcacggtccccttttgaaggggcagtaacagagtcacagtcgttattctcagacaattttcgccatcccaaccctatcccaagtgggcttcctcctttccccagctccccacagacatccagtgactggcctacagcaccagaaccacagagcctcttcacatcagaaacaatcccagtatcatcctctacagactggcaagcagcttttggctttggttcttctaaacaaccagaggatgacttgggttttgatcccttcgatgtcactcgaaaagccttagcagacctgattgagaaggaactgtccgttcaagaccaaccttccctttcgcccacatctcttcagaactcctcttcacacactacaaccgccaaaggtccaggctctggattcctgcatcctgctgcagctacaaatgccaattctctcaatagtaccttttcagtcttgccccagaggttccctcaatttcagcagcaccgagcggtttataattcattcagttttccaggccaggcagcccgctatccttggatggcctttccacgcaatagcatcatgcacttgaaccacacagcaaaccccacctcaaatagtaatttcttggacttgaatctcccgccacagcacaacacaggtctgggagggatccctgtagcaggtattccagcgtcttcaggaaacagtttagactctcttcaagatgacaatcctccacactggctaaaatcccttcaggccctcacagagatggacggccccagcgctgctccatcacagacccaccacagcgcccccttcagcacacagatcccgctgcacagagccagttggaatccctaccctcctccttcaaacccttccagcttccactccccacccccaggctttcagacagccttcagaccccccagcaaaacccccacagatttactacagagttcaacactggaccgccattag

SEQ ID NO: 115287 - DNA, 3507 bp, Homo sapiens
  Payload ID: 2501
  Gene Symbol: CNOT4
  Gene Name: CCR4-NOT transcription complex, subunit 4
  Uniprot ID: O95628
  ENST ID: ENST00000451834
  CDS Start-End: 285-2417
agatggtggcccgtctggctgtggaacccaccgaaagctgagagtctctctctcagccgtaaaggtcggactcgctgaagcaatcaggcccggttctgaagagttttttccccgacgctcgttcggtggtttcttgtgaggacgcggcagcccgtggagtcggctgagggaaaagcgaggcaaggcaggcgggtcgtcaaagtcctacattttagctttcagtgctgaacttccttctcccttaaattattataaacttttgctgctgtttaataaacgtgaagatgtctcgcagtcctgatgcgaaggaagaccctgtggagtgccctctttgcatggagcccttggagatagatgatatcaactttttcccttgcacctgtggctaccagatttgccgattttgttggcatcgaattcgcactgatgaaaatgggctttgtcctgcatgtagaaagccatatccagaagacccagcagtttataaaccactctcccaggaagagctgcaaaggataaagaatgagaaaaaacagaaacaaaatgagagaaaacagaaaatatcagaaaatcgcaaacatttggctagtgtacgtgtcgtacaaaaaaacctcgtctttgttgtaggtttatctcagcgcctagcagacccagaggttttaaaacgaccagaatattttgggaagtttggtaaaatacataaagttgtcatcaataatagcacatcatatgcaggctcacagggtccaagtgccagtgcttatgtaacctatatccggtcagaagacgctctcagagccatacagtgtgtcaacaatgtggtagtagatggcagaacacttaaggcatctctaggtacaacaaaatactgcagttacttcttaaagaatatgcagtgtccaaaacctgactgcatgtatcttcatgaattgggggatgaggcggccagcttcacaaaagaggaaatgcaggcgggtaaacaccaagaatatgaacagaagctacttcaagaattatataaattaaatcccaattttcttcagctatctacgggttcagttgataaaaataagaacaaagtgacaccactgcagagccccattgacaaaccttcagattctctcagtatagggaacggtgataattcccagcagatatctaacagtgatacgccttcaccaccacctggtttgtcaaaatccaatccagtcatccccatcagttcatccaatcacagtgcacggtccccttttgaaggggcagtaacagagtcacagtcgttattctcagacaattttcgccatcccaaccctatcccaagtgggcttcctcctttccccagctccccacagacatccagtgactggcctacagcaccagaaccacagagcctcttcacatcagaaacaatcccagtatcatcctctacagactggcaagcagcttttggctttggttcttctaaacaaccagaggatgacttgggttttgatcccttcgatgtcactcgaaaagccttagcagacctgattgagaaggaactgtccgttcaagaccaaccttccctttcgcccacatctcttcagaactcctcttcacacactacaaccgccaaaggtccaggctctggattcctgcatcctgctgcagctacaaatgccaattctctcaatagtaccttttcagtcttgccccagaggttccctcaatttcagcagcaccgagcggtttataattcattcagttttccaggccaggcagcccgctatccttggatggcctttccacgcaatagcatcatgcacttgaaccacacagcaaaccccacctcaaatagtaatttcttggacttgaatctcccgccacagcacaacacaggtctgggagggatccctgtagcagacaacagcagttctgtagagagtttaaatatgaaggaatggcaggacgggctaagggcacttctacccaacattaacatcaactttggtggactgcccaattcttcttccccctccaacgccaaccacagtgcaccaacgtccaacactgccaccaccgacagcctgagttgggacagccctggcagctggacagacccagccatcatcacaggtattccagcgtcttcaggaaacagtttagactctcttcaagatgacaatcctccacactggctaaaatcccttcaggccctcacagagatggacggccccagcgctgctccatcacagacccaccacagcgcccccttcagcacacagatcccgctgcacagagccagttggaatccctaccctcctccttcaaacccttccagcttccactccccacccccaggctttcagacagccttcagaccccccagcaaaacccccacagatttactacagagttcaacactggaccgccattaggcaaagaggagcaaccattagaaaatgcaggatttgtcccactctgttttctccctctcagcccaccacccacagctcccttctcatctcttatgttctgaagaatccagtacctgatcaattttttttctccctaaccccagatgcaatgcgatcacagggtcattaccatctctttattaattgtaaaaatttttgttgatccagcatttgagtgacactgttgaatgtttctaaaaatgcctttttaaggagagaaaaaaaaatcaaagggcagtctcaatacttagaaaattattgtttgtctgttgcgcataataatgacataatctgcttagcagaaaatgacgattaatctataggaaagctcaagtaaatgcattatcaactgcagaagtttgaaaaccaggttcatttacgtgagattgctaaatgcatgggggaaagcagtggtcctagcatccatcttgtattcagcttatcattattgcagggaaaatgcttttaatttaaattaatttttaattcttttggcaagttgatggcaaggacttgattgtgtcattaagcaaaagaatgtattggaagttgatggaaagacaaattcatctgtagtagtaactggccgattgctaaagagttcataaggaggtgagaagtaatttttttaaaggagaaaaattttttggctttagatttaaagtaaattgaaatgttttaaagaaaaaagtattcacagatttaatacctattaataatataagagctgaaatgtaagtcatttcttcagtccttctcctctgtcggaatcttttttgttttaccataaattcacctgacgagggcactctgagatagcactgctctggggccatctgatcaccatcgggagcaaatctctgacctccttgcctgcagcttttacttaaccctgtagtttctggacgtttgtgcagtattgaaaagacaggagaaaagaaaacagaaacctggttataacctgacgctaaaactaaaaacaaggaaatgtacctctttcttcagaattaaaactaaaatcttaaataaaacagaaaacttgatggtgaca

SEQ ID NO: 115288 - DNA, 4642 bp, Homo sapiens
  Payload ID: 2501
  Gene Symbol: CNOT4
  Gene Name: CCR4-NOT transcription complex, subunit 4
  Uniprot ID: O95628
  ENST ID: ENST00000428680
  CDS Start-End: 281-1999
ggtggcccgtctggctgtggaacccaccgaaagctgagagtctctctctcagccgtaaaggtcggactcgctgaagcaatcaggcccggttctgaagagttttttccccgacgctcgttcggtggtttcttgtgaggacgcggcagcccgtggagtcggctgagggaaaagcgaggcaaggcaggcgggtcgtcaaagtcctacattttagctttcagtgctgaacttccttctcccttaaattattataaacttttgctgctgtttaataaacgtgaagatgtctcgcagtcctgatgcgaaggaagaccctgtggagtgccctctttgcatggagcccttggagatagatgatatcaactttttcccttgcacctgtggctaccagatttgccgattttgttggcatcgaattcgcactgatgaaaatgggctttgtcctgcatgtagaaagccatatccagaagacccagcagtttataaaccactctcccaggaagagctgcaaaggataaagaatgagaaaaaacagaaacaaaatgagagaaaacagaaaatatcagaaaatcgcaaacatttggctagtgtacgtgtcgtacaaaaaaacctcgtctttgttgtaggtttatctcagcgcctagcagacccagaggttttaaaacgaccagaatattttgggaagtttggtaaaatacataaagttgtcatcaataatagcacatcatatgcaggctcacagggtccaagtgccagtgcttatgtaacctatatccggtcagaagacgctctcagagccatacagtgtgtcaacaatgtggtagtagatggcagaacacttaaggcatctctaggtacaacaaaatactgcagttacttcttaaagaatatgcagtgtccaaaacctgactgcatgtatcttcatgaattgggggatgaggcggccagcttcacaaaagaggaaatgcaggcgggtaaacaccaagaatatgaacagaagctacttcaagaattatataaattaaatcccaattttcttcagctatctacgggttcagttgataaaaataagaacaaagtgacaccactgcagagccccattgacaaaccttcagattctctcagtatagggaacggtgataattcccagcagatatctaacagtgatacgccttcaccaccacctggtttgtcaaaatccaatccagtcatccccatcagttcatccaatcacagtgcacggtccccttttgaaggggcagtaacagagtcacagtcgttattctcagacaattttcgccatcccaaccctatcccaagtgggcttcctcctttccccagctccccacagacatccagtgactggcctacagcaccagaaccacagagcctcttcacatcagaaacaatcccagtatcatcctctacagactggcaagcagcttttggctttggttcttctaaacaaccagaggatgacttgggttttgatcccttcgatgtcactcgaaaagccttagcagacctgattgagaaggaactgtccgttcaagaccaaccttccctttcgcccacatctcttcagaactcctcttcacacactacaaccgccaaaggtccaggctctggattcctgcatcctgctgcagctacaaatgccaattctctcaatagtaccttttcagtcttgccccagaggttccctcaatttcagcagcaccgagcggtttataattcattcagttttccaggccaggcagcccgctatccttggatggcctttccacgcaatagcatcatgcacttgaaccacacagcaaaccccacctcaaatagtaatttcttggacttgaatctcccgccacagcacaacacaggtctgggagggatccctgtagcaggggaagaagaggtgaaggtttcgaccatgccactgtcaacctcttcccattcattacaacaaggacagcagcctacaagtctccacactactgtggcctgacaacagaactgagaggagaggattagactctggggtgcttgcatgggcaactggatttttgcatgattcctttatgattttgcttttaatgtatacacccagaagagccaatataaacgttcctcatgcctacagctagcgtgttacctcatagttgttgaagtatttcttcattaggcctttaacataatttattagtgtaataattttggcattgtttctcatgagtgatactatttctaactcataaaaataaacttgtagtactaagatcccaggtgagattagctagaattgttgttattttggctctattattgaaaaattatacaaaggtaatggtagtatcttgttttctggtttgtgaaaaaataatatcctaatctcctgaaaaatttgcaaattaacaagataatgtctattgcattctttgaatacttgagaagaaagaatacatataaaacaaaattggtggtgtcatttaatgctcagaaggatattgttggcgattgtttttagttgtctagatttatatcctataatatgcattacatgtgtagaaactgttttgttctctctcttttgcacttttgcactttctttttgaatggttgttaattatgcatagatggttaaaagataattattgtagcctaaatgcaatataatctcttttctaatgcactgcctagtataccaggaaatgcctcaaaaacagaacttcagtttatagttgacttatctgaaacttgaatacggagtaaacattgtatgtgaaaagcaaccatagtagtgtaacattgttactgaacaaacagtaattctgtgggatattgttttggaaatttcattgtttaataattaaaatgtgataataagataatattataagtacctgaccagaatgagactaaggcagaagagaagagattggatgtcctctaaaattaggccacctaaattgtaacagataattttaatcaagagaatagtggagtactttattaggacataatgtgaagtgatatttctgaaaacacatttcttgaaatagttttaaaactgataataaaggaaaagaaactgtacttagtttggagcagtggacaaaagctgattcagaaaacatgaccatattctgcctacatgaagcatctgggaagaaagggaaagtcacacctcctcttgagattttaaccattatgataaaaggtatgctttaatttgttaaaaaaaaaagtatgaaaggggataatgtgaatacaaaaaagaagcctagagattgaaaataataataatagaacatgttattaggagatggtacttaatgtcatgttggagttggagttttcaaggttacctctatataaaattggattattttctgttagatataatgtgacaaattaaatgactttatcccaaggtacagtgaggtaaacaaaaatctattcttagatatccttagatttggttaactgaggctgtagaagcagcgaattgtctagccatttaagttatttttgtaaaattcagcataaacatcaatctctaatttctatctagaagtgactttaagacattacaagaacattgccaatttggaaaatgccaataaaatactgtagacttattaatattgtagacttattatcagtcttttactatagcttaatttaattatggttttcatttttactgtaagaggccaagacttcacttatgtctcctgtggagctgaggctcctgggccttgttattataacaaactctggctccttgtaatgatgcttactagctcaaagccttctccagcattcagtgttagcctttcattgcctggatcttcttacaaagccatagcaagtggttagtgccatttgctccttggtgttgagagatatacctgttaaatgaggcttctttcctttctcattcatagccagcgtggaaaaatcatcaggtagtttgcccagatttgccagagccctaaataaaatggcaaaacgatctccctgcctgcttctcctccccacccccacttacatgcacaccgtaaatcaagaaatgctttttgggcaattagactttatcttctaaatttttgcatagaatggctaaacatgatcttttgcctcactttgtaattcctacaccttccttgtaagcttcaccttttgcttacctaatattttatttaaacatggttttttaaaaaacctgaagctttaaaatcatagtcataattaattttacactaaaggacagaagaaattatacaacacataaaagaagccactacttcacatagcaagcaaattgaaatcaaaatgacagaagaatgagaaattctttaaaagcttcaggttttttttgttgttgttgttaaattcctgcatgatgcatcatgtgcaagggaaacttaatatacttttacacccttaacctttataaagtgactagcttttcccttaacataggaatttttaacctggagcccagatttttgagagtacacacaaaattgtgggtttgtgtgcatgtacatatgtccatttttttctagggagaagatccatagttattagatttgtgaaggatttggtgatccccttctcccatcaaaaaaaaaaaaaaaaagaa

SEQ ID NO: 115289 - DNA, 3297 bp, Homo sapiens
  Payload ID: 2501
  Gene Symbol: CNOT4
  Gene Name: CCR4-NOT transcription complex, subunit 4
  Uniprot ID: O95628
  ENST ID: ENST00000423368
  CDS Start-End: 282-2210
tggtggcccgtctggctgtggaacccaccgaaagctgagagtctctctctcagccgtaaaggtcggactcgctgaagcaatcaggcccggttctgaagagttttttccccgacgctcgttcggtggtttcttgtgaggacgcggcagcccgtggagtcggctgagggaaaagcgaggcaaggcaggcgggtcgtcaaagtcctacattttagctttcagtgctgaacttccttctcccttaaattattataaacttttgctgctgtttaataaacgtgaagatgtctcgcagtcctgatgcgaaggaagaccctgtggagtgccctctttgcatggagcccttggagatagatgatatcaactttttcccttgcacctgtggctaccagatttgccgattttgttggcatcgaattcgcactgatgaaaatgggctttgtcctgcatgtagaaagccatatccagaagacccagcagtttataaaccactctcccaggaagagctgcaaaggataaagaatgagaaaaaacagaaacaaaatgagagaaaacagaaaatatcagaaaatcgcaaacatttggctagtgtacgtgtcgtacaaaaaaacctcgtctttgttgtaggtttatctcagcgcctagcagacccagaggttttaaaacgaccagaatattttgggaagtttggtaaaatacataaagttgtcatcaataatagcacatcatatgcaggctcacagggtccaagtgccagtgcttatgtaacctatatccggtcagaagacgctctcagagccatacagtgtgtcaacaatgtggtagtagatggcagaacacttaaggcatctctaggtacaacaaaatactgcagttacttcttaaagaatatgcagtgtccaaaacctgactgcatgtatcttcatgaattgggggatgaggcggccagcttcacaaaagaggaaatgcaggcgggtaaacaccaagaatatgaacagaagctacttcaagaattatataaattaaatcccaattttcttcagctatctacgggttcagttgataaaaataagaacaaagtgacaccactgcagaggtacgatacccccattgacaaaccttcagattctctcagtatagggaacggtgataattcccagcagatatctaacagtgatacgccttcaccaccacctggtttgtcaaaatccaatccagtcatccccatcagttcatccaatcacagtgcacggtccccttttgaaggggcagtaacagagtcacagtcgttattctcagacaattttcgccatcccaaccctatcccaagtgggcttcctcctttccccagctccccacagacatccagtgactggcctacagcaccagaaccacagagcctcttcacatcagaaacaatcccagtatcatcctctacagactggcaagcagcttttggctttggttcttctaaacaaccagaggatgacttgggttttgatcccttcgatgtcactcgaaaagccttagcagacctgattgagaaggaactgtccgttcaagaccaaccttccctttcgcccacatctcttcagaactcctcttcacacactacaaccgccaaaggtccaggctctggattcctgcatcctgctgcagctacaaatgccaattctctcaatagtaccttttcagtcttgccccagaggttccctcaatttcagcagcaccgagcggtttataattcattcagttttccaggccaggcagcccgctatccttggatggcctttccacgcaatagcatcatgcacttgaaccacacagcaaaccccacctcaaatagtaatttcttggacttgaatctcccgccacagcacaacacaggtctgggagggatccctgtagcaggtattccagcgtcttcaggaaacagtttagactctcttcaagatgacaatcctccacactggctaaaatcccttcaggccctcacagagatggacggccccagcgctgctccatcacagacccaccacagcgcccccttcagcacacagatcccgctgcacagagccagttggaatccctaccctcctccttcaaacccttccagcttccactccccacccccaggctttcagacagccttcagaccccccagcaaaacccccacagatttactacagagttcaacactggaccgccattaggcaaagaggagcaaccattagaaaatgcaggatttgtcccactctgttttctccctctcagcccaccacccacagctcccttctcatctcttatgttctgaagaatccagtacctgatcaattttttttctccctaaccccagatgcaatgcgatcacagggtcattaccatctctttattaattgtaaaaatttttgttgatccagcatttgagtgacactgttgaatgtttctaaaaatgcctttttaaggagagaaaaaaaaatcaaagggcagtctcaatacttagaaaattattgtttgtctgttgcgcataataatgacataatctgcttagcagaaaatgacgattaatctataggaaagctcaagtaaatgcattatcaactgcagaagtttgaaaaccaggttcatttacgtgagattgctaaatgcatgggggaaagcagtggtcctagcatccatcttgtattcagcttatcattattgcagggaaaatgcttttaatttaaattaatttttaattcttttggcaagttgatggcaaggacttgattgtgtcattaagcaaaagaatgtattggaagttgatggaaagacaaattcatctgtagtagtaactggccgattgctaaagagttcataaggaggtgagaagtaatttttttaaaggagaaaaattttttggctttagatttaaagtaaattgaaatgttttaaagaaaaaagtattcacagatttaatacctattaataatataagagctgaaatgtaagtcatttcttcagtccttctcctctgtcggaatcttttttgttttaccataaattcacctgacgagggcactctgagatagcactgctctggggccatctgatcaccatcgggagcaaatctctgacctccttgcctgcagcttttacttaaccctgtagtttctggacgtttgtgcagtattgaaaagacaggagaaaagaaaacagaaacctggttataacctgacgctaaaactaaaaacaaggaaatgtacctctttcttcagaattaaaactaaaatcttaaataaaacagaaaacttgatggtg

SEQ ID NO: 115290 - DNA, 1687 bp, Homo sapiens
  Payload ID: 2501
  Gene Symbol: CNOT4
  Gene Name: CCR4-NOT transcription complex, subunit 4
  Uniprot ID: O95628
  ENST ID: ENST00000414802
  CDS Start-End: 1-1302
atgtctcgcagtcctgatgcgaaggaagaccctgtggagtgccctctttgcatggagcccttggagatagatgatatcaactttttcccttgcacctgtggctaccagatttgccgattttgttggcatcgaattcgcactgatgaaaatgggctttgtcctgcatgtagaaagccatatccagaagacccagcagtttataaaccactctcccaggaagagctgcaaaggataaagaatgagaaaaaacagaaacaaaatgagagaaaacagaaaatatcagaaaatcgcaaacatttggctagtgtacgtgtcgtacaaaaaaacctcgtctttgttgtaggtttatctcagcgcctagcagacccagaggttttaaaacgaccagaatattttgggaagtttggtaaaatacataaagttgtcatcaataatagcacatcatatgcaggctcacagggtccaagtgccagtgcttatgtaacctatatccggtcagaagacgctctcagagccatacagtgtgtcaacaatgtggtagtagatggcagaacacttaaggcatctctaggtacaacaaaatactgcagttacttcttaaagaatatgcagtgtccaaaacctgactgcatgtatcttcatgaattgggggatgaggcggccagcttcacaaaagaggaaatgcaggcgggtaaacaccaagaatatgaacagaagctacttcaagaattatataaattaaatcccaattttcttcagctatctacgggttcagttgataaaaataagaacaaagtgacaccactgcagaggtacgatacccccattgacaaaccttcagattctctcagtatagggaacggtgataattcccagcagatatctaacagtgatacgccttcaccaccacctggtttgtcaaaatccaatccagtcatccccatcagttcatccaatcacagtgcacggtccccttttgaaggggcagtaacagagtcacagtcgttattctcagacaattttcgccatcccaaccctatcccaagtgggcttcctcctttccccagctccccacagacatccagtgactggcctacagcaccagaaccacagagcctcttcacatcagaaacaatcccagtatcatcctctacagactggcaagcagcttttggctttggttcttctaaacaaccagaggatgacttgggttttgatcccttcgatgtcactcgaaaagccttagcagaccttacagagccaattgagaggaagagactggcagtgctgaagagaagataggctcattcagtaggataatagatgtcgttgggtggtgggaagagataagctcctgagacgagcatgtggtatagcttaagagaggtgggtggccaggcgcggtggctcacgcctgtaatcccaacactttgggaggccaaggcaggcagatcacaaggtcaggagatcgagaccatcctggctaacacggtgaaaccccgtctctactaaaaatacaaaaaaattagctgggcgtggtggcgggcacctgtagccccagctactcgggaggctgaggcaggagaatggcgcgaacccaggaggtggagcttgcagtgagccgagatggtgccactgtgctccagcctgggcaacagagcgagactccgtctaaaaaaaaaaaaaa

SEQ ID NO: 115291 - DNA, 3563 bp, Homo sapiens
  Payload ID: 2501
  Gene Symbol: CNOT4
  Gene Name: CCR4-NOT transcription complex, subunit 4
  Uniprot ID: O95628
  ENST ID: ENST00000541284
  CDS Start-End: 332-2473
agcgtgcgcctgcgcacgggaggccggaggagtcttaccctaatgtaagatggtggcccgtctggctgtggaacccaccgaaagctgagagtctctctctcagccgtaaaggtcggactcgctgaagcaatcaggcccggttctgaagagttttttccccgacgctcgttcggtggtttcttgtgaggacgcggcagcccgtggagtcggctgagggaaaagcgaggcaaggcaggcgggtcgtcaaagtcctacattttagctttcagtgctgaacttccttctcccttaaattattataaacttttgctgctgtttaataaacgtgaagatgtctcgcagtcctgatgcgaaggaagaccctgtggagtgccctctttgcatggagcccttggagatagatgatatcaactttttcccttgcacctgtggctaccagatttgccgattttgttggcatcgaattcgcactgatgaaaatgggctttgtcctgcatgtagaaagccatatccagaagacccagcagtttataaaccactctcccaggaagagctgcaaaggataaagaatgagaaaaaacagaaacaaaatgagagaaaacagaaaatatcagaaaatcgcaaacatttggctagtgtacgtgtcgtacaaaaaaacctcgtctttgttgtaggtttatctcagcgcctagcagacccagaggttttaaaacgaccagaatattttgggaagtttggtaaaatacataaagttgtcatcaataatagcacatcatatgcaggctcacagggtccaagtgccagtgcttatgtaacctatatccggtcagaagacgctctcagagccatacagtgtgtcaacaatgtggtagtagatggcagaacacttaaggcatctctaggtacaacaaaatactgcagttacttcttaaagaatatgcagtgtccaaaacctgactgcatgtatcttcatgaattgggggatgaggcggccagcttcacaaaagaggaaatgcaggcgggtaaacaccaagaatatgaacagaagctacttcaagaattatataaattaaatcccaattttcttcagctatctacgggttcagttgataaaaataagaacaaagtgacaccactgcagaggtacgatacccccattgacaaaccttcagattctctcagtatagggaacggtgataattcccagcagatatctaacagtgatacgccttcaccaccacctggtttgtcaaaatccaatccagtcatccccatcagttcatccaatcacagtgcacggtccccttttgaaggggcagtaacagagtcacagtcgttattctcagacaattttcgccatcccaaccctatcccaagtgggcttcctcctttccccagctccccacagacatccagtgactggcctacagcaccagaaccacagagcctcttcacatcagaaacaatcccagtatcatcctctacagactggcaagcagcttttggctttggttcttctaaacaaccagaggatgacttgggttttgatcccttcgatgtcactcgaaaagccttagcagacctgattgagaaggaactgtccgttcaagaccaaccttccctttcgcccacatctcttcagaactcctcttcacacactacaaccgccaaaggtccaggctctggattcctgcatcctgctgcagctacaaatgccaattctctcaatagtaccttttcagtcttgccccagaggttccctcaatttcagcagcaccgagcggtttataattcattcagttttccaggccaggcagcccgctatccttggatggcctttccacgcaatagcatcatgcacttgaaccacacagcaaaccccacctcaaatagtaatttcttggacttgaatctcccgccacagcacaacacaggtctgggagggatccctgtagcagacaacagcagttctgtagagagtttaaatatgaaggaatggcaggacgggctaagggcacttctacccaacattaacatcaactttggtggactgcccaattcttcttccccctccaacgccaaccacagtgcaccaacgtccaacactgccaccaccgacagcctgagttgggacagccctggcagctggacagacccagccatcatcacaggtattccagcgtcttcaggaaacagtttagactctcttcaagatgacaatcctccacactggctaaaatcccttcaggccctcacagagatggacggccccagcgctgctccatcacagacccaccacagcgcccccttcagcacacagatcccgctgcacagagccagttggaatccctaccctcctccttcaaacccttccagcttccactccccacccccaggctttcagacagccttcagaccccccagcaaaacccccacagatttactacagagttcaacactggaccgccattaggcaaagaggagcaaccattagaaaatgcaggatttgtcccactctgttttctccctctcagcccaccacccacagctcccttctcatctcttatgttctgaagaatccagtacctgatcaattttttttctccctaaccccagatgcaatgcgatcacagggtcattaccatctctttattaattgtaaaaatttttgttgatccagcatttgagtgacactgttgaatgtttctaaaaatgcctttttaaggagagaaaaaaaaatcaaagggcagtctcaatacttagaaaattattgtttgtctgttgcgcataataatgacataatctgcttagcagaaaatgacgattaatctataggaaagctcaagtaaatgcattatcaactgcagaagtttgaaaaccaggttcatttacgtgagattgctaaatgcatgggggaaagcagtggtcctagcatccatcttgtattcagcttatcattattgcagggaaaatgcttttaatttaaattaatttttaattcttttggcaagttgatggcaaggacttgattgtgtcattaagcaaaagaatgtattggaagttgatggaaagacaaattcatctgtagtagtaactggccgattgctaaagagttcataaggaggtgagaagtaatttttttaaaggagaaaaattttttggctttagatttaaagtaaattgaaatgttttaaagaaaaaagtattcacagatttaatacctattaataatataagagctgaaatgtaagtcatttcttcagtccttctcctctgtcggaatcttttttgttttaccataaattcacctgacgagggcactctgagatagcactgctctggggccatctgatcaccatcgggagcaaatctctgacctccttgcctgcagcttttacttaaccctgtagtttctggacgtttgtgcagtattgaaaagacaggagaaaagaaaacagaaacctggttataacctgacgctaaaactaaaaacaaggaaatgtacctctttcttcagaattaaaactaaaatcttaaataaaacagaaaacttgatggtgaca

SEQ ID NO: 115292 - DNA, 6176 bp, Homo sapiens
  Payload ID: 2502
  Gene Symbol: CNOT6
  Gene Name: CCR4-NOT transcription complex, subunit 6
  Uniprot ID: Q9ULM6
  ENST ID: ENST00000261951
  CDS Start-End: 350-2023
caatgaaaacgaggggggcgcggaggaggaggcggcggcgtcggtggcggcggcgacggcggcgcggaggcgaaggcagcggcgggcgcagcgaggagggcgaggccgggggccgagagggcgggagggcgtagtggcggcccgtcggggcggctgaggcgggcagccgaagcagtggctctcggagggggaacaaagagcagcgactaaggcggcagaggagcggcggcggtggcggcgctgcagcagcgggcgggactggtatggtggttccacagggcagaccccgctgcactcacagggaggaggaggcggcagcggcggaggaaggcggcgcaccccgagaggcatgcccaaagaaaaatacgagccccctgaccctcggaggatgtatacaattatgtcttctgaggaagcagcaaatggaaagaaatcccactgggcagagcttgaaataagtggaaaagtaagaagcttaagcgcatctttgtggtcactaactcacctgacagctttgcatttgagtgacaattccctgtcccgaattccttcagacattgccaagcttcacaatctggtgtatttggacctgtcatctaataaaattcgtagcttacccgcagaactcggaaacatggtatcactcagggagctccatttaaataacaacctgttacgagttctaccttttgagctgggaaaactgtttcagttgcagactttaggcctgaaaggaaatccccttacccaggatatattgaacctttatcaggaaccagatggaacaagacggctgctgaactatttgcttgataatttgtcaggtactgcaaaaagaattacaacagaacaaccacctccaaggtcttggattatgttacaagaaccagataggacaaggccaactgccttgttttctgtcatgtgctataatgttctttgtgataaatatgcgacccggcagttatacggctactgtccatcatgggcgctaaactgggactacaggaaaaaggccattattcaagaaatcttgagctgcaatgctgatatcgtaagtcttcaggaggttgaaacggaacagtattacagtttttttctggtagagctgaaagaacgtggctataatggattcttcagtcctaagtctagagctaggacaatgtcagaacaagaaaggaaacatgttgatggctgtgcaatattcttcaagacagaaaaatttactttggttcagaaacacactgttgaatttaatcagctagccatggcaaattctgaggggtctgaagctatgctgaacagagtcatgacaaaagataacattggggttgcagtactgctagaacttcggaaggaatcgattgaaatgccgtccggaaagccacatcttggaacagaaaaacaacttattcttgtggctaacgcccacatgcattgggaccctgaatactctgatgtgaagttggtacaaactatgatgttcctctcagaagtgaagaacattattgataaagcctctcgcaacctcaaatccagtgttttgggagaatttggaactattccacttgtgttatgtgcagatcttaattctttgccagactctggtgttgtagaatatttgagcacaggtggagtagaaacaaatcacaaagactttaaggagttgaggtataatgaaagtctcacaaacttcagctgtcatgggaagaatggaaccaccaatggaaggatcactcatggtttcaagttacagagtgcctatgagagtggcctgatgccttacacgaattacacatttgatttcaagggtataatagactacattttctattctaaacctcagctgaacaccttaggcatcctgggccctctggaccaccactggctggttgagaataacatcagtggctgcccgcaccccctcatcccctctgaccacttctcactttttgcacaactggagctcttactgcctttcctgccccaagtcaacggcatccaccttcctggcaggaggtagtcaagcaccttcagaggacagccttgattcacttgtaaacttgtgaaaatctgaacataggggagtgaggtatggccactgaggatttttgcttgcttaagaatgatttggactttcaatctgattatttgataaggatatagtatgaaagccaggtgctagcaacagacaaattctgagcccaatatgctttatactgctagacagggattggtgtgtttgcacctgtctttcatttgtcataagagattttcctatttcttctacccaatagaatattttcatgcctggaaataggaaaatgtgtgaacagcgtattctcttcacacagaaatctgtagcactgcttttttgaggccagtagcaacatccagagatcattcttccatactttactccctcctttttcagacttgtttgtaaagtacagaatctgaatttagcctttatgattgtatatgatccacagaagacctgatttatgaaattttgtactaaaatcatttggaaatgattgtattgtaaactgaggctaaatttttttttaaacctgtttcatgtgttataaaggccagcttgtaaaagaagctgcaacagactttctctgctcatgatttgcactcttagggttttgttagcccttttgtactactttctttttaaattgagaacatggttctttacatataaatctgcttcaaccttaggatgttttcagaccagaggcaacttattcatgaatttttatgaaaactatctactaggacagataagctgaacagtgatgatctgtagacatttatggactgaatgtaatggttgatatatgtacattctgatatttttaaatctttaactttttaaagttaaaaacctacagctgcttaggtccagcttcttaactctttttgagacacttcctgtcctatctccactgtgcctgcctaaatttgttctcaccaagcactgcctgtgcatgcagagaaaatctgtgcatcctcttttatatttttaaaatactgtttaacatttgtgagaattttatgaaaatgcttttgtatgagctgtggctttttcccattgtgaagcattgaatatcacattttggaacatgttatagggtgagtccctggatctttgctcaccagatccaagcactgcttctcggtgtcattgcagtgtgctgcttgtcacccagaatactactatcatgtgaattctttttgtcgtcagtgtcttttccttagtctttttgttgttgttgttgttgttgttttaatcattccttttttaagaagaagtaattttccatttatgaagcagtatgaattagatgtattttcaaaacaggtccctaagacaattcttcagatcatttttaaaatgactaagtcattttagtatgtcaagcaagataaaaattacatcataccgtctattttgcccatagtgccatttagagatgaaaaccagctttaactttgcaaagtgaacatgtacatggtctgctctcatttattcattcttctctcaaaagtcaaatgaatgcagagggagcttggtcaaactgcttttgtttcaactgcaggcaggggagcaaaaggacgccatgtgagcattaggaaaaaaaatactcactcttactaacaatttttatacagaaaatgagtcattttggaaatgattcttatgttttttttttttctccttttagaaaattctccaaaaggttttgatgttgaatcttggtcttggacctgttttttcctttgagggttttttgttttttgttttttctaggatttcattgtgatgttttggttttgttttttgctttttgtttaagttgtgctgacaccaaacacatccagtttataatcagtacattggaaagctggtattgatgtagaaccagtgcataactttttatggggttttgttattggtttttttttgtaaagtgtgaataaaaggtatgtttactcatttttcctgaacactgtgttggtaatgtgcatcatgacaatttccagtgaaggtgagctggagctggttggactaatgagactgaggaagcagcttttcctacgatctgcattatgtaatcacaggtccagagagctttatggaagcgggagaggaggagcacttactcatgttgtatttgttaatggaggatgtcatcttttcatagatgctggaactagagtgcacttgttagatgctaaaggtttgagctttacacaaaatgtcttcatctgtatttgttattgtctacaatatatttgaatttggggcagcatattaagatgtaatggcctgttatgtcttgaaaatacttgttttgcctcttccaggcatactgcattctgtggatcagtttgaacagcttctccaccttatttggacagtgataaattgaaccaagagtgtagatttacaagtgtaaccttcaaaagaggaagaactatttggggtctgtaggtaatgaacagtcacaccaaaatagactatgatgcttttgttaagaaaggtttcatgttttagatattttccgtgtcctaaataattttcaataatctataatccctaaaatgcaataaaaactagtatgttttcacggtgtatattttttttcaaaaattctgtaacaaatatatttaatgtgttgccataatgtcatttcagtatttttgctggataaatccattttagaaatgtcttacaaaaagtttagggcatgttttctgttttaaagaccagaagtttgaaggcacccaaatccttgtcgccaatctcctgaagtacagctttaccatattagtggtcattatttatgctttgagagtttcaatattgttcgtcaagttaacttatggcataatttaagctaaagttgtagaaatgaattgttgagtgcaactttcatagtcccaaagataggcagagaacatctccagaaatgtgtgtgtgtgtgtgtgtgtgtgtgtgtgtgtttaatatgatttagtgacaaccaggaaaacttacttgggattattagcactttcaaacttagggacattattaaattggatggaatgcacttctaaatgtttaaattaaaatttcaaagctctttcgagattcaggttctcaataataatattcaagttttagagtttcactttgtactatttaaatttatggaactagtttccatactgacttgtaaggttttggggtcatatataaggactaaagccaagctaggcaaaacaatgacagcaccgttttttcagtgaagctctcagaatgtccagtacagatgttgcagataattccaagaactccttcagcaggtgttcttcaccattcgtaaacagtattttaagatgttcactttgctcttctttttggttacatacattttaataactggtatgttgaagtagtgtctaaaagtatctagtctttattcacagtacattatattgtgtgatgcactggactaactcttgtttaccattcatgtaacaaaacccagcacattatctgcactataagctcaaagaatgtcacatccgcccagacagctctttgatgagggtgatgggaactgaataaaccatacggactggcagtaacaagggcttttactgttctgttcagtggaaccttcttggtcaaattgtaattagctagcattatatttatatacagggtcttttttctttaccgatgtattttcctactcatagccaaccaataaattcagtatctgtttcaaatattttagaagtgtagtttgtatagctgtagtactgaggtttgaggaaaaataaatgttgatcagcagaccacgtatttaaaattctgaatcttctgggacagggttgtaactcagccttccaaagggaagagtgcagggggacggggccatgatatggggaaatggtgtaaactaatgtatttctttattggctgttattctgtataacactcatatctttgccaaagttcaattttatatttaggcaactgatggtccttttgcatttaggattttcgttgttgttaccttatacctcatgatataaggaatgggctcatgtgtcttccgtcttttggaaggaggttgacatattttaaataaatgcttttaaatacagta

SEQ ID NO: 115293 - DNA, 6303 bp, Homo sapiens
  Payload ID: 2502
  Gene Symbol: CNOT6
  Gene Name: CCR4-NOT transcription complex, subunit 6
  Uniprot ID: Q9ULM6
  ENST ID: ENST00000393356
  CDS Start-End: 425-2098
ggcgcggaggaggaggcggcggcgtcggtggcggcggcgacggcggcgcggaggcgaaggcagcggcgggcagccgaagcagtggctctcggagggggaacaaagagcagcgactaaggcggcagaggagcggcggcggtggcggcgctgcagcagcgggcgggactggtatggtggttccacagggcagaccccgctgcactcacagggaggaggaggcggcagcggcggaggaaggcggcgcaccccgagagcactaatcgctattttctttggaaacttcctttgattctttacctccttcaccttccccgaagagcctgctaaccaacacctgtggccttctgtttttaactgttgttgccattgacagcgttgtgaatggtcatctcgctcgagctctttggatttgttgttactgtgcatgcccaaagaaaaatacgagccccctgaccctcggaggatgtatacaattatgtcttctgaggaagcagcaaatggaaagaaatcccactgggcagagcttgaaataagtggaaaagtaagaagcttaagcgcatctttgtggtcactaactcacctgacagctttgcatttgagtgacaattccctgtcccgaattccttcagacattgccaagcttcacaatctggtgtatttggacctgtcatctaataaaattcgtagcttacccgcagaactcggaaacatggtatcactcagggagctccatttaaataacaacctgttacgagttctaccttttgagctgggaaaactgtttcagttgcagactttaggcctgaaaggaaatccccttacccaggatatattgaacctttatcaggaaccagatggaacaagacggctgctgaactatttgcttgataatttgtcaggtactgcaaaaagaattacaacagaacaaccacctccaaggtcttggattatgttacaagaaccagataggacaaggccaactgccttgttttctgtcatgtgctataatgttctttgtgataaatatgcgacccggcagttatacggctactgtccatcatgggcgctaaactgggactacaggaaaaaggccattattcaagaaatcttgagctgcaatgctgatatcgtaagtcttcaggaggttgaaacggaacagtattacagtttttttctggtagagctgaaagaacgtggctataatggattcttcagtcctaagtctagagctaggacaatgtcagaacaagaaaggaaacatgttgatggctgtgcaatattcttcaagacagaaaaatttactttggttcagaaacacactgttgaatttaatcagctagccatggcaaattctgaggggtctgaagctatgctgaacagagtcatgacaaaagataacattggggttgcagtactgctagaacttcggaaggaatcgattgaaatgccgtccggaaagccacatcttggaacagaaaaacaacttattcttgtggctaacgcccacatgcattgggaccctgaatactctgatgtgaagttggtacaaactatgatgttcctctcagaagtgaagaacattattgataaagcctctcgcaacctcaaatccagtgttttgggagaatttggaactattccacttgtgttatgtgcagatcttaattctttgccagactctggtgttgtagaatatttgagcacaggtggagtagaaacaaatcacaaagactttaaggagttgaggtataatgaaagtctcacaaacttcagctgtcatgggaagaatggaaccaccaatggaaggatcactcatggtttcaagttacagagtgcctatgagagtggcctgatgccttacacgaattacacatttgatttcaagggtataatagactacattttctattctaaacctcagctgaacaccttaggcatcctgggccctctggaccaccactggctggttgagaataacatcagtggctgcccgcaccccctcatcccctctgaccacttctcactttttgcacaactggagctcttactgcctttcctgccccaagtcaacggcatccaccttcctggcaggaggtagtcaagcaccttcagaggacagccttgattcacttgtaaacttgtgaaaatctgaacataggggagtgaggtatggccactgaggatttttgcttgcttaagaatgatttggactttcaatctgattatttgataaggatatagtatgaaagccaggtgctagcaacagacaaattctgagcccaatatgctttatactgctagacagggattggtgtgtttgcacctgtctttcatttgtcataagagattttcctatttcttctacccaatagaatattttcatgcctggaaataggaaaatgtgtgaacagcgtattctcttcacacagaaatctgtagcactgcttttttgaggccagtagcaacatccagagatcattcttccatactttactccctcctttttcagacttgtttgtaaagtacagaatctgaatttagcctttatgattgtatatgatccacagaagacctgatttatgaaattttgtactaaaatcatttggaaatgattgtattgtaaactgaggctaaatttttttttaaacctgtttcatgtgttataaaggccagcttgtaaaagaagctgcaacagactttctctgctcatgatttgcactcttagggttttgttagcccttttgtactactttctttttaaattgagaacatggttctttacatataaatctgcttcaaccttaggatgttttcagaccagaggcaacttattcatgaatttttatgaaaactatctactaggacagataagctgaacagtgatgatctgtagacatttatggactgaatgtaatggttgatatatgtacattctgatatttttaaatctttaactttttaaagttaaaaacctacagctgcttaggtccagcttcttaactctttttgagacacttcctgtcctatctccactgtgcctgcctaaatttgttctcaccaagcactgcctgtgcatgcagagaaaatctgtgcatcctcttttatatttttaaaatactgtttaacatttgtgagaattttatgaaaatgcttttgtatgagctgtggctttttcccattgtgaagcattgaatatcacattttggaacatgttatagggtgagtccctggatctttgctcaccagatccaagcactgcttctcggtgtcattgcagtgtgctgcttgtcacccagaatactactatcatgtgaattctttttgtcgtcagtgtcttttccttagtctttttgttgttgttgttgttgttgttttaatcattccttttttaagaagaagtaattttccatttatgaagcagtatgaattagatgtattttcaaaacaggtccctaagacaattcttcagatcatttttaaaatgactaagtcattttagtatgtcaagcaagataaaaattacatcataccgtctattttgcccatagtgccatttagagatgaaaaccagctttaactttgcaaagtgaacatgtacatggtctgctctcatttattcattcttctctcaaaagtcaaatgaatgcagagggagcttggtcaaactgcttttgtttcaactgcaggcaggggagcaaaaggacgccatgtgagcattaggaaaaaaaatactcactcttactaacaatttttatacagaaaatgagtcattttggaaatgattcttatgttttttttttttctccttttagaaaattctccaaaaggttttgatgttgaatcttggtcttggacctgttttttcctttgagggttttttgttttttgttttttctaggatttcattgtgatgttttggttttgttttttgctttttgtttaagttgtgctgacaccaaacacatccagtttataatcagtacattggaaagctggtattgatgtagaaccagtgcataactttttatggggttttgttattggtttttttttgtaaagtgtgaataaaaggtatgtttactcatttttcctgaacactgtgttggtaatgtgcatcatgacaatttccagtgaaggtgagctggagctggttggactaatgagactgaggaagcagcttttcctacgatctgcattatgtaatcacaggtccagagagctttatggaagcgggagaggaggagcacttactcatgttgtatttgttaatggaggatgtcatcttttcatagatgctggaactagagtgcacttgttagatgctaaaggtttgagctttacacaaaatgtcttcatctgtatttgttattgtctacaatatatttgaatttggggcagcatattaagatgtaatggcctgttatgtcttgaaaatacttgttttgcctcttccaggcatactgcattctgtggatcagtttgaacagcttctccaccttatttggacagtgataaattgaaccaagagtgtagatttacaagtgtaaccttcaaaagaggaagaactatttggggtctgtaggtaatgaacagtcacaccaaaatagactatgatgcttttgttaagaaaggtttcatgttttagatattttccgtgtcctaaataattttcaataatctataatccctaaaatgcaataaaaactagtatgttttcacggtgtatattttttttcaaaaattctgtaacaaatatatttaatgtgttgccataatgtcatttcagtatttttgctggataaatccattttagaaatgtcttacaaaaagtttagggcatgttttctgttttaaagaccagaagtttgaaggcacccaaatccttgtcgccaatctcctgaagtacagctttaccatattagtggtcattatttatgctttgagagtttcaatattgttcgtcaagttaacttatggcataatttaagctaaagttgtagaaatgaattgttgagtgcaactttcatagtcccaaagataggcagagaacatctccagaaatgtgtgtgtgtgtgtgtgtgtgtgtgtgtgtgtttaatatgatttagtgacaaccaggaaaacttacttgggattattagcactttcaaacttagggacattattaaattggatggaatgcacttctaaatgtttaaattaaaatttcaaagctctttcgagattcaggttctcaataataatattcaagttttagagtttcactttgtactatttaaatttatggaactagtttccatactgacttgtaaggttttggggtcatatataaggactaaagccaagctaggcaaaacaatgacagcaccgttttttcagtgaagctctcagaatgtccagtacagatgttgcagataattccaagaactccttcagcaggtgttcttcaccattcgtaaacagtattttaagatgttcactttgctcttctttttggttacatacattttaataactggtatgttgaagtagtgtctaaaagtatctagtctttattcacagtacattatattgtgtgatgcactggactaactcttgtttaccattcatgtaacaaaacccagcacattatctgcactataagctcaaagaatgtcacatccgcccagacagctctttgatgagggtgatgggaactgaataaaccatacggactggcagtaacaagggcttttactgttctgttcagtggaaccttcttggtcaaattgtaattagctagcattatatttatatacagggtcttttttctttaccgatgtattttcctactcatagccaaccaataaattcagtatctgtttcaaatattttagaagtgtagtttgtatagctgtagtactgaggtttgaggaaaaataaatgttgatcagcagaccacgtatttaaaattctgaatcttctgggacagggttgtaactcagccttccaaagggaagagtgcagggggacggggccatgatatggggaaatggtgtaaactaatgtatttctttattggctgttattctgtataacactcatatctttgccaaagttcaattttatatttaggcaactgatggtccttttgcatttaggattttcgttgttgttaccttatacctcatgatataaggaatgggctcatgtgtcttccgtcttttggaaggaggttgacatattttaaataaatgcttttaaatacagtagcaaacattgtgttggggttataataattcattaaatgtcttgttgcctgta

SEQ ID NO: 115294 - DNA, 706 bp, Homo sapiens
  Payload ID: 2502
  Gene Symbol: CNOT6
  Gene Name: CCR4-NOT transcription complex, subunit 6
  ENST ID: ENST00000504343
  CDS Start-End: 3-706
gcatgcccaaagaaaaatacgagccccctgaccctcggaggatgtatacaattatgtcttctgaggaagcagcaaatggaaagaaatcccactgggcagagcttgaaataagtggaaatccccttacccaggatatattgaacctttatcaggaaccagatggaacaagacggctgctgaactatttgcttgataatttgtcagttacaacagaacaaccacctccaaggtcttggattatgttacaagaaccagataggacaaggccaactgccttgttttctgtcatgtgctataatgttctttgtgataaatatgcgacccggcagttatacggctactgtccatcatgggcgctaaactgggactacaggaaaaaggccattattcaagaaatcttgagctgcaatgctgatatcgtaagtcttcaggaggttgaaacggaacagtattacagtttttttctggtagagctgaaagaacgtggctataatggattcttcagtcctaagtctagagctaggacaatgtcagaacaagaaaggaaacatgttgatggctgtgcaatattcttcaagacagaaaaatttactttggttcagaaacacactgttgaatttaatcagctagccatggcaaattctgaggggtctgaagctatgctgaacagagtcatgacaaaagataacattggggttgcagtact

SEQ ID NO: 115295 - DNA, 6250 bp, Homo sapiens
  Payload ID: 2502
  Gene Symbol: CNOT6
  Gene Name: CCR4-NOT transcription complex, subunit 6
  Uniprot ID: Q9ULM6
  ENST ID: ENST00000618123
  CDS Start-End: 428-2101
gcgaggagggcgaggccgggggccgagagggcgggagggcgtagtggcggcccgtcggggcggctgaggcgggcagccgaagcagtggctctcggagggggaacaaagagcagcgactaaggcggcagaggagcggcggcggtggcggcgctgcagcagcgggcgggactggtatggtggttccacagggcagaccccgctgcactcacagggaggaggaggcggcagcggcggaggaaggcggcgcaccccgagagcactaatcgctattttctttggaaacttcctttgattctttacctccttcaccttccccgaagagcctgctaaccaacacctgtggccttctgtttttaactgttgttgccattgacagcgttgtgaatggtcatctcgctcgagctctttggatttgttgttactgtgcatgcccaaagaaaaatacgagccccctgaccctcggaggatgtatacaattatgtcttctgaggaagcagcaaatggaaagaaatcccactgggcagagcttgaaataagtggaaaagtaagaagcttaagcgcatctttgtggtcactaactcacctgacagctttgcatttgagtgacaattccctgtcccgaattccttcagacattgccaagcttcacaatctggtgtatttggacctgtcatctaataaaattcgtagcttacccgcagaactcggaaacatggtatcactcagggagctccatttaaataacaacctgttacgagttctaccttttgagctgggaaaactgtttcagttgcagactttaggcctgaaaggaaatccccttacccaggatatattgaacctttatcaggaaccagatggaacaagacggctgctgaactatttgcttgataatttgtcaggtactgcaaaaagaattacaacagaacaaccacctccaaggtcttggattatgttacaagaaccagataggacaaggccaactgccttgttttctgtcatgtgctataatgttctttgtgataaatatgcgacccggcagttatacggctactgtccatcatgggcgctaaactgggactacaggaaaaaggccattattcaagaaatcttgagctgcaatgctgatatcgtaagtcttcaggaggttgaaacggaacagtattacagtttttttctggtagagctgaaagaacgtggctataatggattcttcagtcctaagtctagagctaggacaatgtcagaacaagaaaggaaacatgttgatggctgtgcaatattcttcaagacagaaaaatttactttggttcagaaacacactgttgaatttaatcagctagccatggcaaattctgaggggtctgaagctatgctgaacagagtcatgacaaaagataacattggggttgcagtactgctagaacttcggaaggaatcgattgaaatgccgtccggaaagccacatcttggaacagaaaaacaacttattcttgtggctaacgcccacatgcattgggaccctgaatactctgatgtgaagttggtacaaactatgatgttcctctcagaagtgaagaacattattgataaagcctctcgcaacctcaaatccagtgttttgggagaatttggaactattccacttgtgttatgtgcagatcttaattctttgccagactctggtgttgtagaatatttgagcacaggtggagtagaaacaaatcacaaagactttaaggagttgaggtataatgaaagtctcacaaacttcagctgtcatgggaagaatggaaccaccaatggaaggatcactcatggtttcaagttacagagtgcctatgagagtggcctgatgccttacacgaattacacatttgatttcaagggtataatagactacattttctattctaaacctcagctgaacaccttaggcatcctgggccctctggaccaccactggctggttgagaataacatcagtggctgcccgcaccccctcatcccctctgaccacttctcactttttgcacaactggagctcttactgcctttcctgccccaagtcaacggcatccaccttcctggcaggaggtagtcaagcaccttcagaggacagccttgattcacttgtaaacttgtgaaaatctgaacataggggagtgaggtatggccactgaggatttttgcttgcttaagaatgatttggactttcaatctgattatttgataaggatatagtatgaaagccaggtgctagcaacagacaaattctgagcccaatatgctttatactgctagacagggattggtgtgtttgcacctgtctttcatttgtcataagagattttcctatttcttctacccaatagaatattttcatgcctggaaataggaaaatgtgtgaacagcgtattctcttcacacagaaatctgtagcactgcttttttgaggccagtagcaacatccagagatcattcttccatactttactccctcctttttcagacttgtttgtaaagtacagaatctgaatttagcctttatgattgtatatgatccacagaagacctgatttatgaaattttgtactaaaatcatttggaaatgattgtattgtaaactgaggctaaatttttttttaaacctgtttcatgtgttataaaggccagcttgtaaaagaagctgcaacagactttctctgctcatgatttgcactcttagggttttgttagcccttttgtactactttctttttaaattgagaacatggttctttacatataaatctgcttcaaccttaggatgttttcagaccagaggcaacttattcatgaatttttatgaaaactatctactaggacagataagctgaacagtgatgatctgtagacatttatggactgaatgtaatggttgatatatgtacattctgatatttttaaatctttaactttttaaagttaaaaacctacagctgcttaggtccagcttcttaactctttttgagacacttcctgtcctatctccactgtgcctgcctaaatttgttctcaccaagcactgcctgtgcatgcagagaaaatctgtgcatcctcttttatatttttaaaatactgtttaacatttgtgagaattttatgaaaatgcttttgtatgagctgtggctttttcccattgtgaagcattgaatatcacattttggaacatgttatagggtgagtccctggatctttgctcaccagatccaagcactgcttctcggtgtcattgcagtgtgctgcttgtcacccagaatactactatcatgtgaattctttttgtcgtcagtgtcttttccttagtctttttgttgttgttgttgttgttgttttaatcattccttttttaagaagaagtaattttccatttatgaagcagtatgaattagatgtattttcaaaacaggtccctaagacaattcttcagatcatttttaaaatgactaagtcattttagtatgtcaagcaagataaaaattacatcataccgtctattttgcccatagtgccatttagagatgaaaaccagctttaactttgcaaagtgaacatgtacatggtctgctctcatttattcattcttctctcaaaagtcaaatgaatgcagagggagcttggtcaaactgcttttgtttcaactgcaggcaggggagcaaaaggacgccatgtgagcattaggaaaaaaaatactcactcttactaacaatttttatacagaaaatgagtcattttggaaatgattcttatgttttttttttttctccttttagaaaattctccaaaaggttttgatgttgaatcttggtcttggacctgttttttcctttgagggttttttgttttttgttttttctaggatttcattgtgatgttttggttttgttttttgctttttgtttaagttgtgctgacaccaaacacatccagtttataatcagtacattggaaagctggtattgatgtagaaccagtgcataactttttatggggttttgttattggtttttttttgtaaagtgtgaataaaaggtatgtttactcatttttcctgaacactgtgttggtaatgtgcatcatgacaatttccagtgaaggtgagctggagctggttggactaatgagactgaggaagcagcttttcctacgatctgcattatgtaatcacaggtccagagagctttatggaagcgggagaggaggagcacttactcatgttgtatttgttaatggaggatgtcatcttttcatagatgctggaactagagtgcacttgttagatgctaaaggtttgagctttacacaaaatgtcttcatctgtatttgttattgtctacaatatatttgaatttggggcagcatattaagatgtaatggcctgttatgtcttgaaaatacttgttttgcctcttccaggcatactgcattctgtggatcagtttgaacagcttctccaccttatttggacagtgataaattgaaccaagagtgtagatttacaagtgtaaccttcaaaagaggaagaactatttggggtctgtaggtaatgaacagtcacaccaaaatagactatgatgcttttgttaagaaaggtttcatgttttagatattttccgtgtcctaaataattttcaataatctataatccctaaaatgcaataaaaactagtatgttttcacggtgtatattttttttcaaaaattctgtaacaaatatatttaatgtgttgccataatgtcatttcagtatttttgctggataaatccattttagaaatgtcttacaaaaagtttagggcatgttttctgttttaaagaccagaagtttgaaggcacccaaatccttgtcgccaatctcctgaagtacagctttaccatattagtggtcattatttatgctttgagagtttcaatattgttcgtcaagttaacttatggcataatttaagctaaagttgtagaaatgaattgttgagtgcaactttcatagtcccaaagataggcagagaacatctccagaaatgtgtgtgtgtgtgtgtgtgtgtgtgtgtgtgtttaatatgatttagtgacaaccaggaaaacttacttgggattattagcactttcaaacttagggacattattaaattggatggaatgcacttctaaatgtttaaattaaaatttcaaagctctttcgagattcaggttctcaataataatattcaagttttagagtttcactttgtactatttaaatttatggaactagtttccatactgacttgtaaggttttggggtcatatataaggactaaagccaagctaggcaaaacaatgacagcaccgttttttcagtgaagctctcagaatgtccagtacagatgttgcagataattccaagaactccttcagcaggtgttcttcaccattcgtaaacagtattttaagatgttcactttgctcttctttttggttacatacattttaataactggtatgttgaagtagtgtctaaaagtatctagtctttattcacagtacattatattgtgtgatgcactggactaactcttgtttaccattcatgtaacaaaacccagcacattatctgcactataagctcaaagaatgtcacatccgcccagacagctctttgatgagggtgatgggaactgaataaaccatacggactggcagtaacaagggcttttactgttctgttcagtggaaccttcttggtcaaattgtaattagctagcattatatttatatacagggtcttttttctttaccgatgtattttcctactcatagccaaccaataaattcagtatctgtttcaaatattttagaagtgtagtttgtatagctgtagtactgaggtttgaggaaaaataaatgttgatcagcagaccacgtatttaaaattctgaatcttctgggacagggttgtaactcagccttccaaagggaagagtgcagggggacggggccatgatatggggaaatggtgtaaactaatgtatttctttattggctgttattctgtataacactcatatctttgccaaagttcaattttatatttaggcaactgatggtccttttgcatttaggattttcgttgttgttaccttatacctcatgatataaggaatgggctcatgtgtcttccgtcttttggaaggaggttgacatattttaaataaatgcttttaaatac

SEQ ID NO: 115296 - DNA, 4024 bp, Homo sapiens
  Payload ID: 2503
  Gene Symbol: CNOT6L
  Gene Name: CCR4-NOT transcription complex, subunit 6-like
  ENST ID: ENST00000515506
  CDS Start-End: 1-1408
gtgtgtgtgtgtgtcgggggtggcccggggccgggaccccagagtggcgtgtccctcccgctttgtggctgcggctcccgagcctcgcagactaatagggatgccaaaggaaaaatatgatcctccagatcctcgcagaatttataccatcatgtcagcagaggaggtagccaatgggaaaaaatctcactgggcagaattagaaatctcgggtagagtgcggagcctaagtacatcactttggtcattgacacacttgacagcgctgcacctaaatgacaattaccttagtcgcattccacctgatattgccaagcttcataatctggtttacctggatctgtcatccaataaactcagaagtttaccagcagaactaggaaacatggtgtctctcagggaattgcttttaaataacaatctgttacgggttttgccttatgaacttggtcggctcttccagctacaaactctaggtttgaaaggcaatcctttatcacaggatattctcaacttataccaggacccagatggaacccgaaagctactgaacttcatgcttgacaatctcgcagttcatccagagcagcttcctccgaggccatggattacattaaaagaacgagaccaaattctgccgtcagcatcattcacggttatgtgttacaatgtgttatgtgataaatacgctacccggcagctatatggctattgcccatcctgggcattaaactgggaatacaggaaaaagggaattatggaagaaattgttaactgtgacgcagatatcattagtcttcaggaagtggaaacagagcaatacttcactctctttctgccagcattgaaggagcgtggatatgatggatttttttctccaaagtcacgtgccaaaatcatgtctgagcaggagagaaagcatgtagatggttgtgcaatattcttcaaaacagaaaaatttacattggtgcagaagcatacagtggaatttaaccaagtggcgatggctaattcagatggatccgaagctatgctgaacagagtgatgacaaaagataacattggtgtcgctgtggtattagaggtccacaaagaactatttggagcaggtatgaagcctattcatgctgcagacaaacagctgcttatagtggcaaatgcccacatgcattgggacccagagtattctgatgtgaagctcatccagaccatgatgtttgtctcagaggttaaaaacattctggagaaagcctctagtaggcctggaagcccaactgcagatcctaattccatcccgctggtgctatgtgcagatcttaactcattgccagattcaggtgttgtggaatacttaagcaatggaggagtagctgacaaccataaagacttcaaggaactaagggcgtgattgactacattttctattccaagactcatatgaacgtgcttggtgtcctggggcctttagatcctcaatggctggttgagaacaacatcactgggtgtccacaccctcacatcccttcagaccacttctcactgttaacacaacttgaactccaccctccactcctgcctcttgtcaatggtgttcacttgcctaatcggaggtagtggagtactgccccgccaagacggggatctgttgctatggacctgtacagttgtaaatcaaagtatgtaggagtgaagtatggccatccttaagctgcttcttcaggtttctttcattatgtgtttgctgtaagactttgtacatttttgtgcatattggtatcatttggcagtagggctggaaccaaagtattactctctttacaaaattttaatttaacatgtttttaaattggaccttctttatattgtattaacagccagcattcaaaattgataaattaccaatttgaggcccaataacagtgtatttgtttttccaaaacaaatactttcttttgaatggtttcagtgagccaaccattttataaaaggcaatttttaaaaactataaatacagtattttaaactgaatgatgatatgccttccagggaaaaccttgaatttttcctttataactgacttttggattccaaagtcatttgcacattaacagagtacttaaatttacttgttcagtccataaactatgatatagcctctatacatggtaagaaaatttgaaaaattaaagatggttgcacagtatacttttataatccagcatgtaacaccacatgacaatttgttggccaaatgctggtttggagtttttttgaggaatcactttggtttttttgtcctttatatataaccttattggaagtattaattctaagcctgtctctcaagtttatttatagagaaaaagtaagtaatctgtattgccacataccttgaaaatagaatgtggtatgtttaggatgcccacggaatgaatttttccttattccaattcaaccttctgtctggttgtgccaggaaaacagatgttatatgacctatgtcatttttgccattatagtcaaatgttaaaagaagaaaaaagtctgctgaataaaaaggccttgatcaaagtttcagatggggaaaatcatacagatattttatgtgtttccaacatagattatgtggctgttggtttcttgagatgacagtgcaaaggatttgggagagagaacaaatttggggcagtagttgaaaacgttgggtcattttcctgactctagctgccaaatggccatcatatgcttttaatctttgtttcagttgtctgtcagggttgaattaagaagctactggtttattcccaattgttgatgcctttaggtatgttggaatcttttttttgcctaggaggggccagttgaaaatctgtgactcaagaggcagtgaacagaatactgttttctggggaaaaattggttggctacttgatgttaattatggcacagtaacaggaaaaggttgtgtctgtgtttttaagtttttctttattctgcttttttgctgctataagagttttctgaaatttatattttaaacttttcatgcactttactgtttctagtctcaaaatgtgatatttttaataaacaagaaattttccattatgtgaatgaaattttaaaagacaatagcctatatttgtgtctcactaatatataaagtataggtcaaatttaaattatttaattagttttaaatatacacaatttgtctcctctttcaaacctgacatcttcggctgttttattagtcttaaatgatgcatttactttggtcattttatgctaatttcttccatagtaaattaatcaggctatataaggtaatatttccccagagggtaattttagtgggacgagggtggtgggatgatgtcatatcatacatgggattgcatcagaagggttctgtaaagcctgaactcccttttaaaagtgcctagtgatagaggcgttgtttgtcatctattataattggaatgtcattgtagttcagtgaattttgatgtaaataaaatatcttttaaaaatgttaaagtaccaggataaacaaacaaaaagaaacaacccttaagatgacagattttcctcaacatgcaggtttcccttcttatatacctcaagtatccaacatctagccatgcaaattgattacctgaagcatagtactggaaagtagaatagcatgaaaaacttaattttgtggacattacctttttttgtaatcagctactgtatgttttattttagatcttttgttttgggtgggttttctgctctggaggtatatgcactaacaaaacattttcctcctttcatatacgcatgttaattagcaatgtgagcaatatttcctaccatacttcactcccaatattttttgagatgtttgtataaaatggaatttaaagttcacttatgattgtatatgaaccacagaggagcccatttattaataaaaaacttttttaatagttaaatgtagagggaaaaaataaaaaaaaatgggaaacattgtaaa

SEQ ID NO: 115297 - DNA, 8843 bp, Homo sapiens
  Payload ID: 2503
  Gene Symbol: CNOT6L
  Gene Name: CCR4-NOT transcription complex, subunit 6-like
  Uniprot ID: Q96LI5
  ENST ID: ENST00000504123
  CDS Start-End: 132-1799
gtgtgtgtttcccctgccgcggggaaatggctgctgttgcttctgggccagaggaagagaatgaggtagagtgttcttttgcctccgagtaggaccgagagtgttgggaagaggagcgcgtccccggggaaatgagactaatagggatgccaaaggaaaaatatgatcctccagatcctcgcagaatttataccatcatgtcagcagaggaggtagccaatgggaaaaaatctcactgggcagaattagaaatctcgggtagagtgcggagcctaagtacatcactttggtcattgacacacttgacagcgctgcacctaaatgacaattaccttagtcgcattccacctgatattgccaagcttcataatctggtttacctggatctgtcatccaataaactcagaagtttaccagcagaactaggaaacatggtgtctctcagggaattgcttttaaataacaatctgttacgggttttgccttatgaacttggtcggctcttccagctacaaactctaggtttgaaaggcaatcctttatcacaggatattctcaacttataccaggacccagatggaacccgaaagctactgaacttcatgcttgacaatctcgcagttcatccagagcagcttcctccgaggccatggattacattaaaagaacgagaccaaattctgccgtcagcatcattcacggttatgtgttacaatgtgttatgtgataaatacgctacccggcagctatatggctattgcccatcctgggcattaaactgggaatacaggaaaaagggaattatggaagaaattgttaactgtgacgcagatatcattagtcttcaggaagtggaaacagagcaatacttcactctctttctgccagcattgaaggagcgtggatatgatggatttttttctccaaagtcacgtgccaaaatcatgtctgagcaggagagaaagcatgtagatggttgtgcaatattcttcaaaacagaaaaatttacattggtgcagaagcatacagtggaatttaaccaagtggcgatggctaattcagatggatccgaagctatgctgaacagagtgatgacaaaagataacattggtgtcgctgtggtattagaggtccacaaagaactatttggagcaggtatgaagcctattcatgctgcagacaaacagctgcttatagtggcaaatgcccacatgcattgggacccagagtattctgatgtgaagctcatccagaccatgatgtttgtctcagaggttaaaaacattctggagaaagcctctagtaggcctggaagcccaactgcagatcctaattccatcccgctggtgctatgtgcagatcttaactcattgccagattcaggtgttgtggaatacttaagcaatggaggagtagctgacaaccataaagacttcaaggaactaaggtacaatgagtgtcttatgaacttcagctgcaatggaaagaatggaagctcagaagggagaatcacacatggcttccaacttaagagcgcctatgaaaataacttgatgccttacaccaattacacctttgatttcaaaggcgtgattgactacattttctattccaagactcatatgaacgtgcttggtgtcctggggcctttagatcctcaatggctggttgagaacaacatcactgggtgtccacaccctcacatcccttcagaccacttctcactgttaacacaacttgaactccaccctccactcctgcctcttgtcaatggtgttcacttgcctaatcggaggtagtggagtactgccccgccaagacggggatctgttgctatggacctgtacagttgtaaatcaaagtatgtaggagtgaagtatggccatccttaagctgcttcttcaggtttctttcattatgtgtttgctgtaagactttgtacatttttgtgcatattggtatcatttggcagtagggctggaaccaaagtattactctctttacaaaattttaatttaacatgtttttaaattggaccttctttatattgtattaacagccagcattcaaaattgataaattaccaatttgaggcccaataacagtgtatttgtttttccaaaacaaatactttcttttgaatggtttcagtgagccaaccattttataaaaggcaatttttaaaaactataaatacagtattttaaactgaatgatgatatgccttccagggaaaaccttgaatttttcctttataactgacttttggattccaaagtcatttgcacattaacagagtacttaaatttacttgttcagtccataaactatgatatagcctctatacatggtaagaaaatttgaaaaattaaagatggttgcacagtatacttttataatccagcatgtaacaccacatgacaatttgttggccaaatgctggtttggagtttttttgaggaatcactttggtttttttgtcctttatatataaccttattggaagtattaattctaagcctgtctctcaagtttatttatagagaaaaagtaagtaatctgtattgccacataccttgaaaatagaatgtggtatgtttaggatgcccacggaatgaatttttccttattccaattcaaccttctgtctggttgtgccaggaaaacagatgttatatgacctatgtcatttttgccattatagtcaaatgttaaaagaagaaaaaagtctgctgaataaaaaggccttgatcaaagtttcagatggggaaaatcatacagatattttatgtgtttccaacatagattatgtggctgttggtttcttgagatgacagtgcaaaggatttgggagagagaacaaatttggggcagtagttgaaaacgttgggtcattttcctgactctagctgccaaatggccatcatatgcttttaatctttgtttcagttgtctgtcagggttgaattaagaagctactggtttattcccaattgttgatgcctttaggtatgttggaatcttttttttgcctaggaggggccagttgaaaatctgtgactcaagaggcagtgaacagaatactgttttctggggaaaaattggttggctacttgatgttaattatggcacagtaacaggaaaaggttgtgtctgtgtttttaagtttttctttattctgcttttttgctgctataagagttttctgaaatttatattttaaacttttcatgcactttactgtttctagtctcaaaatgtgatatttttaataaacaagaaattttccattatgtgaatgaaattttaaaagacaatagcctatatttgtgtctcactaatatataaagtataggtcaaatttaaattatttaattagttttaaatatacacaatttgtctcctctttcaaacctgacatcttcggctgttttattagtcttaaatgatgcatttactttggtcattttatgctaatttcttccatagtaaattaatcaggctatataaggtaatatttccccagagggtaattttagtgggacgagggtggtgggatgatgtcatatcatacatgggattgcatcagaagggttctgtaaagcctgaactcccttttaaaagtgcctagtgatagaggcgttgtttgtcatctattataattggaatgtcattgtagttcagtgaattttgatgtaaataaaatatcttttaaaaatgttaaagtaccaggataaacaaacaaaaagaaacaacccttaagatgacagattttcctcaacatgcaggtttcccttcttatatacctcaagtatccaacatctagccatgcaaattgattacctgaagcatagtactggaaagtagaatagcatgaaaaacttaattttgtggacattacctttttttgtaatcagctactgtatgttttattttagatcttttgttttgggtgggttttctgctctggaggtatatgcactaacaaaacattttcctcctttcatatacgcatgttaattagcaatgtgagcaatatttcctaccatacttcactcccaatattttttgagatgtttgtataaaatggaatttaaagttcacttatgattgtatatgaaccacagaggagcccatttattaataaaaaacttttttaatagttaaatgtagagggaaaaaataaaaaaaaatgggaaacattgtaaacagcttaagtttattttgtgtatgatcgaggcactctgttgcaggaaggtgtgtaattgggttctctctgcttcaaatgcgctctttcaaaccattcattatcctgtgtatttttaatgtggttttagtaaatgttggtagtagctctgttgaagtaggtaattgtgttatgttttgggtggtacacacttggggcatggtaacccaaatttcatgtgcacggtttccctttagcccactgcccaaatttcacatacccttcaccctttgttccctttgtaaaaggagtggtatctgttttgagctgccaattcagatgatcagaaatgctgctttcctcagcattgtcttgttaaaccgcatgccatttggaactttggcagtgagaagccaaaaggaagaggtgaatgacatatatatatatatattcaatgaaagtaaaatatatatgctcatatactttctagttatcagaatgagttaagctttatgccattgggctgctgcatattttaatcagaagataaaagaaaatctgggcatttttagaatgtgatacatgtttttttaaaactgttaaatattatttcgatatttgtctaagaaccggaatgttcttaaaatttactaaaacagtattgtttgaggaagagaaaactgtactgtttgccattattacagtcatacaagtgcatgtcaagtcacccactctctcaggcatcagtatccacctcatagctttacacattttgatggggaatattgcagcatcctcaggcctgacatctgggaaaggctcagatccacctactgctccttgctcgttgattttgttttaaaatattgtgcctggtgtcaacttttaagcaacagcactgcctaaaagcaagcagagaacagaatcccagcaccattctataggcaactttttagaattcagatatagtaaatctgttccagatttatgatgttttatgtaaaaaaaattttgtataataacatagctgaatatttttgtttcatttctttgatgtaaggcgtgtgaacattcgtttgaatatcacatgttgaagtcaggtatggcacaatgggttctgagaccagcttttcctcccctcccatttgccttgttccaagctctttcttttcaaattacttttctgatattcataggcaggtatttaattttactaattagcatcctgtgtgaatgtattaaagaagccactgtgttttagtgtagttggcaaaaatataaaagctgtttcttatttgcccctatttttttggtgtcttaaagttatatattaaatcacagagaagcaagggagaaagttgaaagatatctaaggctcatatcacttgattctatggtagattatattagaattgaggatgtggcacattaaaactggaacatgggcaaatatagtgttccattttaaaattctaagtttatattgttaaatgggtgaaaatttaagtttatatttgcatttccaagcgtttctaaaaatcactaatgccatctatacttttagtatgaaacagcagactatagaaagcacagggaagaataggctaaatacattctttgaagaaccagaggcatataaccacatcattatgtcattcctaatacatggctagattttctaatgataaaattgactgtgtcccaatgcttatttgattctaagcttttttattctgtttctgagatattttaatagctttgcaaaatatgctgaccagtttttggaaaataatggtttttatagcaagcaaagactttatggcacattttcaaaatagcactcatacatacttacattttgacagaaatgtgaattctcacattgatgagatattctttttcccacctgccctaccctttaaaaaaggtcacttttctaatgtgtagtagattcatttacgcctttccctttgagtcataccatgtttggagaactgtgtgaattgtaggtagagaaattaactagggaagccagaagcttgaactaaagttttaaatttgtaggcagatgagaacttttatactatggttgctttgggcgattctaattttgtaatagcatcatgatcaccaaaattaattcaaacattttagtacatctttaatctgtcttatttaccaaagttctaatctgtttaagaacaggatgccaagagcatctttcattttatagaatgatatgctcacctttataagtgtcacctaaaagcttgagggtaaaaaagaagcagcccatatatctaaactacaggatgtcttgaacaagattcacagaaagaaagaaaaaaaagcagttctttccaggaaggtggtaaggaagagcatgcatatttcttgttttaaccaaataccttttttatgtaaatgtctctattaaaccccaggtcctacaccaggaaatagggtgataaccaggaaaataccaagctttaacccagttggcagttccttgtggcatacatttggttagacttgggtttttcctggaaccaaaggaaaataagcatgttgagttcttcgttcaacagacatgacattgaagtaatagaatattttttaagtaaaatagttttcactttcaaagcctatgacataaggacatttgtgcttattaattgttaatttttttttatggtacattgtataaactgagtagcattgaactgcattttagaagtatgtcatcagaaacaaatcacattatggaaaggatatacaaatgccaagtgatatgactcttttggcatggtggtagcatggtccattcagctttcagaatctttcggaggctctagtttggtgcctagtactagttatttttgttagaacaatctctcaaaatttagataattttccagttgtatgtctgtcacttttaactctaaagcgtaagaatcatggtaaccctctcagaagtggtcctttcttgctcatttcagtttcgtattaacttcaaatcactgatgtattgtctttcaagctatcaattgttatatgtaccaatttaatttagtttgtagttatctgaagtcacaaaattggttcagcattgatgtcaaacaatggctttgcttcttaccaaacagacttagtatcctgctgcttgtttcaatcttgatgcagtaagtgatgcagtatctgggtctgtatttacttagaaactgtactgtcctttctctgtgcttaacttgctaaaaatatattcccttacctgtgaaattcctgagcggtgctctgccaacttttcaaggggagggatttggatggctgtgttactgcacactggatctggaattgttcagggttatgagtgacaaatttcttaaacaccagcagcactgagatgtgcactatgggcattcgtacagttgttgtccaaatgcaaacaactttttcatcttggagaagctgagatacagagttcaatagaactacttggaatattttgagaaggttgaatgtttcatctttggctttgttgtctctggagtggggaagtatggagggctttttttttttttttttttttttttttttttttttttaaagagagtgtgtatgtactttttctctctataagggccagggtgttggtcaaattcaccatcgattaatttatatcttctgttgtgatttttttcaactatataacaagtgccaactaattgtccatgggacaatctacttttccactcaatttatcgttttgagtagggaaaggttcatttattttcattacctggcattaagttaaagaattcattattttgcatacatttgagtcattctgtgacctataaagtgtttttgtaactatctaattctaatggttgcaaagcaaagcacatgactgtaaaaccaagcaaggtgttttagtaactttttccctgaatacttggtagtttccattgatactattccaaaacaaattctgctgttttaggttgtatatttactttgcttttgttctaagaaaaagccaaggactaaatcaacttgtttttgtgtttcagtaatcagtttaaaatctaagatttttttttaaattagactatttaatgaagtgccatgtaattgtagcttgctagtgtttaatgtttaatagactggttctgtaggtgttttaaccatttaacactctctgccatccctggagaaagtggttctactcttactgaacacattctctctgacaaaatcaccagctgctttatttttctatttattacagttaaacagttgatgaggtctgaatcttgaccaaaactgctcagctgagatgtttttcacaatagacactgtacaaagtgtgcgtgcaaaaggacacggttggtagtattttttcattaatgtgaacattgactaaaaaaaagcagtcctgccttttaaatcttgtggcagctcagaagggaggtgcttaagaaccttaactactatgtcagataacaaaatatttttttccattttggagattggttactgctcacacatgatgtatagggctaaatatatgcttgtttccttgcacctgtgtacttcccctctctccctccctttccttcccctgtaggcaataaatggccattttgcaactgca

SEQ ID NO: 115298 - DNA, 1890 bp, Homo sapiens
  Payload ID: 2503
  Gene Symbol: CNOT6L
  Gene Name: CCR4-NOT transcription complex, subunit 6-like
  ENST ID: ENST00000512485
  CDS Start-End: 1-1689
cccggaccccggcgcgctgaatgcagactaatagggatgccaaaggaaaaatatgatcctccagatcctcgcagaatttataccatcatgtcagcagaggaggtagccaatgggaaaaaatctcactgggcagaattagaaatctcgggtagagtgcggagcctaagtacatcactttggtcattgacacacttgacagcgctgcacctaaatgacaattaccttagtcgcattccacctgatattgccaagcttcataatctggtttacctggatctgtcatccaataaactcagaagtttaccagcagaactaggaaacatggtgtctctcagggaattgcttttaaataacaatctgttacgggttttgccttatgaacttggtcggctcttccagctacaaactctaggtttgaaaggcaatcctttatcacaggatattctcaacttataccaggacccagatggaacccgaaagctactgaacttcatgcttgacaatctcgcagttcatccagagcagcttcctccgaggccatggattacattaaaagaacgagaccaaattctgccgtcagcatcattcacggttatgtgttacaatgtgttatgtgataaatacgctacccggcagctatatggctattgcccatcctgggcattaaactgggaatacaggaaaaagggaattatggaagaaattgttaactgtgacgcagatatcattagtcttcaggaagtggaaacagagcaatacttcactctctttctgccagcattgaaggagcgtggatatgatggatttttttctccaaagtcacgtgccaaaatcatgtctgagcaggagagaaagcatgtagatggttgtgcaatattcttcaaaacagaaaaatttacattggtgcagaagcatacagtggaatttaaccaagtggcgatggctaattcagatggatccgaagctatgctgaacagagtgatgacaaaagataacattggtgtcgctgtggtattagaggtccacaaagaactatttggagcaggtatgaagcctattcatgctgcagacaaacagctgcttatagtggcaaatgcccacatgcattgggacccagagtattctgatgtgaagctcatccagaccatgatgtttgtctcagaggttaaaaacattctggagaaagcctctagtaggcctggaagcccaactgcagatcctaattccatcccgctggtgctatgtgcagatcttaactcattgccagattcaggtgttgtggaatacttaagcaatggaggagtagctgacaaccataaagacttcaaggaactaaggtacaatgagtgtcttatgaacttcagctgcaatggaaagaatggaagctcagaagggagaatcacacatggcttccaacttaagagcgcctatgaaaataacttgatgccttacaccaattacacctttgatttcaaaggcgtgattgactacattttctattccaagactcatatgaacgtgcttggtgtcctggggcctttagatcctcaatggctggttgagaacaacatcactgggtgtccacaccctcacatcccttcagaccacttctcactgttaacacaacttgaactccaccctccactcctgcctcttgtcaatggtgttcacttgcctaatcggaggtagtggagtactgccccgccaagacggggatctgttgctatggacctgtacagttgtaaatcaaagtatgtaggagtgaagtatggccatccttaagctgcttcttcaggtttctttcattatgtgtttgctgtaagactttgtacatttttgtgcatattggtatcatttggcagtagggctggaaccaaagtattactctct

SEQ ID NO: 115299 - DNA, 1925 bp, Homo sapiens
  Payload ID: 2503
  Gene Symbol: CNOT6L
  Gene Name: CCR4-NOT transcription complex, subunit 6-like
  ENST ID: ENST00000504804
  CDS Start-End: 69-209
gtgtttgtgtgtgtgtttcccctgccgcggggaaatggctgctgttgcttctgggccagaggaagagaatgagactaatagggatgccaaaggaaaaatatgatcctccagatcctcgcagaatttataccatcatgtcagcagaggaggtagccaatgggaaaaaatctcactgggcagaattagaaatctcggagtgcggagcctaagtacatcactttggtcattgacacacttgacagcgctgcacctaaatgacaattaccttagtcgcattccacctgatattgccaagcttcataatctggtttacctggatctgtcatccaataaactcagaagtttaccagcagaactaggaaacatggtgtctctcagggaattgcttttaaataacaatctgttacgggttttgccttatgaacttggtcggctcttccagctacaaactctaggtttgaaaggcaatcctttatcacaggatattctcaacttataccaggacccagatggaacccgaaagctactgaacttcatgcttgacaatctcgcagttcatccagagcagcttcctccgaggccatggattacattaaaagaacgagaccaaattctgccgtcagcatcattcacggttatgtgttacaatgtgttatgtgataaatacgctacccggcagctatatggctattgcccatcctgggcattaaactgggaatacaggaaaaagggaattatggaagaaattgttaactgtgacgcagatatcattagtcttcaggaagtggaaacagagcaatacttcactctctttctgccagcattgaaggagcgtggatatgatggatttttttctccaaagtcacgtgccaaaatcatgtctgagcaggagagaaagcatgtagatggttgtgcaatattcttcaaaacagaaaaatttacattggtgcagaagcatacagtggaatttaaccaagtggcgatggctaattcagatggatccgaagctatgctgaacagagtgatgacaaaagataacattggtgtcgctgtggtattagaggtccacaaagaactatttggagcaggtatgaagcctattcatgctgcagacaaacagctgcttatagtggcaaatgcccacatgcattgggacccagagtattctgatgtgaagctcatccagaccatgatgtttgtctcagaggttaaaaacattctggagaaagcctctagtaggcctggaagcccaactgcagatcctaattccatcccgctggtgctatgtgcagatcttaactcattgccagattcaggtgttgtggaatacttaagcaatggaggagtagctgacaaccataaagacttcaaggaactaaggtacaatgagtgtcttatgaacttcagctgcaatggaaagaatggaagctcagaagggagaatcacacatggcttccaacttaagagcgcctatgaaaataacttgatgccttacaccaattacacctttgatttcaaaggcgtgattgactacattttctattccaagactcatatgaacgtgcttggtgtcctggggcctttagatcctcaatggctggttgagaacaacatcactgggtgtccacaccctcacatcccttcagaccacttctcactgttaacacaacttgaactccaccctccactcctgcctcttgtcaatggtgttcacttgcctaatcggaggtagtggagtactgccccgccaagacggggatctgttgctatggacctgtacagttgtaaatcaaagtatgtaggagtgaagtatggccatccttaagctgcttcttcaggtttctttcattatgtgtttgctgtaagactttgtacatttttgtgcatattggtatcatttggcagtagggctggaaccaaagtat

SEQ ID NO: 115300 - DNA, 572 bp, Homo sapiens
  Payload ID: 2503
  Gene Symbol: CNOT6L
  Gene Name: CCR4-NOT transcription complex, subunit 6-like
  ENST ID: ENST00000515441
  CDS Start-End: 83-572
gcgcgcgcgcgcgcgtgtttgtgtgtgtgtttcccctgccgcggggaaatggctgctgttgcttctgggccagaggaagagaatgagactaatagggatgccaaaggaaaaatatgatcctccagatcctcgcagaatttataccatcatgtcagcagaggaggtagccaatgggaaaaaatctcactgggcagaattagaaatctcgggtagagtgcggagcctaagtacatcactttggtcattgacacacttgacagcgctgcacctaaatgacaattaccttagtcgcattccacctgatattgccaagcttcataatctggtttacctggatctgtcatccaataaactcagaagtttaccagcagaactaggaaacatggtgtctctcagggaattgcttttaaataacaatctgttacgggttttgccttatgaacttggtcggctcttccagctacaaactctaggtttgaaaggcaatcctttatcacaggatattctcaacttataccaggacccagatggaacccgaaagctactgaacttcatgcttgacaatctcgcag

SEQ ID NO: 115301 - DNA, 781 bp, Homo sapiens
  Payload ID: 2503
  Gene Symbol: CNOT6L
  Gene Name: CCR4-NOT transcription complex, subunit 6-like
  ENST ID: ENST00000505983
  CDS Start-End: 1-781
ttaaaaagctgccattgtcaagtagcagctgctagcaatcaggaagtggaaacagagcaatacttcactctctttctgccagcattgaaggagcgtggatatgatggatttttttctccaaagtcacgtgccaaaatcatgtctgagcaggagagaaagcatgtagatggttgtgcaatattcttcaaaacagaaaaatttacattggtgcagaagcatacagtggaatttaaccaagtggcgatggctaattcagatggatccgaagctatgctgaacagagtgatgacaaaagataacattggtgtcgctgtggtattagaggtccacaaagaactatttggagcaggtatgaagcctattcatgctgcagacaaacagctgcttatagtggcaaatgcccacatgcattgggacccagagtattctgatgtgaagctcatccagaccatgatgtttgtctcagaggttaaaaacattctggagaaagcctctagtaggcctggaagcccaactgcagatcctaattccatcccgctggtgctatgtgcagatcttaactcattgccagattcaggtgttgtggaatacttaagcaatggaggagtagctgacaaccataaagacttcaaggaactaaggtacaatgagtgtcttatgaacttcagctgcaatggaaagaatggaagctcagaagggagaatcacacatggcttccaacttaagagcgcctatgaaaataacttgatgccttacaccaattacacctttgatttcaaag

SEQ ID NO: 115302 - DNA, 6913 bp, Homo sapiens
  Payload ID: 2504
  Gene Symbol: CNOT7
  Gene Name: CCR4-NOT transcription complex, subunit 7
  Uniprot ID: Q9UIV1
  ENST ID: ENST00000361272
  CDS Start-End: 300-1157
atctagcgcccccgtcaggacgtgcgaaaagcgacggcgcagcacggtgcggcgcagctcctgctcgcctttcccttcgctgggcgagaggtgtctatggggcacccgctgccgccgccgctaccgccaccgccaccgccaccgccgccgagtgctgtctctatggcgaggaggaggaggaggagcgcgagctcagcgacacaagtacataaataaaggataaaatattttatgaaacaaatcttcaatcaagtataacattttgatgcttggcatctagactcccttgtgccctcactatgccagcggcaactgtagatcatagccaaagaatttgtgaagtttgggcttgcaacttggatgaagagatgaagaaaattcgtcaagttatccgaaaatataattacgttgctatggacaccgagtttccaggtgtggttgcaagacccattggagaattcaggagcaatgctgactatcaataccaactattgcggtgtaatgtagacttgttaaagataattcagctaggactgacatttatgaatgagcaaggagaataccctccaggaacttcaacttggcagtttaattttaaatttaatttgacggaggacatgtatgcccaggactctatagagctactaacaacatctggtatccagtttaaaaaacatgaggaggaaggaattgaaacccagtactttgcagaacttcttatgacttctggagtggtcctctgtgaaggggtcaaatggttgtcatttcatagcggttacgactttggctacttaatcaaaatcctaaccaactctaacttgcctgaagaagaacttgacttctttgagatccttcgattgttttttcctgtcatttatgatgtgaagtacctcatgaagagctgcaaaaatctcaaaggtggattacaggaggtggcagaacagttagagctggaacggataggaccacaacatcaggcaggatctgattcattgctcacaggaatggcctttttcaaaatgagagaaatgttctttgaagatcatattgatgatgccaaatattgtggtcatttgtatggccttggttctggttcatcctatgtacagaatggcacagggaatgcatatgaagaggaagccaacaagcagtcatgacatgaaatagtccttttatttttatttcgagctacacacatgcttgtatataggttttatctctggttgaatccctcgaacaatagacagtacctttcccccccctttcatggcccattttattgtctgcctttcagtactaagtatgaccgttcctatctcagatcttaataaaaagaaaaaaaaaaacgcattcaggttaaatttggccttaatttaatatacttgttagcaagcgtgtgtgacagagagtggggaaagctacatcattgaatattttgataaactttaccgacttgagtttggtttatttttcccttttcctaaattaactagcactgactgtaatttatttccctgtttcacgtctctcccttccattctgcaggagttttagctatttgagatcgtggaccatcagttttgcactttagagagtgtttctgactctaaacctgttttatcagaaaatttgttttttcttgatcttagctggaaaaatctgccaactttacacagtatttacttggttttgacccacagaatatagcacgttgtgcaaactgtcgattcagcgaaacttaaaaaagacaagaaactactgaggagcttagtaactgctgtttctgtacgtagtgtttaatcttccaagcacatctagtgtctgtcagtttctaattggcatgtgtaggctgctctgtgactgaagaattttcaaaccagctttacacccttcaggaaaaatcccttgtgattggatgtttactatctgccaggaaactggtactcaagatgttgaagctacagttattttatgatagcacacttcccttgatctgcttatttttattccatcaccatttaccctttttttttttttaaattttgtagccattcttatgatgctcttgatttgttggttacacaaatcaattttattaaaaatccaaagataagtctttaggtatattttgtaccaaattaaattagaagacaaaaattgtgctttcatagttgctacaaaggtaaataatggagagatttggtacaaaacaacaaaatatatatatattctcatatatatatatatagctgataaaattacctgaggagtgtaatgcttatttttttgtgtatatctttgcaatctattttatatatattgacaaaagagactgtgaaatacttagccatgcagaatatgtgaccagaccagagcatgtgtaggaagactttacggtaatcattaactctaccccgaaatgatggactacaagttataatgtgtgttacctacacttcaatcagtaatattagcaaatctccaaatgttagtcacattggtttgtctcccttgtacattctttattcatgatattacagtgctgtaactgggtggtcctttttaaacaaaacattatttgcaaaacagagggtattatttgtttttaaagcttttgtaaataaaggcttcaaaatgttttcttataaatgttgatgactggtgattttcttttggaaatacttatttgggggatattgttcatttttatttgggcaactcaacagaattcagtaacttccttcattaaccctagatgattattagtccattaattgaaaaatcagtctgagttttctgcatttcaagtgttggcttattcttgttctttatgagtacctcaactagctaattaaggactgacttctgtttctcctttccaggaatgcatttattccgaaggatatacttcacaaagtaaatacatttggtataactgtggctttttaaaaaatctaacacaatgtagtaagtttctaactggcttcttttgtcttcgttaaaaaggaagtgaagcttcttttcgcttgtgatttgttagctgagaaaactaatatttaaattctgttcaactatttgagaaatcaatgctggatttcaaataggaatgataaagattgcctttttattagccacatagttgctcaatctcataacttgtatcatttctggcttctgtccctaaaaagtatagataatccctaacttactttcgacttaatgatttttcaactttacagtgggtgtattgagaggtaaccccatcaaaagtttaggagcgccttaggaccaaagatggggttatagtttctactgaatgtgtattgcttttgcaccattgcaaagtcaaaatttataacttgaaccatcgtaaattgggggactgtatgctgttgcctgcattaaatgcatcttagtattttttcagatgtaacctcattgtaggttgagcaaccgtatagtgtaacttttgtagaggaacattttgacttttactgggtctaagttttacttttttattttgttccagacagtctcaatgtttgtaaagtctaggttccagatgtaagatatttggctgatattttagtgttactgagccattaattaattacaggctcatatattctgttaaatctactagagcaagggttgtcaaactatggcccgtagccagaatcagcttgctgcctgtttttgtgtggcccatgaactgaaaatggcttttaaatggttgggaaaaataatcaaaagattatttcctgacatctgaaaattacatgaaattcaaattttagtgtctataagtttttattggaatgcagccacactaatttacatattatctatggatacttttttgctataatgggaaagttgagtagctgctacagaacctgtgtatgtgtgtcttgtttcacattgccgcttggcaagctacagaatcatggtgatgcagatattacctgaaagcatttggaatgccctgtgtattgctagatttattactttttctgctaccagttcatgccctgtatctcagaacaagaaaagtacctttgaatgttacactttcaaggcacattggaatatggactattttattatatgctggtacattgtgtttataatgcagtgtcaccataactggtaaaagaatagactgacagtatcagactaacatcacaatattcccaactggtgggaaagcaacagtcagaagaattagaaaatttaaatgaaacatcacagcaaaatttcacaaaagtaataaaaatgaggctgcaaccaaaatgtttacaagtagcctatttgttagccaagcaaagaaaaccatttactaatgctgaattacatcgtgcttgaagatagtaaccaacccaaagacatgtgtccagagaaaattaagacatcagccctttgatgagaacagtagtttgaagaatgaggattttggacacaacatcaaatgacactgttaattctttgcctcttactagtcagtactgcctagctttattttttgagaaaccattgctggatttgaagtgatcgaagaatttgtatggaactacaagtgggaatattttcaaaaaagttgataaacagtacaacctgaagtggaatctactaagatgtgatgcaaccgatgctgggaaaaatgcatgaagcagaaaaaaagtttatttggtcaaattttaaggcttgtgaaaacgtaagttgtttaaagcctgtagttactcacttgattattcatcagcaggtacttcacaggaaatattggtgttactgaactggtcaacagttaacttcatttgctcttgtggacttaaccatcttcagttccatgatttttttttttttgtgagaaacagaagctgaatatcctgatttgatttgccacacaggcgttcaatggcttagcagtgctaaagatttatttttatttttttgggctctgggctgacattgaaatttttctgaatgagaaaaaccatcctcaaccactgttttttaacactgagtaactttggaaattaacttttgccacagacttgaaaatgtttcttaatgaatttgacctgaaattacaaggtacaacaacataatatggtaaattcatttcaataaaaactaaaacttaagattgtcaagctgctttatatactttctgtgctatgagaagtcaaaacagcgctgtattgccaaatccatttttagtggatatattttcctgtagcagttttttggaccttgatgcagtgcaaagaaaatttttaaattttaaaagcatttaactgcaattaaatgcttttaaagtttcctcttaatcttctgttggaaatgaatcatcttgaatgaatgacatgctaaagggcaaataccaaaaagatgaatcctacaaatgccttacaagtgatgaatatgcttaactaaaatcacatgctcatgggtggatgtgtcagtatttagcagtaccttgacctgtttgtgtgaaaagacattttcaaagatgaaatacgtgaaatcccattacacatcagcattaacagattaacattttctatttattccaatgaggggataccaactttcagcccaaattgagcaaaatgttacctcccgtcccctgccaaaaaatcccattattcccattagtagaactctattactaaaaaaagaaaaaaaaattgtactcaatattttgagttttcaatttttagaataaaaatttggtgaaaagtttccttgagtacctaaataatgtccttcattttgtcttagcttgcaaagcctctaatatttgctacctgcccttttcaaaaaaaaaaaaaaaaaaaaaaaaaaggcttgtccacctctctactagaagaaactcaagggtctatgtctgtcctgtttgctatttcatctgcattgccaaatgcagtggctcctctgggtaggcaacctgaggtggaatcaaattatgaatgcatatgttatctcatgtctataaaataaatgtgttagaatttataaataaagggataggaaaaatgctgattattctgtgtgtcggtgctttgtagtgaaggccagttcacacatgccatttgctatgttggtgtaatttatatgagagtttcttttataacaacgttacctgtcatttatttttctattaagacattatagaaacgtaggactgtacacatccaaatcctgcagaattttcatttcaggttttgaaagttaaaaaaatgtcaccatagaatgaaaattccaagaaaacaagattcatgtacattatcactagacaatttccatttgttttaaacagttttctacagcattagttacatttaacgtttagtataaaagcaattgagcaatttctctttagaagtccatttcattgctttgtagccatagtctgtaggtgaatgaacaagctacatttctccagaattactcattttctttttaaagataaactggtcaatactctccttcctggtatggaggaattttttgtatatgagaagcattcatgaatataatctgccctcttgctttattgtcataggaggggaaattcactgctttcacacccttctgttttggctctttctcccaaaagataagaatctttatttagtatcataccaagaaattggagttcctttagcttcagactatcatcatggcttccaaattgttaggaaatacaagtttgcaagaccccaaggggacttaatattttacatcttactagccatgtcataggttttaagtgcttttaatggggaactgtttcactcatgccatatacctgttttgtttttctaaaaaattaatactgtaagttgtgagcaggtgtcttgtatcactgcgaaacccatgcataataaaaacttgttcttgagctata

SEQ ID NO: 115303 - DNA, 680 bp, Homo sapiens
  Payload ID: 2504
  Gene Symbol: CNOT7
  Gene Name: CCR4-NOT transcription complex, subunit 7
  ENST ID: ENST00000519918
  CDS Start-End: 1-626
atgaagagatgaagaaaattcgtcaagttatccgaaaatataattacgttgctatggacaccgagtttccaggtgtggttgcaagacccattggagaattcaggagcaatgctgactatcaataccaactattgcggtgtaatgtagacttgttaaagataattcagctaggactgacatttatgaatgagcaaggagaataccctccaggaacttcaacttggcagtttaattttaaatttaatttgacggaggacatgtatgcccaggactctatagagctactaacaacatctggtatccagtttaaaaaacatgaggaggaaggaattgaaacccagtactttgcagaacttcttatgacttctggagtggtcctctgtgaaggggtcaaatggttgtcatttcatagcggttacgactttggctacttaatcaaaatcctaaccaactctaacttgcctgaagaagaacttgacttctttgagatccttcgattgttttttcctgtcatttatgatgtgaagtacctcatgaagagctgcaaaaatctcaaagtaaggcttcggatggcattatctacagcagcacactgttcagaccaagtgactgtcatgcgagcctaggctgggatgttgttttaaaccatattttaaagtattacagtgaatgcaattata

SEQ ID NO: 115304 - DNA, 768 bp, Homo sapiens
  Payload ID: 2504
  Gene Symbol: CNOT7
  Gene Name: CCR4-NOT transcription complex, subunit 7
  ENST ID: ENST00000518021
  CDS Start-End: 279-467
gtgcgaaaagcgacggcgcagcacggtgcggcgcagctcctgctcgcctttcccttcgctgggcgagaggtgtctatggggcacccgctgccgccgccgctaccgccaccgccaccgccaccgccgccgagtgctgtctctatggcgaggaggaggaggaggagcgcgagctcagcgacacaagtacataaataaaggataaaatattttatgaaacaaatcttcaatcaagtataacattttgatgcttggcatctagactcccttgtgccctcactatgccagcggcaactgtagatcatagccaaagaatttgtgaagtttgggcttgcaacttggatgaagagatgaagaaaattcgtcaagttatccgaaaatataattacgttgctatgggttttggtgttgagaaaaaccttgtgtcagagaagcaattggaaagtacagggcgttttcccctcttttgaaccagttcttcaagaaacttggttttagcattggaatactgtgagcatcatttcatgtatcctttgggagacaggaatttatgattttcccccctttcttggttatagagacaccgagtttccaggtgtggttgcaagacccattggagaattcaggagcaatgctgactatcaataccaactattgcggtgtaatgtagacttgttaaagataattcagctaggactgacatttatgaatgagcaaggagaataccctccaggaacttcaacttggcagtttaattttaaatttaatttg

SEQ ID NO: 115305 - DNA, 568 bp, Homo sapiens
  Payload ID: 2504
  Gene Symbol: CNOT7
  Gene Name: CCR4-NOT transcription complex, subunit 7
  ENST ID: ENST00000520178
  CDS Start-End: 447-568
agtgggacggaaattgggagtggagggcggtggcctagatcctcacctcttcgtattgtttcacgcggcagtgcttgggagtcagtgtagctccagtcagtgttatcagcaccttcgcactggcgctttgccagggaagagagttatctatggcttgaatacctcggtgccgtcctctcgtttctctgggaaactgcagtacggagatgctttctccagtaatgagaaggcctttggtgtctcttcggggcttctgggactgcagtagagagagagaaggatttgaaatttccctgcccaagaatcaacaggaactctgtttatagaccagaaatgtgacatctatctttggtacataaataaaggataaaatattttatgaaacaaatcttcaatcaagtataacattttgatgcttggcatctagactcccttgtgccctcactatgccagcggcaactgtagatcatagccaaagaatttgtgaagtttgggcttgcaacttggatgaagagatgaagaaaattcgtcaagttatccgaaaatataattacgttgctatggacac

SEQ ID NO: 115306 - DNA, 1885 bp, Homo sapiens
  Payload ID: 2504
  Gene Symbol: CNOT7
  Gene Name: CCR4-NOT transcription complex, subunit 7
  Uniprot ID: Q9UIV1
  ENST ID: ENST00000523917
  CDS Start-End: 300-1034
atctagcgcccccgtcaggacgtgcgaaaagcgacggcgcagcacggtgcggcgcagctcctgctcgcctttcccttcgctgggcgagaggtgtctatggggcacccgctgccgccgccgctaccgccaccgccaccgccaccgccgccgagtgctgtctctatggcgaggaggaggaggaggagcgcgagctcagcgacacaagtacataaataaaggataaaatattttatgaaacaaatcttcaatcaagtataacattttgatgcttggcatctagactcccttgtgccctcactatgccagcggcaactgtagatcatagccaaagaatttgtgaagtttgggcttgcaacttggatgaagagatgaagaaaattcgtcaagttatccgaaaatataattacgttgctatggacaccgagtttccaggtgtggttgcaagacccattggagaattcaggagcaatgctgactatcaataccaactattgcggtgtaatgtagacttgttaaagataattcagctaggactgacatttatgaatgagcaaggagaataccctccaggaacttcaacttggcagtttaattttaaatttaatttgacggaggacatgtatgcccaggactctatagagctactaacaacatctggtatccagtttaaaaaacatgaggaggaaggaattgaaacccagtactttgcagaacttcttatgacttctggagtggtcctctgtgaaggggtcaaatggttgtcatttcatagcggttacgactttggctacttaatcaaaatcctaaccaactctaacttgcctgaagaagaacttgacttctttgagatccttcgattgttttttcctgtcatttatgatgtgaagtacctcatgaagagctgcaaaaatctcaaaggtggattacaggaggtggcagaacagttagagctggaacggataggaccacaacatcaggcaggatctgattcattgctcacaggaatggcctttttcaaaatgagagaagtatgaagacatcactgcctttttctcagttggttgttaggttgagaacattaaaaatcttgtggccaaagattttgggcaacaagtacctactaagtaaagatataattagagataccatatgagtcacatccaccacacttaaaagtattcaaaaataagtcatcttgaaatgtagttcagaaggaactgggagaacatgttcatcatagaaccaacaattttaaaacataaactacctgagaagtcatgtaggtccaaccatattatttctcaggtgagaaaacaggctaataacttccatgattaaacacattactagtgggagaactccagagttcttttctgactcccattggtgctcctcctacaaggcaaggaatctttatattaggtttattctagcatgaccccttttaaggtttaaactggtgataaatatattatttgctcatgtcattcttcagtgctttgaagattttatagagaagaactcaggctcttttactgcattgagtcttaaaaggggggttgaattccgaagggatcaaataaatccaacgtagtagttgcatcagaaaccatattaggaaaaccctccttaaacggcaaaaggcagagatcagttccttgagtataaagtgttagggatggaagaatgaaactaaatgaacccattatctactcctaagtaattaagtgatgtgcacagatacacctagctataggtaaacaggaaaattggttgtgcaaaaaacaagtgaggtttttcttgactataagttttcccttttggaaaaattcgctgtggatttgagtatattttctcttagacattaaattgagactgagaattt

SEQ ID NO: 115307 - DNA, 1209 bp, Homo sapiens
  Payload ID: 2504
  Gene Symbol: CNOT7
  Gene Name: CCR4-NOT transcription complex, subunit 7
  ENST ID: ENST00000519954
  CDS Start-End: 279-434
gtgcgaaaagcgacggcgcagcacggtgcggcgcagctcctgctcgcctttcccttcgctgggcgagaggtgtctatggggcacccgctgccgccgccgctaccgccaccgccaccgccaccgccgccgagtgctgtctctatggcgaggaggaggaggaggagcgcgagctcagcgacacaagtacataaataaaggataaaatattttatgaaacaaatcttcaatcaagtataacattttgatgcttggcatctagactcccttgtgccctcactatgccagcggcaactgtagatcatagccaaagaatttgtgaagtttgggcttgcaacttggatgaagagatgaagaaaattcgtcaagttatccgaaaatataattacgttgctatgttcttcaagaaacttggttttagcattggaatactgtgagcatcatttcatgtatcctttgggagacaggaatttatgattttcccccctttcttggttatagagacaccgagtttccaggtgtggttgcaagacccattggagaattcaggagcaatgctgactatcaataccaactattgcggtgtaatgtagacttgttaaagataattcagctaggactgacatttatgaatgagcaaggagaataccctccaggaacttcaacttggcagtttaattttaaatttaatttgacggaggacatgtatgcccaggactctatagagctactaacaacatctggtatccagtttaaaaaacatgaggaggaaggaattgaaacccagtactttgcagaacttcttatgacttctggagtggtcctctgtgaaggggtcaaatggttgtcatttcatagcggttacgactttggctacttaatcaaaatcctaaccaactctaacttgcctgaagaagaacttgacttctttgagatccttcgattgttttttcctgtcatttatgatgtgaagtacctcatgaagagctgcaaaaatctcaaaggtggattacaggaggtggcagaacagttagagctggaacggataggaccacaacatcaggcaggatctgattcattgctcacaggaatggcctttttcaaaatgagagaagtatgaagacatcactgcctttttctcagttggttgttaggttgagaacattaaaaatcttgtggccaaagattttgggcaacaagtacctactaagt

SEQ ID NO: 115308 - DNA, 700 bp, Homo sapiens
  Payload ID: 2504
  Gene Symbol: CNOT7
  Gene Name: CCR4-NOT transcription complex, subunit 7
  ENST ID: ENST00000524358
  CDS Start-End: 258-700
gggacgatgaacctgagagggtgcgcgatggcgccagctggagtgcggctggcggaggaaggagcctggcggcgggttgggggctggaaggatttgaaatttccctgcccaagaatcaacaggaactctgtttatagaccagaaatgtgacatctatctttggtacataaataaaggataaaatattttatgaaacaaatcttcaatcaagtataacattttgatgcttggcatctagactcccttgtgccctcactatgccagcggcaactgtagatcatagccaaagaatttgtgaagtttgggcttgcaacttggatgaagagatgaagaaaattcgtcaagttatccgaaaatataattacgttgctatggacaccgagtttccaggtgtggttgcaagacccattggagaattcaggagcaatgctgactatcaataccaactattgcggtgtaatgtagacttgttaaagataattcagctaggactgacatttatgaatgagcaaggagaataccctccaggaacttcaacttggcagtttaattttaaatttaatttgacggaggacatgtatgcccaggactctatagagctactaacaacatctggtatccagtttaaaaaacatgaggaggaaggaattgaaacccagtactttgcagaacttcttatgacttctggagtggtcctctg

SEQ ID NO: 115309 - DNA, 426 bp, Homo sapiens
  Payload ID: 2504
  Gene Symbol: CNOT7
  Gene Name: CCR4-NOT transcription complex, subunit 7
  ENST ID: ENST00000518541
  CDS Start-End: 1-274
cggttacgactttggctacttaatcaaaatcctaaccaactctaacttgcctgaagaagaacttgacttctttgagatccttcgattgttttttcctgtcatttatgatgtgaagtacctcatgaagagctgcaaaaatctcaaaatgttctttgaagatcatattgatgatgccaaatattgtggtcatttgtatggccttggttctggttcatcctatgtacagaatggcacagggaatgcatatgaagaggaagccaacaagcagtcatgacatgaaatagtccttttatttttatttcgagctacacacatgcttgtatataggttttatctctggttgaatccctcgaacaatagacagtacctttcccccccctttcatggcccattttattgtctgcctttcagtactaagtatgaccg

SEQ ID NO: 115310 - DNA, 432 bp, Homo sapiens
  Payload ID: 2504
  Gene Symbol: CNOT7
  Gene Name: CCR4-NOT transcription complex, subunit 7
  ENST ID: ENST00000628418
  CDS Start-End: 277-432
gcgaaaagcgacggcgcagcacggtgcggcgcagctcctgctcgcctttcccttcgctgggcgagaggtgtctatggggcacccgctgccgccgccgctaccgccaccgccaccgccaccgccgccgagtgctgtctctatggcgaggaggaggaggaggagcgcgagctcagcgacacaagtacataaataaaggataaaatattttatgaaacaaatcttcaatcaagtataacattttgatgcttggcatctagactcccttgtgccctcactatgccagcggcaactgtagatcatagccaaagaatttgtgaagtttgggcttgcaacttggatgaagagatgaagaaaattcgtcaagttatccgaaaatataattacgttgctatgttcttcaagaaacttggttttagcattggaatactgtga

SEQ ID NO: 115311 - DNA, 2528 bp, Homo sapiens
  Payload ID: 2505
  Gene Symbol: CNOT8
  Gene Name: CCR4-NOT transcription complex, subunit 8
  Uniprot ID: Q9UFF9
  ENST ID: ENST00000285896
  CDS Start-End: 296-1174
gggtagagtggtgccgtccggttgtttggtgggaggcacgtaagaccgctctgggcacgggggcgctcacctcactggctcgttcggttctaggagcagatccggggtagagggaaaagagctccgggccaggggctgccgtcgccgccgtcggggagtcagcccgccagcccgccagctcgtcagcccgccagccagcgcttcgcgggccctgtcggtcccgatcagaccaaacattgtctggcttgcactgtaaaactagttagctgaagacgacttctcaggtttcttcaggatgcctgcagcacttgtggagaatagccaggttatctgtgaagtgtgggccagtaatctagaagaagagatgaggaagatccgagaaatcgtgctcagttacagttatattgccatggacacagaatttccaggtgttgtggtgcgaccaattggtgaatttcgtagttccatagattaccaatatcagcttctgcggtgcaatgttgaccttttaaaaattatccagctgggccttacattcacaaatgagaagggagagtatccttctggaatcaatacttggcagttcaatttcaaatttaaccttacagaggacatgtactcccaggattccatagatctccttgctaactcaggactacagtttcagaagcatgaagaggaagggattgacacactgcactttgcagagctgcttatgacatcaggagtggttctctgtgacaatgtcaaatggctttcatttcatagtggctatgattttggctatatggtaaagttgcttacagattctcgtttgccagaagaggaacatgaattctttcatattctgaaccttttcttcccatccatttatgatgtgaaatacctgatgaagagctgcaaaaatcttaagggaggtcttcaggaagttgctgatcagttggatttgcagaggattggaaggcagcaccaggcaggctcagactcactgctgacaggaatggctttctttaggatgaaagagttgttttttgaggacagcattgatgatgccaagtactgtgggcggctctatggcttaggcacaggagtggcccagaagcagaatgaggatgtggactctgcccaggagaagatgagcatcctggcgattatcaacaacatgcagcagtgatggcgccaggctctgcagggtgggcctgatcccagagtggtgcttactgtgctgactgtgtacttatcttccccaagagaaaatgcttcttttgagcacactgtacctaccatctgcattgagcagaaagacttttgttttactgaagacaaaagatgtttttattttagacccagaagagaggagtttgctctgaatttgtaaataagtcttccccattcctcatactcgagcctctcctctctggttgcctcctgccaccagcatccatggctcatttgacacctttttaaatatcaggacaagtctgaaacaaagtagtaaaatgtatataactcttacctgttgtcattctttttcttttaaatttgttgctaatctctgataatgaagattcttactctgattctcagctgagctgtgagggcttccagggaaaatggaacaaaatggtgttcttaggtaatgggttgtagatactgagtcttcctttccttttctgacccttctcgaggacatttgctttcctcacacttttgtagtctctctttacatattactatatggaaatgaattgctctgtgctgaaatttgaagaccagataatgaaactgaaaagcaaacaattttactgaatctgtctacccttcattcatgagaactccagaatgagtgttgaccactgaagcatcttttaagtctgtgttccattgtgccattcaggtttgctgtcacatatgcatcatctgaaatcatttgaaatttttgtacaataaaatatcctggatttgatcctgaaggaaactagtaagatcagatttttgggtcatgtctgttgtattttcagtaatgtgatttcagatggtcatctggattctcccacttctctactccattatttctctacttttccttccagcaaacctgaaacgtgagggagatggattaatgtgagtaacaggaatgtgtctttaaaaagctagagtggttacatttaatcaggcagtaagataatttgggttcttgagttgttttggagtaatatcccacaactggggtaggaagctcaggacttttttctttaaagctagtcatttcaaaagcatattgtatttttttgaatgactacagtatggacaatttcaaaaaccaaaacccactttggattggtggaagtaaaaactggtaactcactcaagtgaatgaatggtcttgcattttaaaagcttatgggaaactcaatttgaaatgattagaaaatgtcaagtattataagctggtatttaagatgcttgtaaatactatttatgtttttaattttgtaaaataaagatttctttttaaccactggcat

SEQ ID NO: 115312 - DNA, 2604 bp, Homo sapiens
  Payload ID: 2505
  Gene Symbol: CNOT8
  Gene Name: CCR4-NOT transcription complex, subunit 8
  Uniprot ID: Q9UFF9
  ENST ID: ENST00000403027
  CDS Start-End: 373-1251
agagagcaggcgagtcgggcggatcgggtgggtagagtggtgccgtccggttgtttggtgggaggcacgtaagaccgctctgggcacgggggcgctcacctcactggctcgttcggttctaggagcagatccggggtagagggaaaagagctccgggccaggggctgccgtcgccgccgtcggggagtcagcccgccagcccgccagctcgtcagcccgccagccagcgcttcgcgggccctgtcggtcccggtaagcgggcctgcgcttaccggaaagaggagcgtaagatgaaagagtatcagaccaaacattgtctggcttgcactgtaaaactagttagctgaagacgacttctcaggtttcttcaggatgcctgcagcacttgtggagaatagccaggttatctgtgaagtgtgggccagtaatctagaagaagagatgaggaagatccgagaaatcgtgctcagttacagttatattgccatggacacagaatttccaggtgttgtggtgcgaccaattggtgaatttcgtagttccatagattaccaatatcagcttctgcggtgcaatgttgaccttttaaaaattatccagctgggccttacattcacaaatgagaagggagagtatccttctggaatcaatacttggcagttcaatttcaaatttaaccttacagaggacatgtactcccaggattccatagatctccttgctaactcaggactacagtttcagaagcatgaagaggaagggattgacacactgcactttgcagagctgcttatgacatcaggagtggttctctgtgacaatgtcaaatggctttcatttcatagtggctatgattttggctatatggtaaagttgcttacagattctcgtttgccagaagaggaacatgaattctttcatattctgaaccttttcttcccatccatttatgatgtgaaatacctgatgaagagctgcaaaaatcttaagggaggtcttcaggaagttgctgatcagttggatttgcagaggattggaaggcagcaccaggcaggctcagactcactgctgacaggaatggctttctttaggatgaaagagttgttttttgaggacagcattgatgatgccaagtactgtgggcggctctatggcttaggcacaggagtggcccagaagcagaatgaggatgtggactctgcccaggagaagatgagcatcctggcgattatcaacaacatgcagcagtgatggcgccaggctctgcagggtgggcctgatcccagagtggtgcttactgtgctgactgtgtacttatcttccccaagagaaaatgcttcttttgagcacactgtacctaccatctgcattgagcagaaagacttttgttttactgaagacaaaagatgtttttattttagacccagaagagaggagtttgctctgaatttgtaaataagtcttccccattcctcatactcgagcctctcctctctggttgcctcctgccaccagcatccatggctcatttgacacctttttaaatatcaggacaagtctgaaacaaagtagtaaaatgtatataactcttacctgttgtcattctttttcttttaaatttgttgctaatctctgataatgaagattcttactctgattctcagctgagctgtgagggcttccagggaaaatggaacaaaatggtgttcttaggtaatgggttgtagatactgagtcttcctttccttttctgacccttctcgaggacatttgctttcctcacacttttgtagtctctctttacatattactatatggaaatgaattgctctgtgctgaaatttgaagaccagataatgaaactgaaaagcaaacaattttactgaatctgtctacccttcattcatgagaactccagaatgagtgttgaccactgaagcatcttttaagtctgtgttccattgtgccattcaggtttgctgtcacatatgcatcatctgaaatcatttgaaatttttgtacaataaaatatcctggatttgatcctgaaggaaactagtaagatcagatttttgggtcatgtctgttgtattttcagtaatgtgatttcagatggtcatctggattctcccacttctctactccattatttctctacttttccttccagcaaacctgaaacgtgagggagatggattaatgtgagtaacaggaatgtgtctttaaaaagctagagtggttacatttaatcaggcagtaagataatttgggttcttgagttgttttggagtaatatcccacaactggggtaggaagctcaggacttttttctttaaagctagtcatttcaaaagcatattgtatttttttgaatgactacagtatggacaatttcaaaaaccaaaacccactttggattggtggaagtaaaaactggtaactcactcaagtgaatgaatggtcttgcattttaaaagcttatgggaaactcaatttgaaatgattagaaaatgtcaagtattataagctggtatttaagatgcttgtaaatactatttatgtttttaattttgtaaaataaagatttctttttaaccactggca

SEQ ID NO: 115313 - DNA, 692 bp, Homo sapiens
  Payload ID: 2505
  Gene Symbol: CNOT8
  Gene Name: CCR4-NOT transcription complex, subunit 8
  ENST ID: ENST00000517568
  CDS Start-End: 338-692
ggatcgggtgggtagagtggtgccgtccggttgtttggtgggaggcacgtaagaccgctctgggcacgggggcgctcacctcactggctcgttcggttctaggagcagatccggggtagagggaaaagagctccgggccaggggctgccgtcgccgccgtcggggagtcagcccgccagcccgccagctcgtcagcccgccagccagcgcttcgcgggccctgtcggtcccggtaagcgggcctgcgcttaccggaaagaggagcatcagaccaaacattgtctggcttgcactgtaaaactagttagctgaagacgacttctcaggtttcttcaggatgcctgcagcacttgtggagaatagccaggttatctgtgaagtgtgggccagtaatctagaagaagagatgaggaagatccgagaaatcgtgctcagttacagttatattgccatggacacagaatttccaggtgttgtggtgcgaccaattggtgaatttcgtagttccatagattaccaatatcagcttctgcggtgcaatgttgaccttttaaaaattatccagctgggccttacattcacaaatgagaagggagagtatccttctggaatcaatacttggcagttcaatttcaaatttaaccttacagaggacatgtactcccaggattccatagatctccttgctaact

SEQ ID NO: 115314 - DNA, 923 bp, Homo sapiens
  Payload ID: 2505
  Gene Symbol: CNOT8
  Gene Name: CCR4-NOT transcription complex, subunit 8
  Uniprot ID: Q9UFF9
  ENST ID: ENST00000520671
  CDS Start-End: 344-904
gttcggttctaggagcagatccggggtagagggaaaagagctccgggccaggggctgccgtcgccgccgtcggggagtcagcccgccagcccgccagctcgtcagcccgccagccagcgcttcgcgggccctgtcggtcccggacacagaatttccaggtgttgtggtgcgaccaattggtgaatttcgtagttccatagattaccaatatcagcttctgcggtgcaatgttgaccttttaaaaattatccagctgggccttacattcacaaatgagaagggagagtatccttctggaatcaatacttggcagttcaatttcaaatttaaccttacagaggacatgtactcccaggattccatagatctccttgctaactcaggactacagtttcagaagcatgaagaggaagggattgacacactgcactttgcagagctgcttatgacatcaggagtggttctctgtgacaatgtcaaatggctttcatttcatagtggctatgattttggctatatggtaaagttgcttacagattctcgtttgccagaagaggaacatgaattctttcatattctgaaccttttcttcccatccatttatgatgtgaaatacctgatgaagagctgcaaaaatcttaagggaggtcttcaggaagttgctgatcagttggatttgcagaggattggaaggcagcaccaggcaggctcagactcactgctgacaggaatggctttctttaggatgaaagagttgttttttgaggacagcattgatgatgccaagtactgtgggcggctctatggcttaggcacaggagtggcccagaagcagaatgaggatgtggactctgcccaggagaagatgagcatcctggcgattatcaacaacatgcagcagtgatggcgccaggctctgcagg

SEQ ID NO: 115315 - DNA, 648 bp, Homo sapiens
  Payload ID: 2505
  Gene Symbol: CNOT8
  Gene Name: CCR4-NOT transcription complex, subunit 8
  ENST ID: ENST00000519903
  CDS Start-End: 392-648
agagagcaggcgagtcgggcggatcgggagcagatccggggtagagggaaaagagctccgggccaggggctgccgtcgccgccgtcggggagtcagcccgccagcccgccagctcgtcagcccgccagccagcgcttcgcgggccctgtcggtcccggtaagcgggcctgcgcttaccggaaagaggagcgacacagaatttccaggtgttgtggtgcgaccaattggtgaatttcgtagttccatagattaccaatatcagcttctgcggtgcaatgttgaccttttaaaaattatccagctgggccttacattcacaaatgagaagggagagtatccttctggaatcaatacttggcagttcaatttcaaatttaaccttacagaggacatgtactcccaggattccatagatctccttgctaactcaggactacagtttcagaagcatgaagaggaagggattgacacactgcactttgcagagctgcttatgacatcaggagtggttctctgtgacaatgtcaaatggctttcatttcatagtggctatgattttggctatatggtaaagttgcttacagattctcgtttgccagaagaggaacatgaattctttcatattctgaaccttttcttcccatccat

SEQ ID NO: 115316 - DNA, 623 bp, Homo sapiens
  Payload ID: 2505
  Gene Symbol: CNOT8
  Gene Name: CCR4-NOT transcription complex, subunit 8
  ENST ID: ENST00000522458
  CDS Start-End: 261-623
ctagagagcaggcgagtcgggcggatcgggagcagatccggggtagagggaaaagagctccgggccaggggctgccgtcgccgccgtcggggagtcagcccgccagcccgccagctcgtcagcccgccagccagcgcttcgcgggccctgtcggtcccggtaagcgggcctgcgcttaccggaaagagatcagaccaaacattgtctggcttgcactgtaaaactagttagctgaagacgacttctcaggtttcttcaggatgcctgcagcacttgtggagaatagccaggttatctgtgaagtgtgggccagtaatctagaagaagagatgaggaagatccgagaaatcgtgctcagttacagttatattgccatggacacagaatttccaggtgttgtggtgcgaccaattggtgaatttcgtagttccatagattaccaatatcagcttctgcggtgcaatgttgaccttttaaaaattatccagctgggccttacattcacaaatgagaagggagagtatccttctggaatcaatacttggcagttcaatttcaaatttaaccttactggctatgattttggctatatggtaaagttgcttacagattctcgtttgcca

SEQ ID NO: 115317 - DNA, 862 bp, Homo sapiens
  Payload ID: 2505
  Gene Symbol: CNOT8
  Gene Name: CCR4-NOT transcription complex, subunit 8
  Uniprot ID: Q9UFF9
  ENST ID: ENST00000523698
  CDS Start-End: 285-845
aaagaggaccaaaatggaggagtaagaatcatgattaaattgagcgagcgcaactaatcacgcgaagagggccgcaggcgggccgtcttccgcaagcgtgcttccaggcctccactccccacctattcggcggcaccctgttacttctgctcctgcgcgctgcttcccgcgacctcacaggcagagcgaacacgcacggagtcgcaggggcgcgcaaagggggaggagcgggcgtgaccaggcgcgcgcgcgcgtctggagtgactctagagagcagagaggacatgtactcccaggattccatagatctccttgctaactcaggactacagtttcagaagcatgaagaggaagggattgacacactgcactttgcagagctgcttatgacatcaggagtggttctctgtgacaatgtcaaatggctttcatttcatagtggctatgattttggctatatggtaaagttgcttacagattctcgtttgccagaagaggaacatgaattctttcatattctgaaccttttcttcccatccatttatgatgtgaaatacctgatgaagagctgcaaaaatcttaagggaggtcttcaggaagttgctgatcagttggatttgcagaggattggaaggcagcaccaggcaggctcagactcactgctgacaggaatggctttctttaggatgaaagagttgttttttgaggacagcattgatgatgccaagtactgtgggcggctctatggcttaggcacaggagtggcccagaagcagaatgaggatgtggactctgcccaggagaagatgagcatcctggcgattatcaacaacatgcagcagtgatggcgccaggctctgca

SEQ ID NO: 115318 - DNA, 1027 bp, Homo sapiens
  Payload ID: 2505
  Gene Symbol: CNOT8
  Gene Name: CCR4-NOT transcription complex, subunit 8
  ENST ID: ENST00000522644
  CDS Start-End: 201-554
gccgccgtcggggagtcagcccgccagcccgccagctcgtcagcccgccagccagcgcttcgcgggccctgtcggtcccggtaagcgggcctgcgcttaccggaaagaggagcgtaagatgaaagagtatcagaccaaacattgtctggcttgcactgtaaaactagttagctgaagacgacttctcaggtttcttcaggatgcctgcagcacttgtggagaatagccaggttatctgtgaagtgtgggccagtaatctagaagaagagatgaggaagatccgagaaatcgtgctcagttacagttatattgccatggacacagaatttccaggtgttgtggtgcgaccaattggtgaatttcgtagttccatagattaccaatatcagcttctgcggtgcaatgttgaccttttaaaaattatccagctgggccttacattcacaaatgagaagggagagtatccttctggaatcaatacttggcagttcaatttcaaatttaaccttacatataagaaagaaaaagtcaacaataatacatgtgttgcttgagctaaaagacataggagaacagacaacacatacccattacatttctaggaaatacgagagaggacatgtactcccaggattccatagatctccttgctaactcaggactacagtttcagaagcatgaagaggaagggattgacacactgcactttgcagagctgcttatgacatcaggagtggttctctgtgacaatgtcaaatggctttcatttcatagtggctatgattttggctatatggtaaagttgcttacagattctcgtttgccagaagaggaacatgaattctttcatattctgaaccttttcttcccatccatttatgatgtgaaatacctgatgaagagctgcaaaaatcttaagggaggtcttcaggaagttgctgatcagttggatttgcagaggattggaaggcagcaccaggcaggctcagactcactgctgacaggaatggctttctttaggatgaaa

SEQ ID NO: 115319 - DNA, 1068 bp, Homo sapiens
  Payload ID: 2505
  Gene Symbol: CNOT8
  Gene Name: CCR4-NOT transcription complex, subunit 8
  ENST ID: ENST00000521729
  CDS Start-End: 236-394
agagggaaaagagctccgggccaggggctgccgtcgccgccgtcggggagtcagcccgccagcccgccagctcgtcagcccgccagccagcgcttcgcgggccctgtcggtcccggtaagcgggcctgcgcttaccggaaagaggagcgtaagatgaaagagtatcagaccaaacattgtctggcttgcactgtaaaactagttagctgaagacgacttctcaggtttcttcaggatgcctgcagcacttgtggagaatagccaggttatctgtgaagtgtgggccagtaatctagaagaagagatgaggaagatccgagaaatcgtgctcagttacagttatattgccatgagaggacatgtactcccaggattccatagatctccttgctaactcaggactacagtttcagaagcatgaagaggaagggattgacacactgcactttgcagagctgcttatgacatcaggagtggttctctgtgacaatgtcaaatggctttcatttcatagtggctatgattttggctatatggtaaagttgcttacagattctcgtttgccagaagaggaacatgaattctttcatattctgaaccttttcttcccatccatttatgatgtgaaatacctgatgaagagctgcaaaaatcttaagggaggtcttcaggaagttgctgatcagttggatttgcagaggattggaaggcagcaccaggcaggctcagactcactgctgacaggaatggctttctttaggatgaaagagttgttttttgaggacagcattgatgatgccaagtactgtgggcggctctatggcttaggcacaggagtggcccagaagcagaatgaggatgtggactctgcccaggagaagatgagcatcctggcgattatcaacaacatgcagcagtgatggcgccaggctctgcagggtgggcctgatcccagagtggtgcttactgtgctgactgtgtacttatcttccccaagagaaaatgcttcttttgagcacactgtacctaccatctgcattgagcagaaagacttttgttttactgaag

SEQ ID NO: 115320 - DNA, 500 bp, Homo sapiens
  Payload ID: 2505
  Gene Symbol: CNOT8
  Gene Name: CCR4-NOT transcription complex, subunit 8
  ENST ID: ENST00000519394
  CDS Start-End: 231-500
agagggaaaagagctccgggccaggggctgccgtcgccgccgtcggggagtcagcccgccagcccgccagctcgtcagcccgccagccagcgcttcgcgggccctgtcggtcccggtaagcgggcctgcgcttaccggaaagaggagcgtaagatgaaagagtaccaaacattgtctggcttgcactgtaaaactagttagctgaagacgacttctcaggtttcttcaggatgcctgcagcacttgtggagaatagccaggttatctgtgaagtgtgggccagtaatctagaagaagagatgaggaagatccgagaaatcgtgctcagttacagttatattgccatggacacagaatttccaggtgttgtggtgcgaccaattggtgaatttcgtagttccatagattaccaatatcagcttctgcggtgcaatgttgaccttttaaaaattatccagctgggccttacattcacaaatgagaagggagagtatccttct

SEQ ID NO: 115321 - DNA, 620 bp, Homo sapiens
  Payload ID: 2505
  Gene Symbol: CNOT8
  Gene Name: CCR4-NOT transcription complex, subunit 8
  ENST ID: ENST00000519211
  CDS Start-End: 265-620
gtgaccaggcgcgcgcgcgcgtctggagtgactctagagagcaggcgagtcgggcggatcgggagcagatccggggtagagggaaaagagctccgggccaggggctgccgtcgccgccgtcggggagtcagcccgccagcccgccagctcgtcagcccgccagccagcgcttcgcgggccctgtcggtcccgatcagaccaaacattgtctggcttgcactgtaaaactagttagctgaagacgacttctcaggtttcttcaggatgcctgcagcacttgtggagaatagccaggttatctgtgaagtgtgggccagtaatctagaagaagagatgaggaagatccgagaaatcgtgctcagttacagttatattgccatggacacagaatttccaggtgttgtggtgcgaccaattggtgaatttcgtagttccatagattaccaatatcagcttctgcggtgcaatgttgaccttttaaaaattatccagctgggccttacattcacaaatgagaagggagagtatccttctggaatcaatacttggcagttcaatttcaaatttaaccttacagaggacatgtactcccaggattccatagatctccttgctaactc

SEQ ID NO: 115322 - DNA, 562 bp, Homo sapiens
  Payload ID: 2505
  Gene Symbol: CNOT8
  Gene Name: CCR4-NOT transcription complex, subunit 8
  ENST ID: ENST00000519430
  CDS Start-End: 396-562
tcgttcggttctaggagcagatccggggtagagggaaaagagctccgggccaggggctgccgtcgccgccgtcggggagtcagcccgccagcccgccagctcgtcagcccgccagccagcgcttcgcgggccctgtcggtcccggccttgattgcttgcagagaaaactttcctgtggctttatcattagttgcccttcagagctttcctgtgtaaataagaagctatgttttggagaagtttacaccgtagatgaacgggagcgatctgaacatactgcactgcaggtcaacacagagcagggacttcagtaattcataggtatcagaccaaacattgtctggcttgcactgtaaaactagttagctgaagacgacttctcaggtttcttcaggatgcctgcagcacttgtggagaatagccaggttatctgtgaagtgtgggccagtaatctagaagaagagatgaggaagatccgagaaatcgtgctcagttacagttatattgccatggacacagaatttccaggtgttgtggtgcgaccaattggtgaatttcgtag

SEQ ID NO: 115323 - DNA, 920 bp, Homo sapiens
  Payload ID: 2505
  Gene Symbol: CNOT8
  Gene Name: CCR4-NOT transcription complex, subunit 8
  ENST ID: ENST00000518775
  CDS Start-End: 245-920
aagagctccgggccaggggctgccgtcgccgccgtcggggagtcagcccgccagcccgccagctcgtcagcccgccagccagcgcttcgcgggccctgtcggtcccggtaagcgggcctgcgcttaccggaaagaggagcgtaagatgaaagagtgtgagagaccattggggatcagaccaaacattgtctggcttgcactgtaaaactagttagctgaagacgacttctcaggtttcttcaggatgcctgcagcacttgtggagaatagccaggttatctgtgaagtgtgggccagtaatctagaagaagagatgaggaagatccgagaaatcgtgctcagttacagttatattgccatggacacagaatttccaggtgttgtggtgcgaccaattggtgaatttcgtagttccatagattaccaatatcagcttctgcggtgcaatgttgaccttttaaaaattatccagctgggccttacattcacaaatgagaagggagagtatccttctggaatcaatacttggcagttcaatttcaaatttaaccttactggctatgattttggctatatggtaaagttgcttacagattctcgtttgccagaagaggaacatgaattctttcatattctgaaccttttcttcccatccatttatgatgtgaaatacctgatgaagagctgcaaaaatcttaagggaggtcttcaggaagttgctgatcagttggatttgcagaggattggaaggcagcaccaggcaggctcagactcactgctgacaggaatggctttctttaggatgaaagagttgttttttgaggacagcattgatgatgccaagtactgtgggcggctctatggcttaggcacaggagtggcccagaagcagaatgaggatgtggactctgcccaggaga

SEQ ID NO: 115324 - DNA, 904 bp, Homo sapiens
  Payload ID: 2505
  Gene Symbol: CNOT8
  Gene Name: CCR4-NOT transcription complex, subunit 8
  ENST ID: ENST00000524105
  CDS Start-End: 444-830
atcgggtgggtagagtggtgccgtccggttgtttggtgggaggcacgtaagaccgctctgggcacgggggcgctcacctcactggctcgttcggttctaggagcagatccggggtagagggaaaagagctccgggccaggggctgccgtcgccgccgtcggggagtcagcccgccagcccgccagctcgtcagcccgccagccagcgcttcgcgggccctgtcggtcccggacacagaatttccaggtgttgtggtgcgaccaattggtgaatttcgtagttccatagattaccaatatcagcttctgcggtgcaatgttgaccttttaaaaattatccagctgggccttacattcacaaatgagaagggagagtatccttctggaatcaatacttggcagttcaatttcaaatttaaccttactggctatgattttggctatatggtaaagttgcttacagattctcgtttgccagaagaggaacatgaattctttcatattctgaaccttttcttcccatccatttatgatgtgaaatacctgatgaagagctgcaaaaatcttaagggaggtcttcaggaagttgctgatcagttggatttgcagaggattggaaggcagcaccaggcaggctcagactcactgctgacaggaatggctttctttaggatgaaagagttgttttttgaggacagcattgatgatgccaagtactgtgggcggctctatggcttaggcacaggagtggcccagaagcagaatgaggatgtggactctgcccaggagaagatgagcatcctggcgattatcaacaacatgcagcagtgatggcgccaggctctgcagggtgggcctgatcccagagtggtgcttactgtgctgactgtgtacttatcttcccc

SEQ ID NO: 115325 - DNA, 516 bp, Homo sapiens
  Payload ID: 2505
  Gene Symbol: CNOT8
  Gene Name: CCR4-NOT transcription complex, subunit 8
  ENST ID: ENST00000518028
  CDS Start-End: 351-516
ctaggagcagatccggggtagagggaaaagagctccgggccaggggctgccgtcgccgccgtcggggagtcagcccgccagcccgccagctcgtcagcccgccagccagcgcttcgcgggccctgtcggtcccgttcttgcggccccataactttttcttggtgttctatggctttatgaatggaggagccaactcacagacctgggccattcgggtggttttaagaagtttgaactgcggttcaatccagggcagtgccttgagacactgtttggagatcagaccaaacattgtctggcttgcactgtaaaactagttagctgaagacgacttctcaggtttcttcaggatgcctgcagcacttgtggagaatagccaggttatctgtgaagtgtgggccagtaatctagaagaagagatgaggaagatccgagaaatcgtgctcagttacagttatattgccatggacacagaatttccaggtgttgtggtgcgaccaattggtgaatttcgta

SEQ ID NO: 115326 - DNA, 1151 bp, Homo sapiens
  Payload ID: 2505
  Gene Symbol: CNOT8
  Gene Name: CCR4-NOT transcription complex, subunit 8
  Uniprot ID: Q9UFF9
  ENST ID: ENST00000521583
  CDS Start-End: 445-1005
gttcggttctaggagcagatccggggtagagggaaaagagctccgggccaggggctgccgtcgccgccgtcggggagtcagcccgccagcccgccagctcgtcagcccgccagccagcgcttcgcgggccctgtcggtcccggacacagaatttccaggtgttgtggtgcgaccaattggtgaatttcgtagttccatagattaccaatatcagcttctgcggtgcaatgttgaccttttaaaaattatccagctgggccttacattcacaaatgagaagggagagtatccttctggaatcaatacttggcagttcaatttcaaatttaaccttacatataagaaagaaaaagtcaacaataatacatgtgttgcttgagctaaaagacataggagaacagacaacacatacccattacatttctaggaaatacgagagaggacatgtactcccaggattccatagatctccttgctaactcaggactacagtttcagaagcatgaagaggaagggattgacacactgcactttgcagagctgcttatgacatcaggagtggttctctgtgacaatgtcaaatggctttcatttcatagtggctatgattttggctatatggtaaagttgcttacagattctcgtttgccagaagaggaacatgaattctttcatattctgaaccttttcttcccatccatttatgatgtgaaatacctgatgaagagctgcaaaaatcttaagggaggtcttcaggaagttgctgatcagttggatttgcagaggattggaaggcagcaccaggcaggctcagactcactgctgacaggaatggctttctttaggatgaaagagttgttttttgaggacagcattgatgatgccaagtactgtgggcggctctatggcttaggcacaggagtggcccagaagcagaatgaggatgtggactctgcccaggagaagatgagcatcctggcgattatcaacaacatgcagcagtgatggcgccaggctctgcagggtgggcctgatcccagagtggtgcttactgtgctgactgtgtacttatcttccccaagagaaaatgcttcttttgagcacactgtacctaccatctgcattgagcagaaagacttttgttttactga

SEQ ID NO: 115327 - DNA, 912 bp, Homo sapiens
  Payload ID: 2505
  Gene Symbol: CNOT8
  Gene Name: CCR4-NOT transcription complex, subunit 8
  ENST ID: ENST00000520472
  CDS Start-End: 515-912
atggaggagtaagaatcatgattaaattgagcgagcgcaactaatcacgcgaagagggccgcaggcgggccgtcttccgcaagcgtgcttccaggcctccactccccacctattcggcggcaccctgttacttctgctcctgcgcgctgcttcccgcgacctcacaggcagagcgaacacgcacggagtcgcaggggcgcgcaaagggggaggagcgggcgtgaccaggcgcgcgcgcgcgtctggagtgactctagagagcaggagcagatccggggtagagggaaaagagctccgggccaggggctgccgtcgccgccgtcggggagtcagcccgccagcccgccagctcgtcagcccgccagccagcgcttcgcgggccctgtcggtcccggtaagcgggcctgcgcttaccggaaagaggagcgtaagatgaaagagtatcagaccaaacattgtctggcttgcactgtaaaactagttagctgaagacgacttctcaggtttcttcaggatgcctgcagcacttgtggagaatagccaggttatctgtgaagtgtgggccagtaatctagaagaagagatgaggaagatccgagaaatcgtgctcagttacagttatattgccatggacacagaatttccaggtgttgtggtgcgaccaattggtgaatttcgtagttccatagattaccaatatcagcttctgcggtgcaatgttgaccttttaaaaattatccagctgggccttacattcacaaatgagaagggagagtatccttctggaatcaatacttggcagttcaatttcaaatttaaccttacagaggacatgtactcccaggattccatagatctccttgctaactcaggactacagtttcagaagcatgaagaggaagggattgacac

SEQ ID NO: 115328 - DNA, 2708 bp, Homo sapiens
  Payload ID: 2505
  Gene Symbol: CNOT8
  Gene Name: CCR4-NOT transcription complex, subunit 8
  Uniprot ID: Q9UFF9
  ENST ID: ENST00000517876
  CDS Start-End: 477-1355
gaggaccaaaatggaggagtaagaatcatgattaaattgagcgagcgcaactaatcacgcgaagagggccgcaggcgggccgtcttccgcaagcgtgcttccaggcctccactccccacctattcggcggcaccctgttacttctgctcctgcgcgctgcttcccgcgacctcacaggcagagcgaacacgcacggagtcgcaggggcgcgcaaagggggaggagcgggcgtgaccaggcgcgcgcgcgcgtctggagtgactctagagagcaggagcagatccggggtagagggaaaagagctccgggccaggggctgccgtcgccgccgtcggggagtcagcccgccagcccgccagctcgtcagcccgccagccagcgcttcgcgggccctgtcggtcccgatcagaccaaacattgtctggcttgcactgtaaaactagttagctgaagacgacttctcaggtttcttcaggatgcctgcagcacttgtggagaatagccaggttatctgtgaagtgtgggccagtaatctagaagaagagatgaggaagatccgagaaatcgtgctcagttacagttatattgccatggacacagaatttccaggtgttgtggtgcgaccaattggtgaatttcgtagttccatagattaccaatatcagcttctgcggtgcaatgttgaccttttaaaaattatccagctgggccttacattcacaaatgagaagggagagtatccttctggaatcaatacttggcagttcaatttcaaatttaaccttacagaggacatgtactcccaggattccatagatctccttgctaactcaggactacagtttcagaagcatgaagaggaagggattgacacactgcactttgcagagctgcttatgacatcaggagtggttctctgtgacaatgtcaaatggctttcatttcatagtggctatgattttggctatatggtaaagttgcttacagattctcgtttgccagaagaggaacatgaattctttcatattctgaaccttttcttcccatccatttatgatgtgaaatacctgatgaagagctgcaaaaatcttaagggaggtcttcaggaagttgctgatcagttggatttgcagaggattggaaggcagcaccaggcaggctcagactcactgctgacaggaatggctttctttaggatgaaagagttgttttttgaggacagcattgatgatgccaagtactgtgggcggctctatggcttaggcacaggagtggcccagaagcagaatgaggatgtggactctgcccaggagaagatgagcatcctggcgattatcaacaacatgcagcagtgatggcgccaggctctgcagggtgggcctgatcccagagtggtgcttactgtgctgactgtgtacttatcttccccaagagaaaatgcttcttttgagcacactgtacctaccatctgcattgagcagaaagacttttgttttactgaagacaaaagatgtttttattttagacccagaagagaggagtttgctctgaatttgtaaataagtcttccccattcctcatactcgagcctctcctctctggttgcctcctgccaccagcatccatggctcatttgacacctttttaaatatcaggacaagtctgaaacaaagtagtaaaatgtatataactcttacctgttgtcattctttttcttttaaatttgttgctaatctctgataatgaagattcttactctgattctcagctgagctgtgagggcttccagggaaaatggaacaaaatggtgttcttaggtaatgggttgtagatactgagtcttcctttccttttctgacccttctcgaggacatttgctttcctcacacttttgtagtctctctttacatattactatatggaaatgaattgctctgtgctgaaatttgaagaccagataatgaaactgaaaagcaaacaattttactgaatctgtctacccttcattcatgagaactccagaatgagtgttgaccactgaagcatcttttaagtctgtgttccattgtgccattcaggtttgctgtcacatatgcatcatctgaaatcatttgaaatttttgtacaataaaatatcctggatttgatcctgaaggaaactagtaagatcagatttttgggtcatgtctgttgtattttcagtaatgtgatttcagatggtcatctggattctcccacttctctactccattatttctctacttttccttccagcaaacctgaaacgtgagggagatggattaatgtgagtaacaggaatgtgtctttaaaaagctagagtggttacatttaatcaggcagtaagataatttgggttcttgagttgttttggagtaatatcccacaactggggtaggaagctcaggacttttttctttaaagctagtcatttcaaaagcatattgtatttttttgaatgactacagtatggacaatttcaaaaaccaaaacccactttggattggtggaagtaaaaactggtaactcactcaagtgaatgaatggtcttgcattttaaaagcttatgggaaactcaatttgaaatgattagaaaatgtcaagtattataagctggtatttaagatgcttgtaaatactatttatgtttttaattttgtaaaataaagatttctttttaaccactggca

SEQ ID NO: 115329 - DNA, 945 bp, Homo sapiens
  Payload ID: 2505
  Gene Symbol: CNOT8
  Gene Name: CCR4-NOT transcription complex, subunit 8
  Uniprot ID: Q9UFF9
  ENST ID: ENST00000519404
  CDS Start-End: 190-906
gtagagggaaaagagctccgggccaggggctgccgtcgccgccgtcggggagtcagcccgccagcccgccagctcgtcagcccgccagccagcgcttcgcgggccctgtcggtcccgatcagaccaaacattgtctggcttgcactgtaaaactagttagctgaagacgacttctcaggtttcttcaggatgcctgcagcacttgtggagaatagccaggttatctgtgaagtgtgggccagtaatctagaagaagagatgaggaagatccgagaaatcgtgctcagttacagttatattgccatggacacagaatttccaggtgttgtggtgcgaccaattggtgaatttcgtagttccatagattaccaatatcagcttctgcggtgcaatgttgaccttttaaaaattatccagctgggccttacattcacaaatgagaagggagagtatccttctggaatcaatacttggcagttcaatttcaaatttaaccttactggctatgattttggctatatggtaaagttgcttacagattctcgtttgccagaagaggaacatgaattctttcatattctgaaccttttcttcccatccatttatgatgtgaaatacctgatgaagagctgcaaaaatcttaagggaggtcttcaggaagttgctgatcagttggatttgcagaggattggaaggcagcaccaggcaggctcagactcactgctgacaggaatggctttctttaggatgaaagagttgttttttgaggacagcattgatgatgccaagtactgtgggcggctctatggcttaggcacaggagtggcccagaagcagaatgaggatgtggactctgcccaggagaagatgagcatcctggcgattatcaacaacatgcagcagtgatggcgccaggctctgcagggtgggcctgatcccagagtg

SEQ ID NO: 115330 - DNA, 1158 bp, Homo sapiens
  Payload ID: 2505
  Gene Symbol: CNOT8
  Gene Name: CCR4-NOT transcription complex, subunit 8
  Uniprot ID: Q9UFF9
  ENST ID: ENST00000521450
  CDS Start-End: 165-725
agagagcaggcgagtcgggcggatcgggagcagatccggggtagagggaaaagagctccgggccaggggctgccgtcgccgccgtcggggagtcagcccgccagcccgccagctcgtcagcccgccagccagcgcttcgcgggccctgtcggtcccgagaggacatgtactcccaggattccatagatctccttgctaactcaggactacagtttcagaagcatgaagaggaagggattgacacactgcactttgcagagctgcttatgacatcaggagtggttctctgtgacaatgtcaaatggctttcatttcatagtggctatgattttggctatatggtaaagttgcttacagattctcgtttgccagaagaggaacatgaattctttcatattctgaaccttttcttcccatccatttatgatgtgaaatacctgatgaagagctgcaaaaatcttaagggaggtcttcaggaagttgctgatcagttggatttgcagaggattggaaggcagcaccaggcaggctcagactcactgctgacaggaatggctttctttaggatgaaagagttgttttttgaggacagcattgatgatgccaagtactgtgggcggctctatggcttaggcacaggagtggcccagaagcagaatgaggatgtggactctgcccaggagaagatgagcatcctggcgattatcaacaacatgcagcagtgatggcgccaggctctgcagggtgggcctgatcccagagtggtgcttactgtgctgactgtgtacttatcttccccaagagaaaatgcttcttttgagcacactgtacctaccatctgcattgagcagaaagacttttgttttactgaagacaaaagatgtttttattttagacccagaagagaggagtttgctctgaatttgtaaataagtcttccccattcctcatactcgagcctctcctctctggttgcctcctgccaccagcatccatggctcatttgacacctttttaaatatcaggacaagtctgaaacaaagtagtaaaatgtatataactcttacctgttgtcattctttttcttttaaatttgttgctaatctctgataatgaagattcttactctgattctcagctgagctgtgagggcttcca

SEQ ID NO: 115331 - DNA, 2885 bp, Homo sapiens
  Payload ID: 2506
  Gene Symbol: CCZ1B
  Gene Name: CCZ1 homolog B, vacuolar protein trafficking and biogenesis associated
  Uniprot ID: P86790
  ENST ID: ENST00000316731
  CDS Start-End: 574-2022
caacaggctgggcggtggtgtctcacgcctgtaatcggagcactttgggaggccgaagtgggagaccatttgaggccaggagttcgagagcagcctgggcaacacagaccccacctctacaaaaaaataaaactggccttggtggcgcgcgcctgtaatcctagctacttgggaggctgaggcagggggattgcttgagtgtcggacgttgaggctgcagtgagctgagatcgcgccactacactccagcctggatgacaaactgagaccctatcagaaaaaacaacaacaacaaaaaaacagtgcccgctcggtttttcctgaaacgcgcagccctcgcctgtagccaggagaaaactccgcgagccagcaaaacacaaactcggccaggaaacagacaacaaggccacccgggggtgcctgaagaggacgctgcgaggcggattctttttccgggcctgcggcgagtgcttccggggcggtggcgacggaggcggaagtgcggtgttttagccggtggctgctgtctctgggcgggccgtgggaggctcccgaggtgggggccggggcgggatggctgcagcggcggccggggccgggagcgggccctgggcggcccaggagaagcagttcccgccggcgctgctgagtttcttcatctacaacccgcgcttcgggccgcgcgaaggacaggaggaaaataagattttattttatcatccaaatgaggtagaaaagaatgagaagattagaaatgtcggattgtgtgaagctattgtacagtttacaaggacatttagcccatcaaaacctgcaaaatctttacatacacagaagaacagacagttcttcaatgaaccagaagaaaatttctggatggtcatggttgttcggaatcctataattgaaaaacagagtaaagatggaaaaccagttattgaatatcaagaggaggagttgttggacaaggtttatagctcggtgctgcggcagtgctacagcatgtacaagctttttaatggtacatttctgaaagccatggaagacggaggcgtcaagcttctgaaagaaagattagagaaattcttccatcggtatttgcaaacgctacatttgcagtcatgtgacctacttgacatttttggtggaatcagcttcttcccgttggataaaatgacttatttgaaaatccagtcctttattaatagaatggaggaaagcctgaatatagtcaaatacactgcttttctctataacgatcagctcatctggagtggattagaacaagatgacatgagaattttatacaaataccttaccacctcccttttcccaaggcacatcgaacctgagttagcaggaagggattctccaataagagcagaaatgccaggaaatcttcaacactatggaagatttcttaccggacccttgaacctcaatgatccagatgcaaaatgcagattccccaaaatttttgtaaatacagatgacacttatgaagagctccatttaatcgtttataaggccatgagtgcggctgtgtgctttatgatcgacgcctctgtccacccaacgttggatttttgccgaagactggacagcatcgttgggccccagctcacagtgctggcctctgacatctgtgaacagtttaacatcaacaagaggatgtctgggtctgagaaagaaccccagtttaagtttatctacttcaaccacatgaatctcgccgagaagagcacagttcacatgaggaaaacgcccagcgtgtcgctcacttccgtgcacccggatttaatgaagattctcggtgacatcaacagtgactttaccagagtggatgaagatgaggagatcattgtgaaggccatgagtgattactgggttgttggaaagaagtctgatcggcgggagctctatgttattttgaatcaaaaaaatgcaaacctgattgaagtaaatgaagaggtcaagaaactttgtgcaacgcagttcaacaacatcttcttcttggattgacggatgacggctcaccgagagcatatctaaaaaacactctgcaaacatttggtcacatgcaagttagtggtcatatgacggactgcattcaggacaagggtaaagcaatacttgctttgaagaatcagatttcgactcggtctgctgatctgaggtttttagattttaaatatttatgtggaattaattaaaggtagttggctatatcgctatcatttcattcttttgacattatttgaatattttactggaaaataagactaataaattgttaaaagtttttaaaattctggtttggtgttgagtctctctcctgctgcctatttatagattacactggccaccagctccgtgacccaggctggaatgcaatggctcactgcagcctcaacctcctgagctcaagcaatcctcccacctcagcctcccaagaagctagaaccacatgtacacaccaccacggtcggctgatgttttaattttgcagagatgggggggtctcactatgttgcccaggctggtctcgaactcccgtaatccagccatgtaggaaacctgagatgcagtgggccaaggggtatgttaaaacactgtgacgagttcagtgctaagaactgtaatgctcaggaaatcttacagcacgtgccatcctaagcctgtgtgtgtgtcctcgtgtctctctactttttcttcttcttgctggtgatggtcttgctggatggggacacggtcacatcctccttgggagggtccagtatgaggtgagaggatgacacgtctgccggctccttgagcactgtgatgtccacctcatagtcatgtctcttggcctcttcctctctcaagataaagatgttcagcct

SEQ ID NO: 115332 - DNA, 571 bp, Homo sapiens
  Payload ID: 2506
  Gene Symbol: CCZ1B
  Gene Name: CCZ1 homolog B, vacuolar protein trafficking and biogenesis associated
  ENST ID: ENST00000411858
  CDS Start-End: 47-283
ctctgggcgggccgtgggaggctcccgaggtgggggccggggcgggatggctgcagcggcggccggggccgggagcgggccctgggcggcccaggagaagcagttcccgccggcgctgctgagtttcttcatctacaacccgcgcttcgggccgcgcgaaggacaggaggaaaataagattttattttatcatccaaatgaggtagaaaagaatgagaagattagaaatgtcggattgtgtgaagctattgtacagtttacaaggttgttcggaatcctataattgaaaaacagagtaaagatggaaaaccagttattgaatatcaagaggaggagttgttggacaaggtttatagctcggtgctgcggcagtgctacagcatgtacaagctttttaatggtacatttctgaaagccatggaagacggaggcgtcaagcttctgaaagaaagattagagaaattcttccatcgggagtggattagaacaagatgacatgagaattttatacaaataccttaccacctcccttttcccaaggcacatcgaacctgagttagcaggaagggat

SEQ ID NO: 115333 - DNA, 2211 bp, Homo sapiens
  Payload ID: 2506
  Gene Symbol: CCZ1B
  Gene Name: CCZ1 homolog B, vacuolar protein trafficking and biogenesis associated
  ENST ID: ENST00000626257
  CDS Start-End: 574-810
caacaggctgggcggtggtgtctcacgcctgtaatcggagcactttgggaggccgaagtgggagaccatttgaggccaggagttcgagagcagcctgggcaacacagaccccacctctacaaaaaaataaaactggccttggtggcgcgcgcctgtaatcctagctacttgggaggctgaggcagggggattgcttgagtgtcggacgttgaggctgcagtgagctgagatcgcgccactacactccagcctggatgacaaactgagaccctatcagaaaaaacaacaacaacaaaaaaacagtgcccgctcggtttttcctgaaacgcgcagccctcgcctgtagccaggagaaaactccgcgagccagcaaaacacaaactcggccaggaaacagacaacaaggccacccgggggtgcctgaagaggacgctgcgaggcggattctttttccgggcctgcggcgagtgcttccggggcggtggcgacggaggcggaagtgcggtgttttagccggtggctgctgtctctgggcgggccgtgggaggctcccgaggtgggggccggggcgggatggctgcagcggcggccggggccgggagcgggccctgggcggcccaggagaagcagttcccgccggcgctgctgagtttcttcatctacaacccgcgcttcgggccgcgcgaaggacaggaggaaaataagattttattttatcatccaaatgaggtagaaaagaatgagaagattagaaatgtcggattgtgtgaagctattgtacagtttacaaggttgttcggaatcctataattgaaaaacagagtaaagatggaaaaccagttattgaatatcaagaggaggagttgttggacaaggtttatagctcggtgctgcggcagtgctacagcatgtacaagctttttaatggtacatttctgaaagccatggaagacggaggcgtcaagcttctgaaagaaagattagagaaattcttccatcggtatttgcaaacgctacatttgcagtcatgtgacctacttgacatttttggtggaatcagcttcttcccgttggataaaatgacttatttgaaaatccagtcctttattaatagaatggaggaaagcctgaatatagtcaaatacactgcttttctctataacgatcagctcatctggagtggattagaacaagatgacatgagaattttatacaaataccttaccacctcccttttcccaaggcacatcgaacctgagttagcaggaagggattctccaataagagcagaaatgccaggaaatcttcaacactatggaagatttcttaccggacccttgaacctcaatgatccagatgcaaaatgcagattccccaaaatttttgtaaatacagatgacacttatgaagagctccatttaatcgtttataaggccatgagtgcggctgtgtgctttatgatcgacgcctctgtccacccaacgttggatttttgccgaagactggacagcatcgttgggccccagctcacagtgctggcctctgacatctgtgaacagtttaacatcaacaagaggatgtctgggtctgagaaagaaccccagtttaagtttatctacttcaaccacatgaatctcgccgagaagagcacagttcacatgaggaaaacgcccagcgtgtcgctcacttccgtgcacccggatttaatgaagattctcggtgacatcaacagtgactttaccagagtggatgaagatgaggagatcattgtgaaggccatgagtgattactgggttgttggaaagaagtctgatcggcgggagctctatgttattttgaatcaaaaaaatgcaaacctgattgaagtaaatgaagaggtcaagaaactttgtgcaacgcagttcaacaacatcttcttcttggattgacggatgacggctcaccgagagcatatctaaaaaacactctgcaaacatttggtcacatgcaagttagtggtcatatgacggactgcattcaggacaagggtaaagcaatacttgctttgaagaatcagatttcgactcggtctgctgatctgaggtttttagattttaaatatttatgtggaattaattaaaggtagttggctatatcgctatcatttcattcttttgacattatttgaatattttactggaaaataagactaataaattgttaaaagttttt

SEQ ID NO: 115334 - DNA, 1802 bp, Homo sapiens
  Payload ID: 2507
  Gene Symbol: CCZ1
  Gene Name: CCZ1 homolog, vacuolar protein trafficking and biogenesis associated
  Uniprot ID: P86791
  ENST ID: ENST00000325974
  CDS Start-End: 67-1515
ttttagccggtggctgctgtctctgggcgggccgtgggaggctcccgaggtgggggccggggcgggatggctgcagcggcggccggggccgggagcgggccctgggcggcccaggagaagcagttcccgccggcgctgctgagtttcttcatctacaacccgcgcttcgggccgcgcgaaggacaggaggaaaataagattttattttatcatccaaatgaggtagaaaagaatgagaagattagaaatgtcggattgtgtgaagctattgtacagtttacaaggacatttagcccatcaaaacctgcaaaatctttacatacacagaagaacagacagttcttcaatgaaccagaagaaaatttctggatggtcatggttgttcggaatcctataattgaaaaacagagtaaagatggaaaaccagttattgaatatcaagaggaggagttgttggacaaggtttatagctcggtgctgcggcagtgctacagcatgtacaagctttttaatggtacatttctgaaagccatggaagacggaggcgtcaagcttctgaaagaaagattagagaaattcttccatcggtatttgcaaacgctacatttgcagtcatgtgacctacttgacatttttggtggaatcagcttcttcccgttggataaaatgacttatttgaaaatccagtcctttattaatagaatggaggaaagcctgaatatagtcaaatacactgcttttctctataacgatcagctcatctggagtggattagaacaagatgacatgagaattttatacaaataccttaccacctccctttttccaaggcacatcgaacctgagttagcaggaagggattctccaataagagcagaaatgccaggaaatcttcaacactatggaagatttcttaccggacccttgaacctcaatgatccagatgcaaaatgcagattccccaaaatttttgtaaatacagatgacacttatgaagagctccatttaatcgtttataaggccatgagtgcggctgtgtgctttatgatcgacgcctctgtccacccaacgttggatttttgccgaagactggacagcatcgttgggccccagctcacagtgctggcctctgacatctgtgaacagtttaacatcaacaagaggatgtccgggtctgagaaagaaccccagtttaagtttatctacttcaaccacatgaatctcgccgagaagagcacagttcacatgaggaaaacgcccagcgtgtcgctcacttccgtgcacccggatttaatgaagattctcggtgacatcaacagtgactttaccagagtggatgaagatgaggagatcattgtgaaggccatgagtgattactgggttgttggaaagaagtctgatcggcgggagctctatgttattttgaatcaaaaaaatgcaaacctgattgaagtaaatgaagaggtcaagaaactttgtgcaacgcagttcaacaacatcttcttcttggattgacggatgacggctcaccgagagcatatctaaaaaacactctgcaaacatttggtcacatgcaagttagtggtcatatgacggactgcattcaggacaagggtaaagcaatacttgctttgaagaatcacatttcgactcggtctgctgatctgaggtttttagattttaaatatttatgtggaattaattaaaggtagttggctatatcgctatcatttcattcttttgacattatgtgaatattttactggaaaataagactaataaattgttaaaagtttttaaaa

SEQ ID NO: 115335 - DNA, 2218 bp, Homo sapiens
  Payload ID: 2507
  Gene Symbol: CCZ1
  Gene Name: CCZ1 homolog, vacuolar protein trafficking and biogenesis associated
  ENST ID: ENST00000628813
  CDS Start-End: 1-237
atggctgcagcggcggccggggccgggagcgggccctgggcggcccaggagaagcagttcccgccggcgctgctgagtttcttcatctacaacccgcgcttcgggccgcgcgaaggacaggaggaaaataagattttattttatcatccaaatgaggtagaaaagaatgagaagattagaaatgtcggattgtgtgaagctattgtacagtttacaaggttgttcggaatcctataattgaaaaacagagtaaagatggaaaaccagttattgaatatcaagaggaggagttgttggacaaggtttatagctcggtgctgcggcagtgctacagcatgtacaagctttttaatggtacatttctgaaagccatggaagacggaggcgtcaagcttctgaaagaaagattagagaaattcttccatcggtatttgcaaacgctacatttgcagtcatgtgacctacttgacatttttggtggaatcagcttcttcccgttggataaaatgacttatttgaaaatccagtcctttattaatagaatggaggaaagcctgaatatagtcaaatacactgcttttctctataacgatcagctcatctggagtggattagaacaagatgacatgagaattttatacaaataccttaccacctccctttttccaaggcacatcgaacctgagttagcaggaagggattctccaataagagcagaaatgccaggaaatcttcaacactatggaagatttcttaccggacccttgaacctcaatgatccagatgcaaaatgcagattccccaaaatttttgtaaatacagatgacacttatgaagagctccatttaatcgtttataaggccatgagtgcggctgtgtgctttatgatcgacgcctctgtccacccaacgttggatttttgccgaagactggacagcatcgttgggccccagctcacagtgctggcctctgacatctgtgaacagtttaacatcaacaagaggatgtccgggtctgagaaagaaccccagtttaagtttatctacttcaaccacatgaatctcgccgagaagagcacagttcacatgaggaaaacgcccagcgtgtcgctcacttccgtgcacccggatttaatgaagattctcggtgacatcaacagtgactttaccagagtggatgaagatgaggagatcattgtgaaggccatgagtgattactgggttgttggaaagaagtctgatcggcgggagctctatgttattttgaatcaaaaaaatgcaaacctgattgaagtaaatgaagaggtcaagaaactttgtgcaacgcagttcaacaacatcttcttcttggattgacggatgacggctcaccgagagcatatctaaaaaacactctgcaaacatttggtcacatgcaagttagtggtcatatgacggactgcattcaggacaagggtaaagcaatacttgctttgaagaatcacatttcgactcggtctgctgatctgaggtttttagattttaaatatttatgtggaattaattaaaggtagttggctatatcgctatcatttcattcttttgacattatgtgaatattttactggaaaataagactaataaattgttaaaagtttttaaaattctggtttggtgttgagtctctctcctgctgcctatttatagattacactggccaccagctccgtgacccaggctggaatgcaatggctcactgcagcctcaacctcctgagctcaagcaatcctcccacctcagcctcccaagaagctagaaccacatgtacacaccaccacggtcggctgatgttttaattttgcagagatgggggggtctcactatgttgcccaggctggtctcgaactcccgtaatccagccatgtaggaaacctgagatgcagtgggccaaggggtatgttaaaacactgtgacgagttcagtgctaagaactgtaatgctcaggaaatcttacagcacgtgccatcctaagcctgtgtgtgtgtcctcgtgtctctctactttttcttcttcttgctggtgatggtcttgctggatggggacacggtcacatcctccttgggagggtccagtatgaggtgagaggatgacacgtctgccggctccttgagcactgtgatgtccacctcatagtcatgtctcttggcctcttcctctctcaagatgaagatgttcagcct

SEQ ID NO: 115336 - DNA, 3283 bp, Homo sapiens
  Payload ID: 2508
  Gene Symbol: CD101
  Gene Name: CD101 molecule
  Uniprot ID: Q93033
  ENST ID: ENST00000256652
  CDS Start-End: 69-3134
agcatttgtcactcaacctctgaatgttagtgacactattgggacgaaaaaggactgtgctggcccaaatggcaggcatctcatatgtggcatctttctttctccttctgactaagctcagcattggccagagagaagtaacagttcagaaaggaccactgtttagagctgaaggttacccagtcagcattggctgcaatgtaactggccaccagggaccttctgagcagcatttccagtggtctgtttacctgccgacaaacccgacccaggaagtccagatcattagcaccaaggatgctgccttctcttacgcagtatatacgcagcgggtgcgaagcggagacgtctacgtggagagggtccagggcaactcagtcttgttgcacatctcaaaactccagatgaaggatgctggcgagtatgagtgtcacacaccaaacactgatgagaaatactatggaagttacagtgcaaagactaatctaattgttattccagataccctctctgccaccatgagttctcagactctcggtaaggaggaaggtgagccattagccctcacctgtgaggcatccaaagccacagcccaacatactcacctctctgtcacctggtacctaacacaggatggaggaggaagccaagccactgagattatttctctctccaaagattttatattggtccctgggcccttgtatacagagcggtttgcagccagtgacgtacagctcaacaaactgggacccactacattcaggctgtccatagagaggctccagtcctcagatcagggtcagctgttctgtgaggcaacggaatggattcaggatccagatgaaacttggatgttcatcaccaaaaagcagaccgatcaaaccactctgaggatccagccagcagtgaaagattttcaagtcaacattacagctgacagcttgtttgctgaagggaaacccttagaactggtttgcctggttgtaagcagtggccgtgacccacagcttcaaggcatttggttcttcaatgggactgaaattgctcacattgatgctggtggagtcctgggcctgaagaatgactacaaagagagagcaagtcaaggagagctccaggtttcaaagttaggccccaaggctttctctctcaagatcttctctctgggcccagaggatgaaggcgcctacagatgtgtggtagcagaggtcatgaaaacacgcacaggttcctggcaggtgcttcagagaaagcagtcaccagacagccacgtgcacctgaggaagccagcagcaagaagtgtggtcatgtctaccaagaacaagcagcaagttgtgtgggaaggagagacactcgcctttctctgtaaggctggtggagctgaaagtcccctgtctgtgagctggtggcacatcccacgggaccagacacagcccgagtttgtggctggcatggggcaggatggcattgtgcagctgggtgcctcctatggggtacccagttaccatggcaacacaaggctggagaaaatggactgggccaccttccagctggagatcaccttcactgccatcacagacagtggcacatatgagtgcagagtatctgagaagtctcggaaccaggccagagatctgagctggactcagaagatttcagttactgtaaagtctctggagtcaagtttacaagttagtctgatgagccgtcagccgcaagtgatgttaaccaacacctttgacctgtcctgtgtcgtgagggccggttactctgacctcaaggtgccactcactgtgacgtggcagttccagccagctagctctcacatcttccaccagcttattcgaatcacccacaatggcactattgaatgggggaatttcctatcccggttccaaaagaagacgaaagtgtcgcagtctttatttcgttcacaactcctagtccatgatgccactgaggaagagacaggagtgtatcagtgtgaagtagaagtttatgacagaaattccctatacaacaaccgccccccgagggcttctgccatctctcacccactgaggatagccgtcactttaccagagagcaagctaaaagtgaattcaaggagtcaagtccaagagctctccatcaactccaacactgatatagaatgtagcatcttgtcccggtccaatggaaaccttcagttagccattatttggtatttttctcctgtttccactaatgcctcttggctaaagatcctggagatggaccaaaccaatgttataaaaactggggatgagtttcacaccccacagagaaaacaaaaatttcatactgagaaggtttcccaagacttatttcagctgcacattctgaatgtggaagacagcgatcggggcaaatatcactgtgctgtggaggaatggctcctgtctacaaatggcacttggcacaagcttggagaaaagaagtcaggactaacagaattgaaactcaagcccacaggaagtaaggtacgtgtctccaaagtgtactggaccgaaaatgtgactgagcacagagaagtggccatccgctgcagcctggagagtgtaggcagctcagccactctgtactctgtgatgtggtactggaacagagaaaactctggaagtaaattgctggtgcacttgcaacatgatggcttgctggagtatggggaagaggggctcaggaggcacctgcactgttaccgttcatcctctacagactttgtcctgaagcttcatcaggtggagatggaggatgcaggaatgtactggtgtagggtggcagagtggcagctccatggacacccaagcaagtggattaatcaagcatccgatgagtcacagcggatggtgctcacggtgctgccttcagagcccacgcttccttccaggatctgctcctcggcccctttactctatttcctgttcatctgtcccttcgtcctgctcctccttctgctcatctccctcctctgcttatactggaaggccaggaagttgtcaacactgcgttccaacacacggaaagaaaaagctctctgggtggacttgaaagaggctggaggtgtgaccacaaataggagggaagacgaggaggaagatgaaggcaactgaatcccaagaggcacctgcagccaggaaggaaaggtgggggctttttaattgggctaaccagggtgtgaatgaatcctggttctgtcctcaactatgtctgcggccttgggcaagttacctaggaatcagagggagcattcactgagtgc

SEQ ID NO: 115337 - DNA, 3324 bp, Homo sapiens
  Payload ID: 2508
  Gene Symbol: CD101
  Gene Name: CD101 molecule
  Uniprot ID: Q93033
  ENST ID: ENST00000369470
  CDS Start-End: 7-3072
gcccaaatggcaggcatctcatatgtggcatctttctttctccttctgactaagctcagcattggccagagagaagtaacagttcagaaaggaccactgtttagagctgaaggttacccagtcagcattggctgcaatgtaactggccaccagggaccttctgagcagcatttccagtggtctgtttacctgccgacaaacccgacccaggaagtccagatcattagcaccaaggatgctgccttctcttacgcagtatatacgcagcgggtgcgaagcggagacgtctacgtggagagggtccagggcaactcagtcttgttgcacatctcaaaactccagatgaaggatgctggcgagtatgagtgtcacacaccaaacactgatgagaaatactatggaagttacagtgcaaagactaatctaattgttattccagataccctctctgccaccatgagttctcagactctcggtaaggaggaaggtgagccattagccctcacctgtgaggcatccaaagccacagcccaacatactcacctctctgtcacctggtacctaacacaggatggaggaggaagccaagccactgagattatttctctctccaaagattttatattggtccctgggcccttgtatacagagcggtttgcagccagtgacgtacagctcaacaaactgggacccactacattcaggctgtccatagagaggctccagtcctcagatcagggtcagctgttctgtgaggcaacggaatggattcaggatccagatgaaacttggatgttcatcaccaaaaagcagaccgatcaaaccactctgaggatccagccagcagtgaaagattttcaagtcaacattacagctgacagcttgtttgctgaagggaaacccttagaactggtttgcctggttgtaagcagtggccgtgacccacagcttcaaggcatttggttcttcaatgggactgaaattgctcacattgatgctggtggagtcctgggcctgaagaatgactacaaagagagagcaagtcaaggagagctccaggtttcaaagttaggccccaaggctttctctctcaagatcttctctctgggcccagaggatgaaggcgcctacagatgtgtggtagcagaggtcatgaaaacacgcacaggttcctggcaggtgcttcagagaaagcagtcaccagacagccacgtgcacctgaggaagccagcagcaagaagtgtggtcatgtctaccaagaacaagcagcaagttgtgtgggaaggagagacactcgcctttctctgtaaggctggtggagctgaaagtcccctgtctgtgagctggtggcacatcccacgggaccagacacagcccgagtttgtggctggcatggggcaggatggcattgtgcagctgggtgcctcctatggggtacccagttaccatggcaacacaaggctggagaaaatggactgggccaccttccagctggagatcaccttcactgccatcacagacagtggcacatatgagtgcagagtatctgagaagtctcggaaccaggccagagatctgagctggactcagaagatttcagttactgtaaagtctctggagtcaagtttacaagttagtctgatgagccgtcagccgcaagtgatgttaaccaacacctttgacctgtcctgtgtcgtgagggccggttactctgacctcaaggtgccactcactgtgacgtggcagttccagccagctagctctcacatcttccaccagcttattcgaatcacccacaatggcactattgaatgggggaatttcctatcccggttccaaaagaagacgaaagtgtcgcagtctttatttcgttcacaactcctagtccatgatgccactgaggaagagacaggagtgtatcagtgtgaagtagaagtttatgacagaaattccctatacaacaaccgccccccgagggcttctgccatctctcacccactgaggatagccgtcactttaccagagagcaagctaaaagtgaattcaaggagtcaagtccaagagctctccatcaactccaacactgatatagaatgtagcatcttgtcccggtccaatggaaaccttcagttagccattatttggtatttttctcctgtttccactaatgcctcttggctaaagatcctggagatggaccaaaccaatgttataaaaactggggatgagtttcacaccccacagagaaaacaaaaatttcatactgagaaggtttcccaagacttatttcagctgcacattctgaatgtggaagacagcgatcggggcaaatatcactgtgctgtggaggaatggctcctgtctacaaatggcacttggcacaagcttggagaaaagaagtcaggactaacagaattgaaactcaagcccacaggaagtaaggtacgtgtctccaaagtgtactggaccgaaaatgtgactgagcacagagaagtggccatccgctgcagcctggagagtgtaggcagctcagccactctgtactctgtgatgtggtactggaacagagaaaactctggaagtaaattgctggtgcacttgcaacatgatggcttgctggagtatggggaagaggggctcaggaggcacctgcactgttaccgttcatcctctacagactttgtcctgaagcttcatcaggtggagatggaggatgcaggaatgtactggtgtagggtggcagagtggcagctccatggacacccaagcaagtggattaatcaagcatccgatgagtcacagcggatggtgctcacggtgctgccttcagagcccacgcttccttccaggatctgctcctcggcccctttactctatttcctgttcatctgtcccttcgtcctgctcctccttctgctcatctccctcctctgcttatactggaaggccaggaagttgtcaacactgcgttccaacacacggaaagaaaaagctctctgggtggacttgaaagaggctggaggtgtgaccacaaataggagggaagacgaggaggaagatgaaggcaactgaatcccaagaggcacctgcagccaggaaggaaagccccgtgtggaatgtggtgacctagtcacctggaaccagctcctgacagaccccggcaacttctagatgaacccaagtgaactttcctcattaccatcctgaagtcactaccccagggggagctatagcttcatgaccgtaacatgtgacctgtgtgctggcaggacgactcactgcggctgcgccactgggacccctcccctacatgcaccaatgcac

SEQ ID NO: 115338 - DNA, 9130 bp, Homo sapiens
  Payload ID: 2509
  Gene Symbol: CD109
  Gene Name: CD109 molecule
  Uniprot ID: Q6YHK3
  ENST ID: ENST00000287097
  CDS Start-End: 113-4450
ctaaactcgaattaagagggaaaaaaaatcagggaggaggtggcaagccacaccccacggtgcccgcgaacttccccggcagcggactgtagcccaggcagacgccgtcgagatgcagggcccaccgctcctgaccgccgcccacctcctctgcgtgtgcaccgccgcgctggccgtggctcccgggcctcggtttctggtgacagccccagggatcatcaggcccggaggaaatgtgactattggggtggagcttctggaacactgcccttcacaggtgactgtgaaggcggagctgctcaagacagcatcaaacctcactgtctctgtcctggaagcagaaggagtctttgaaaaaggctcttttaagacacttactcttccatcactacctctgaacagtgcagatgagatttatgagctacgtgtaaccggacgtacccaggatgagattttattctctaatagtacccgcttatcatttgagaccaagagaatatctgtcttcattcaaacagacaaggccttatacaagccaaagcaagaagtgaagtttcgcattgttacactcttctcagattttaagccttacaaaacctctttaaacattctcattaaggaccccaaatcaaatttgatccaacagtggttgtcacaacaaagtgatcttggagtcatttccaaaacttttcagctatcttcccatccaatacttggtgactggtctattcaagttcaagtgaatgaccagacatactatcaatcatttcaggtttcagaatatgtattaccaaaatttgaagtgactttgcagacaccattatattgttctatgaattctaagcatttaaatggtaccatcacggcaaagtatacatatgggaagccagtgaaaggagacgtaacgcttacatttttacctttatccttttggggaaagaagaaaaatattacaaaaacatttaagataaatggatctgcaaacttctcttttaatgatgaagagatgaaaaatgtaatggattcttcaaatggactttctgaatacctggatctatcttcccctggaccagtagaaattttaaccacagtgacagaatcagttacaggtatttcaagaaatgtaagcactaatgtgttcttcaagcaacatgattacatcattgagttttttgattatactactgtcttgaagccatctctcaacttcacagccactgtgaaggtaactcgtgctgatggcaaccaactgactcttgaagaaagaagaaataatgtagtcataacagtgacacagagaaactatactgagtactggagcggatctaacagtggaaatcagaaaatggaagctgttcagaaaataaattatactgtcccccaaagtggaacttttaagattgaattcccaatcctggaggattccagtgagctacagttgaaggcctatttccttggtagtaaaagtagcatggcagttcatagtctgtttaagtctcctagtaagacatacatccaactaaaaacaagagatgaaaatataaaggtgggatcgccttttgagttggtggttagtggcaacaaacgattgaaggagttaagctatatggtagtatccaggggacagttggtggctgtaggaaaacaaaattcaacaatgttctctttaacaccagaaaattcttggactccaaaagcctgtgtaattgtgtattatattgaagatgatggggaaattataagtgatgttctaaaaattcctgttcagcttgtttttaaaaataagataaagctatattggagtaaagtgaaagctgaaccatctgagaaagtctctcttaggatctctgtgacacagcctgactccatagttgggattgtagctgttgacaaaagtgtgaatctgatgaatgcctctaatgatattacaatggaaaatgtggtccatgagttggaactttataacacaggatattatttaggcatgttcatgaattcttttgcagtctttcaggaatgtggactctgggtattgacagatgcaaacctcacgaaggattatattgatggtgtttatgacaatgcagaatatgctgagaggtttatggaggaaaatgaaggacatattgtagatattcatgacttttctttgggtagcagtccacatgtccgaaagcattttccagagacttggatttggctagacaccaacatgggttacaggatttaccaagaatttgaagtaactgtacctgattctatcacttcttgggtggctactggttttgtgatctctgaggacctgggtcttggactaacaactactccagtggagctccaagccttccaaccatttttcatttttttgaatcttccctactctgttatcagaggtgaagaatttgctttggaaataactatattcaattatttgaaagatgccactgaggttaaggtaatcattgagaaaagtgacaaatttgatattctaatgacttcaaatgaaataaatgccacaggccaccagcagacccttctggttcccagtgaggatggggcaactgttctttttcccatcaggccaacacatctgggagaaattcctatcacagtcacagctctttcacccactgcttctgatgctgtcacccagatgattttagtaaaggctgaaggaatagaaaaatcatattcacaatccatcttattagacttgactgacaataggctacagagtaccctgaaaactttgagtttctcatttcctcctaatacagtgactggcagtgaaagagttcagatcactgcaattggagatgttcttggtccttccatcaatggcttagcctcattgattcggatgccttatggctgtggtgaacagaacatgataaattttgctccaaatatttacattttggattatctgactaaaaagaaacaactgacagataatttgaaagaaaaagctctttcatttatgaggcaaggttaccagagagaacttctctatcagagggaagatggctctttcagtgcttttgggaattatgacccttctgggagcacttggttgtcagcttttgttttaagatgtttccttgaagccgatccttacatagatattgatcagaatgtgttacacagaacatacacttggcttaaaggacatcagaaatccaacggtgaattttgggatccaggaagagtgattcatagtgagcttcaaggtggcaataaaagtccagtaacacttacagcctatattgtaacttctctcctgggatatagaaagtatcagcctaacattgatgtgcaagagtctatccattttttggagtctgaattcagtagaggaatttcagacaattatactctagcccttataacttatgcattgtcatcagtggggagtcctaaagcgaaggaagctttgaatatgctgacttggagagcagaacaagaaggtggcatgcaattctgggtgtcatcagagtccaaactttctgactcctggcagccacgctccctggatattgaagttgcagcctatgcactgctctcacacttcttacaatttcagacttctgagggaatcccaattatgaggtggctaagcaggcaaagaaatagcttgggtggttttgcatctactcaggataccactgtggctttaaaggctctgtctgaatttgcagccctaatgaatacagaaaggacaaatatccaagtgaccgtgacggggcctagctcaccaagtcctgtaaagtttctgattgacacacacaaccgcttactccttcagacagcagagcttgctgtggtacagccaacggcagttaatatttccgcaaatggttttggatttgctatttgtcagctcaatgttgtatataatgtgaaggcttctgggtcttctagaagacgaagatctatccaaaatcaagaagcctttgatttagatgttgctgtaaaagaaaataaagatgatctcaatcatgtggatttgaatgtgtgtacaagcttttcgggcccgggtaggagtggcatggctcttatggaagttaacctattaagtggctttatggtgccttcagaagcaatttctctgagcgagacagtgaagaaagtggaatatgatcatggaaaactcaacctctatttagattctgtaaatgaaacccagttttgtgttaatattcctgctgtgagaaactttaaagtttcaaatacccaagatgcttcagtgtccatagtggattactatgagccaaggagacaggcggtgagaagttacaactctgaagtgaagctgtcctcctgtgacctttgcagtgatgtccagggctgccgtccttgtgaggatggagcttcaggctcccatcatcactcttcagtcatttttattttctgtttcaagcttctgtactttatggaactttggctgtgatttatttttaaaggactctgtgtaacactaacatttccagtagtcacatgtgattgttttgttttcgtagaagaatactgcttctattttgaaaaaagagttttttttctttctatggggttgcagggatggtgtacaacaggtcctagcatgtatagctgcatagatttcttcacctgatctttgtgtggaagatcagaatgaatgcagttgtgtgtctatattttcccctctcaaaatcttttagaatttttttggaggtgtttgttttctccagaataaaggtattactttagaataggtattctcctcattttgtgaaagaaatgaacctagattcttaagcattattacacatccatgtttgcttaaagatggatttccctgggaatgggagaaaacagccagcaggaggagcttcatctgttcccttcccacctccaacctagccctactgcccaccccaccccaacccaccccatgcccagtggtctcagtagatacttcttaactggaaattctttcttttcagaatctaggtggtgaattttttttaagtggcacggtctttttctgcttgaaatctgatcacaccccccagccattgccctccctctctttttcctctgtagagaaatgtgaggggcagtacatttactgtgcttttcacaccatctcagaggttgaggagcatactgaaaattgccctggggggtgctgggtgtgctgtctccttcccacatcctcagccccacaccagctctatttcaggggtgagagtcagagagcactgcaatatgtgcttcatgggatttcgattcgaagatcctagaccagggagacactgtgagccagggatacaacaaaatactaggtaagtcactgcagaccgacctccctgcagtttgggaaagaagctgggtttgtggagaatcagagcatcttgacatgactgctgacctaaagatccctggcattggccagggatcctgtggaacctcttctagttcaggggtgtgagcattagactgccagttgtctagtgacatctgatgcttgctgtgaacttttaagatccccgaatcctgagcacctcaatctttaattgccctgtattccgaagggtaatataatttatctggatggaaattttaaagatgaatcccccttttttcttttcttctctcttttctttccttctccctttcttctttgccttctaaatatactgaaatgatttagatatgtgtcaacaattaatgatcttttattcaatctaagaaatggtttagtttttctctttagctctatggcatttcactcaagtggacaggggaaaaagtaattgccatgggctccaaagaatttgctttatgtttttagctatttaaaaataaatccatcaaaaataaagtatgcaaatgtatcttttaaagttaatttttaaaaatgctcttattttagtgaattttcagaaattatagtggaatggatgctcatatattgcttatggatattttggataccaaagtaggaataactgacattcagtattttaaagctggcaaacctgtacatagaaaatagatccccagacagtggtctatgaagagggcagttaagtatcaaatacttaattttcttgcctttttttcttaagtggggaaaagtttctagatctcttacacctctgacacaatctgttctaaaacaggcacttgtaatgttggggcctccttgtaaacgtgtttttgccctttactctctgggagttctttaaaggtgaaatcatcttacaaagaaattgggggagggtcttggcaaaggactttcccctcctctttcctggcctgggaaccttatactgacaatcaatactttatattttaaagtatataatttatagttaacttctagtgtaatatattaggaaacactagaatggaaaggccattggaagacaggttgtatcttttttagaccatatttccttgtttaaaaactatcatttgaatacttttttggtgaagaactccatgttttcaagttaaaggtcacctcgtaggccaggcgcagtggctcatgcctgtaatcccagcactctgggaggctgaggcgggtgaatcacaaggttaggagtttgagaccagcctggccaatatggtgaaaccccgtccctactaaaaatacaaaatttagccaggcgtggtggcatgcacctgtagtcccacctactcgggaggctgaggcaggagaatcacttgaacctgagagacagaggttgcagtgagccgagatcacgccactgcactccagcctgggggacagagtgagattctgtctcaaaaaacaaaaaacaaaaaagtcaccttgtaactcatctctttttattgtaagtttattaaaaatgaagaggacaacaatgagaaggaacataaagggttagctagcactgtctcctggtgcatggggctgtgcagatgtcccggccacttcttccttcatacttcccttagagaacttgctctgctacaagcagtgggcttggactaaaagtgattaaaataccacaggcataaggagaaaaggagtatatgtagtagtaataattactagtataaattattttcttcacatgctatgagtaataatattaaaaaactcattttaccattaagattccttatgctgaagctcttccatttagaatactgtcaatgtcatttactggtatgaactaaagtcccccttcttttccactcactgggaaccttagtaaaacaccagcatatcttacctctctttctgactggccgatgcttccagagactgaatgttgggaaaacctagtagccaaacaattctaggacagaataacatttttatatttggttccaccatcttattacatttagttatagttttaaaaaagaaattcaagcccattaaaatatgtctggtcaatgaaatgcttccttttattgtgttgtgctattgtactttgtttttcaaaacattgtaaaaatagtatctttggtttagtattttggattatatattataatctgaggagtgttttgcttatgtagaatccagatatatttctgttacctaggagatgttacttacatatgtaatactgtatcctgcacgtggaaatattcagaattgtagatagcataactctccctgctcctattcttttgagcctaggtataattttttttttttttttagaaaaagacatatttagctttaatttctatttatgctaaacatatttataagtagtctgtcaatataataccaactatttttatttttacataattcaattatttcatttgacatgtctggcagactcaagacattaagtaaaaaattggaactatgatttttctttgtcattttttaaaaaagaattattttattaacctgctggcatataatctggagttcttttcacaaccttactttttctgatttgctttattgaatgattgaatactcatttctttctaaaaatatgttgtaaattctcccttggcaagatttctccctatgagggtagttattatttgagtctgccaagtggttaccatggggcaaggtgccatgatgtattcttgggtgcattggttttttgcgcattgtaaatttaagacacttatagtaagtggactcattcatagatgagtttcagaaccttttacgttctcggtagaggcttctgtcggacaggcagaagagtgtattcctcacttttttttttgtcttcaaattccagtaaggcatagcacttttaagaaattagaatttttctatcatctatgcaaatgatatttatgttaatattaaatatcttatgttacactgggagtaatttgaggtgcaattatttttattactactttgaatagaggaccattatccttctttcttcagaaaactaagaagtaagtgtaacttttaaagtaagtatatatcagtgagagtaggcttgttttacaactatttctagccagtgagttgtgttttcatgtctcatcaaaagacaataccacattgcatcattttacaaaatatgttgtcattttcatttcagttgtaacataggaaaatagatatttcctagatgatttctgagtttcttactgcaaagaacagttataaattggtatacatgtgtctctgtaatagggataatattgatatatctgttgctacatatttaagaatcattctatcttatgttgtcttgaggccaagatttaccacgtttgcccagtgtattgaattggtggtagaaggtagttccatgttccatttgtagatctttaagattttatctttgataactttaatagaatgtggctcagttctggtccttcaagcctgtatggtttggattttcagtaggggacagttgatgtggagtcaatctctttggtacacaggaagctttataaaatttcattcacgaatctcttattttgggaagctgttttgcatatgagaagaacactgttgaaataaggaactaaagctttatatattgatcaaggtgattctgaaagttttaatttttaatgttgtaatgttatgttattgttaattgtactttattatgtattcaatagaaaatcatgatttattaataaaagcttaaattctcatcta

SEQ ID NO: 115339 - DNA, 9401 bp, Homo sapiens
  Payload ID: 2509
  Gene Symbol: CD109
  Gene Name: CD109 molecule
  Uniprot ID: Q6YHK3
  ENST ID: ENST00000437994
  CDS Start-End: 432-4718
atagttgctatgaatttctcctcacaaggatgggcctgtttactcaccctgggcatcgttggtagagcgctagtgtaaacagcctgaggaacccggtgggccggggaagtgggcgcgctctgttctccgcggccagctgggacgccgggccaggtggggccgcctgcgtttagcaactgctttctcaccccctggatttgcgatgtttgccacagcagcgagaagcgccattgtaatggggatgggaggggtggagcctccaagtcctgtctcaatttagatctctcactctgctgttaggcgcgcccatttcagattactaaactcgaattaagagggaaaaaaaatcagggaggaggtggcaagccacaccccacggtgcccgcgaacttccccggcagcggactgtagcccaggcagacgccgtcgagatgcagggcccaccgctcctgaccgccgcccacctcctctgcgtgtgcaccgccgcgctggccgtggctcccgggcctcggtttctggtgacagccccagggatcatcaggcccggaggaaatgtgactattggggtggagcttctggaacactgcccttcacaggtgactgtgaaggcggagctgctcaagacagcatcaaacctcactgtctctgtcctggaagcagaaggagtctttgaaaaaggctcttttaagacacttactcttccatcactacctctgaacagtgcagatgagatttatgagctacgtgtaaccggacgtacccaggatgagattttattctctaatagtacccgcttatcatttgagaccaagagaatatctgtcttcattcaaacagacaaggccttatacaagccaaagcaagaagtgaagtttcgcattgttacactcttctcagattttaagccttacaaaacctctttaaacattctcattaaggaccccaaatcaaatttgatccaacagtggttgtcacaacaaagtgatcttggagtcatttccaaaacttttcagctatcttcccatccaatacttggtgactggtctattcaagttcaagtgaatgaccagacatactatcaatcatttcaggtttcagaatatgtattaccaaaatttgaagtgactttgcagacaccattatattgttctatgaattctaagcatttaaatggtaccatcacggcaaagtatacatatgggaagccagtgaaaggagacgtaacgcttacatttttacctttatccttttggggaaagaagaaaaatattacaaaaacatttaagataaatggatctgcaaacttctcttttaatgatgaagagatgaaaaatgtaatggattcttcaaatggactttctgaatacctggatctatcttcccctggaccagtagaaattttaaccacagtgacagaatcagttacaggtatttcaagaaatgtaagcactaatgtgttcttcaagcaacatgattacatcattgagttttttgattatactactgtcttgaagccatctctcaacttcacagccactgtgaaggtaactcgtgctgatggcaaccaactgactcttgaagaaagaagaaataatgtagtcataacagtgacacagagaaactatactgagtactggagcggatctaacagtggaaatcagaaaatggaagctgttcagaaaataaattatactgtcccccaaagtggaacttttaagattgaattcccaatcctggaggattccagtgagctacagttgaaggcctatttccttggtagtaaaagtagcatggcagttcatagtctgtttaagtctcctagtaagacatacatccaactaaaaacaagagatgaaaatataaaggtgggatcgccttttgagttggtggttagtggcaacaaacgattgaaggagttaagctatatggtagtatccaggggacagttggtggctgtaggaaaacaaaattcaacaatgttctctttaacaccagaaaattcttggactccaaaagcctgtgtaattgtgtattatattgaagatgatggggaaattataagtgatgttctaaaaattcctgttcagcttgtttttaaaaataagataaagctatattggagtaaagtgaaagctgaaccatctgagaaagtctctcttaggatctctgtgacacagcctgactccatagttgggattgtagctgttgacaaaagtgtgaatctgatgaatgcctctaatgatattacaatggaaaatgtggtccatgagttggaactttataacacaggatattatttaggcatgttcatgaattcttttgcagtctttcaggaatgtggactctgggtattgacagatgcaaacctcacgaaggattatattgatggtgtttatgacaatgcagaatatgctgagaggtttatggaggaaaatgaaggacatattgtagatattcatgacttttctttgggtagcagtccacatgtccgaaagcattttccagagacttggatttggctagacaccaacatgggttacaggatttaccaagaatttgaagtaactgtacctgattctatcacttcttgggtggctactggttttgtgatctctgaggacctgggtcttggactaacaactactccagtggagctccaagccttccaaccatttttcatttttttgaatcttccctactctgttatcagaggtgaagaatttgctttggaaataactatattcaattatttgaaagatgccactgaggttaaggtaatcattgagaaaagtgacaaatttgatattctaatgacttcaaatgaaataaatgccacaggccaccagcagacccttctggttcccagtgaggatggggcaactgttctttttcccatcaggccaacacatctgggagaaattcctatcacagtcacagctctttcacccactgcttctgatgctgtcacccagatgattttagtaaaggctgaaggaatagaaaaatcatattcacaatccatcttattagacttgactgacaataggctacagagtaccctgaaaactttgagtttctcatttcctcctaatacagtgactggcagtgaaagagttcagatcactgcaattggagatgttcttggtccttccatcaatggcttagcctcattgattcggatgccttatggctgtggtgaacagaacatgataaattttgctccaaatatttacattttggattatctgactaaaaagaaacaactgacagataatttgaaagaaaaagctctttcatttatgaggcaaggttaccagagagaacttctctatcagagggaagatggctctttcagtgcttttgggaattatgacccttctgggagcacttggttgtcagcttttgttttaagatgtttccttgaagccgatccttacatagatattgatcagaatgtgttacacagaacatacacttggcttaaaggacatcagaaatccaacggtgaattttgggatccaggaagagtgattcatagtgagcttcaaggtggcaataaaagtccagtaacacttacagcctatattgtaacttctctcctgggatatagaaagtatcagcctaacattgatgtgcaagagtctatccattttttggagtctgaattcagtagaggaatttcagacaattatactctagcccttataacttatgcattgtcatcagtggggagtcctaaagcgaaggaagctttgaatatgctgacttggagagcagaacaagaaggtggcatgcaattctgggtgtcatcagagtccaaactttctgactcctggcagccacgctccctggatattgaagttgcagcctatgcactgctctcacacttcttacaatttcagacttctgagggaatcccaattatgaggtggctaagcaggcaaagaaatagcttgggtggttttgcatctactcaggataccactgtggctttaaaggctctgtctgaatttgcagccctaatgaatacagaaaggacaaatatccaagtgaccgtgacggggcctagctcaccaagtcctcttgctgtggtacagccaacggcagttaatatttccgcaaatggttttggatttgctatttgtcagctcaatgttgtatataatgtgaaggcttctgggtcttctagaagacgaagatctatccaaaatcaagaagcctttgatttagatgttgctgtaaaagaaaataaagatgatctcaatcatgtggatttgaatgtgtgtacaagcttttcgggcccgggtaggagtggcatggctcttatggaagttaacctattaagtggctttatggtgccttcagaagcaatttctctgagcgagacagtgaagaaagtggaatatgatcatggaaaactcaacctctatttagattctgtaaatgaaacccagttttgtgttaatattcctgctgtgagaaactttaaagtttcaaatacccaagatgcttcagtgtccatagtggattactatgagccaaggagacaggcggtgagaagttacaactctgaagtgaagctgtcctcctgtgacctttgcagtgatgtccagggctgccgtccttgtgaggatggagcttcaggctcccatcatcactcttcagtcatttttattttctgtttcaagcttctgtactttatggaactttggctgtgatttatttttaaaggactctgtgtaacactaacatttccagtagtcacatgtgattgttttgttttcgtagaagaatactgcttctattttgaaaaaagagttttttttctttctatggggttgcagggatggtgtacaacaggtcctagcatgtatagctgcatagatttcttcacctgatctttgtgtggaagatcagaatgaatgcagttgtgtgtctatattttcccctctcaaaatcttttagaatttttttggaggtgtttgttttctccagaataaaggtattactttagaataggtattctcctcattttgtgaaagaaatgaacctagattcttaagcattattacacatccatgtttgcttaaagatggatttccctgggaatgggagaaaacagccagcaggaggagcttcatctgttcccttcccacctccaacctagccctactgcccaccccaccccaacccaccccatgcccagtggtctcagtagatacttcttaactggaaattctttcttttcagaatctaggtggtgaattttttttaagtggcacggtctttttctgcttgaaatctgatcacaccccccagccattgccctccctctctttttcctctgtagagaaatgtgaggggcagtacatttactgtgcttttcacaccatctcagaggttgaggagcatactgaaaattgccctggggggtgctgggtgtgctgtctccttcccacatcctcagccccacaccagctctatttcaggggtgagagtcagagagcactgcaatatgtgcttcatgggatttcgattcgaagatcctagaccagggagacactgtgagccagggatacaacaaaatactaggtaagtcactgcagaccgacctccctgcagtttgggaaagaagctgggtttgtggagaatcagagcatcttgacatgactgctgacctaaagatccctggcattggccagggatcctgtggaacctcttctagttcaggggtgtgagcattagactgccagttgtctagtgacatctgatgcttgctgtgaacttttaagatccccgaatcctgagcacctcaatctttaattgccctgtattccgaagggtaatataatttatctggatggaaattttaaagatgaatcccccttttttcttttcttctctcttttctttccttctccctttcttctttgccttctaaatatactgaaatgatttagatatgtgtcaacaattaatgatcttttattcaatctaagaaatggtttagtttttctctttagctctatggcatttcactcaagtggacaggggaaaaagtaattgccatgggctccaaagaatttgctttatgtttttagctatttaaaaataaatccatcaaaaataaagtatgcaaatgtatcttttaaagttaatttttaaaaatgctcttattttagtgaattttcagaaattatagtggaatggatgctcatatattgcttatggatattttggataccaaagtaggaataactgacattcagtattttaaagctggcaaacctgtacatagaaaatagatccccagacagtggtctatgaagagggcagttaagtatcaaatacttaattttcttgcctttttttcttaagtggggaaaagtttctagatctcttacacctctgacacaatctgttctaaaacaggcacttgtaatgttggggcctccttgtaaacgtgtttttgccctttactctctgggagttctttaaaggtgaaatcatcttacaaagaaattgggggagggtcttggcaaaggactttcccctcctctttcctggcctgggaaccttatactgacaatcaatactttatattttaaagtatataatttatagttaacttctagtgtaatatattaggaaacactagaatggaaaggccattggaagacaggttgtatcttttttagaccatatttccttgtttaaaaactatcatttgaatacttttttggtgaagaactccatgttttcaagttaaaggtcacctcgtaggccaggcgcagtggctcatgcctgtaatcccagcactctgggaggctgaggcgggtgaatcacaaggttaggagtttgagaccagcctggccaatatggtgaaaccccgtccctactaaaaatacaaaatttagccaggcgtggtggcatgcacctgtagtcccacctactcgggaggctgaggcaggagaatcacttgaacctgagagacagaggttgcagtgagccgagatcacgccactgcactccagcctgggggacagagtgagattctgtctcaaaaaacaaaaaacaaaaaagtcaccttgtaactcatctctttttattgtaagtttattaaaaatgaagaggacaacaatgagaaggaacataaagggttagctagcactgtctcctggtgcatggggctgtgcagatgtcccggccacttcttccttcatacttcccttagagaacttgctctgctacaagcagtgggcttggactaaaagtgattaaaataccacaggcataaggagaaaaggagtatatgtagtagtaataattactagtataaattattttcttcacatgctatgagtaataatattaaaaaactcattttaccattaagattccttatgctgaagctcttccatttagaatactgtcaatgtcatttactggtatgaactaaagtcccccttcttttccactcactgggaaccttagtaaaacaccagcatatcttacctctctttctgactggccgatgcttccagagactgaatgttgggaaaacctagtagccaaacaattctaggacagaataacatttttatatttggttccaccatcttattacatttagttatagttttaaaaaagaaattcaagcccattaaaatatgtctggtcaatgaaatgcttccttttattgtgttgtgctattgtactttgtttttcaaaacattgtaaaaatagtatctttggtttagtattttggattatatattataatctgaggagtgttttgcttatgtagaatccagatatatttctgttacctaggagatgttacttacatatgtaatactgtatcctgcacgtggaaatattcagaattgtagatagcataactctccctgctcctattcttttgagcctaggtataattttttttttttttttagaaaaagacatatttagctttaatttctatttatgctaaacatatttataagtagtctgtcaatataataccaactatttttatttttacataattcaattatttcatttgacatgtctggcagactcaagacattaagtaaaaaattggaactatgatttttctttgtcattttttaaaaaagaattattttattaacctgctggcatataatctggagttcttttcacaaccttactttttctgatttgctttattgaatgattgaatactcatttctttctaaaaatatgttgtaaattctcccttggcaagatttctccctatgagggtagttattatttgagtctgccaagtggttaccatggggcaaggtgccatgatgtattcttgggtgcattggttttttgcgcattgtaaatttaagacacttatagtaagtggactcattcatagatgagtttcagaaccttttacgttctcggtagaggcttctgtcggacaggcagaagagtgtattcctcacttttttttttgtcttcaaattccagtaaggcatagcacttttaagaaattagaatttttctatcatctatgcaaatgatatttatgttaatattaaatatcttatgttacactgggagtaatttgaggtgcaattatttttattactactttgaatagaggaccattatccttctttcttcagaaaactaagaagtaagtgtaacttttaaagtaagtatatatcagtgagagtaggcttgttttacaactatttctagccagtgagttgtgttttcatgtctcatcaaaagacaataccacattgcatcattttacaaaatatgttgtcattttcatttcagttgtaacataggaaaatagatatttcctagatgatttctgagtttcttactgcaaagaacagttataaattggtatacatgtgtctctgtaatagggataatattgatatatctgttgctacatatttaagaatcattctatcttatgttgtcttgaggccaagatttaccacgtttgcccagtgtattgaattggtggtagaaggtagttccatgttccatttgtagatctttaagattttatctttgataactttaatagaatgtggctcagttctggtccttcaagcctgtatggtttggattttcagtaggggacagttgatgtggagtcaatctctttggtacacaggaagctttataaaatttcattcacgaatctcttattttgggaagctgttttgcatatgagaagaacactgttgaaataaggaactaaagctttatatattgatcaaggtgattctgaaagttttaatttttaatgttgtaatgttatgttattgttaattgtactttattatgtattcaatagaaaatcatgatttattaataaaagcttaaattctcatctattt

SEQ ID NO: 115340 - DNA, 9221 bp, Homo sapiens
  Payload ID: 2509
  Gene Symbol: CD109
  Gene Name: CD109 molecule
  Uniprot ID: Q6YHK3
  ENST ID: ENST00000422508
  CDS Start-End: 432-4538
atagttgctatgaatttctcctcacaaggatgggcctgtttactcaccctgggcatcgttggtagagcgctagtgtaaacagcctgaggaacccggtgggccggggaagtgggcgcgctctgttctccgcggccagctgggacgccgggccaggtggggccgcctgcgtttagcaactgctttctcaccccctggatttgcgatgtttgccacagcagcgagaagcgccattgtaatggggatgggaggggtggagcctccaagtcctgtctcaatttagatctctcactctgctgttaggcgcgcccatttcagattactaaactcgaattaagagggaaaaaaaatcagggaggaggtggcaagccacaccccacggtgcccgcgaacttccccggcagcggactgtagcccaggcagacgccgtcgagatgcagggcccaccgctcctgaccgccgcccacctcctctgcgtgtgcaccgccgcgctggccgtggctcccgggcctcggtttctggtgacagccccagggatcatcaggcccggaggaaatgtgactattggggtggagcttctggaacactgcccttcacaggtgactgtgaaggcggagctgctcaagacagcatcaaacctcactgtctctgtcctggaagcagaaggagtctttgaaaaaggctcttttaagacacttactcttccatcagaccccaaatcaaatttgatccaacagtggttgtcacaacaaagtgatcttggagtcatttccaaaacttttcagctatcttcccatccaatacttggtgactggtctattcaagttcaagtgaatgaccagacatactatcaatcatttcaggtttcagaatatgtattaccaaaatttgaagtgactttgcagacaccattatattgttctatgaattctaagcatttaaatggtaccatcacggcaaagtatacatatgggaagccagtgaaaggagacgtaacgcttacatttttacctttatccttttggggaaagaagaaaaatattacaaaaacatttaagataaatggatctgcaaacttctcttttaatgatgaagagatgaaaaatgtaatggattcttcaaatggactttctgaatacctggatctatcttcccctggaccagtagaaattttaaccacagtgacagaatcagttacaggtatttcaagaaatgtaagcactaatgtgttcttcaagcaacatgattacatcattgagttttttgattatactactgtcttgaagccatctctcaacttcacagccactgtgaaggtaactcgtgctgatggcaaccaactgactcttgaagaaagaagaaataatgtagtcataacagtgacacagagaaactatactgagtactggagcggatctaacagtggaaatcagaaaatggaagctgttcagaaaataaattatactgtcccccaaagtggaacttttaagattgaattcccaatcctggaggattccagtgagctacagttgaaggcctatttccttggtagtaaaagtagcatggcagttcatagtctgtttaagtctcctagtaagacatacatccaactaaaaacaagagatgaaaatataaaggtgggatcgccttttgagttggtggttagtggcaacaaacgattgaaggagttaagctatatggtagtatccaggggacagttggtggctgtaggaaaacaaaattcaacaatgttctctttaacaccagaaaattcttggactccaaaagcctgtgtaattgtgtattatattgaagatgatggggaaattataagtgatgttctaaaaattcctgttcagcttgtttttaaaaataagataaagctatattggagtaaagtgaaagctgaaccatctgagaaagtctctcttaggatctctgtgacacagcctgactccatagttgggattgtagctgttgacaaaagtgtgaatctgatgaatgcctctaatgatattacaatggaaaatgtggtccatgagttggaactttataacacaggatattatttaggcatgttcatgaattcttttgcagtctttcaggaatgtggactctgggtattgacagatgcaaacctcacgaaggattatattgatggtgtttatgacaatgcagaatatgctgagaggtttatggaggaaaatgaaggacatattgtagatattcatgacttttctttgggtagcagtccacatgtccgaaagcattttccagagacttggatttggctagacaccaacatgggttacaggatttaccaagaatttgaagtaactgtacctgattctatcacttcttgggtggctactggttttgtgatctctgaggacctgggtcttggactaacaactactccagtggagctccaagccttccaaccatttttcatttttttgaatcttccctactctgttatcagaggtgaagaatttgctttggaaataactatattcaattatttgaaagatgccactgaggttaaggtaatcattgagaaaagtgacaaatttgatattctaatgacttcaaatgaaataaatgccacaggccaccagcagacccttctggttcccagtgaggatggggcaactgttctttttcccatcaggccaacacatctgggagaaattcctatcacagtcacagctctttcacccactgcttctgatgctgtcacccagatgattttagtaaaggctgaaggaatagaaaaatcatattcacaatccatcttattagacttgactgacaataggctacagagtaccctgaaaactttgagtttctcatttcctcctaatacagtgactggcagtgaaagagttcagatcactgcaattggagatgttcttggtccttccatcaatggcttagcctcattgattcggatgccttatggctgtggtgaacagaacatgataaattttgctccaaatatttacattttggattatctgactaaaaagaaacaactgacagataatttgaaagaaaaagctctttcatttatgaggcaaggttaccagagagaacttctctatcagagggaagatggctctttcagtgcttttgggaattatgacccttctgggagcacttggttgtcagcttttgttttaagatgtttccttgaagccgatccttacatagatattgatcagaatgtgttacacagaacatacacttggcttaaaggacatcagaaatccaacggtgaattttgggatccaggaagagtgattcatagtgagcttcaaggtggcaataaaagtccagtaacacttacagcctatattgtaacttctctcctgggatatagaaagtatcagcctaacattgatgtgcaagagtctatccattttttggagtctgaattcagtagaggaatttcagacaattatactctagcccttataacttatgcattgtcatcagtggggagtcctaaagcgaaggaagctttgaatatgctgacttggagagcagaacaagaaggtggcatgcaattctgggtgtcatcagagtccaaactttctgactcctggcagccacgctccctggatattgaagttgcagcctatgcactgctctcacacttcttacaatttcagacttctgagggaatcccaattatgaggtggctaagcaggcaaagaaatagcttgggtggttttgcatctactcaggataccactgtggctttaaaggctctgtctgaatttgcagccctaatgaatacagaaaggacaaatatccaagtgaccgtgacggggcctagctcaccaagtcctgtaaagtttctgattgacacacacaaccgcttactccttcagacagcagagcttgctgtggtacagccaacggcagttaatatttccgcaaatggttttggatttgctatttgtcagctcaatgttgtatataatgtgaaggcttctgggtcttctagaagacgaagatctatccaaaatcaagaagcctttgatttagatgttgctgtaaaagaaaataaagatgatctcaatcatgtggatttgaatgtgtgtacaagcttttcgggcccgggtaggagtggcatggctcttatggaagttaacctattaagtggctttatggtgccttcagaagcaatttctctgagcgagacagtgaagaaagtggaatatgatcatggaaaactcaacctctatttagattctgtaaatgaaacccagttttgtgttaatattcctgctgtgagaaactttaaagtttcaaatacccaagatgcttcagtgtccatagtggattactatgagccaaggagacaggcggtgagaagttacaactctgaagtgaagctgtcctcctgtgacctttgcagtgatgtccagggctgccgtccttgtgaggatggagcttcaggctcccatcatcactcttcagtcatttttattttctgtttcaagcttctgtactttatggaactttggctgtgatttatttttaaaggactctgtgtaacactaacatttccagtagtcacatgtgattgttttgttttcgtagaagaatactgcttctattttgaaaaaagagttttttttctttctatggggttgcagggatggtgtacaacaggtcctagcatgtatagctgcatagatttcttcacctgatctttgtgtggaagatcagaatgaatgcagttgtgtgtctatattttcccctctcaaaatcttttagaatttttttggaggtgtttgttttctccagaataaaggtattactttagaataggtattctcctcattttgtgaaagaaatgaacctagattcttaagcattattacacatccatgtttgcttaaagatggatttccctgggaatgggagaaaacagccagcaggaggagcttcatctgttcccttcccacctccaacctagccctactgcccaccccaccccaacccaccccatgcccagtggtctcagtagatacttcttaactggaaattctttcttttcagaatctaggtggtgaattttttttaagtggcacggtctttttctgcttgaaatctgatcacaccccccagccattgccctccctctctttttcctctgtagagaaatgtgaggggcagtacatttactgtgcttttcacaccatctcagaggttgaggagcatactgaaaattgccctggggggtgctgggtgtgctgtctccttcccacatcctcagccccacaccagctctatttcaggggtgagagtcagagagcactgcaatatgtgcttcatgggatttcgattcgaagatcctagaccagggagacactgtgagccagggatacaacaaaatactaggtaagtcactgcagaccgacctccctgcagtttgggaaagaagctgggtttgtggagaatcagagcatcttgacatgactgctgacctaaagatccctggcattggccagggatcctgtggaacctcttctagttcaggggtgtgagcattagactgccagttgtctagtgacatctgatgcttgctgtgaacttttaagatccccgaatcctgagcacctcaatctttaattgccctgtattccgaagggtaatataatttatctggatggaaattttaaagatgaatcccccttttttcttttcttctctcttttctttccttctccctttcttctttgccttctaaatatactgaaatgatttagatatgtgtcaacaattaatgatcttttattcaatctaagaaatggtttagtttttctctttagctctatggcatttcactcaagtggacaggggaaaaagtaattgccatgggctccaaagaatttgctttatgtttttagctatttaaaaataaatccatcaaaaataaagtatgcaaatgtatcttttaaagttaatttttaaaaatgctcttattttagtgaattttcagaaattatagtggaatggatgctcatatattgcttatggatattttggataccaaagtaggaataactgacattcagtattttaaagctggcaaacctgtacatagaaaatagatccccagacagtggtctatgaagagggcagttaagtatcaaatacttaattttcttgcctttttttcttaagtggggaaaagtttctagatctcttacacctctgacacaatctgttctaaaacaggcacttgtaatgttggggcctccttgtaaacgtgtttttgccctttactctctgggagttctttaaaggtgaaatcatcttacaaagaaattgggggagggtcttggcaaaggactttcccctcctctttcctggcctgggaaccttatactgacaatcaatactttatattttaaagtatataatttatagttaacttctagtgtaatatattaggaaacactagaatggaaaggccattggaagacaggttgtatcttttttagaccatatttccttgtttaaaaactatcatttgaatacttttttggtgaagaactccatgttttcaagttaaaggtcacctcgtaggccaggcgcagtggctcatgcctgtaatcccagcactctgggaggctgaggcgggtgaatcacaaggttaggagtttgagaccagcctggccaatatggtgaaaccccgtccctactaaaaatacaaaatttagccaggcgtggtggcatgcacctgtagtcccacctactcgggaggctgaggcaggagaatcacttgaacctgagagacagaggttgcagtgagccgagatcacgccactgcactccagcctgggggacagagtgagattctgtctcaaaaaacaaaaaacaaaaaagtcaccttgtaactcatctctttttattgtaagtttattaaaaatgaagaggacaacaatgagaaggaacataaagggttagctagcactgtctcctggtgcatggggctgtgcagatgtcccggccacttcttccttcatacttcccttagagaacttgctctgctacaagcagtgggcttggactaaaagtgattaaaataccacaggcataaggagaaaaggagtatatgtagtagtaataattactagtataaattattttcttcacatgctatgagtaataatattaaaaaactcattttaccattaagattccttatgctgaagctcttccatttagaatactgtcaatgtcatttactggtatgaactaaagtcccccttcttttccactcactgggaaccttagtaaaacaccagcatatcttacctctctttctgactggccgatgcttccagagactgaatgttgggaaaacctagtagccaaacaattctaggacagaataacatttttatatttggttccaccatcttattacatttagttatagttttaaaaaagaaattcaagcccattaaaatatgtctggtcaatgaaatgcttccttttattgtgttgtgctattgtactttgtttttcaaaacattgtaaaaatagtatctttggtttagtattttggattatatattataatctgaggagtgttttgcttatgtagaatccagatatatttctgttacctaggagatgttacttacatatgtaatactgtatcctgcacgtggaaatattcagaattgtagatagcataactctccctgctcctattcttttgagcctaggtataattttttttttttttttagaaaaagacatatttagctttaatttctatttatgctaaacatatttataagtagtctgtcaatataataccaactatttttatttttacataattcaattatttcatttgacatgtctggcagactcaagacattaagtaaaaaattggaactatgatttttctttgtcattttttaaaaaagaattattttattaacctgctggcatataatctggagttcttttcacaaccttactttttctgatttgctttattgaatgattgaatactcatttctttctaaaaatatgttgtaaattctcccttggcaagatttctccctatgagggtagttattatttgagtctgccaagtggttaccatggggcaaggtgccatgatgtattcttgggtgcattggttttttgcgcattgtaaatttaagacacttatagtaagtggactcattcatagatgagtttcagaaccttttacgttctcggtagaggcttctgtcggacaggcagaagagtgtattcctcacttttttttttgtcttcaaattccagtaaggcatagcacttttaagaaattagaatttttctatcatctatgcaaatgatatttatgttaatattaaatatcttatgttacactgggagtaatttgaggtgcaattatttttattactactttgaatagaggaccattatccttctttcttcagaaaactaagaagtaagtgtaacttttaaagtaagtatatatcagtgagagtaggcttgttttacaactatttctagccagtgagttgtgttttcatgtctcatcaaaagacaataccacattgcatcattttacaaaatatgttgtcattttcatttcagttgtaacataggaaaatagatatttcctagatgatttctgagtttcttactgcaaagaacagttataaattggtatacatgtgtctctgtaatagggataatattgatatatctgttgctacatatttaagaatcattctatcttatgttgtcttgaggccaagatttaccacgtttgcccagtgtattgaattggtggtagaaggtagttccatgttccatttgtagatctttaagattttatctttgataactttaatagaatgtggctcagttctggtccttcaagcctgtatggtttggattttcagtaggggacagttgatgtggagtcaatctctttggtacacaggaagctttataaaatttcattcacgaatctcttattttgggaagctgttttgcatatgagaagaacactgttgaaataaggaactaaagctttatatattgatcaaggtgattctgaaagttttaatttttaatgttgtaatgttatgttattgttaattgtactttattatgtattcaatagaaaatcatgatttattaataaaagcttaaattctcatctattt

SEQ ID NO: 115341 - DNA, 1886 bp, Homo sapiens
  Payload ID: 2510
  Gene Symbol: CD14
  Gene Name: CD14 molecule
  Uniprot ID: P08571
  ENST ID: ENST00000302014
  CDS Start-End: 631-1758
aattctaccccccttggtgccaacagatgaggttcacaatctcttccacaaaacatgcagttaaatatctgaggatattcagggacttggatttggtggcaggagatcaacataaaccaagacaaggaagaagtcaaagaaatgaatcaagtagattctctgggatataaggtagggggattggggggttggatagtgcagagtatggtactggcctaaggcactgaggatcatccttttcccacacccaccagagaaggcttaggctcccgagtcaacagggcattcaccgcctggggcgcctgagtcatcaggacactgccaggagacacagaaccctagatgccctgcagaatccttcctgttacggtccccctccctgaaacatccttcattgcaatatttccaggaaaggaagggggctggctcggaggaagagaggtggggaggtgatcagggttcacagaggagggaactgaatgacatcccaggattacataaactgtcagaggcagccgaagagttcacaagtgtgaagcctggaagccggcgggtgccgctgtgtaggaaagaagctaaagcacttccagagcctgtccggagctcagaggttcggaagacttatcgaccatggagcgcgcgtcctgcttgttgctgctgctgctgccgctggtgcacgtctctgcgaccacgccagaaccttgtgagctggacgatgaagatttccgctgcgtctgcaacttctccgaacctcagcccgactggtccgaagccttccagtgtgtgtctgcagtagaggtggagatccatgccggcggtctcaacctagagccgtttctaaagcgcgtcgatgcggacgccgacccgcggcagtatgctgacacggtcaaggctctccgcgtgcggcggctcacagtgggagccgcacaggttcctgctcagctactggtaggcgccctgcgtgtgctagcgtactcccgcctcaaggaactgacgctcgaggacctaaagataaccggcaccatgcctccgctgcctctggaagccacaggacttgcactttccagcttgcgcctacgcaacgtgtcgtgggcgacagggcgttcttggctcgccgagctgcagcagtggctcaagccaggcctcaaggtactgagcattgcccaagcacactcgcctgccttttcctgcgaacaggttcgcgccttcccggcccttaccagcctagacctgtctgacaatcctggactgggcgaacgcggactgatggcggctctctgtccccacaagttcccggccatccagaatctagcgctgcgcaacacaggaatggagacgcccacaggcgtgtgcgccgcactggcggcggcaggtgtgcagccccacagcctagacctcagccacaactcgctgcgcgccaccgtaaaccctagcgctccgagatgcatgtggtccagcgccctgaactccctcaatctgtcgttcgctgggctggaacaggtgcctaaaggactgccagccaagctcagagtgctcgatctcagctgcaacagactgaacagggcgccgcagcctgacgagctgcccgaggtggataacctgacactggacgggaatcccttcctggtccctggaactgccctcccccacgagggctcaatgaactccggcgtggtcccagcctgtgcacgttcgaccctgtcggtgggggtgtcgggaaccctggtgctgctccaaggggcccggggctttgcctaagatccaagacagaataatgaatggactcaaactgccttggcttcaggggagtcccgtcaggacgttgaggacttttcgaccaattcaaccctttgccccacctttattaaaatcttaaacaacgggtc

SEQ ID NO: 115342 - DNA, 1648 bp, Homo sapiens
  Payload ID: 2510
  Gene Symbol: CD14
  Gene Name: CD14 molecule
  Uniprot ID: P08571
  ENST ID: ENST00000401743
  CDS Start-End: 393-1520
aattctaccccccttggtgccaacagatgaggttcacaatctcttccacaaaacatgcagttaaatatctgaggatattcagggacttggatttggtggcaggagatcaacataaaccaagacaaggaagaagtcaaagaaatgaatcaagtagattctctgggatataaggaaaggaagggggctggctcggaggaagagaggtggggaggtgatcagggttcacagaggagggaactgaatgacatcccaggattacataaactgtcagaggcagccgaagagttcacaagtgtgaagcctggaagccggcgggtgccgctgtgtaggaaagaagctaaagcacttccagagcctgtccggagctcagaggttcggaagacttatcgaccatggagcgcgcgtcctgcttgttgctgctgctgctgccgctggtgcacgtctctgcgaccacgccagaaccttgtgagctggacgatgaagatttccgctgcgtctgcaacttctccgaacctcagcccgactggtccgaagccttccagtgtgtgtctgcagtagaggtggagatccatgccggcggtctcaacctagagccgtttctaaagcgcgtcgatgcggacgccgacccgcggcagtatgctgacacggtcaaggctctccgcgtgcggcggctcacagtgggagccgcacaggttcctgctcagctactggtaggcgccctgcgtgtgctagcgtactcccgcctcaaggaactgacgctcgaggacctaaagataaccggcaccatgcctccgctgcctctggaagccacaggacttgcactttccagcttgcgcctacgcaacgtgtcgtgggcgacagggcgttcttggctcgccgagctgcagcagtggctcaagccaggcctcaaggtactgagcattgcccaagcacactcgcctgccttttcctgcgaacaggttcgcgccttcccggcccttaccagcctagacctgtctgacaatcctggactgggcgaacgcggactgatggcggctctctgtccccacaagttcccggccatccagaatctagcgctgcgcaacacaggaatggagacgcccacaggcgtgtgcgccgcactggcggcggcaggtgtgcagccccacagcctagacctcagccacaactcgctgcgcgccaccgtaaaccctagcgctccgagatgcatgtggtccagcgccctgaactccctcaatctgtcgttcgctgggctggaacaggtgcctaaaggactgccagccaagctcagagtgctcgatctcagctgcaacagactgaacagggcgccgcagcctgacgagctgcccgaggtggataacctgacactggacgggaatcccttcctggtccctggaactgccctcccccacgagggctcaatgaactccggcgtggtcccagcctgtgcacgttcgaccctgtcggtgggggtgtcgggaaccctggtgctgctccaaggggcccggggctttgcctaagatccaagacagaataatgaatggactcaaactgccttggcttcaggggagtcccgtcaggacgttgaggacttttcgaccaattcaaccctttgccccacctttattaaaatcttaaacaacgggtc

SEQ ID NO: 115343 - DNA, 556 bp, Homo sapiens
  Payload ID: 2510
  Gene Symbol: CD14
  Gene Name: CD14 molecule
  ENST ID: ENST00000512545
  CDS Start-End: 392-556
attctaccccccttggtgccaacagatgaggttcacaatctcttccacaaaacatgcagttaaatatctgaggatattcagggacttggatttggtggcaggagatcaacataaaccaagacaaggaagaagtcaaagaaatgaatcaagtagattctctgggatataaggaaaggaagggggctggctcggaggaagagaggtggggaggtgatcagggttcacagaggagggaactgaatgacatcccaggattacataaactgtcagaggcagccgaagagttcacaagtgtgaagcctggaagccggcgggtgccgctgtgtaggaaagaagctaaagcacttccagagcctgtccggagctcagaggttcggaagacttatcgaccatggagcgcgcgtcctgcttgttgctgctgctgctgccgctggtgcacgtctctgcgaccacgccagaaccttgtgagctggacgatgaagatttccgctgcgtctgcaacttctccgaacctcagcccgactggtccgaagccttccagtgtgtgtctgcagta

SEQ ID NO: 115344 - DNA, 882 bp, Homo sapiens
  Payload ID: 2510
  Gene Symbol: CD14
  Gene Name: CD14 molecule
  ENST ID: ENST00000498971
  CDS Start-End: 243-882
aaacatgcagttaaatatctgaggatattcagggacttggatttggtggcaggagatcaacataaaccaagacaaggaagaagtcaaagaaatgaatcaagtagattctctgggatataagaggcagccgaagagttcacaagtgtgaagcctggaagccggcgggtgccgctgtgtaggaaagaagctaaagcacttccagagcctgtccggagctcagaggttcggaagacttatcgaccatggagcgcgcgtcctgcttgttgctgctgctgctgccgctggtgcacgtctctgcgaccacgccagaaccttgtgagctggacgatgaagatttccgctgcgtctgcaacttctccgaacctcagcccgactggtccgaagccttccagtgtgtgtctgcagtagaggtggagatccatgccggcggtctcaacctagagccgtttctaaagcgcgtcgatgcggacgccgacccgcggcagtatgctgacacggtcaaggctctccgcgtgcggcggctcacagtgggagccgcacaggttcctgctcagctactggtaggcgccctgcgtgtgctagcgtactcccgcctcaaggaactgacgctcgaggacctaaagataaccggcaccatgcctccgctgcctctggaagccacaggacttgcactttccagcttgcgcctacgcaacgtgtcgtgggcgacagggcgttcttggctcgccgagctgcagcagtggctcaagccaggcctcaaggtactgagcattgcccaagcacactcgcctgccttttcctgcgaacaggttcgcgccttcccggcccttaccagcctagacctgtctgacaatcctggactgggcgaacgcggactgatgg

SEQ ID NO: 115345 - DNA, 485 bp, Homo sapiens
  Payload ID: 2510
  Gene Symbol: CD14
  Gene Name: CD14 molecule
  ENST ID: ENST00000519715
  CDS Start-End: 243-485
aggttcacaatctcttccacaaaacatgcagttaaatatctgaggatattcagggacttggatttggtggcaggagatcaacataaaccaagacaaggaagaagtcaaagaaatgaatcaaaggcagccgaagagttcacaagtgtgaagcctggaagccggcgggtgccgctgtgtaggaaagaagctaaagcacttccagagcctgtccggagctcagaggttcggaagacttatcgaccatggagcgcgcgtcctgcttgttgctgctgctgctgccgctggtgcacgtctctgcgaccacgccagaaccttgtgagctggacgatgaagatttccgctgcgtctgcaacttctccgaacctcagcccgactggtccgaagccttccagtgtgtgtctgcagtagaggtggagatccatgccggcggtctcaacctagagccgtttctaaagcgcgtcgatgcggacgccgacccgcggcag

SEQ ID NO: 115346 - DNA, 1548 bp, Homo sapiens
  Payload ID: 2511
  Gene Symbol: CD151
  Gene Name: CD151 molecule (Raph blood group)
  Uniprot ID: P48509
  ENST ID: ENST00000322008
  CDS Start-End: 145-906
attctcagcgctgggagccgccgcccccgcagctgctgccgccgccgccagggcccggactcggacgcgtggtagcctagagtcctggggagcttctgtccacctgtcctgcagaggagtcgtttccagcccggctgccccaggatgggtgagttcaacgagaagaagacaacatgtggcaccgtttgcctcaagtacctgctgtttacctacaattgctgcttctggctggctggcctggctgtcatggcagtgggcatctggacgctggccctcaagagtgactacatcagcctgctggcctcaggcacctacctggccacagcctacatcctggtggtggcgggcactgtcgtcatggtgactggggtcttgggctgctgcgccaccttcaaggagcgtcggaacctgctgcgcctgtacttcatcctgctcctcatcatctttctgctggagatcatcgctggtatcctcgcctacgcctactaccagcagctgaacacggagctcaaggagaacctgaaggacaccatgaccaagcgctaccaccagccgggccatgaggctgtgaccagcgctgtggaccagctgcagcaggagttccactgctgtggcagcaacaactcacaggactggcgagacagtgagtggatccgctcacaggaggccggtggccgtgtggtcccagacagctgctgcaagacggtggtggctctttgtgggcagcgagaccatgcctccaacatctacaaggtggagggcggctgcatcaccaagttggagaccttcatccaggagcacctgagggtcattggggctgtggggatcggcattgcctgtgtgcaggtctttggcatgatcttcacgtgctgcctgtacaggagtctcaagctggagcactactgaccctgccttgggccttgctgctgctgcacccaactactgagctgagaccactgagtaccaggggctgggctccctgatgacacccaccctgtgccatcaccataacctctggggaccccaacctcagaggcagcttcaagtgccttttgctgcgcaccaatgcccagcaggggaggtgaggggggctggcggggcgaagtttggggggtgttttgtggggctccccagacacactctctgcctggtggtcagatgcaggttggaaggggccttgctgagtggcgcaaggccgagcgttcccagcagggggagaaacccttcacaccccaggcccttcaggaactggggccttgccttgcagccacatggccccatcccagttggggaagccaggtgagctctgacccttgggcctgggcctctgcccctcccaacccagccctcgtctccctcgacagcgcccctgctgtcttccccaccgcagtcaccaccacccgaaatgccacgtggtcactgtgcactgccctgttcatgtgcctctgcggggcagggccttcctggttttgttcactgctgtacccagatgcctacaaccatccctgccacatacaggtgctcaataaacacttgtagagcagatgg

SEQ ID NO: 115347 - DNA, 1648 bp, Homo sapiens
  Payload ID: 2511
  Gene Symbol: CD151
  Gene Name: CD151 molecule (Raph blood group)
  Uniprot ID: P48509
  ENST ID: ENST00000397420
  CDS Start-End: 250-1011
cgcgggttcagacctgccgagcgcccgccgccgcgggaggggcttgaggccggggcggggccggggcggggcggggcggggcgtccccctcgtaggctccgggccgcgcattctcagcgctgggagccgccgcccccgcagctgctgccgccgccgccagggcccggactcggacgcgtgcctagagtcctggggagcttctgtccacctgtcctgcagaggagtcgtttccagcccggctgccccaggatgggtgagttcaacgagaagaagacaacatgtggcaccgtttgcctcaagtacctgctgtttacctacaattgctgcttctggctggctggcctggctgtcatggcagtgggcatctggacgctggccctcaagagtgactacatcagcctgctggcctcaggcacctacctggccacagcctacatcctggtggtggcgggcactgtcgtcatggtgactggggtcttgggctgctgcgccaccttcaaggagcgtcggaacctgctgcgcctgtacttcatcctgctcctcatcatctttctgctggagatcatcgctggtatcctcgcctacgcctactaccagcagctgaacacggagctcaaggagaacctgaaggacaccatgaccaagcgctaccaccagccgggccatgaggctgtgaccagcgctgtggaccagctgcagcaggagttccactgctgtggcagcaacaactcacaggactggcgagacagtgagtggatccgctcacaggaggccggtggccgtgtggtcccagacagctgctgcaagacggtggtggctctttgtgggcagcgagaccatgcctccaacatctacaaggtggagggcggctgcatcaccaagttggagaccttcatccaggagcacctgagggtcattggggctgtggggatcggcattgcctgtgtgcaggtctttggcatgatcttcacgtgctgcctgtacaggagtctcaagctggagcactactgaccctgccttgggccttgctgctgctgcacccaactactgagctgagaccactgagtaccaggggctgggctccctgatgacacccaccctgtgccatcaccataacctctggggaccccaacctcagaggcagcttcaagtgccttttgctgcgcaccaatgcccagcaggggaggtgaggggggctggcggggcgaagtttggggggtgttttgtggggctccccagacacactctctgcctggtggtcagatgcaggttggaaggggccttgctgagtggcgcaaggccgagcgttcccagcagggggagaaacccttcacaccccaggcccttcaggaactggggccttgccttgcagccacatggccccatcccagttggggaagccaggtgagctctgacccttgggcctgggcctctgcccctcccaacccagccctcgtctccctcgacagcgcccctgctgtcttccccaccgcagtcaccaccacccgaaatgccacgtggtcactgtgcactgccctgttcatgtgcctctgcggggcagggccttcctggttttgttcactgctgtacccagatgcctacaaccatccctgccacatacaggtgctcaataaacacttgtagagca

SEQ ID NO: 115348 - DNA, 1486 bp, Homo sapiens
  Payload ID: 2511
  Gene Symbol: CD151
  Gene Name: CD151 molecule (Raph blood group)
  Uniprot ID: P48509
  ENST ID: ENST00000397421
  CDS Start-End: 83-844
attctcagcgctgggagccgccgcccccgcagctgctgccgccgccgccagggcccggactcggacgcgtggtagccccaggatgggtgagttcaacgagaagaagacaacatgtggcaccgtttgcctcaagtacctgctgtttacctacaattgctgcttctggctggctggcctggctgtcatggcagtgggcatctggacgctggccctcaagagtgactacatcagcctgctggcctcaggcacctacctggccacagcctacatcctggtggtggcgggcactgtcgtcatggtgactggggtcttgggctgctgcgccaccttcaaggagcgtcggaacctgctgcgcctgtacttcatcctgctcctcatcatctttctgctggagatcatcgctggtatcctcgcctacgcctactaccagcagctgaacacggagctcaaggagaacctgaaggacaccatgaccaagcgctaccaccagccgggccatgaggctgtgaccagcgctgtggaccagctgcagcaggagttccactgctgtggcagcaacaactcacaggactggcgagacagtgagtggatccgctcacaggaggccggtggccgtgtggtcccagacagctgctgcaagacggtggtggctctttgtgggcagcgagaccatgcctccaacatctacaaggtggagggcggctgcatcaccaagttggagaccttcatccaggagcacctgagggtcattggggctgtggggatcggcattgcctgtgtgcaggtctttggcatgatcttcacgtgctgcctgtacaggagtctcaagctggagcactactgaccctgccttgggccttgctgctgctgcacccaactactgagctgagaccactgagtaccaggggctgggctccctgatgacacccaccctgtgccatcaccataacctctggggaccccaacctcagaggcagcttcaagtgccttttgctgcgcaccaatgcccagcaggggaggtgaggggggctggcggggcgaagtttggggggtgttttgtggggctccccagacacactctctgcctggtggtcagatgcaggttggaaggggccttgctgagtggcgcaaggccgagcgttcccagcagggggagaaacccttcacaccccaggcccttcaggaactggggccttgccttgcagccacatggccccatcccagttggggaagccaggtgagctctgacccttgggcctgggcctctgcccctcccaacccagccctcgtctccctcgacagcgcccctgctgtcttccccaccgcagtcaccaccacccgaaatgccacgtggtcactgtgcactgccctgttcatgtgcctctgcggggcagggccttcctggttttgttcactgctgtacccagatgcctacaaccatccctgccacatacaggtgctcaataaacacttgtagagcagatgg

SEQ ID NO: 115349 - DNA, 793 bp, Homo sapiens
  Payload ID: 2511
  Gene Symbol: CD151
  Gene Name: CD151 molecule (Raph blood group)
  ENST ID: ENST00000524748
  CDS Start-End: 253-793
cgccgccagggcccggactcggacgcgtgcctagagtcctggggagcttctgtccacctgtcctgcagaggagtcgtttccagcccggctggtgagtgctggccagggtggggcagagcaggcggggcggcgaaagtccagacctggctgtgctgtctggaaacgtggcccagggcgctcagctgctgtctgcaccccacgccctccctggcttccccatgctcacagcttgcccactgctgcagccccaggatgggtgagttcaacgagaagaagacaacatgtggcaccgtttgcctcaagtacctgctgtttacctacaattgctgcttctggctggctggcctggctgtcatggcagtgggcatctggacgctggccctcaagagtgactacatcagcctgctggcctcaggcacctacctggccacagcctacatcctggtggtggcgggcactgtcgtcatggtgactggggtcttgggctgctgcgccaccttcaaggagcgtcggaacctgctgcgcctgtacttcatcctgctcctcatcatctttctgctggagatcatcgctggtatcctcgcctacgcctactaccagcagctgaacacggagctcaaggagaacctgaaggacaccatgaccaagcgctaccaccagccgggccatgaggctgtgaccagcgctgtggaccagctgcagcaggagttccactgctgtggcagcaacaactcacaggactggcgagacagtgagtggatccgctcacaggaggccggtggccgtgtggtcc

SEQ ID NO: 115350 - DNA, 561 bp, Homo sapiens
  Payload ID: 2511
  Gene Symbol: CD151
  Gene Name: CD151 molecule (Raph blood group)
  ENST ID: ENST00000525333
  CDS Start-End: 323-561
gctgccgccgccgccagggcccggactcggacgcgtggtagcctagagtcctggggagcttctgtccacctgtcctgcagaggagtcgtttccagcccggctggtgagtgctggccagggtggggcagagcaggcggggcggcgaaagtccagacctggctgtgctgtctggaaacgtggcccagggcgctcagctgctgtctgcaccccacgccctccctggcttccccatgctcacagcttgcccactgctgcaggtcgggcgggcacggggcatctggggaggggcatagcctgtctgtgctgccccctcagccccaggatgggtgagttcaacgagaagaagacaacatgtggcaccgtttgcctcaagtacctgctgtttacctacaattgctgcttctggctggctggcctggctgtcatggcagtgggcatctggacgctggccctcaagagtgactacatcagcctgctggcctcaggcacctacctggccacagcctacatcctggtggtggcgggcactgtcgtcatggtgactggggtcttgggctgctg

SEQ ID NO: 115351 - DNA, 608 bp, Homo sapiens
  Payload ID: 2511
  Gene Symbol: CD151
  Gene Name: CD151 molecule (Raph blood group)
  ENST ID: ENST00000529810
  CDS Start-End: 74-608
gctgggagccgccgcccccgcagctgctgccgccgccgccagggcccggactcggacgcgtggtagccccaggatgggtgagttcaacgagaagaagacaacatgtggcaccgtttgcctcaagtacctgctgtttacctacaattgctgcttctggctggctggcctggctgtcatggcagtgggcatctggacgctggccctcaagagtgactacatcagcctgctggcctcaggcacctacctggccacagcctacatcctggtggtggcgggcactgtcgtcatggtgactggggtcttgggctgctgcgccaccttcaaggagcgtcggaacctgctgcgcctgctgaacacggagctcaaggagaacctgaaggacaccatgaccaagcgctaccaccagccgggccatgaggctgtgaccagcgctgtggaccagctgcagcaggagttccactgctgtggcagcaacaactcacaggactggcgagacagtgagtggatccgctcacaggaggccggtggccgtgtggtcccagacagctgctgcaagacggtggtggctctttgtgggcagcgagaccatgcctccaacatctacaagg

SEQ ID NO: 115352 - DNA, 1407 bp, Homo sapiens
  Payload ID: 2511
  Gene Symbol: CD151
  Gene Name: CD151 molecule (Raph blood group)
  Uniprot ID: P48509
  ENST ID: ENST00000530726
  CDS Start-End: 84-845
gactcggacgcgtgcctagagtcctggggagcttctgtccacctgtcctgcagaggagtcgtttccagcccggctgccccaggatgggtgagttcaacgagaagaagacaacatgtggcaccgtttgcctcaagtacctgctgtttacctacaattgctgcttctggctggctggcctggctgtcatggcagtgggcatctggacgctggccctcaagagtgactacatcagcctgctggcctcaggcacctacctggccacagcctacatcctggtggtggcgggcactgtcgtcatggtgactggggtcttgggctgctgcgccaccttcaaggagcgtcggaacctgctgcgcctgtacttcatcctgctcctcatcatctttctgctggagatcatcgctggtatcctcgcctacgcctactaccagcagctgaacacggagctcaaggagaacctgaaggacaccatgaccaagcgctaccaccagccgggccatgaggctgtgaccagcgctgtggaccagctgcagcaggagttccactgctgtggcagcaacaactcacaggactggcgagacagtgagtggatccgctcacaggaggccggtggccgtgtggtcccagacagctgctgcaagacggtggtggctctttgtgggcagcgagaccatgcctccaacatctacaaggtggagggcggctgcatcaccaagttggagaccttcatccaggagcacctgagggtcattggggctgtggggatcggcattgcctgtgtgcaggtctttggcatgatcttcacgtgctgcctgtacaggagtctcaagctggagcactactgaccctgccttgggccttgctgctgctgcacccaactactgagctgagaccactgagtaccaggggctgggctccctgatgacacccaccctgtgccatcaccataacctctggggaccccaacctcagaggcagcttcaagtgccttttgctgcgcaccaatgcccagcaggggagatgcaggttggaaggggccttgctgagtggcgcaaggccgagcgttcccagcagggggagaaacccttcacaccccaggcccttcaggaactggggccttgccttgcagccacatggccccatcccagttggggaagccaggtgagctctgacccttgggcctgggcctctgcccctcccaacccagccctcgtctccctcgacagcgcccctgctgtcttccccaccgcagtcaccaccacccgaaatgccacgtggtcactgtgcactgccctgttcatgtgcctctgcggggcagggccttcctggttttgttcactgctgtacccagatgcctacaaccatccctgccacatacaggtgctcaataaacacttgtagagcaga

SEQ ID NO: 115353 - DNA, 1369 bp, Homo sapiens
  Payload ID: 2511
  Gene Symbol: CD151
  Gene Name: CD151 molecule (Raph blood group)
  ENST ID: ENST00000528011
  CDS Start-End: 8-763
ccccaggatgggtgagttcaacgagaagaagacaacatgtggcaccgtttgcctcaagtacctgctgtttacctacaattgctgcttctggctggctggcctggctgtcatggcagtgggcatctggacgctggccctcaagagtgactacatcagcctgctggcctcaggcacctacctggccacagcctacatcctggtggtggcgggcactgtcgtcatggtgactggggtcttgggctgctgcgccaccttcaaggagcgtcggaacctgctgcgcctgtacttcatcctgctcctcatcatctttctgctggagatcatcgctggtatcctcgcctacgcctactaccagcagctgaacacggagctcaaggagaacctgaaggacaccatgaccaagcgctaccaccagccgggccatgaggctgtgaccagcgctgtggaccagctgcagcaggagttccactgctgtggcagcaacaactcacaggactggcgagacagtgagtggatccgctcacaggaggccggtggccgtgtggtcccagacagctgctgcaagacggtggtggctctttgtgggcagcgagaccatgcctccaacatctacaagggcggctgcatcaccaagttggagaccttcatccaggagcacctgagggtcattggggctgtggggatcggcattgcctgtgtgcaggtctttggcatgatcttcacgtgctgcctgtacaggagtctcaagctggagcactactgaccctgccttgggccttgctgctgctgcacccaactactgagctgagaccactgagtaccaggggctgggctccctgatgacacccaccctgtgccatcaccataacctctggggaccccaacctcagaggcagcttcaagtgccttttgctgcgcaccaatgcccagcaggggaggtgaggggggctggcggggcgaagtttggggggtgttttgtggggctccccagacacactctctgcctggtggtcagatgcaggttggaaggggccttgctgagtggcgcaaggccgagcgttcccagcagggggagaaacccttcacaccccaggcccttcaggaactggggccttgccttgcagccacatggccccatcccagttggggaagccaggtgagctctgacccttgggcctgggcctctgcccctcccaacccagccctcgtctccctcgacagcgcccctgctgtcttccccaccgcagtcaccaccacccgaaatgccacgtggtcactgtgcactgccctgttcatgtgcctctgcggggcagggccttcctggttttgttcactgctgtacccagatgcctacaaccatccctgccac

SEQ ID NO: 115354 - DNA, 545 bp, Homo sapiens
  Payload ID: 2511
  Gene Symbol: CD151
  Gene Name: CD151 molecule (Raph blood group)
  ENST ID: ENST00000528867
  CDS Start-End: 276-545
attctccccaccccggccaggatgaaggaagggctgccctttaacagaccgtaaacaggcctggagagcttaggaaggggctgagctggggcctgtctgagcccctacccctctgctgtctgagtggcctcctccgcccttactgcaggcccataggctcctgccagcctgtgacgtgcggccccgggaatgccgtggggagcgggcaggctggcatgagctcaccggaggtacccgctagggcttcctcccccggccgctagcagggccccaggatgggtgagttcaacgagaagaagacaacatgtggcaccgtttgcctcaagtacctgctgtttacctacaattgctgcttctggctggctggcctggctgtcatggcagtgggcatctggacgctggccctcaagagtgactacatcagcctgctggcctcaggcacctacctggccacagcctacatcctggtggtggcgggcactgtcgtcatggtgactggggtcttgggctgctgcgccaccttcaaggagcgtcggaacctgctg

SEQ ID NO: 115355 - DNA, 648 bp, Homo sapiens
  Payload ID: 2511
  Gene Symbol: CD151
  Gene Name: CD151 molecule (Raph blood group)
  ENST ID: ENST00000530320
  CDS Start-End: 139-648
caccaggggtctgtcctggctgtcagggctcctgagtcgctaggaagtgacacgtcctgttcccacaggggctcattcacaggcctcccaggacagtggctggctctgccccgacttctgggctggcttggccccaggatgggtgagttcaacgagaagaagacaacatgtggcaccgtttgcctcaagtacctgctgtttacctacaattgctgcttctggctggctggcctggctgtcatggcagtgggcatctggacgctggccctcaagagtgactacatcagcctgctggcctcaggcacctacctggccacagcctacatcctggtggtggcgggcactgtcgtcatggtgactggggtcttgggctgctgcgccaccttcaaggagcgtcggaacctgctgcgcctgtacttcatcctgctcctcatcatctttctgctggagatcatcgctggtatcctcgcctacgcctactaccagcagctgaacacggagctcaaggagaacctgaaggacaccatgaccaagcgctaccaccagccgggccatgaggctgtgaccagcgctgtggaccagctgcagcaggagttccactgctgtggcagcaacaactcacaggactggcgagacagtgagtggatc

SEQ ID NO: 115356 - DNA, 713 bp, Homo sapiens
  Payload ID: 2511
  Gene Symbol: CD151
  Gene Name: CD151 molecule (Raph blood group)
  ENST ID: ENST00000526439
  CDS Start-End: 520-713
ggctggttgtgaactcccgacctcaagtgattgcacctgccttggcctcccaaagtgctggcattataggcatgagacaccgcacctggactcctttcctctactttctttgggttaatttgctagtctctttttattatttatttatttattttgagatggagtctcactctgtcgcccaggctggagtgcagtggcaccatctcggctcactgcaagcttcgcctcccgggttcacgccattctcctgcctcagcctcccaagtagctgggactacaggcgcccgccaccacgcccggctaattttttgtatttctagtacagacggggtttcaccgtgttagccaggatggtcttgatctcctgaccttgtgatctgcctgccttggccccccaaagtgctgggattacaggcgtgagccaccgcgcctggccctgtgtcccctcctatccgtctcccagtcaggggcccggtgctgtggccccgctgacccctcccctgcctcctcagccccaggatgggtgagttcaacgagaagaagacaacatgtggcaccgtttgcctcaagtacctgctgtttacctacaattgctgcttctggctggctggcctggctgtcatggcagtgggcatctggacgctggccctcaagagtgactacatcagcctgctggcctcaggcacctacctggccacagcctacatcctggt

SEQ ID NO: 115357 - DNA, 771 bp, Homo sapiens
  Payload ID: 2511
  Gene Symbol: CD151
  Gene Name: CD151 molecule (Raph blood group)
  ENST ID: ENST00000526693
  CDS Start-End: 244-771
ccgccgcccccgcagctgctgccgccgccgccagggcccggactcggacgcgtgcctagagtcctggggagcttctgtccacctgtcctgcagaggagtcgtttccagcccggctggcccataggctcctgccagcctgtgacgtgcggccccgggaatgccgtggggagcgggcaggctggcatgagctcaccggaggtacccgctagggcttcctcccccggccgctagcagggccccaggatgggtgagttcaacgagaagaagacaacatgtggcaccgtttgcctcaagtacctgctgtttacctacaattgctgcttctggctggctggcctggctgtcatggcagtgggcatctggacgctggccctcaagagtgactacatcagcctgctggcctcaggcacctacctggccacagcctacatcctggtggtggcgggcactgtcgtcatggtgactggggtcttgggctgctgcgccaccttcaaggagcgtcggaacctgctgcgcctgtacttcatcctgctcctcatcatctttctgctggagatcatcgctggtatcctcgcctacgcctactaccagcagctgaacacggagctcaaggagaacctgaaggacaccatgaccaagcgctaccaccagccgggccatgaggctgtgaccagcgctgtggaccagctgcagcaggagttccactgctgtggcagcaacaactcacaggactggcgagacagtgagtggatccgctcacaggaggccggt

SEQ ID NO: 115358 - DNA, 565 bp, Homo sapiens
  Payload ID: 2511
  Gene Symbol: CD151
  Gene Name: CD151 molecule (Raph blood group)
  ENST ID: ENST00000525718
  CDS Start-End: 290-565
tgaggccggggcggggccggggcggggcggggcggggcgtccccctcgtaggctccgggccgcgcattctcagcgctgggagccgccgcccccgcagctgctgccgccgccgccagggcccggactcggacgcgtggtaggctgtagctgccgctgtttgtgggggaagggccagtgatgggtctggagcgaaggccaagagtggggcacctgggggaagcctagagtcctggggagcttctgtccacctgtcctgcagaggagtcgtttccagcccggctgccccaggatgggtgagttcaacgagaagaagacaacatgtggcaccgtttgcctcaagtacctgctgtttacctacaattgctgcttctggctggctggcctggctgtcatggcagtgggcatctggacgctggccctcaagagtgactacatcagcctgctggcctcaggcacctacctggccacagcctacatcctggtggtggcgggcactgtcgtcatggtgactggggtcttgggctgctgcgccaccttcaaggagcgtcggaacctgctgcgcctg

SEQ ID NO: 115359 - DNA, 797 bp, Homo sapiens
  Payload ID: 2511
  Gene Symbol: CD151
  Gene Name: CD151 molecule (Raph blood group)
  ENST ID: ENST00000527341
  CDS Start-End: 257-797
cgccgccagggcccggactcggacgcgtggtagcctagagtcctggggagcttctgtccacctgtcctgcagaggagtcgtttccagcccggctggtgagtgctggccagggtggggcagagcaggcggggcggcgaaagtccagacctggctgtgctgtctggaaacgtggcccagggcgctcagctgctgtctgcaccccacgccctccctggcttccccatgctcacagcttgcccactgctgcagccccaggatgggtgagttcaacgagaagaagacaacatgtggcaccgtttgcctcaagtacctgctgtttacctacaattgctgcttctggctggctggcctggctgtcatggcagtgggcatctggacgctggccctcaagagtgactacatcagcctgctggcctcaggcacctacctggccacagcctacatcctggtggtggcgggcactgtcgtcatggtgactggggtcttgggctgctgcgccaccttcaaggagcgtcggaacctgctgcgcctgtacttcatcctgctcctcatcatctttctgctggagatcatcgctggtatcctcgcctacgcctactaccagcagctgaacacggagctcaaggagaacctgaaggacaccatgaccaagcgctaccaccagccgggccatgaggctgtgaccagcgctgtggaccagctgcagcaggagttccactgctgtggcagcaacaactcacaggactggcgagacagtgagtggatccgctcacaggaggccggtggccgtgtggtcc

SEQ ID NO: 115360 - DNA, 1425 bp, Homo sapiens
  Payload ID: 2512
  Gene Symbol: CD160
  Gene Name: CD160 molecule
  Uniprot ID: O95971
  ENST ID: ENST00000235933
  CDS Start-End: 85-630
ctgtgcttttaggagactgaagccaaggataccagcagagccaacatttgcttcaagttcctgggcctgctgacagcgtgcaggatgctgttggaacccggcagaggctgctgtgccctggccatcctgctggcaattgtggacatccagtctggtggatgcattaacatcaccagctcagcttcccaggaaggaacgcgactaaacttaatctgtactgtatggcataagaaagaagaggctgaggggtttgtagtgtttttgtgcaaggacaggtctggagactgttctcctgagaccagtttaaaacagctgagacttaaaagggatcctgggatagatggtgttggtgaaatatcatctcagttgatgttcaccataagccaagtcacaccgttgcacagtgggacctaccagtgttgtgccagaagccagaagtcaggtatccgccttcagggccattttttctccattctattcacagagacagggaactacacagtgacgggattgaaacaaagacaacaccttgagttcagccataatgaaggcactctcagttcaggcttcctacaagaaaaggtctgggtaatgctggtcaccagccttgtggcccttcaagctttgtaagccttgtgccaaaagaaacttttaaaacagctacagcaagatgagtctgactatggcttagtatctttctcattacaataggcacagagaagaatgcaacagggcacaggggaagagatgctaaatataccaagaatctgtggaaatataagctggggcaaatcagtgtaatccttgactttgctcctcaccatcagggcaaacttgccttcttccctcctaagctccagtaaataaacagaacagctttcaccaaagtgggtagtatagtcctcaaatatcggataaatatatgcgtttttgtaccccagaaaaacttttcctccctcttcatcaacatagtaaaataagtcaaacaaaatgagaacaccaaattttgggggaataaatttttatttaacactgcaaaggaaagagagagaaaacaagcaaagataggtaggacagaaaggaagacagccagatccagtgattgacttggcatgaaaatgagaaaatgcagacagacctcaacattcaacaacatccatacagcactgctggaggaagaggaagatttgtgcagaccaagagcaccacagactacaactgcccagcttcatctaaatacttgttaacctctttggtcatttctctttttaaataaatgcccatagcagtatttggagtcttttcttttctcctaaatccacaaactctcttctttctctttggacagatgacctcttgtcatagttaagcagagagtgggcaggatattcctgataggaggaactacatgaataaaggggtaag

SEQ ID NO: 115361 - DNA, 1424 bp, Homo sapiens
  Payload ID: 2512
  Gene Symbol: CD160
  Gene Name: CD160 molecule
  Uniprot ID: O95971
  ENST ID: ENST00000369288
  CDS Start-End: 219-764
ccccagtctgagaacaagaaagaagaacttctgtctcgagggtctcactgtcaaccaggccagagtgcagtgaagatcatacctcactacatccgtgaactcccgggctcctcccacctaagtctcttgagtagctgggacttcaggagactgaagccaaggataccagcagagccaacatttgcttcaagttcctgggcctgctgacagcgtgcaggatgctgttggaacccggcagaggctgctgtgccctggccatcctgctggcaattgtggacatccagtctggtggatgcattaacatcaccagctcagcttcccaggaaggaacgcgactaaacttaatctgtactgtatggcataagaaagaagaggctgaggggtttgtagtgtttttgtgcaaggacaggtctggagactgttctcctgagaccagtttaaaacagctgagacttaaaagggatcctgggatagatggtgttggtgaaatatcatctcagttgatgttcaccataagccaagtcacaccgttgcacagtgggacctaccagtgttgtgccagaagccagaagtcaggtatccgccttcagggccattttttctccattctattcacagagacagggaactacacagtgacgggattgaaacaaagacaacaccttgagttcagccataatgaaggcactctcagttcaggcttcctacaagaaaaggtctgggtaatgctggtcaccagccttgtggcccttcaagctttgtaagccttgtgccaaaagaaacttttaaaacagctacagcaagatgagtctgactatggcttagtatctttctcattacaataggcacagagaagaatgcaacagggcacaggggaagagatgctaaatataccaagaatctgtggaaatataagctggggcaaatcagtgtaatccttgactttgctcctcaccatcagggcaaacttgccttcttccctcctaagctccagtaaataaacagaacagctttcaccaaagtgggtagtatagtcctcaaatatcggataaatatatgcgtttttgtaccccagaaaaacttttcctccctcttcatcaacatagtaaaataagtcaaacaaaatgagaacaccaaattttgggggaataaatttttatttaacactgcaaaggaaagagagagaaaacaagcaaagataggtaggacagaaaggaagacagccagatccagtgattgacttggcatgaaaatgagaaaatgcagacagacctcaacattcaacaacatccatacagcactgctggaggaagaggaagatttgtgcagaccaagagcaccacagactacaactgcccagcttcatctaaatacttgttaacctctttggtcatttctctttttaaataaatgcccatagcagt

SEQ ID NO: 115362 - DNA, 705 bp, Homo sapiens
  Payload ID: 2512
  Gene Symbol: CD160
  Gene Name: CD160 molecule
  ENST ID: ENST00000401557
  CDS Start-End: 1-705
atgctgttggaacccggcagaggctgctgtgccctggccatcctgctggcaattgtggacatccagtctggtggatgcattaacatcaccagctcagcttcccaggaaggaacgcgactaaacttaatctgtactgtatggcataagaaagaagaggctgaggggtttgtagtgtttttgtgcaaggacaggtctggagactgttctcctgagaccagtttaaaacagctgagacttaaaagggatcctgggatagatggtgttggtgaaatatcatctcagttgatgttcaccataagccaagtcacaccgttgcacagtgggacctaccagtgttgtgccagaagccagaagtcaggtatccgccttcagggccattttttctccattctattcacagagacagggaactacacagtgacgggattgaaacaaagacaacaccttgagttcagccataatgaaggcactctcagttcaggcttcctacaagaaaaggtctgggtaatgctggtcaccagccttgtggcccttcaaggtatgtccaaaagagccgtaagcaccccaagcaatgagggtgctattatatttctgccaccttggttattctccaggaggagaaggttggaaaggatgtccagggggagagaaaaatgttactcaagccctggctatccacaggaaagttcaaaccagtttcactga

SEQ ID NO: 115363 - DNA, 219 bp, Homo sapiens
  Payload ID: 2512
  Gene Symbol: CD160
  Gene Name: CD160 molecule
  ENST ID: ENST00000584442
  CDS Start-End: 1-219
atgctgttggaacccggcagaggctgctgtgccctggccatcctgctggcaattgtggacatccagtctggtgagacagggaactacacagtgacgggattgaaacaaagacaacaccttgagttcagccataatgaaggcactctcagttcaggcttcctacaagaaaaggtctgggtaatgctggtcaccagccttgtggcccttcaagctttgtaa

SEQ ID NO: 115364 - DNA, 3388 bp, Homo sapiens
  Payload ID: 2512
  Gene Symbol: CD160
  Gene Name: CD160 molecule
  ENST ID: ENST00000616463
  CDS Start-End: 159-536
aacaagatgcaaggacaatctgaggactgagagccatttcaacgtgagcccccagtctgagaacaagaaagaagaacttctgtctcgagactgaagccaaggataccagcagagccaacatttgcttcaagttcctgggcctgctgacagcgtgcaggatgctgttggaacccggcagaggctgctgtgccctggccatcctgctggcaattgtggacatccagtctggtgagacagggaactacacagtgacgggattgaaacaaagacaacaccttgagttcagccataatgaaggcactctcagttcaggcttcctacaagaaaaggtctgggtaatgctggtcaccagccttgtggcccttcaaggtatgtccaaaagagccgtaagcaccccaagcaatgagggtgctattatatttctgccaccttggttattctccaggaggagaaggttggaaaggatgtccagggggagagaaaaatgttactcaagccctggctatccacaggaaagttcaaaccagtttcactgatccaaaggcactaaggaggaagacagataaatcagacttttcaatgggtaggaggtaagactcattaggaatgaaggcctgtgagagaggcaagttagtacaactacctctactcactgcatgaacagagggctacaagttgaagcaacagattttcagctattagaggaagaaaaggcaagagacagacttggtttggagatgggttttgaacaatgcggctcctcagcaaaggctgatggccagattgagtatattaaacacatgtagctgagtcctctgaaaaccatttaccaatatagattagcgttttccctattagataacaaaaagtgaaacttccaataatttgtcataacgtttttgcataacaagcaactgattcaggtttttgcctggccttggcattcttaactccattttatttaggcattcctcaaatcaataactaccactgttttgaatggcatcagaatgtaagctctatatatatgtaaggactttgtcttctttaccccaacgaaaagtcccacacatatggcaggctcttaataaatttgttaaaaaacctgtatgatgaatcagatgctttacacatgatgattctaaccttatacaacccttgcaagcaaacatcccctggttactcatcaggaaacagacacaaggaagttaaatagggcctggtgcggtggctcacgcctgtaatcccagcactttgggaggccaaggcaggcagatcctttgagcctaggagtttgaggccagtctgggcaacatggcaaaaccccaactatacaaaaaaatacaaaaattaggcatggtggcacacaactgtagtcccaagctaaggcatgaggatcacctgagcccaggctggttgaggttgcagtgagccatgatcatgccactgtactccagcctgggtgacagggtgagacactttctcaaaggaaaaaaaaaaaaaaaaagagttaattgttgcccgtcacagcaattaatacagatccttctcactctaaaaccttacactcagtaatgatctactatatgcaaagcacctcttacatccttcaccaccccattcattctgagattgactcctcccctttccagaaacaggaccacctaaacattccctattccagtcccttatttgcaagtcatcaaaagaaaacagagatttcaaaaagaaaacagagaccttatctgtaatccttggtaaggatcttccaaatttaagcctatgccagttttcaggaggaaacatgaatatgaaacagtctgacctttagacataattttttgttgactttaaattcccttggttaggccactgtaaccagtaaaataaattttattttagaataaaaattataaaggggaaattgagtctagccatacaacctactactagttactatctttgattcccaagtcatcctagagcaaaaaaaaaaaaaaaaaaatcatctctggcctttttttccttttccactcaggtgaagagaatgagcttttgaatccaattttttgttttctcctatattcaattcaagtagctttaaagttaaccaaaggaaaaaaccaaagctcaatatttgattaaacgagaaaatatacactacttagaagctttcttttctttatccttcttccccaactcaaggcttagtagaattattgaaagaggtagtattcagtagaatagtacacatgctttttcaggtccagaaacaccacataggtcaagttatcatgcttacatgtggggaaaaggaggagggagtttcctggacctctgtgcctctctcagctcatgaactagtttcagtgaatatccttgtcttaccactgtgccaacaattcagagctatacgtggaaaacctaccttcaactttttgagtggcatctattgcttctttgattgttccttccagcaaggagcgatcaaaggctagcccccttcccactcccaccagaatcagatttgctcaagattacaaccctaatttagtaataagatgcaatacataaaatagttcccactttccttttccaatccctttacagtcatgagggcctatcacgcacgcatctcaggacaggtgagacttcattatatcaggtattttgttgctattctaagttataaggcagtaatacaaactttctttccacagctttgtaagccttgtgccaaaagaaacttttaaaacagctacagcaagatgagtctgactatggcttagtatctttctcattacaataggcacagagaagaatgcaacagggcacaggggaagagatgctaaatataccaagaatctgtggaaatataagctggggcaaatcagtgtaatccttgactttgctcctcaccatcagggcaaacttgccttcttccctcctaagctccagtaaataaacagaacagctttcaccaaagtgggtagtatagtcctcaaatatcggataaatatatgcgtttttgtaccccagaaaaacttttcctccctcttcatcaacatagtaaaataagtcaaacaaaatgagaacaccaaattttgggggaataaatttttatttaacactgcaaaggaaagagagagaaaacaagcaaagataggtaggacagaaaggaagacagccagatccagtgattgacttggcatgaaaatgagaaaatgcagacagacctcaacattcaacaacatccatacagcactgctggaggaagaggaagatttgtgcagaccaagagcaccacagactacaactgcccagcttcatctaaatacttgttaacctctttggtcatttctctttttaaataaatgcccatagcagt

SEQ ID NO: 115365 - DNA, 4268 bp, Homo sapiens
  Payload ID: 2513
  Gene Symbol: CD163
  Gene Name: CD163 molecule
  Uniprot ID: Q86VB7
  ENST ID: ENST00000359156
  CDS Start-End: 204-3674
attgaagaaaacatgagtatgaaatggaacctcagctctttcaatgacttccctttttgagttgactccgcctccatatgtagccttttcattttcatgaaagtgaagtgatttttagaattcttagttgttttctttagaagaacatttctagggaataatacaagaagatttaggaatcattgaagttataaatctttggaatgagcaaactcagaatggtgctacttgaagactctggatctgctgacttcagaagacattttgtcaacttgagtcccttcaccattactgtggtcttacttctcagtgcctgttttgtcaccagttctcttggaggaacagacaaggagctgaggctagtggatggtgaaaacaagtgtagcgggagagtggaagtgaaagtccaggaggagtggggaacggtgtgtaataatggctggagcatggaagcggtctctgtgatttgtaaccagctgggatgtccaactgctatcaaagcccctggatgggctaattccagtgcaggttctggacgcatttggatggatcatgtttcttgtcgtgggaatgagtcagctctttgggattgcaaacatgatggatggggaaagcatagtaactgtactcaccaacaagatgctggagtgacctgctcagatggatccaatttggaaatgaggctgacgcgtggagggaatatgtgttctggaagaatagagatcaaattccaaggacggtggggaacagtgtgtgatgataacttcaacatagatcatgcatctgtcatttgtagacaacttgaatgtggaagtgctgtcagtttctctggttcatctaattttggagaaggctctggaccaatctggtttgatgatcttatatgcaacggaaatgagtcagctctctggaactgcaaacatcaaggatggggaaagcataactgtgatcatgctgaggatgctggagtgatttgctcaaagggagcagatctgagcctgagactggtagatggagtcactgaatgttcaggaagattagaagtgagattccaaggagaatgggggacaatatgtgatgacggctgggacagttacgatgctgctgtggcatgcaagcaactgggatgtccaactgccgtcacagccattggtcgagttaacgccagtaagggatttggacacatctggcttgacagcgtttcttgccagggacatgaacctgctatctggcaatgtaaacaccatgaatggggaaagcattattgcaatcacaatgaagatgctggcgtgacatgttctgatggatcagatctggagctaagacttagaggtggaggcagccgctgtgctgggacagttgaggtggagattcagagactgttagggaaggtgtgtgacagaggctggggactgaaagaagctgatgtggtttgcaggcagctgggatgtggatctgcactcaaaacatcttatcaagtgtactccaaaatccaggcaacaaacacatggctgtttctaagtagctgtaacggaaatgaaacttctctttgggactgcaagaactggcaatggggtggacttacctgtgatcactatgaagaagccaaaattacctgctcagcccacagggaacccagactggttggaggggacattccctgttctggacgtgttgaagtgaagcatggtgacacgtggggctccatctgtgattcggacttctctctggaagctgccagcgttctatgcagggaattacagtgtggcacagttgtctctatcctggggggagctcactttggagagggaaatggacagatctgggctgaagaattccagtgtgagggacatgagtcccatctttcactctgcccagtagcaccccgcccagaaggaacttgtagccacagcagggatgttggagtagtctgctcaagatacacagaaattcgcttggtgaatggcaagaccccgtgtgagggcagagtggagctcaaaacgcttggtgcctggggatccctctgtaactctcactgggacatagaagatgcccatgttctttgccagcagcttaaatgtggagttgccctttctaccccaggaggagcacgttttggaaaaggaaatggtcagatctggaggcatatgtttcactgcactgggactgagcagcacatgggagattgtcctgtaactgctctaggtgcttcattatgtccttcagagcaagtggcctctgtaatctgctcaggaaaccagtcccaaacactgtcctcgtgcaattcatcgtctttgggcccaacaaggcctaccattccagaagaaagtgctgtggcctgcatagagagtggtcaacttcgcctggtaaatggaggaggtcgctgtgctgggagagtagagatctatcatgagggctcctggggcaccatctgtgatgacagctgggacctgagtgatgcccacgtggtttgcagacagctgggctgtggagaggccattaatgccactggttctgctcattttggggaaggaacagggcccatctggctggatgagatgaaatgcaatggaaaagaatcccgcatttggcagtgccattcacacggctgggggcagcaaaattgcaggcacaaggaggatgcgggagttatctgctcagaattcatgtctctgagactgaccagtgaagccagcagagaggcctgtgcagggcgtctggaagttttttacaatggagcttggggcactgttggcaagagtagcatgtctgaaaccactgtgggtgtggtgtgcaggcagctgggctgtgcagacaaagggaaaatcaaccctgcatctttagacaaggccatgtccattcccatgtgggtggacaatgttcagtgtccaaaaggacctgacacgctgtggcagtgcccatcatctccatgggagaagagactggccagcccctcggaggagacctggatcacatgtgacaacaagataagacttcaggaaggacccacttcctgttctggacgtgtggagatctggcatggaggttcctgggggacagtgtgtgatgactcttgggacttggacgatgctcaggtggtgtgtcaacaacttggctgtggtccagctttgaaagcattcaaagaagcagagtttggtcaggggactggaccgatatggctcaatgaagtgaagtgcaaagggaatgagtcttccttgtgggattgtcctgccagacgctggggccatagtgagtgtgggcacaaggaagacgctgcagtgaattgcacagatatttcagtgcagaaaaccccacaaaaagccacaacaggtcgctcatcccgtcagtcatcctttattgcagtcgggatccttggggttgttctgttggccattttcgtcgcattattcttcttgactaaaaagcgaagacagagacagcggcttgcagtttcctcaagaggagagaacttagtccaccaaattcaataccgggagatgaattcttgcctgaatgcagatgatctggacctaatgaattcctcagaaaattcccatgagtcagctgatttcagtgctgctgaactaatttctgtgtctaaatttcttcctatttctggaatggaaaaggaggccattctgagccacactgaaaaggaaaatgggaatttataacccagtgagttcagcctttaagataccttgatgaagacctggactattgaatggagcagaaattcacctctctcactgactattacagttgcatttttatggagttcttcttctcctaggattcctaagactgctgctgaatttataaaaattaagtttgtgaatgtgactacttagtggtgtatatgagactttcaagggaattaaataaataaataagaatgttattgatttgagtttgctttaattacttgtccttaattctattaatttctaaatgggcttcctaattttttgtagagtttcctagatgtattataatgtgttttatttgacagtgtttcaatttgcatatacagtactgtatattttttcttatttggtttgaataattttcctattaccaaataaaaataaatttatttttactttagtttttctaagacaggaaaagttaatgatattgaagggtctgtaaataatatatggctaactttataaggcatgactcacaacgattctttaactgctttttgttactgtaattctgttcactagaataaaatgcagagccacacctggtgagggcacaaa

SEQ ID NO: 115366 - DNA, 3800 bp, Homo sapiens
  Payload ID: 2513
  Gene Symbol: CD163
  Gene Name: CD163 molecule
  ENST ID: ENST00000396620
  CDS Start-End: 87-3551
gaattcttagttgttttctttagaagaacatttctagggaataatacaagaagatttaggaatcattgaagttataaatctttggaatgagcaaactcagaatggtgctacttgaagactctggatctgctgacttcagaagacattttgtcaacttgagtcccttcaccattactgtggtcttacttctcagtgcctgttttgtcaccagttctcttggaggaacagacaaggagctgaggctagtggatggtgaaaacaagtgtagcgggagagtggaagtgaaagtccaggaggagtggggaacggtgtgtaataatggctggagcatggaagcggtctctgtgatttgtaaccagctgggatgtccaactgctatcaaagcccctggatgggctaattccagtgcaggttctggacgcatttggatggatcatgtttcttgtcgtgggaatgagtcagctctttgggattgcaaacatgatggatggggaaagcatagtaactgtactcaccaacaagatgctggagtgacctgctcagatggatccaatttggaaatgaggctgacgcgtggagggaatatgtgttctggaagaatagagatcaaattccaaggacggtggggaacagtgtgtgatgataacttcaacatagatcatgcatctgtcatttgtagacaacttgaatgtggaagtgctgtcagtttctctggttcatctaattttggagaaggctctggaccaatctggtttgatgatcttatatgcaacggaaatgagtcagctctctggaactgcaaacatcaaggatggggaaagcataactgtgatcatgctgaggatgctggagtgatttgctcaaagggagcagatctgagcctgagactggtagatggagtcactgaatgttcaggaagattagaagtgagattccaaggagaatgggggacaatatgtgatgacggctgggacagttacgatgctgctgtggcatgcaagcaactgggatgtccaactgccgtcacagccattggtcgagttaacgccagtaagggatttggacacatctggcttgacagcgtttcttgccagggacatgaacctgctatctggcaatgtaaacaccatgaatggggaaagcattattgcaatcacaatgaagatgctggcgtgacatgttctgatggatcagatctggagctaagacttagaggtggaggcagccgctgtgctgggacagttgaggtggagattcagagactgttagggaaggtgtgtgacagaggctggggactgaaagaagctgatgtggtttgcaggcagctgggatgtggatctgcactcaaaacatcttatcaagtgtactccaaaatccaggcaacaaacacatggctgtttctaagtagctgtaacggaaatgaaacttctctttgggactgcaagaactggcaatggggtggacttacctgtgatcactatgaagaagccaaaattacctgctcagcccacagggaacccagactggttggaggggacattccctgttctggacgtgttgaagtgaagcatggtgacacgtggggctccatctgtgattcggacttctctctggaagctgccagcgttctatgcagggaattacagtgtggcacagttgtctctatcctggggggagctcactttggagagggaaatggacagatctgggctgaagaattccagtgtgagggacatgagtcccatctttcactctgcccagtagcaccccgcccagaaggaacttgtagccacagcagggatgttggagtagtctgctcaagtaagacccagaaaacatctttaattggttctcatactgtgaaagggacagggttagggagtcatagctgtctttttctaaagccctgtctccttccaggatacacagaaattcgcttggtgaatggcaagaccccgtgtgagggcagagtggagctcaaaacgcttggtgcctggggatccctctgtaactctcactgggacatagaagatgcccatgttctttgccagcagcttaaatgtggagttgccctttctaccccaggaggagcacgttttggaaaaggaaatggtcagatctggaggcatatgtttcactgcactgggactgagcagcacatgggagattgtcctgtaactgctctaggtgcttcattatgtccttcagagcaagtggcctctgtaatctgctcaggaaaccagtcccaaacactgtcctcgtgcaattcatcgtctttgggcccaacaaggcctaccattccagaagaaagtgctgtggcctgcatagagagtggtcaacttcgcctggtaaatggaggaggtcgctgtgctgggagagtagagatctatcatgagggctcctggggcaccatctgtgatgacagctgggacctgagtgatgcccacgtggtttgcagacagctgggctgtggagaggccattaatgccactggttctgctcattttggggaaggaacagggcccatctggctggatgagatgaaatgcaatggaaaagaatcccgcatttggcagtgccattcacacggctgggggcagcaaaattgcaggcacaaggaggatgcgggagttatctgctcagaattcatgtctctgagactgaccagtgaagccagcagagaggcctgtgcagggcgtctggaagttttttacaatggagcttggggcactgttggcaagagtagcatgtctgaaaccactgtgggtgtggtgtgcaggcagctgggctgtgcagacaaagggaaaatcaaccctgcatctttagacaaggccatgtccattcccatgtgggtggacaatgttcagtgtccaaaaggacctgacacgctgtggcagtgcccatcatctccatgggagaagagactggccagcccctcggaggagacctggatcacatgtgacaacaagataagacttcaggaaggacccacttcctgttctggacgtgtggagatctggcatggaggttcctgggggacagtgtgtgatgactcttgggacttggacgatgctcaggtggtgtgtcaacaacttggctgtggtccagctttgaaagcattcaaagaagcagagtttggtcaggggactggaccgatatggctcaatgaagtgaagtgcaaagggaatgagtcttccttgtgggattgtcctgccagacgctggggccatagtgagtgtgggcacaaggaagacgctgcagtgaattgcacagatatttcagtgcagaaaaccccacaaaaagccacaacaggtcgctcatcccgtcagtcatcctttattgcagtcgggatccttggggttgttctgttggccattttcgtcgcattattcttcttgactaaaaagcgaagacagagacagcggcttgcagtttcctcaagaggagagaacttagtccaccaaattcaataccgggagatgaattcttgcctgaatgcagatgatctggacctaatgaattcctcaggaggccattctgagccacactgaaaaggaaaatgggaatttataacccagtgagttcagcctttaagataccttgatgaagacctggactattgaatggagcagaaattcacctctctcactgactattacagttgcatttttatggagttcttcttctcctaggattcctaagactgctgctgaatttataaaaattaagtttgtgaatgtgactacttagtggtgtatatgagactttcaagggaattaaataaataaataagaatgtta

SEQ ID NO: 115367 - DNA, 3701 bp, Homo sapiens
  Payload ID: 2513
  Gene Symbol: CD163
  Gene Name: CD163 molecule
  Uniprot ID: Q86VB7
  ENST ID: ENST00000432237
  CDS Start-End: 87-3452
gaattcttagttgttttctttagaagaacatttctagggaataatacaagaagatttaggaatcattgaagttataaatctttggaatgagcaaactcagaatggtgctacttgaagactctggatctgctgacttcagaagacattttgtcaacttgagtcccttcaccattactgtggtcttacttctcagtgcctgttttgtcaccagttctcttggaggaacagacaaggagctgaggctagtggatggtgaaaacaagtgtagcgggagagtggaagtgaaagtccaggaggagtggggaacggtgtgtaataatggctggagcatggaagcggtctctgtgatttgtaaccagctgggatgtccaactgctatcaaagcccctggatgggctaattccagtgcaggttctggacgcatttggatggatcatgtttcttgtcgtgggaatgagtcagctctttgggattgcaaacatgatggatggggaaagcatagtaactgtactcaccaacaagatgctggagtgacctgctcagatggatccaatttggaaatgaggctgacgcgtggagggaatatgtgttctggaagaatagagatcaaattccaaggacggtggggaacagtgtgtgatgataacttcaacatagatcatgcatctgtcatttgtagacaacttgaatgtggaagtgctgtcagtttctctggttcatctaattttggagaaggctctggaccaatctggtttgatgatcttatatgcaacggaaatgagtcagctctctggaactgcaaacatcaaggatggggaaagcataactgtgatcatgctgaggatgctggagtgatttgctcaaagggagcagatctgagcctgagactggtagatggagtcactgaatgttcaggaagattagaagtgagattccaaggagaatgggggacaatatgtgatgacggctgggacagttacgatgctgctgtggcatgcaagcaactgggatgtccaactgccgtcacagccattggtcgagttaacgccagtaagggatttggacacatctggcttgacagcgtttcttgccagggacatgaacctgctatctggcaatgtaaacaccatgaatggggaaagcattattgcaatcacaatgaagatgctggcgtgacatgttctgatggatcagatctggagctaagacttagaggtggaggcagccgctgtgctgggacagttgaggtggagattcagagactgttagggaaggtgtgtgacagaggctggggactgaaagaagctgatgtggtttgcaggcagctgggatgtggatctgcactcaaaacatcttatcaagtgtactccaaaatccaggcaacaaacacatggctgtttctaagtagctgtaacggaaatgaaacttctctttgggactgcaagaactggcaatggggtggacttacctgtgatcactatgaagaagccaaaattacctgctcagcccacagggaacccagactggttggaggggacattccctgttctggacgtgttgaagtgaagcatggtgacacgtggggctccatctgtgattcggacttctctctggaagctgccagcgttctatgcagggaattacagtgtggcacagttgtctctatcctggggggagctcactttggagagggaaatggacagatctgggctgaagaattccagtgtgagggacatgagtcccatctttcactctgcccagtagcaccccgcccagaaggaacttgtagccacagcagggatgttggagtagtctgctcaagatacacagaaattcgcttggtgaatggcaagaccccgtgtgagggcagagtggagctcaaaacgcttggtgcctggggatccctctgtaactctcactgggacatagaagatgcccatgttctttgccagcagcttaaatgtggagttgccctttctaccccaggaggagcacgttttggaaaaggaaatggtcagatctggaggcatatgtttcactgcactgggactgagcagcacatgggagattgtcctgtaactgctctaggtgcttcattatgtccttcagagcaagtggcctctgtaatctgctcaggaaaccagtcccaaacactgtcctcgtgcaattcatcgtctttgggcccaacaaggcctaccattccagaagaaagtgctgtggcctgcatagagagtggtcaacttcgcctggtaaatggaggaggtcgctgtgctgggagagtagagatctatcatgagggctcctggggcaccatctgtgatgacagctgggacctgagtgatgcccacgtggtttgcagacagctgggctgtggagaggccattaatgccactggttctgctcattttggggaaggaacagggcccatctggctggatgagatgaaatgcaatggaaaagaatcccgcatttggcagtgccattcacacggctgggggcagcaaaattgcaggcacaaggaggatgcgggagttatctgctcagaattcatgtctctgagactgaccagtgaagccagcagagaggcctgtgcagggcgtctggaagttttttacaatggagcttggggcactgttggcaagagtagcatgtctgaaaccactgtgggtgtggtgtgcaggcagctgggctgtgcagacaaagggaaaatcaaccctgcatctttagacaaggccatgtccattcccatgtgggtggacaatgttcagtgtccaaaaggacctgacacgctgtggcagtgcccatcatctccatgggagaagagactggccagcccctcggaggagacctggatcacatgtgacaacaagataagacttcaggaaggacccacttcctgttctggacgtgtggagatctggcatggaggttcctgggggacagtgtgtgatgactcttgggacttggacgatgctcaggtggtgtgtcaacaacttggctgtggtccagctttgaaagcattcaaagaagcagagtttggtcaggggactggaccgatatggctcaatgaagtgaagtgcaaagggaatgagtcttccttgtgggattgtcctgccagacgctggggccatagtgagtgtgggcacaaggaagacgctgcagtgaattgcacagatatttcagtgcagaaaaccccacaaaaagccacaacaggtcgctcatcccgtcagtcatcctttattgcagtcgggatccttggggttgttctgttggccattttcgtcgcattattcttcttgactaaaaagcgaagacagagacagcggcttgcagtttcctcaagaggagagaacttagtccaccaaattcaataccgggagatgaattcttgcctgaatgcagatgatctggacctaatgaattcctcaggaggccattctgagccacactgaaaaggaaaatgggaatttataacccagtgagttcagcctttaagataccttgatgaagacctggactattgaatggagcagaaattcacctctctcactgactattacagttgcatttttatggagttcttcttctcctaggattcctaagactgctgctgaatttataaaaattaagtttgtgaatgtgactacttagtggtgtatatgagactttcaagggaattaaataaataaataagaatgtta

SEQ ID NO: 115368 - DNA, 640 bp, Homo sapiens
  Payload ID: 2513
  Gene Symbol: CD163
  Gene Name: CD163 molecule
  ENST ID: ENST00000537626
  CDS Start-End: 1-413
ctggaccgatatggctcaatgaagtgaagtgcaaagggaatgagtcttccttgtgggattgtcctgccagacgctggggccatagtgagtgtgggcacaaggaagacgctgcagtgaattgcacagatatttcagtgcagaaaaccccacaaaaagccacaacaggtcgctcatcccgtcagtcatcctttattgcagtcgggatccttggggttgttctgttggccattttcgtcgcattattcttcttgactaaaaagcgaagacagagacagcggcttgcagaaaattcccatgagtcagctgatttcagtgctgctgaactaatttctgtgtctaaatttcttcctatttctggaatggaaaaggaggccattctgagccacactgaaaaggaaaatgggaatttataacccagtgagttcagcctttaagataccttgatgaagacctggactattgaatggagcagaaattcacctctctcactgactattacagttgcatttttatggagttcttcttctcctaggattcctaagactgctgctgaatttataaaaattaagtttgtgaatgtgactacttagtggtgtatatgagactttcaagggaattaaataaataaataagaatgtta

SEQ ID NO: 115369 - DNA, 3590 bp, Homo sapiens
  Payload ID: 2513
  Gene Symbol: CD163
  Gene Name: CD163 molecule
  ENST ID: ENST00000541972
  CDS Start-End: 12-3341
actgaaactatatgagcctggacttcagaagacattttgtcaacttgagtcccttcaccattactgtggtcttacttctcagtgcctgttttgtcaccagttctcttggaggaacagacaaggagctgaggctagtggatggtgaaaacaagtgtagcgggagagtggaagtgaaagtccaggaggagtggggaacggtgtgtaataatggctggagcatggaagcggtctctgtgatttgtaaccagctgggatgtccaactgctatcaaagcccctggatgggctaattccagtgcaggttctggacgcatttggatggatcatgtttcttgtcgtgggaatgagtcagctctttgggattgcaaacatgatggatggggaaagcatagtaactgtactcaccaacaagatgctggagtgacctgctcagatggatccaatttggaaatgaggctgacgcgtggagggaatatgtgttctggaagaatagagatcaaattccaaggacggtggggaacagtgtgtgatgataacttcaacatagatcatgcatctgtcatttgtagacaacttgaatgtggaagtgctgtcagtttctctggttcatctaattttggagaaggctctggaccaatctggtttgatgatcttatatgcaacggaaatgagtcagctctctggaactgcaaacatcaaggatggggaaagcataactgtgatcatgctgaggatgctggagtgatttgctcaaagggagcagatctgagcctgagactggtagatggagtcactgaatgttcaggaagattagaagtgagattccaaggagaatgggggacaatatgtgatgacggctgggacagttacgatgctgctgtggcatgcaagcaactgggatgtccaactgccgtcacagccattggtcgagttaacgccagtaagggatttggacacatctggcttgacagcgtttcttgccagggacatgaacctgctatctggcaatgtaaacaccatgaatggggaaagcattattgcaatcacaatgaagatgctggcgtgacatgttctgatggatcagatctggagctaagacttagaggtggaggcagccgctgtgctgggacagttgaggtggagattcagagactgttagggaaggtgtgtgacagaggctggggactgaaagaagctgatgtggtttgcaggcagctgggatgtggatctgcactcaaaacatcttatcaagtgtactccaaaatccaggcaacaaacacatggctgtttctaagtagctgtaacggaaatgaaacttctctttgggactgcaagaactggcaatggggtggacttacctgtgatcactatgaagaagccaaaattacctgctcagcccacagggaacccagactggttggaggggacattccctgttctggacgtgttgaagtgaagcatggtgacacgtggggctccatctgtgattcggacttctctctggaagctgccagcgttctatgcagggaattacagtgtggcacagttgtctctatcctggggggagctcactttggagagggaaatggacagatctgggctgaagaattccagtgtgagggacatgagtcccatctttcactctgcccagtagcaccccgcccagaaggaacttgtagccacagcagggatgttggagtagtctgctcaagatacacagaaattcgcttggtgaatggcaagaccccgtgtgagggcagagtggagctcaaaacgcttggtgcctggggatccctctgtaactctcactgggacatagaagatgcccatgttctttgccagcagcttaaatgtggagttgccctttctaccccaggaggagcacgttttggaaaaggaaatggtcagatctggaggcatatgtttcactgcactgggactgagcagcacatgggagattgtcctgtaactgctctaggtgcttcattatgtccttcagagcaagtggcctctgtaatctgctcaggaaaccagtcccaaacactgtcctcgtgcaattcatcgtctttgggcccaacaaggcctaccattccagaagaaagtgctgtggcctgcatagagagtggtcaacttcgcctggtaaatggaggaggtcgctgtgctgggagagtagagatctatcatgagggctcctggggcaccatctgtgatgacagctgggacctgagtgatgcccacgtggtttgcagacagctgggctgtggagaggccattaatgccactggttctgctcattttggggaaggaacagggcccatctggctggatgagatgaaatgcaatggaaaagaatcccgcatttggcagtgccattcacacggctgggggcagcaaaattgcaggcacaaggaggatgcgggagttatctgctcagaattcatgtctctgagactgaccagtgaagccagcagagaggcctgtgcagggcgtctggaagttttttacaatggagcttggggcactgttggcaagagtagcatgtctgaaaccactgtgggtgtggtgtgcaggcagctgggctgtgcagacaaagggaaaatcaaccctgcatctttagacaaggccatgtccattcccatgtgggtggacaatgttcagtgtccaaaaggacctgacacgctgtggcagtgcccatcatctccatgggagaagagactggccagcccctcggaggagacctggatcacatgtgacaacaagataagacttcaggaaggacccacttcctgttctggacgtgtggagatctggcatggaggttcctgggggacagtgtgtgatgactcttgggacttggacgatgctcaggtggtgtgtcaacaacttggctgtggtccagctttgaaagcattcaaagaagcagagtttggtcaggggactggaccgatatggctcaatgaagtgaagtgcaaagggaatgagtcttccttgtgggattgtcctgccagacgctggggccatagtgagtgtgggcacaaggaagacgctgcagtgaattgcacagatatttcagtgcagaaaaccccacaaaaagccacaacaggtcgctcatcccgtcagtcatcctttattgcagtcgggatccttggggttgttctgttggccattttcgtcgcattattcttcttgactaaaaagcgaagacagagacagcggcttgcagtttcctcaagaggagagaacttagtccaccaaattcaataccgggagatgaattcttgcctgaatgcagatgatctggacctaatgaattcctcaggaggccattctgagccacactgaaaaggaaaatgggaatttataacccagtgagttcagcctttaagataccttgatgaagacctggactattgaatggagcagaaattcacctctctcactgactattacagttgcatttttatggagttcttcttctcctaggattcctaagactgctgctgaatttataaaaattaagtttgtgaatgtgactacttagtggtgtatatgagactttcaagggaattaaataaataaataagaatgtta

SEQ ID NO: 115370 - DNA, 606 bp, Homo sapiens
  Payload ID: 2513
  Gene Symbol: CD163
  Gene Name: CD163 molecule
  ENST ID: ENST00000542280
  CDS Start-End: 1-375
gacgatgctcaggtggtgtgtcaacaacttggctgtggtccagctttgaaagcattcaaagaagcagagtttggtcaggggactggaccgatatggctcaatgaagtgaagtgcaaagggaatgagtcttccttgtgggattgtcctgccagacgctggggccatagtgagtgtgggcacaaggaagacgctgcagtgaattgcacagatatttcagtgcagaaaaccccacaaaaagccacaacagaaaattcccatgagtcagctgatttcagtgctgctgaactaatttctgtgtctaaatttcttcctatttctggaatggaaaaggaggccattctgagccacactgaaaaggaaaatgggaatttataacccagtgagttcagcctttaagataccttgatgaagacctggactattgaatggagcagaaattcacctctctcactgactattacagttgcatttttatggagttcttcttctcctaggattcctaagactgctgctgaatttataaaaattaagtttgtgaatgtgactacttagtggtgtatatgagactttcaagggaattaaataaataaataagaatgttattga

SEQ ID NO: 115371 - DNA, 4615 bp, Homo sapiens
  Payload ID: 2514
  Gene Symbol: CD163L1
  Gene Name: CD163 molecule-like 1
  Uniprot ID: Q9NR16
  ENST ID: ENST00000313599
  CDS Start-End: 59-4420
gattatatataagaggacccaggagttacatcaggactcaggaagagatagacccataatgatgctgcctcaaaactcgtggcatattgattttggaagatgctgctgtcatcagaaccttttctctgctgtggtaacttgcatcctgctcctgaattcctgctttctcatcagcagttttaatggaacagatttggagttgaggctggtcaatggagacggtccctgctctgggacagtggaggtgaaattccagggacagtgggggactgtgtgtgatgatgggtggaacactactgcctcaactgtcgtgtgcaaacagcttggatgtccattttctttcgccatgtttcgttttggacaagccgtgactagacatggaaaaatttggcttgatgatgtttcctgttatggaaatgagtcagctctctgggaatgtcaacaccgggaatggggaagccataactgttatcatggagaagatgttggtgtgaactgttatggtgaagccaatctgggtttgaggctagtggatggaaacaactcctgttcagggagagtggaggtgaaattccaagaaaggtggggaactatatgtgatgatgggtggaacttgaatactgctgccgtggtgtgcaggcaactaggatgtccatcttcttttatttcttctggagttgttaatagccctgctgtattgcgccccatttggctggatgacattttatgccaggggaatgagttggcactctggaattgcagacatcgtggatggggaaatcatgactgcagtcacaatgaggatgtcacattaacttgttatgatagtagtgatcttgaactaaggcttgtaggtggaactaaccgctgtatggggagagtagagctgaaaatccaaggaaggtgggggaccgtatgccaccataagtggaacaatgctgcagctgatgtcgtatgcaagcagttgggatgtggaaccgcacttcacttcgctggcttgcctcatttgcagtcagggtctgatgttgtatggcttgatggtgtctcctgctccggtaatgaatcttttctttgggactgcagacattccggaaccgtcaattttgactgtcttcatcaaaacgatgtgtctgtgatctgctcagatggagcagatttggaactgcgactagcagatggaagtaacaattgttcagggagagtagaggtgagaattcatgaacagtggtggacaatatgtgaccagaactggaagaatgaacaagcccttgtggtttgtaagcagctaggatgtccgttcagcgtctttggcagtcgtcgtgctaaacctagtaatgaagctagagacatttggataaacagcatatcttgcactgggaatgagtcagctctctgggactgcacatatgatggaaaagcaaagcgaacatgcttccgaagatcagatgctggagtaatttgttctgataaggcagatctggacctaaggcttgtcggggctcatagcccctgttatgggagattggaggtgaaataccaaggagagtgggggactgtgtgtcatgacagatggagcacaaggaatgcagctgttgtttgtaaacaattgggatgtggaaagcctttgcatgtgtttggtatgacctattttaaagaagcatcaggacctatttggctggatgacgtttcttgcattggaaatgagtcaaatatctgggactgtgaacacagtggatggggaaagcataattgtgtacacagagaggatgtgattgtaacctgctcaggtgatgcaacatggggcctgaggctggtgggcggcagcaaccgctgctcgggaagactggaggtgtactttcaaggacggtggggcacagtgtgtgatgacggctggaacagtaaagctgcagctgtggtgtgtagccagctggactgcccatcttctatcattggcatgggtctgggaaacgcttctacaggatatggaaaaatttggctcgatgatgtttcctgtgatggagatgagtcagatctctggtcatgcaggaacagtgggtggggaaataatgactgcagtcacagtgaagatgttggagtgatctgttctgatgcatcggatatggagctgaggcttgtgggtggaagcagcaggtgtgctggaaaagttgaggtgaatgtccagggtgccgtgggaattctgtgtgctaatggctggggaatgaacattgctgaagttgtttgcaggcaacttgaatgtgggtctgcaatcagggtctccagagagcctcatttcacagaaagaacattacacatcttaatgtcgaattctggctgcactggaggggaagcctctctctgggattgtatacgatgggagtggaaacagactgcgtgtcatttaaatatggaagcaagtttgatctgctcagcccacaggcagcccaggctggttggagctgatatgccctgctctggacgtgttgaagtgaaacatgcagacacatggcgctctgtctgtgattctgatttctctcttcatgctgccaatgtgctgtgcagagaattaaactgtggagatgccatatctctttctgtgggagatcactttggaaaagggaatggtctaacttgggccgaaaagttccagtgtgaagggagtgaaactcaccttgcattatgccccattgttcaacatccggaagacacttgtatccacagcagagaagttggagttgtctgttcccgatatacagatgtccgacttgtgaatggcaaatcccagtgtgacgggcaagtggagatcaacgtgcttggacactggggctcactgtgtgacacccactgggacccagaagatgcccgtgttctatgcagacagctcagctgtgggactgctctctcaaccacaggaggaaaatatattggagaaagaagtgttcgtgtgtggggacacaggtttcattgcttagggaatgagtcacttctggataactgtcaaatgacagttcttggagcacctccctgtatccatggaaatactgtctctgtgatctgcacaggaagcctgacccagccactgtttccatgcctcgcaaatgtatctgacccatatttgtctgcagttccagagggcagtgctttgatctgcttagaggacaaacggctccgcctagtggatggggacagccgctgtgccgggagagtagagatctatcacgacggcttctggggcaccatctgtgatgacggctgggacctgagcgatgcccacgtggtgtgtcaaaagctgggctgtggagtggccttcaatgccacggtctctgctcactttggggaggggtcagggcccatctggctggatgacctgaactgcacaggaatggagtcccacttgtggcagtgcccttcccgcggctgggggcagcacgactgcaggcacaaggaggacgcaggggtcatctgctcagaattcacagccttgaggctctacagtgaaactgaaacagagagctgtgctgggagattggaagtcttctataacgggacctggggcagcgtcggcaggaggaacatcaccacagccatagcaggcattgtgtgcaggcagctgggctgtggggagaatggagttgtcagcctcgcccctttatctaagacaggctctggtttcatgtgggtggatgacattcagtgtcctaaaacgcatatctccatatggcagtgcctgtctgccccatgggagcgaagaatctccagcccagcagaagagacctggatcacatgtgaagatagaataagagtgcgtggaggagacaccgagtgctctgggagagtggagatctggcacgcaggctcctggggcacagtgtgtgatgactcctgggacctggccgaggcggaagtggtgtgtcagcagctgggctgtggctctgctctggctgccctgagggacgcttcgtttggccagggaactggaaccatctggttggatgacatgcggtgcaaaggaaatgagtcatttctatgggactgtcacgccaaaccctggggacagagtgactgtggacacaaggaagatgctggcgtgaggtgctctggacagtcgctgaaatcactgaatgcctcctcaggtcatttagcacttattttatccagtatctttgggctccttctcctggttctgtttattctatttctcacgtggtgccgagttcagaaacaaaaacatctgcccctcagagtttcaaccagaaggaggggttctctcgaggagaatttattccatgagatggagacctgcctcaagagagaggacccacatgggacaagaacctcagatgacacccccaaccatggttgtgaagatgctagcgacacatcgctgttgggagttcttcctgcctctgaagccacaaaatgactttagacttccagggctcaccagatcaacctctaaatatctttgaaggagacaacaacttttaaatgaataaagaggaagtcaagttgccctatggaaaacttgtccaaataacatttcttgaacaataggagaacagctaaattgataaagactggtgataataaaaattgaattatgtatatcactgttaaa

SEQ ID NO: 115372 - DNA, 4603 bp, Homo sapiens
  Payload ID: 2514
  Gene Symbol: CD163L1
  Gene Name: CD163 molecule-like 1
  Uniprot ID: Q9NR16
  ENST ID: ENST00000416109
  CDS Start-End: 20-4411
aggaagagatagacccataatgatgctgcctcaaaactcgtggcatattgattttggaagatgctgctgtcatcagaaccttttctctgctgtggtaacttgcatcctgctcctgaattcctgctttctcatcagcagttttaatggaacagatttggagttgaggctggtcaatggagacggtccctgctctgggacagtggaggtgaaattccagggacagtgggggactgtgtgtgatgatgggtggaacactactgcctcaactgtcgtgtgcaaacagcttggatgtccattttctttcgccatgtttcgttttggacaagccgtgactagacatggaaaaatttggcttgatgatgtttcctgttatggaaatgagtcagctctctgggaatgtcaacaccgggaatggggaagccataactgttatcatggagaagatgttggtgtgaactgttatggtaagagtctaactagagtaggaaggcaaggtgaagccaatctgggtttgaggctagtggatggaaacaactcctgttcagggagagtggaggtgaaattccaagaaaggtggggaactatatgtgatgatgggtggaacttgaatactgctgccgtggtgtgcaggcaactaggatgtccatcttcttttatttcttctggagttgttaatagccctgctgtattgcgccccatttggctggatgacattttatgccaggggaatgagttggcactctggaattgcagacatcgtggatggggaaatcatgactgcagtcacaatgaggatgtcacattaacttgttatgatagtagtgatcttgaactaaggcttgtaggtggaactaaccgctgtatggggagagtagagctgaaaatccaaggaaggtgggggaccgtatgccaccataagtggaacaatgctgcagctgatgtcgtatgcaagcagttgggatgtggaaccgcacttcacttcgctggcttgcctcatttgcagtcagggtctgatgttgtatggcttgatggtgtctcctgctccggtaatgaatcttttctttgggactgcagacattccggaaccgtcaattttgactgtcttcatcaaaacgatgtgtctgtgatctgctcagatggagcagatttggaactgcgactagcagatggaagtaacaattgttcagggagagtagaggtgagaattcatgaacagtggtggacaatatgtgaccagaactggaagaatgaacaagcccttgtggtttgtaagcagctaggatgtccgttcagcgtctttggcagtcgtcgtgctaaacctagtaatgaagctagagacatttggataaacagcatatcttgcactgggaatgagtcagctctctgggactgcacatatgatggaaaagcaaagcgaacatgcttccgaagatcagatgctggagtaatttgttctgataaggcagatctggacctaaggcttgtcggggctcatagcccctgttatgggagattggaggtgaaataccaaggagagtgggggactgtgtgtcatgacagatggagcacaaggaatgcagctgttgtttgtaaacaattgggatgtggaaagcctttgcatgtgtttggtatgacctattttaaagaagcatcaggacctatttggctggatgacgtttcttgcattggaaatgagtcaaatatctgggactgtgaacacagtggatggggaaagcataattgtgtacacagagaggatgtgattgtaacctgctcaggtgatgcaacatggggcctgaggctggtgggcggcagcaaccgctgctcgggaagactggaggtgtactttcaaggacggtggggcacagtgtgtgatgacggctggaacagtaaagctgcagctgtggtgtgtagccagctggactgcccatcttctatcattggcatgggtctgggaaacgcttctacaggatatggaaaaatttggctcgatgatgtttcctgtgatggagatgagtcagatctctggtcatgcaggaacagtgggtggggaaataatgactgcagtcacagtgaagatgttggagtgatctgttctgatgcatcggatatggagctgaggcttgtgggtggaagcagcaggtgtgctggaaaagttgaggtgaatgtccagggtgccgtgggaattctgtgtgctaatggctggggaatgaacattgctgaagttgtttgcaggcaacttgaatgtgggtctgcaatcagggtctccagagagcctcatttcacagaaagaacattacacatcttaatgtcgaattctggctgcactggaggggaagcctctctctgggattgtatacgatgggagtggaaacagactgcgtgtcatttaaatatggaagcaagtttgatctgctcagcccacaggcagcccaggctggttggagctgatatgccctgctctggacgtgttgaagtgaaacatgcagacacatggcgctctgtctgtgattctgatttctctcttcatgctgccaatgtgctgtgcagagaattaaactgtggagatgccatatctctttctgtgggagatcactttggaaaagggaatggtctaacttgggccgaaaagttccagtgtgaagggagtgaaactcaccttgcattatgccccattgttcaacatccggaagacacttgtatccacagcagagaagttggagttgtctgttcccgatatacagatgtccgacttgtgaatggcaaatcccagtgtgacgggcaagtggagatcaacgtgcttggacactggggctcactgtgtgacacccactgggacccagaagatgcccgtgttctatgcagacagctcagctgtgggactgctctctcaaccacaggaggaaaatatattggagaaagaagtgttcgtgtgtggggacacaggtttcattgcttagggaatgagtcacttctggataactgtcaaatgacagttcttggagcacctccctgtatccatggaaatactgtctctgtgatctgcacaggaagcctgacccagccactgtttccatgcctcgcaaatgtatctgacccatatttgtctgcagttccagagggcagtgctttgatctgcttagaggacaaacggctccgcctagtggatggggacagccgctgtgccgggagagtagagatctatcacgacggcttctggggcaccatctgtgatgacggctgggacctgagcgatgcccacgtggtgtgtcaaaagctgggctgtggagtggccttcaatgccacggtctctgctcactttggggaggggtcagggcccatctggctggatgacctgaactgcacaggaatggagtcccacttgtggcagtgcccttcccgcggctgggggcagcacgactgcaggcacaaggaggacgcaggggtcatctgctcagaattcacagccttgaggctctacagtgaaactgaaacagagagctgtgctgggagattggaagtcttctataacgggacctggggcagcgtcggcaggaggaacatcaccacagccatagcaggcattgtgtgcaggcagctgggctgtggggagaatggagttgtcagcctcgcccctttatctaagacaggctctggtttcatgtgggtggatgacattcagtgtcctaaaacgcatatctccatatggcagtgcctgtctgccccatgggagcgaagaatctccagcccagcagaagagacctggatcacatgtgaagatagaataagagtgcgtggaggagacaccgagtgctctgggagagtggagatctggcacgcaggctcctggggcacagtgtgtgatgactcctgggacctggccgaggcggaagtggtgtgtcagcagctgggctgtggctctgctctggctgccctgagggacgcttcgtttggccagggaactggaaccatctggttggatgacatgcggtgcaaaggaaatgagtcatttctatgggactgtcacgccaaaccctggggacagagtgactgtggacacaaggaagatgctggcgtgaggtgctctggacagtcgctgaaatcactgaatgcctcctcaggtcatttagcacttattttatccagtatctttgggctccttctcctggttctgtttattctatttctcacgtggtgccgagttcagaaacaaaaacatctgcccctcagagtttcaaccagaaggaggggttctctcgaggagaatttattccatgagatggagacctgcctcaagagagaggacccacatgggacaagaacctcagatgacacccccaaccatggttgtgaagatgctagcgacacatcgctgttgggagttcttcctgcctctgaagccacaaaatgactttagacttccagggctcaccagatcaacctctaaatatctttgaaggagacaacaacttttaaatgaataaagaggaagtcaagttgccctatggaaaacttgtccaaataacatttcttgaacaataggagaacagctaaattgataaagactggtgataataaaaattgaattatgtatatcactgtt

SEQ ID NO: 115373 - DNA, 815 bp, Homo sapiens
  Payload ID: 2514
  Gene Symbol: CD163L1
  Gene Name: CD163 molecule-like 1
  ENST ID: ENST00000539726
  CDS Start-End: 1-328
ctcaggacagtcgctgaaatcactgaatgcctcctcaggtcatttagcacttattttatccagtatctttgggctccttctcctggttctgtttattctatttctcacgtggtgccgagttcagaaacaaaaacatctgcccctcagagtttcaaccagaaggaggggttctctcgaggagaatttattccatgagatggagacctgcctcaagagagaggacccacatgggacaagaacctcagatgacacccccaaccatggttgtgaagatgctagcgacacatcgctgttgggagttcttcctgcctctgaagccacaaaatgactttagacttccagggctcaccagaatcttgatatgtgggtgatgttaagccctcctgacccagcaagttgaaaactcaccatgaagagcagcggtcaaaggaactagggaaatcctacagtgtgatcagtttttctgctgcaggtaagcagagagcatccctttgcactgaataggccactgagccgcattactgcttattaattcctcatcattcctgcctccttttatgttctccctaaatgactaggtttgcggggccaggaactttatttcccacaatccctaacaggaagaatctgggctcgcttccaccagagagacttgttcatggaagatacggtttcgcaaggatctttgtacttgtcctgaaaactgctagcctagatattacagcatggtgccctttagcagtggtttcctgggggttttaaaacttcctgatgagggttttgtaagcataattattccctgtagtaaaccactt

SEQ ID NO: 115374 - DNA, 568 bp, Homo sapiens
  Payload ID: 2514
  Gene Symbol: CD163L1
  Gene Name: CD163 molecule-like 1
  ENST ID: ENST00000545926
  CDS Start-End: 1-568
acgtttctctgtgacttcatcctagatggagcagatttggaactgcgactagcagatggaagtaacaattgttcagggagagtagaggtgagaattcatgaacagtggtggacaatatgtgaccagaactggaagaatgaacaagcccttgtggtttgtaagcagctaggatgtccgttcagcgtctttggcagtcgtcgtgctaaacctagtaatgaagctagagacatttggataaacagcatatcttgcactgggaatgagtcagctctctgggactgcacatatgatggaaaagcaaagcgaacatgcttccgaagatcagatgctggagtaatttgttctggtgatgcaacatggggcctgaggctggtgggcggcagcaaccgctgctcgggaagactggaggtgtactttcaaggacggtggggcacagtgtgtgatgacggctggaacagtaaagctgcagctgtggtgtgtagccagctggactgcccatcttctatcattggcatgggtctgggaaacgcttctacaggatatggaaaaatttggctcgatgatgttt

SEQ ID NO: 115375 - DNA, 532 bp, Homo sapiens
  Payload ID: 2514
  Gene Symbol: CD163L1
  Gene Name: CD163 molecule-like 1
  ENST ID: ENST00000543276
  CDS Start-End: 348-532
acactgaaaaggaaaatgggaatttataacccagtgaggaggtctgaaaacattgggccatcatttcaacatgacaacggtgaattggagattttggaagatgctgctgtcatcagaaccttttctctgctgtggtaacttgcatcctgctcctgaattcctgctttctcatcagcagttttaatggaacagatttggagttgaggctggtcaatggagacggtccctgctctgggacagtggaggtgaaattccagggacagtgggggactgtgtgtgatgatgggtggaacactactgcctcaactgtcgtgtgcaaacagcttggatgtccattttctttcgccatgtttcgttttggacaagccgtgactagacatggaaaaatttggcttgatgatgtttcctgttatggaaatgagtcagctctctgggaatgtcaacaccgggaatggggaagccataactgttatcatggagaagatgttggtgtgaactgttatggtgaagccaatctgggtttgaggctagt

SEQ ID NO: 115376 - DNA, 470 bp, Homo sapiens
  Payload ID: 2514
  Gene Symbol: CD163L1
  Gene Name: CD163 molecule-like 1
  ENST ID: ENST00000546182
  CDS Start-End: 1-175
ctcaggacagtcgctgaaatcactgaatgcctcctcaggtcatttagcacttattttatccagtatctttgggctccttctcctggttctgtttattctatttctcacgtggtgccgagttcagaaacaaaaacatctgcccctcagaggtgagagccccactaggattgtataaaattttcaaccagaaggaggggttctctcgaggagaatttattccatgagatggagacctgcctcaagagagaggacccacatgggacaagaacctcagatgacacccccaaccatggttgtgaagatgctagcgacacatcgctgttgggagttcttcctgcctctgaagccacaaaatgactttagacttccagggctcaccagatcaacctctaaatatctttgaaggagacaacaacttttaaatgaataaagaggaagtcaagttgccctatggaaaacttgtccaaata

SEQ ID NO: 115377 - DNA, 2954 bp, Homo sapiens
  Payload ID: 2515
  Gene Symbol: CD164
  Gene Name: CD164 molecule, sialomucin
  Uniprot ID: Q04900
  ENST ID: ENST00000275080
  CDS Start-End: 67-621
ggattgaggggttgactgagcgttgcgagccttagctttctcccgaacgccagcgctgaggacacgatgtcgcggctctcccgctcactgctttgggccgccacctgcctgggcgtgctctgcgtgctgtccgcggacaagaacacgacccagcacccgaacgtgacgactttagcgcccatctccaacgtaacctcggcgccggtgacgtccctcccgctggtcaccactccggcaccagaaacctgtgaaggtcgaaacagctgcgtttcctgttttaatgttagcgttgttaatactacctgcttttggatagaatgtaaagatgagagctattgttcacataactcaacagttagtgattgtcaagtggggaacacgacagacttctgttccgctaaacccacagttcagccctccccttctacaacttccaagacagttactacatcaggtacaacaaataacactgtgactccaacctcacaacctgtgcgaaagtctacctttgatgcagccagtttcattggaggaattgtcctggtcttgggtgtgcaggctgtaattttctttctttataaattctgcaaatctaaagaacgaaattaccacactctgtaaacagacccattgaattaataaggactggtgattcatttgtgtaactcactgaagccaaaatactatcttttaagatgtcccacatggaagacgctattccaggatctttaaatttccatggatgcatataggatgtttgggagcatcatccgtgaagaaaaaatcaattaaatcattgtgttcaacaggaatatttaaaatattctgcatgaatcctgtggctgtcttattttaaatagctgctgctgtgggattatattttttttccttaacatgccaaatataactttctgaaagtgatggaaaatgttgtcttgtgcagacaacatcatggctcttggcagtttaaatttagtaattttaatttagtgaacagaattgagaagaacgtgccaaatgagaatcaattaggtggatttttggctgtcatttcaaaagtggaataaatttattaatttagtagtactaaatggtatccttagattaaaattttgtgcttgataacagctgttttttctacattagaaataagatgccacacaaggaactacattccagatttaaagaaatgaaaggataccattagtgtgtataacagattattgttcatacttgtaaagcatcttatgtcattgagaatataaagaacagtgccttagaagacagtgaaaggtaagctctagcttaatgtctatgatttgttctttgacattaaggaaggtaaggattggtcagaggatgtaacttgatgtgagcagtagtaaacctgttttagatatcatactgttaatattttattgaaaatttatttcagagcggagaaacttaagctaaagtctgttatacagaattgaaagccttcgtatcttgaacctcccaacatttttcttatggctgttgaaaagtatagagctaaattgatttaattacactttcctttgtactttaaaaaaaagtatgctagcactattgtaccttgaaaggatttccaccagactgtcttgagtagtgacttctttggtgaggcaagaaggatatacattattttagaatcatttactatttaaatgagacaatcatattattttagaatcatttattttaaatgagacaatcattttaagttttaagataacagaagtgaccaatgtaatttcacaacacctaaggattttttggttgatcaggttactgtagatttttactgattgtcctggatgaatagactgtgctttttctttttctctcccttccttcttggtttcccatagtataataagcatgcatactttaacttctatagttttctcctttagagggtcgtcttcagttttagaggtttacttctcccttgcctttgactcattggactagtgcagaggctttaagtagtttaaaatgggcttttgcttttctaggtcattaacgttttttatttagtttctttagccaatagtggctgagtttcgcacttgattttcaatattttatagtaagaaatgacaaactgctttgtttcatttcataaacaaactctgcatttagataactattaaaggttgttaagatgaagatttactgtttctttgttactcgttggtacagctgtttgttttacttgcacatttgtacatatacttaatgttttcaagtgccttaattgtttaaaatctctggcttcaaagtttcttggggaaaggtcggtttacctcacattttttgtttccattagtaatattctaggtacctcacaaaatgtattatggtgccatggctgttagtttttagtgagtgctgtaggattaattcgaaaataggcagaattccattcctcccaaggtggcaaaaattagctatactgatgtaattgtcatttacctgggtatgaattccctgacacacattcatgtcaacatatgtagcaaattttgtgaaaacataacaatttgaagcttctgtaattttgagcactgctctaacaacaagcataatataaaattagttagattttgcaagtctacaaatgagctcttgcaacagaactcacagcctttttacttttttcccctaactttagcaatgtagtatcttgagccattaatttttgggtttttttaaaatccagaaggtatatagaaaccttttcagatttttcatctgatttgttcttgcagatgttcttctatcaaataccttattttaccttacagatatttgttgcacaggcagatactgctgtatttagacatttctatttcagttcattaaaaactgcaaaaccaatctgtatcatgtaccaaactgacttaaaataaatctacatgtttattgaa

SEQ ID NO: 115378 - DNA, 2993 bp, Homo sapiens
  Payload ID: 2515
  Gene Symbol: CD164
  Gene Name: CD164 molecule, sialomucin
  Uniprot ID: Q04900
  ENST ID: ENST00000310786
  CDS Start-End: 67-660
ggattgaggggttgactgagcgttgcgagccttagctttctcccgaacgccagcgctgaggacacgatgtcgcggctctcccgctcactgctttgggccgccacctgcctgggcgtgctctgcgtgctgtccgcggacaagaacacgacccagcacccgaacgtgacgactttagcgcccatctccaacgtaacctcggcgccggtgacgtccctcccgctggtcaccactccggcaccagaaacctgtgaaggtcgaaacagctgcgtttcctgttttaatgttagcgttgttaatactacctgcttttggatagaatgtaaagatgagagctattgttcacataactcaacagttagtgattgtcaagtggggaacacgacagacttctgttccgtttccacggccactccagtgccaacagccaattctacagctaaacccacagttcagccctccccttctacaacttccaagacagttactacatcaggtacaacaaataacactgtgactccaacctcacaacctgtgcgaaagtctacctttgatgcagccagtttcattggaggaattgtcctggtcttgggtgtgcaggctgtaattttctttctttataaattctgcaaatctaaagaacgaaattaccacactctgtaaacagacccattgaattaataaggactggtgattcatttgtgtaactcactgaagccaaaatactatcttttaagatgtcccacatggaagacgctattccaggatctttaaatttccatggatgcatataggatgtttgggagcatcatccgtgaagaaaaaatcaattaaatcattgtgttcaacaggaatatttaaaatattctgcatgaatcctgtggctgtcttattttaaatagctgctgctgtgggattatattttttttccttaacatgccaaatataactttctgaaagtgatggaaaatgttgtcttgtgcagacaacatcatggctcttggcagtttaaatttagtaattttaatttagtgaacagaattgagaagaacgtgccaaatgagaatcaattaggtggatttttggctgtcatttcaaaagtggaataaatttattaatttagtagtactaaatggtatccttagattaaaattttgtgcttgataacagctgttttttctacattagaaataagatgccacacaaggaactacattccagatttaaagaaatgaaaggataccattagtgtgtataacagattattgttcatacttgtaaagcatcttatgtcattgagaatataaagaacagtgccttagaagacagtgaaaggtaagctctagcttaatgtctatgatttgttctttgacattaaggaaggtaaggattggtcagaggatgtaacttgatgtgagcagtagtaaacctgttttagatatcatactgttaatattttattgaaaatttatttcagagcggagaaacttaagctaaagtctgttatacagaattgaaagccttcgtatcttgaacctcccaacatttttcttatggctgttgaaaagtatagagctaaattgatttaattacactttcctttgtactttaaaaaaaagtatgctagcactattgtaccttgaaaggatttccaccagactgtcttgagtagtgacttctttggtgaggcaagaaggatatacattattttagaatcatttactatttaaatgagacaatcatattattttagaatcatttattttaaatgagacaatcattttaagttttaagataacagaagtgaccaatgtaatttcacaacacctaaggattttttggttgatcaggttactgtagatttttactgattgtcctggatgaatagactgtgctttttctttttctctcccttccttcttggtttcccatagtataataagcatgcatactttaacttctatagttttctcctttagagggtcgtcttcagttttagaggtttacttctcccttgcctttgactcattggactagtgcagaggctttaagtagtttaaaatgggcttttgcttttctaggtcattaacgttttttatttagtttctttagccaatagtggctgagtttcgcacttgattttcaatattttatagtaagaaatgacaaactgctttgtttcatttcataaacaaactctgcatttagataactattaaaggttgttaagatgaagatttactgtttctttgttactcgttggtacagctgtttgttttacttgcacatttgtacatatacttaatgttttcaagtgccttaattgtttaaaatctctggcttcaaagtttcttggggaaaggtcggtttacctcacattttttgtttccattagtaatattctaggtacctcacaaaatgtattatggtgccatggctgttagtttttagtgagtgctgtaggattaattcgaaaataggcagaattccattcctcccaaggtggcaaaaattagctatactgatgtaattgtcatttacctgggtatgaattccctgacacacattcatgtcaacatatgtagcaaattttgtgaaaacataacaatttgaagcttctgtaattttgagcactgctctaacaacaagcataatataaaattagttagattttgcaagtctacaaatgagctcttgcaacagaactcacagcctttttacttttttcccctaactttagcaatgtagtatcttgagccattaatttttgggtttttttaaaatccagaaggtatatagaaaccttttcagatttttcatctgatttgttcttgcagatgttcttctatcaaataccttattttaccttacagatatttgttgcacaggcagatactgctgtatttagacatttctatttcagttcattaaaaactgcaaaaccaatctgtatcatgtaccaaactgacttaaaataaatctacatgtttattgaa

SEQ ID NO: 115379 - DNA, 2936 bp, Homo sapiens
  Payload ID: 2515
  Gene Symbol: CD164
  Gene Name: CD164 molecule, sialomucin
  Uniprot ID: Q04900
  ENST ID: ENST00000324953
  CDS Start-End: 67-603
ggattgaggggttgactgagcgttgcgagccttagctttctcccgaacgccagcgctgaggacacgatgtcgcggctctcccgctcactgctttgggccgccacctgcctgggcgtgctctgcgtgctgtccgcggacaagaacacgacccagcacccgaacgtgacgactttagcgcccatctccaacgtaacctcggcgccggtgacgtccctcccgctggtcaccactccggcaccagaaacctgtgaaggtcgaaacagctgcgtttcctgttttaatgttagcgttgttaatactacctgcttttggatagaatgtaaagatgagagctattgttcacataactcaacagttagtgattgtcaagtggggaacacgacagacttctgttccgtttccacggccactccagtgccaacagccaattctacaggtacaacaaataacactgtgactccaacctcacaacctgtgcgaaagtctacctttgatgcagccagtttcattggaggaattgtcctggtcttgggtgtgcaggctgtaattttctttctttataaattctgcaaatctaaagaacgaaattaccacactctgtaaacagacccattgaattaataaggactggtgattcatttgtgtaactcactgaagccaaaatactatcttttaagatgtcccacatggaagacgctattccaggatctttaaatttccatggatgcatataggatgtttgggagcatcatccgtgaagaaaaaatcaattaaatcattgtgttcaacaggaatatttaaaatattctgcatgaatcctgtggctgtcttattttaaatagctgctgctgtgggattatattttttttccttaacatgccaaatataactttctgaaagtgatggaaaatgttgtcttgtgcagacaacatcatggctcttggcagtttaaatttagtaattttaatttagtgaacagaattgagaagaacgtgccaaatgagaatcaattaggtggatttttggctgtcatttcaaaagtggaataaatttattaatttagtagtactaaatggtatccttagattaaaattttgtgcttgataacagctgttttttctacattagaaataagatgccacacaaggaactacattccagatttaaagaaatgaaaggataccattagtgtgtataacagattattgttcatacttgtaaagcatcttatgtcattgagaatataaagaacagtgccttagaagacagtgaaaggtaagctctagcttaatgtctatgatttgttctttgacattaaggaaggtaaggattggtcagaggatgtaacttgatgtgagcagtagtaaacctgttttagatatcatactgttaatattttattgaaaatttatttcagagcggagaaacttaagctaaagtctgttatacagaattgaaagccttcgtatcttgaacctcccaacatttttcttatggctgttgaaaagtatagagctaaattgatttaattacactttcctttgtactttaaaaaaaagtatgctagcactattgtaccttgaaaggatttccaccagactgtcttgagtagtgacttctttggtgaggcaagaaggatatacattattttagaatcatttactatttaaatgagacaatcatattattttagaatcatttattttaaatgagacaatcattttaagttttaagataacagaagtgaccaatgtaatttcacaacacctaaggattttttggttgatcaggttactgtagatttttactgattgtcctggatgaatagactgtgctttttctttttctctcccttccttcttggtttcccatagtataataagcatgcatactttaacttctatagttttctcctttagagggtcgtcttcagttttagaggtttacttctcccttgcctttgactcattggactagtgcagaggctttaagtagtttaaaatgggcttttgcttttctaggtcattaacgttttttatttagtttctttagccaatagtggctgagtttcgcacttgattttcaatattttatagtaagaaatgacaaactgctttgtttcatttcataaacaaactctgcatttagataactattaaaggttgttaagatgaagatttactgtttctttgttactcgttggtacagctgtttgttttacttgcacatttgtacatatacttaatgttttcaagtgccttaattgtttaaaatctctggcttcaaagtttcttggggaaaggtcggtttacctcacattttttgtttccattagtaatattctaggtacctcacaaaatgtattatggtgccatggctgttagtttttagtgagtgctgtaggattaattcgaaaataggcagaattccattcctcccaaggtggcaaaaattagctatactgatgtaattgtcatttacctgggtatgaattccctgacacacattcatgtcaacatatgtagcaaattttgtgaaaacataacaatttgaagcttctgtaattttgagcactgctctaacaacaagcataatataaaattagttagattttgcaagtctacaaatgagctcttgcaacagaactcacagcctttttacttttttcccctaactttagcaatgtagtatcttgagccattaatttttgggtttttttaaaatccagaaggtatatagaaaccttttcagatttttcatctgatttgttcttgcagatgttcttctatcaaataccttattttaccttacagatatttgttgcacaggcagatactgctgtatttagacatttctatttcagttcattaaaaactgcaaaaccaatctgtatcatgtaccaaactgacttaaaataaatctacatgtttattgaa

SEQ ID NO: 115380 - DNA, 3106 bp, Homo sapiens
  Payload ID: 2515
  Gene Symbol: CD164
  Gene Name: CD164 molecule, sialomucin
  ENST ID: ENST00000368961
  CDS Start-End: 182-625
atcgtccgagccccacctccctcctcttcgcccccgcacgccgaaaacaggggcctctcacgtgacccctgcgcgctcccgcgggggagcgtagtctcggaggcggcgccgcaggggattgaggggttgactgagcgttgcgagccttagctttctcccgaacgccagcgctgaggacacgatgtcgcggctctcccgctcactgctttgggccgccacctgcctgggcgtgctctgcgtgctgtccgcggacaagaacacgacccagcacccgaacgtgacgactttagcgcccatctccaacgtaacctcggcgccggtgacgtccctcccgctggtcaccactccggcaccagaaacctgtgaaggtcgaaacagctgcgtttcctgttttaatgttagcgttgttaatactacctgcttttggatagaatgtaaagatgagagctattgttcacataactcaacagttagtgattgtcaagtggggaacacgacagacttctgttccgtttccacggcccagtgccaacagccaattctacagctaaacccacagttcagccctccccttctacaacttccaagacagttactacatcaggtacaacaaataacactgtgactccaacctcacaacctgtgcgaaagtctacctttgatgcagccagtttcattggaggaattgtcctggtcttgggtgtgcaggctgtaattttctttctttataaattctgcaaatctaaagaacgaaattaccacactctgtaaacagacccattgaattaataaggactggtgattcatttgtgtaactcactgaagccaaaatactatcttttaagatgtcccacatggaagacgctattccaggatctttaaatttccatggatgcatataggatgtttgggagcatcatccgtgaagaaaaaatcaattaaatcattgtgttcaacaggaatatttaaaatattctgcatgaatcctgtggctgtcttattttaaatagctgctgctgtgggattatattttttttccttaacatgccaaatataactttctgaaagtgatggaaaatgttgtcttgtgcagacaacatcatggctcttggcagtttaaatttagtaattttaatttagtgaacagaattgagaagaacgtgccaaatgagaatcaattaggtggatttttggctgtcatttcaaaagtggaataaatttattaatttagtagtactaaatggtatccttagattaaaattttgtgcttgataacagctgttttttctacattagaaataagatgccacacaaggaactacattccagatttaaagaaatgaaaggataccattagtgtgtataacagattattgttcatacttgtaaagcatcttatgtcattgagaatataaagaacagtgccttagaagacagtgaaaggtaagctctagcttaatgtctatgatttgttctttgacattaaggaaggtaaggattggtcagaggatgtaacttgatgtgagcagtagtaaacctgttttagatatcatactgttaatattttattgaaaatttatttcagagcggagaaacttaagctaaagtctgttatacagaattgaaagccttcgtatcttgaacctcccaacatttttcttatggctgttgaaaagtatagagctaaattgatttaattacactttcctttgtactttaaaaaaaagtatgctagcactattgtaccttgaaaggatttccaccagactgtcttgagtagtgacttctttggtgaggcaagaaggatatacattattttagaatcatttactatttaaatgagacaatcatattattttagaatcatttattttaaatgagacaatcattttaagttttaagataacagaagtgaccaatgtaatttcacaacacctaaggattttttggttgatcaggttactgtagatttttactgattgtcctggatgaatagactgtgctttttctttttctctcccttccttcttggtttcccatagtataataagcatgcatactttaacttctatagttttctcctttagagggtcgtcttcagttttagaggtttacttctcccttgcctttgactcattggactagtgcagaggctttaagtagtttaaaatgggcttttgcttttctaggtcattaacgttttttatttagtttctttagccaatagtggctgagtttcgcacttgattttcaatattttatagtaagaaatgacaaactgctttgtttcatttcataaacaaactctgcatttagataactattaaaggttgttaagatgaagatttactgtttctttgttactcgttggtacagctgtttgttttacttgcacatttgtacatatacttaatgttttcaagtgccttaattgtttaaaatctctggcttcaaagtttcttggggaaaggtcggtttacctcacattttttgtttccattagtaatattctaggtacctcacaaaatgtattatggtgccatggctgttagtttttagtgagtgctgtaggattaattcgaaaataggcagaattccattcctcccaaggtggcaaaaattagctatactgatgtaattgtcatttacctgggtatgaattccctgacacacattcatgtcaacatatgtagcaaattttgtgaaaacataacaatttgaagcttctgtaattttgagcactgctctaacaacaagcataatataaaattagttagattttgcaagtctacaaatgagctcttgcaacagaactcacagcctttttacttttttcccctaactttagcaatgtagtatcttgagccattaatttttgggtttttttaaaatccagaaggtatatagaaaccttttcagatttttcatctgatttgttcttgcagatgttcttctatcaaataccttattttaccttacagatatttgttgcacaggcagatactgctgtatttagacatttctatttcagttcattaaaaactgcaaaaccaatctgtatcatgtaccaaactgacttaaaataaatctacatgtttattgaatt

SEQ ID NO: 115381 - DNA, 2414 bp, Homo sapiens
  Payload ID: 2515
  Gene Symbol: CD164
  Gene Name: CD164 molecule, sialomucin
  Uniprot ID: Q04900
  ENST ID: ENST00000413644
  CDS Start-End: 80-649
gcggcgccgcaggggattgaggggttgactgagcgttgcgagccttagctttctcccgaacgccagcgctgaggacacgatgtcgcggctctcccgctcactgctttgggccgccacctgcctgggcgtgctctgcgtgctgtccgcggacaagaacacgacccagcacccgaacgtgacgactttagcgcccatctccaacgtaacctcggcgccggtgacgtccctcccgctggtcaccactccggcaccagaaacctgtgaaggtcgaaacagctgcgtttcctgttttaatgttagcgttgttaatactacctgcttttggatagaatgtaaagatgagagctattgttcacataactcaacagttagtgattgtcaagtggggaacacgacagacttctgttccgtttccacggccactccagtgccaacagccaattctacagctaaacccacagttcagccctccccttctacaacttccaagacagttactacatcaggtacaacaaataacactgtgactccaacctcacaacctgtgcgaaagtctacctttgatgcagccagtttcattggaggaattgtcctggtcttggaaataagatgccacacaaggaactacattccagatttaaagaaatgaaaggataccattagtgtgtataacagattattgttcatacttgtaaagcatcttatgtcattgagaatataaagaacagtgccttagaagacagtgaaaggtaagctctagcttaatgtctatgatttgttctttgacattaaggaaggtaaggattggtcagaggatgtaacttgatgtgagcagtagtaaacctgttttagatatcatactgttaatattttattgaaaatttatttcagagcggagaaacttaagctaaagtctgttatacagaattgaaagccttcgtatcttgaacctcccaacatttttcttatggctgttgaaaagtatagagctaaattgatttaattacactttcctttgtactttaaaaaaaagtatgctagcactattgtaccttgaaaggatttccaccagactgtcttgagtagtgacttctttggtgaggcaagaaggatatacattattttagaatcatttactatttaaatgagacaatcatattattttagaatcatttattttaaatgagacaatcattttaagttttaagataacagaagtgaccaatgtaatttcacaacacctaaggattttttggttgatcaggttactgtagatttttactgattgtcctggatgaatagactgtgctttttctttttctctcccttccttcttggtttcccatagtataataagcatgcatactttaacttctatagttttctcctttagagggtcgtcttcagttttagaggtttacttctcccttgcctttgactcattggactagtgcagaggctttaagtagtttaaaatgggcttttgcttttctaggtcattaacgttttttatttagtttctttagccaatagtggctgagtttcgcacttgattttcaatattttatagtaagaaatgacaaactgctttgtttcatttcataaacaaactctgcatttagataactattaaaggttgttaagatgaagatttactgtttctttgttactcgttggtacagctgtttgttttacttgcacatttgtacatatacttaatgttttcaagtgccttaattgtttaaaatctctggcttcaaagtttcttggggaaaggtcggtttacctcacattttttgtttccattagtaatattctaggtacctcacaaaatgtattatggtgccatggctgttagtttttagtgagtgctgtaggattaattcgaaaataggcagaattccattcctcccaaggtggcaaaaattagctatactgatgtaattgtcatttacctgggtatgaattccctgacacacattcatgtcaacatatgtagcaaattttgtgaaaacataacaatttgaagcttctgtaattttgagcactgctctaacaacaagcataatataaaattagttagattttgcaagtctacaaatgagctcttgcaacagaactcacagcctttttacttttttcccctaactttagcaatgtagtatcttgagccattaatttttgggtttttttaaaatccagaaggtatatagaaaccttttcagatttttcatctgatttgttcttgcagatgttcttctatcaaataccttattttaccttacagatatttgttgcacaggcagatactgctgtatttagacatttctatttcagttcattaaaaactgcaaaaccaatctgtatcatgtaccaaactgacttaaaataaatctacatgtttattgaattaa

SEQ ID NO: 115382 - DNA, 1402 bp, Homo sapiens
  Payload ID: 2515
  Gene Symbol: CD164
  Gene Name: CD164 molecule, sialomucin
  ENST ID: ENST00000504373
  CDS Start-End: 125-616
gttcgtgtctcagacttgagtctgagaaggtcgcttgagatttaattacattggttttgcagataggaatagaatgtagctgacgtttgagcacgtagttagtgaaaacttcacacttcaaagtatgcgaaaaggaagaaaagtacccatgtatgtaccgggtgttttgcgtacgtatcctaaggctaaactggaagaaacctgtgaaggtcgaaacagctgcgtttcctgttttaatgttagcgttgttaatactacctgcttttggatagaatgtaaagatgagagctattgttcacataactcaacagttagtgattgtcaagtggggaacacgacagacttctgttccgtttccacggccactccagtgccaacagccaattctacagctaaacccacagttcagccctccccttctacaacttccaagacagttactacatcaggtacaacaaataacactgtgactccaacctcacaacctgtgcgaaagtctacctttgatgcagccagtttcattggaggaattgtcctggtcttgggtgtgcaggctgtaattttctttctttataaattctgcaaatctaaagaacgaaattaccacactctgtaaacagacccattgaattaataaggactggtgattcatttgtgtaactcactgaagccaaaatactatcttttaagatgtcccacatggaagacgctattccaggatctttaaatttccatggatgcatataggatgtttgggagcatcatccgtgaagaaaaaatcaattaaatcattgtgttcaacaggaatatttaaaatattctgcatgaatcctgtggctgtcttattttaaatagctgctgctgtgggattatattttttttccttaacatgccaaatataactttctgaaagtgatggaaaatgttgtcttgtgcagacaacatcatggctcttggcagtttaaatttagtaattttaatttagtgaacagaattgagaagaacgtgccaaatgagaatcaattaggtggatttttggctgtcatttcaaaagtggaataaatttattaatttagtagtactaaatggtatccttagattaaaattttgtgcttgataacagctgttttttctacattagaaataagatgccacacaaggaactacattccagatttaaagaaatgaaaggataccattagtgtgtataacagattattgttcatacttgtaaagcatcttatgtcattgagaatataaagaacagtgccttagaagacagtgaaaggtaagctctagcttaatgtctatgatttgttctttgacattaaggaaggtaaggattggtcagaggatgtaacttgatgtgagcagtagtaaacctgttttagatatcatactg

SEQ ID NO: 115383 - DNA, 964 bp, Homo sapiens
  Payload ID: 2515
  Gene Symbol: CD164
  Gene Name: CD164 molecule, sialomucin
  Uniprot ID: Q04900
  ENST ID: ENST00000512821
  CDS Start-End: 33-506
gctttctcccgaacgccagcgctgaggacacgatgtcgcggctctcccgctcactgctttgggccgccacctgcctgggcgtgctctgcgtgctgtccgcggacaagaacacgacccagcacccgaacgtgacgactttagcgcccatctccaacgtaacctcggcgccggtgacgtccctcccgctggtcaccactccggcaccagaaacctgtgaaggtcgaaacagctgcgtttcctgttttaatgttagcgttgttaatactacctgcttttggatagaatgtaaagatgagagctattgttcacataactcaacagttagtgattgtcaagtggggaacacgacagacttctgttccgtttccacggccactccagtgccaacagccaattctacagctaaacccacagttcagccctccccttctacaacttccaagacagttactacatcagaaataagatgccacacaaggaactacattccagatttaaagaaatgaaaggataccattagtgtgtataacagattattgttcatacttgtaaagcatcttatgtcattgagaatataaagaacagtgccttagaagacagtgaaaggtaagctctagcttaatgtctatgatttgttctttgacattaaggaaggtaaggattggtcagaggatgtaacttgatgtgagcagtagtaaacctgttttagatatcatactgttaatattttattgaaaatttatttcagagcggagaaacttaagctaaagtctgttatacagaattgaaagccttcgtatcttgaacctcccaacatttttcttatggctgttgaaaagtatagagctaaattgatttaattacactttcctttgtactttaaaaaaaagtatgctagcactattgtaccttgaaaggatttccaccagactgtcttgagtagtgacttctttggtgaggcaag

SEQ ID NO: 115384 - DNA, 1457 bp, Homo sapiens
  Payload ID: 2516
  Gene Symbol: CD164L2
  Gene Name: CD164 sialomucin-like 2
  Uniprot ID: Q6UWJ8
  ENST ID: ENST00000374027
  CDS Start-End: 65-586
acgcgcccggcagctgtccaccgatcccggccaccgcccccggccacccccaccccgcgagcccatggaggctccgggaccccgcgccttgcggactgcgctctgtggcggctgttgctgcctcctcctatgtgcccagctggctgtggctggtaaaggagctcgaggctttgggaggggagccctgatccgcctgaatatctggccggcggtccaaggggcctgcaaacagctggaggtctgtgagcactgcgtggagggagacggagcgcgcaatctctccagctgcgtgtgggagcagtgccggccagaggagccaggacactgtgtggcccaatctgaggtggtcaaggaaggttgctccatctacaaccgctcagaggcatgtccagctgctcaccaccaccccacctatgaaccgaagacagtcacaacagggagccccccagtccctgaggcccacagccctggatttgacggggccagctttatcggaggtgtcgtgctggtgttgagcctacaggcggtggctttctttgtgctgcacttcctcaaggccaaggacagcacctaccagacgctgtgagtacctggccagcagcaagtacctgagtcccagcttacctcctggttcctgccccaccgttccccttcagtacccagggtgctgtcttctccatgggcaagccctcaggacggtgacagcgtgctccatgtgagccacaccccttttgtctcctccagttggggtgtttcctttgtcagatgttggctgggaccaggactcagcctgggccagtctaggagcccagctgagccctcctgtgtcttttcccttcatgctgccagcagggaagagaaccagtaggtgccagcccaggcaagcctgtggcccgcgtttctgtggctgtgggcaggagctgggccttgtgtctagttgggttttgctctgagaaggggagctgtgcctgaggccctctgtgtgccgtgtgtgctgtggggcgggtcgccacagcctgtgttaaagtgtttgctcttcctctgctgcctcctctcgaggcagggggtccttggctggctgaggcagtgtcaccttcctgagtgtcctctttggcctctgcagaatctgacccctttgggcctggactccatcctgaggggaaaggaggatgcagagggtggcctctgggcacccttgtgggtaagcggggggcgggggcgggaaaaactctggccgccagtttttggctcctgcgggcaccaagcaggctcagtgtctgatgcctgacatctcctcctgtcctgggcctggaacctgcagctgagaaaatccctcaaccacctcgtctcctccatcgcccctgctgggccccccagcctgacagtgggttgtatgcctgcctctttccaccaactggcctgggcactgcccccaaataaaggaactctgcactgca

SEQ ID NO: 115385 - DNA, 993 bp, Homo sapiens
  Payload ID: 2516
  Gene Symbol: CD164L2
  Gene Name: CD164 sialomucin-like 2
  Uniprot ID: Q6UWJ8
  ENST ID: ENST00000374030
  CDS Start-End: 142-666
ccacgcccccacctggccacgccccggttgcccaggtctcgctccgcacacgctcagccgagcccagtctgggagggacgcgcccggcagctgtccaccgatcccggccaccgcccccggccacccccaccccgcgagcccatggaggctccgggaccccgcgccttgcggactgcgctctgtggcggctgttgctgcctcctcctatgtgcccagctggctgtggctggtaaaggagctcgaggctttgggaggggagccctgatccgcctgaatatctggccggcggtccaaggggcctgcaaacagctggaggtctgtgagcactgcgtggagggagacggagcgcgcaatctctccagctgcgtgtgggagcagtgccggccagaggagccaggacactgtgtggcccaatctgaggtggtcaaggaaggttgctccatctacaaccgctcagaggcatgtccagctgctcaccaccaccccacctatgaaccgaagacagtcacaacagggagccccccagtccctgaggcccacagccctggatttgacggggccagctttatcggaggtgtcgtgctggtgttgagcctacaggcggtggctttctttgtgctgcacttcctcaaggccaaggacagcacctaccagacgctaatctgacccctttgggcctggactccatcctgaggggaaaggaggatgcagagggtggcctctgggcacccttgtgggtaagcggggggcgggggcgggaaaaactctggccgccagtttttggctcctgcgggcaccaagcaggctcagtgtctgatgcctgacatctcctcctgtcctgggcctggaacctgcagctgagaaaatccctcaaccacctcgtctcctccatcgcccctgctgggccccccagcctgacagtgggttgtatgcctgcctctttccaccaactggcctgggcactgcccccaaataaaggaactctgcactgca

SEQ ID NO: 115386 - DNA, 1512 bp, Homo sapiens
  Payload ID: 2517
  Gene Symbol: CD177
  Gene Name: CD177 molecule
  Uniprot ID: Q8N6Q3
  ENST ID: ENST00000378012
  CDS Start-End: 1-438
atgagcgcggtattactgctggccctcctggggttcatcctcccactgccaggagtgcaggcgctgctctgccagtttgggacagttcagcatgtgtggaaggtgtccgacctgccccggcaatggacccctaagaacaccagctgcgacagcggcttggggtgccaggacacgttgatgctcattgagagcggaccccaagtgagcctggtgctctccaagggctgcacggaggccaaggaccaggagccccgcgtcactgagcaccggatgggccccggcctctccctgatctcctacaccttcgtgtgccgccaggaggacttctgcaacaacctcgttaactccctcccgctttgggccccacagcccccagcagatcccatgatgggagctgcagaaggcccctttgggaaggctgagcaggttgactcttgaggccagcaaaagtggggtgcagagaaggtatctgatcaaatccagtgccctctcagtgccccctcactctgtctgtcactttcctagacccaggatccttgaggtgcccagtctgcttgtctatggaaggctgtctggaggggacaacagaagagatctgccccaaggggaccacacactgttatgatggcctcctcaggctcaggggaggaggcatcttctccaatctgagagtccagggatgcatgccccagccagtttgcaacctgctcaatgggacacaggaaattgggcccgtgggtatgactgagaactgcgatatgaaagattttctgacctgtcatcgggggaccaccattatgacacacggaaacttggctcaagaacccactgattggaccacatcgaataccgagatgtgcgaggtggggcaggtgtgtcaggagacgctgctgctcctagatgtaggactcacatcaaccctggtggggacaaaaggctgcagcactgttggggctcaaaattcccagaagaccaccatccactcagcccctcctggggtgcttgtggcctcctatacccacttctgctcctcggacctgtgcaatagtgccagcagcagcagcgttctgctgaactccctccctcctcaagctgcccctgtcccaggagaccggcagtgtcctacctgtgtgcagccccttggaacctgttcaagtggctccccccgaatgacctgccccaggggcgccactcattgttatgatgggtacattcatctctcaggaggtgggctgtccaccaaaatgagcattcagggctgcgtggcccaaccttccagcttcttgttgaaccacaccagacaaatcgggatcttctctgcgcgtgagaagcgtgatgtgcagcctcctgcctctcagcatgagggaggtggggctgagggcctggagtctctcacttggggggtggggctggcactggccccagcgctgtggtggggagtggtttgcccttcctgctaactctattacccccacgattcttcaccgctgctgaccacccacactcaacctc

SEQ ID NO: 115387 - DNA, 2222 bp, Homo sapiens
  Payload ID: 2517
  Gene Symbol: CD177
  Gene Name: CD177 molecule
  ENST ID: ENST00000618265
  CDS Start-End: 57-1370
aaaggacttgtttcctgctgaaaaagcagaaagagattaccagccacagacgggtcatgagcgcggtattactgctggccctcctggggttcatcctcccactgccaggagtgcaggcgctgctctgccagtttgggacagttcagcatgtgtggaaggtgtccgacctgccccggcaatggacccctaagaacaccagctgcgacagcggcttggggtgccaggacacgttgatgctcattgagagcggaccccaagtgagcctggtgctctccaagggctgcacggaggccaaggaccaggagccccgcgtcactgagcaccggatgggccccggcctctccctgatctcctacaccttcgtgtgccgccaggaggacttctgcaacaacctcgttaactccctcccgctttgggccccacagcccccagcagacccaggatccttgaggtgcccagtctgcttgtctatggaaggctgtctggaggggacaacagaagagatctgccccaaggggaccacacactgttatgatggcctcctcaggctcaggggaggaggcatcttctccaatctgagagtccagggatgcatgccccagccagtttgcaacctgctcaatgggacacaggaaattgggcccgtgggtatgactgagaactgcgatatgaaagattttctgacctgtcatcgggggaccaccattatgacacacggaaacttggctcaagaacccactgattggaccacatcgaataccgagatgtgcgaggtggggcaggtgtgtcaggagacgctgctgctcctagatgtaggactcacatcaaccctggtggggacaaaaggctgcagcactgttggggctcaaaattcccagaagaccaccatccactcagcccctcctggggtgcttgtggcctcctatacccacttctgctcctcggacctgtgcaatagtgccagcagcagcagcgttctgctgaactccctccctcctcaagctgcccctgtcccaggagaccggcagtgtcctacctgtgtgcagccccttggaacctgttcaagtggctccccccgaatgacctgccccaggggcgccactcattgttatgatgggtacattcatctctcaggaggtgggctgtccaccaaaatgagcattcagggctgcgtggcccaaccttccagcttcttgttgaaccacaccagacaaatcgggatcttctctgcgcgtgagaagcgtgatgtgcagcctcctgcctctcagcatgagggaggtggggctgagggcctggagtctctcacttggggggtggggctggcactggccccagcgctgtggtggggagtggtttgcccttcctgctaactctattacccccacgattcttcaccgctgctgaccacccacactcaacctccctctgacctcataacctaatggccttggacaccagattctttcccattctgtccatgaatcatcttccccacacacaatcattcatatctactcacctaacagcaacactggggagagcctggagcatccggacttgccctatgggagaggggacgctggaggagtggctgcatgtatctgataatacagaccctgtcctttctcccagtgctgggatttctccatgtgagggggcagcaggacacccagggatctagcgtgggggaggagaggagcctaatgagaaaatgaccatctaaagcctgcccttcattggtctggttcacgtctccaaaccagcttggatggtagcagagacttcagggtgctccagccaaacgtatttgggcatcaccatgacctgggaggggaagatgcactgagacgtatgaggcttccagcctagcagccagggccctagcacaaacaggaggctcgccccatctgagcaactgcaggagaggttagtacagtcatgcattgcttaacgacagggacgtgtcgttagaaatgtgtcgttaggtgattttatgaccataggaacattgtagcgtgcacttacaccaacccagatggtacagcccaatacacacccaggatggacgctagagtcgactgctcctaggctacaagcctgcagtgcatgttatggtgtgaatactgcaggcaatcttaacaccacggcaagtatttgtgcatctacacacatctaaacatagaaaaggtacagcataaatacactattgtcatctcagcaga

SEQ ID NO: 115388 - DNA, 536 bp, Homo sapiens
  Payload ID: 2517
  Gene Symbol: CD177
  Gene Name: CD177 molecule
  ENST ID: ENST00000607855
  CDS Start-End: 25-444
gagattaccagccacagacgggtcatgagcgcggtattactgctggccctcctggggttcatcctcccactgccaggagtgcaggcgctgctctgccagtttgggacagttcagcatgtgtggaaggtgtccgacctgccccggcaatggacccctaagaacaccagctgcgacagcggcttggggtgccaggacacgttgatgctcattgagagcggaccccaagtgagcctggtgctctccaagggctgcacggaggccaaggaccaggagccccgcgtcactgagcaccggatgggccccggcctctccctgatctcctacaccttcgtgtgccgccaggaggacttctgcaacaacctcgttaactccctcccgctttgggccccacagcccccagcaggtgcctgcgggagggtcgggaggagagggaggggctgctagaaggggatccgctgagcacagaggggctgttacggagtccctcccaccctcgctcgctatcccgaccctcgctggctccatccctcccctga

SEQ ID NO: 115389 - DNA, 5388 bp, Homo sapiens
  Payload ID: 2518
  Gene Symbol: CD180
  Gene Name: CD180 molecule
  Uniprot ID: Q99467
  ENST ID: ENST00000256447
  CDS Start-End: 159-2144
acagagccacagaatgctgagcagtcaacagcatttcttgttccaagatcacccttctgagtacctctctggctgccaaattgccagggccttcacagtttgattccatttctcagctccaagcattaggtaaacccaccaagcaatcctagcctgtgatggcgtttgacgtcagctgcttcttttgggtggtgctgttttctgccggctgtaaagtcatcacctcctgggatcagatgtgcattgagaaagaagccaacaaaacatataactgtgaaaatttaggtctcagtgaaatccctgacactctaccaaacacaacagaatttttggaattcagctttaattttttgcctacaattcacaatagaaccttcagcagactcatgaatcttacctttttggatttaactaggtgccagattaactggatacatgaagacacttttcaaagccatcatcaattaagcacacttgtgttaactggaaatcccctgatattcatggcagaaacatcgcttaatgggcccaagtcactgaagcatcttttcttaatccaaacgggaatatccaatctcgagtttattccagtgcacaatctggaaaacttggaaagcttgtatcttggaagcaaccatatttcctccattaagttccccaaagacttcccagcacggaatctgaaagtactggattttcagaataatgctatacactacatctctagagaagacatgaggtctctggagcaggccatcaacctaagcctgaacttcaatggcaataatgttaaaggtattgagcttggggcttttgattcaacgatcttccaaagtttgaactttggaggaactccaaatttgtctgttatattcaatggtctgcagaactctactactcagtctctctggctgggaacatttgaggacattgatgacgaagatattagttcagccatgctcaagggactctgtgaaatgtctgttgagagcctcaacctgcaggaacaccgcttctctgacatctcatccaccacatttcagtgcttcacccaactccaagaattggatctgacagcaactcacttgaaagggttaccctctgggatgaagggtctgaacttgctcaagaaattagttctcagtgtaaatcatttcgatcaattgtgtcaaatcagtgctgccaatttcccctcccttacacacctctacatcagaggcaacgtgaagaaacttcaccttggtgttggctgcttggagaaactaggaaaccttcagacacttgatttaagccataatgacatagaggcttctgactgctgcagtctgcaactcaaaaacctgtcccacttgcaaaccttaaacctgagccacaatgagcctcttggtctccagagtcaggcattcaaagaatgtcctcagctagaactcctcgatttggcatttacccgcttacacattaatgctccacaaagtcccttccaaaacctccatttccttcaggttctgaatctcacttactgcttccttgataccagcaatcagcatcttctagcaggcctaccagttctccggcatctcaacttaaaagggaatcactttcaagatgggactatcacgaagaccaacctacttcagaccgtgggcagcttggaggttctgattttgtcctcttgtggtctcctctctatagaccagcaagcattccacagcttgggaaaaatgagccatgtagacttaagccacaacagcctgacatgcgacagcattgattctcttagccatcttaagggaatctacctcaatctggctgccaacagcattaacatcatctcaccccgtctcctccctatcttgtcccagcagagcaccattaatttaagtcataaccccctggactgcacttgctcgaatattcatttcttaacatggtacaaagaaaacctgcacaaacttgaaggctcggaggagaccacgtgtgcaaacccgccatctctaaggggagttaagctatctgatgtcaagctttcctgtgggattacagccataggcattttctttctcatagtatttctattattgttggctattctgctattttttgcagttaaataccttctcaggtggaaataccaacacatttagtgctgaaggtttccagagaaagcaaataagtgtgcttagcaaaattgctctaagtgaaagaactgtcatctgctggtgaccagaccagacttttcagattgcttcctggaactgggcagggactcactgtgcttttctgagcttcttactcctgtgagtcccagagctaaagaaccttctaggcaagtacaccgaatgactcagtccagagggtcagatgctgctgtgagaggcacagagccctttccgcatgtggaagagtgggaggaagcagagggagggactgggcagggactgccggccccggagtctcccacagggaggccattccccttctactcaccgacatccctcccagcaccacacaccccgcccctgaaaggagatcatcagcccccacaatttgtcagagctgaagccagcccactacccacccccactacagcattgtgcttgggtctgggttctcagtaatgtagccatttgagaaacttacttggggacaaagtctcaatccttattttaaatgaaaaaagaaaagaaaagcataataaatttaaaagaaaaggctgagaaatgaaacttggtatcaaatcgactccattaatcttcttaatccttaggtctgtaaggtctctgtaatgcccctagggtgtgaatggctataaaaaatagaacccacccccaaggtttagaatttcttccacatttgcctcactcagttcagaaaccaggcaggctctctctgcctatctggtgttctggctcttatgttacagatcctaacttgcaggtgggctgtgacccaaaatgctcttctcatttgggcatccggttcttagaagtctcttttccagaagaactgtgaaataaatcgtggtttggttctcaggcttgcccttaaaagcctatttgcttcggagagcatttgaattagcacatttacgtgaaaatgaggaagaaggcatccctgcatgctagctgttgggaacacagtaaagctggcttagtgagaagtggtttctgttgaggctggggatgtcaccaaaggtcacaccagccatggacaggggcctgaaccactgaatgcagatagacaaagagcaatgtcatgacttaggcttaaagggccatactcacacaggcctgtatcttctgaagtcttgattgccagacaagcttggcgggagctcctggactcaagtggtgcattgttctgttcaataaccaattttagggtagagatagagatggtaacttatagttatgaaattctgataagctaacaaaataaaaatggatccaaccaatcagaatatattagtccttaagttgaaggcatactagtgggacatcataacagagtgaaaacttgggggtcatcctttttgtctcttcgcccccaggaaaagcagggcaggcagggaacagcagtgggtgaacctcttctctgctcagggatttcaggccttcacacttgctctttcctttgcctctaagatgctgccattggcctccaaatggctccttccttcatcttgagatttcagtgctaatattttctcctttgagggatttcttctctgacctagctaatccaaagcaacctctatgcctcacctggttttattatctttataatgcttatcagtgtttggaattaacttcttcatttgttttaattagtttctcttgtcttgtctctcccaaatacaagtgccatgagagggtctttgcctaaagataccctagaacatgcctgggacatagtaaggactctctctctctctctccatatgtgtgtgtgtgtgtatgtgtgtgtatgtgtgtgtgtatatatatatataattttttttttgagactgattcttgctctgtcgcccaggctggagtgctatagtgcaatcttggctcactgtaacctccgcctcccaggttccagcgattctcctgcctcagcctcctgagtagctgggattacaggcgcccaccaccacgcctggctaatttttgtatttttagtagagacagggtttcaccatgttggccaggctggtcttgaactcctgacctcaagtgatctgcccgcctcggcctcccaaagtgctgggattacagatgagagccatcgtgcccggccaagattcaatatatttttaatatgtgctgatccctgagcctttattagctcctagttctgccaccatgcctatgctgctgactcttagctcctgacctctccacggtttcctgggcctcccacatgtttttcactggcatctcctagggaagtttttacaaaatggattcccaggcctcacccccagatactgagattctgttggactgaggttggctcagggttcccagccaaatgattccatgtaaaatgtggaaggtccaaactctaagaatccagtcttagacagcaccaacccattgagtccctgcatattctgtcacaggtaagctctttcttgccttagggatttaagctgcagatggaaaatactaattgctgatttaccaacccatagacatactgccctccataatatttaatatgtaacttggaaaaacgaaacaattctgtagaaaacctctgatgtgaattacatcacactaacaatgaaaggggcccaggccttagcaaagcataattgcccatcctgctttcacttctcaggcccgctcccttccatgcgatgcagcttgctgctccgtaactgatctaaggctttgtgacagctcctctgttttaagcaacagtaaattcaccccacaaagtcagaaagggagcttgttgatggctgctgtcaattttattgctttaacctgtttactaggatagactctgtaacatggtgtgtttattggttttatgtattgcatgttgttgctgctctgacaagctactcctataaaaatgtgttattattgcacgatgtagctcagtgagctgaccctgcatttcaaagggtactggagcaaatagcactgaagtccataaaagctgactggcctccatcacagaggactctctgcatgagctgcaactcctacaacccaggagagaattacacctttccctgtgccagcagccactgcttagtacagcacagcccttgaacacaggcaatatctgtaaaattccaagacagaaaactgtcgtgccattcttatttgtccaactctccaatcagtgtagtttgcaattttgatgtttataaaagtatgaaacaaa

SEQ ID NO: 115390 - DNA, 1932 bp, Homo sapiens
  Payload ID: 2519
  Gene Symbol: CD19
  Gene Name: CD19 molecule
  Uniprot ID: P15391
  ENST ID: ENST00000324662
  CDS Start-End: 45-1715
gcatcccctgcgcgaagctgggtgccccggagagtctgaccaccatgccacctcctcgcctcctcttcttcctcctcttcctcacccccatggaagtcaggcccgaggaacctctagtggtgaaggtggaagagggagataacgctgtgctgcagtgcctcaaggggacctcagatggccccactcagcagctgacctggtctcgggagtccccgcttaaacccttcttaaaactcagcctggggctgccaggcctgggaatccacatgaggcccctggccatctggcttttcatcttcaacgtctctcaacagatggggggcttctacctgtgccagccggggcccccctctgagaaggcctggcagcctggctggacagtcaatgtggagggcagcggggagctgttccggtggaatgtttcggacctaggtggcctgggctgtggcctgaagaacaggtcctcagagggccccagctccccttccgggaagctcatgagccccaagctgtatgtgtgggccaaagaccgccctgagatctgggagggagagcctccgtgtctcccaccgagggacagcctgaaccagagcctcagccaggacctcaccatggcccctggctccacactctggctgtcctgtggggtaccccctgactctgtgtccaggggccccctctcctggacccatgtgcaccccaaggggcctaagtcattgctgagcctagagctgaaggacgatcgcccggccagagatatgtgggtaatggagacgggtctgttgttgccccgggccacagctcaagacgctggaaagtattattgtcaccgtggcaacctgaccatgtcattccacctggagatcactgctcggccagtactatggcactggctgctgaggactggtggctggaaggtctcagctgtgactttggcttatctgatcttctgcctgtgttcccttgtgggcattcttcatcttcaaagagccctggtcctgaggaggaaaagaaagcgaatgactgaccccaccaggagattcttcaaagtgacgcctcccccaggaagcgggccccagaaccagtacgggaacgtgctgtctctccccacacccacctcaggcctcggacgcgcccagcgttgggccgcaggcctggggggcactgccccgtcttatggaaacccgagcagcgacgtccaggcggatggagccttggggtcccggagcccgccgggagtgggcccagaagaagaggaaggggagggctatgaggaacctgacagtgaggaggactccgagttctatgagaacgactccaaccttgggcaggaccagctctcccaggatggcagcggctacgagaaccctgaggatgagcccctgggtcctgaggatgaagactccttctccaacgctgagtcttatgagaacgaggatgaagagctgacccagccggtcgccaggacaatggacttcctgagccctcatgggtcagcctgggaccccagccgggaagcaacctccctggggtcccagtcctatgaggatatgagaggaatcctgtatgcagccccccagctccgctccattcggggccagcctggacccaatcatgaggaagatgcagactcttatgagaacatggataatcccgatgggccagacccagcctggggaggagggggccgcatgggcacctggagcaccaggtgatcctcaggtggccagcctggatctcctcaagtccccaagattcacacctgactctgaaatctgaagacctcgagcagatgatgccaacctctggagcaatgttgcttaggatgtgtgcatgtgtgtaagtgtgtgtgtgtgtgtgtgtgtgtatacatgccagtgacacttccagtcccctttgtattccttaaataaactcaatgagctcttccaa

SEQ ID NO: 115391 - DNA, 1957 bp, Homo sapiens
  Payload ID: 2519
  Gene Symbol: CD19
  Gene Name: CD19 molecule
  Uniprot ID: P15391
  ENST ID: ENST00000538922
  CDS Start-End: 63-1736
aggcccctgcctgccccagcatcccctgcgcgaagctgggtgccccggagagtctgaccaccatgccacctcctcgcctcctcttcttcctcctcttcctcacccccatggaagtcaggcccgaggaacctctagtggtgaaggtggaagagggagataacgctgtgctgcagtgcctcaaggggacctcagatggccccactcagcagctgacctggtctcgggagtccccgcttaaacccttcttaaaactcagcctggggctgccaggcctgggaatccacatgaggcccctggccatctggcttttcatcttcaacgtctctcaacagatggggggcttctacctgtgccagccggggcccccctctgagaaggcctggcagcctggctggacagtcaatgtggagggcagcggggagctgttccggtggaatgtttcggacctaggtggcctgggctgtggcctgaagaacaggtcctcagagggccccagctccccttccgggaagctcatgagccccaagctgtatgtgtgggccaaagaccgccctgagatctgggagggagagcctccgtgtctcccaccgagggacagcctgaaccagagcctcagccaggacctcaccatggcccctggctccacactctggctgtcctgtggggtaccccctgactctgtgtccaggggccccctctcctggacccatgtgcaccccaaggggcctaagtcattgctgagcctagagctgaaggacgatcgcccggccagagatatgtgggtaatggagacgggtctgttgttgccccgggccacagctcaagacgctggaaagtattattgtcaccgtggcaacctgaccatgtcattccacctggagatcactgctcggccagtactatggcactggctgctgaggactggtggctggaaggtctcagctgtgactttggcttatctgatcttctgcctgtgttcccttgtgggcattcttcatcttcaaagagccctggtcctgaggaggaaaagaaagcgaatgactgaccccaccaggagattcttcaaagtgacgcctcccccaggaagcgggccccagaaccagtacgggaacgtgctgtctctccccacacccacctcaggcctcggacgcgcccagcgttgggccgcaggcctggggggcactgccccgtcttatggaaacccgagcagcgacgtccaggcggatggagccttggggtcccggagcccgccgggagtgggcccagaagaagaggaaggggagggctatgaggaacctgacagtgaggaggactccgagttctatgagaacgactccaaccttgggcaggaccagctctcccaggatggcagcggctacgagaaccctgaggatgagcccctgggtcctgaggatgaagactccttctccaacgctgagtcttatgagaacgaggatgaagagctgacccagccggtcgccaggacaatggacttcctgagccctcatgggtcagcctgggaccccagccgggaagcaacctccctggcagggtcccagtcctatgaggatatgagaggaatcctgtatgcagccccccagctccgctccattcggggccagcctggacccaatcatgaggaagatgcagactcttatgagaacatggataatcccgatgggccagacccagcctggggaggagggggccgcatgggcacctggagcaccaggtgatcctcaggtggccagcctggatctcctcaagtccccaagattcacacctgactctgaaatctgaagacctcgagcagatgatgccaacctctggagcaatgttgcttaggatgtgtgcatgtgtgtaagtgtgtgtgtgtgtgtgtgtgtgtatacatgccagtgacacttccagtcccctttgtattccttaaataaactcaatgagctcttccaatcct

SEQ ID NO: 115392 - DNA, 1707 bp, Homo sapiens
  Payload ID: 2519
  Gene Symbol: CD19
  Gene Name: CD19 molecule
  Uniprot ID: P15391
  ENST ID: ENST00000567541
  CDS Start-End: 34-1707
gcgaagctgggtgccccggagagtctgaccaccatgccacctcctcgcctcctcttcttcctcctcttcctcacccccatggaagtcaggcccgaggaacctctagtggtgaaggtggaagagggagataacgctgtgctgcagtgcctcaaggggacctcagatggccccactcagcagctgacctggtctcgggagtccccgcttaaacccttcttaaaactcagcctggggctgccaggcctgggaatccacatgaggcccctggccatctggcttttcatcttcaacgtctctcaacagatggggggcttctacctgtgccagccggggcccccctctgagaaggcctggcagcctggctggacagtcaatgtggagggcagcggggagctgttccggtggaatgtttcggacctaggtggcctgggctgtggcctgaagaacaggtcctcagagggccccagctccccttccgggaagctcatgagccccaagctgtatgtgtgggccaaagaccgccctgagatctgggagggagagcctccgtgtctcccaccgagggacagcctgaaccagagcctcagccaggacctcaccatggcccctggctccacactctggctgtcctgtggggtaccccctgactctgtgtccaggggccccctctcctggacccatgtgcaccccaaggggcctaagtcattgctgagcctagagctgaaggacgatcgcccggccagagatatgtgggtaatggagacgggtctgttgttgccccgggccacagctcaagacgctggaaagtattattgtcaccgtggcaacctgaccatgtcattccacctggagatcactgctcggccagtactatggcactggctgctgaggactggtggctggaaggtctcagctgtgactttggcttatctgatcttctgcctgtgttcccttgtgggcattcttcatcttcaaagagccctggtcctgaggaggaaaagaaagcgaatgactgaccccaccaggagattcttcaaagtgacgcctcccccaggaagcgggccccagaaccagtacgggaacgtgctgtctctccccacacccacctcaggcctcggacgcgcccagcgttgggccgcaggcctggggggcactgccccgtcttatggaaacccgagcagcgacgtccaggcggatggagccttggggtcccggagcccgccgggagtgggcccagaagaagaggaaggggagggctatgaggaacctgacagtgaggaggactccgagttctatgagaacgactccaaccttgggcaggaccagctctcccaggatggcagcggctacgagaaccctgaggatgagcccctgggtcctgaggatgaagactccttctccaacgctgagtcttatgagaacgaggatgaagagctgacccagccggtcgccaggacaatggacttcctgagccctcatgggtcagcctgggaccccagccgggaagcaacctccctggcagggtcccagtcctatgaggatatgagaggaatcctgtatgcagccccccagctccgctccattcggggccagcctggacccaatcatgaggaagatgcagactcttatgagaacatggataatcccgatgggccagacccagcctggggaggagggggccgcatgggcacctggagcaccaggtga

SEQ ID NO: 115393 - DNA, 1901 bp, Homo sapiens
  Payload ID: 2519
  Gene Symbol: CD19
  Gene Name: CD19 molecule
  ENST ID: ENST00000611258
  CDS Start-End: 17-1420
ggagagtctgaccaccatgccacctcctcgcctcctcttcttcctcctcttcctcacccccatggaagtcaggcccgaggaacctctagtggtgaaggtggaagagggagataacgctgtgctgcagtgcctcaaggggacctcagatggccccactcagcagctgacctggtctcgggagtccccgcttaaacccttcttaaaactcagcctggggctgccaggcctgggaatccacatgaggcccctggccatctggcttttcatcttcaacgtctctcaacagatggggggcttctacctgtgccagccggggcccccctctgagaaggcctggcagcctggctggacagtcaatgtggagggcagcggggagctgttccggtggaatgtttcggacctaggtggcctgggctgtggcctgaagaacaggtcctcagagggccccagctccccttccgggaagctcatgagccccaagctgtatgtgtgggccaaagaccgccctgagatctgggagggagagcctccgtgtctcccaccgagggacagcctgaaccagagcctcagccaggacctcaccatggcccctggctccacactctggctgtcctgtggggtaccccctgactctgtgtccaggggccccctctcctggacccatgtgcaccccaaggggcctaagtcattgctgagcctagagctgaaggacgatcgcccggccagagatatgtgggtaatggagacgggtctgttgttgccccgggccacagctcaagacgctggaaagtattattgtcaccgtggcaacctgaccatgtcattccacctggagatcactgctcggccagtactatggcactggctgctgaggactggtggctggaaggtctcagctgtgactttggcttatctgatcttctgcctgtgttcccttgtgggcattcttcatcttcaaagagccctggtcctgaggaggaaaagaaagcgaatgactgaccccaccaggagattcttcaaagtgacgcctcccccaggaagcgggccccagaaccagtacgggaacgtgctgtctctccccacacccacctcaggcctcggacgcgcccagcgttgggccgcaggcctggggggcactgccccgtcttatggaaacccgagcagcgacgtccaggcggatggagccttggggtcccggagccgccgggagtgggcccagaagaagaggaaggggagggctatgaggaacctgacagtgaggaggactccgagttctatgagaacgactccaaccttgggcaggaccagctctcccaggatggcagcggctacgagaaccctgaggatgagcccctgggtcctgaggatgaagactccttctccaacgctgagtcttatgagaacgaggatgaagagctgacccagccggtcgccaggacaatggacttcctgagccctcatgggtcagcctgggaccccagccgggaagcaacctccctggggtcccagtcctatgaggatatgagaggaatcctgtatgcagccccccagctccgctccattcggggccagcctggacccaatcatgaggaagatgcagactcttatgagaacatggataatcccgatgggccagacccagcctggggaggagggggccgcatgggcacctggagcaccaggtgatcctcaggtggccagcctggatctcctcaagtccccaagattcacacctgactctgaaatctgaagacctcgagcagatgatgccaacctctggagcaatgttgcttaggatgtgtgcatgtgtgtaagtgtgtgtgtgtgtgtgtgtgtgtatacatgccagtgacacttccagtcccctttgtattccttaaataaactcaatgagctcttcc

SEQ ID NO: 115394 - DNA, 2096 bp, Homo sapiens
  Payload ID: 2520
  Gene Symbol: CD1A
  Gene Name: CD1a molecule
  Uniprot ID: P06126
  ENST ID: ENST00000289429
  CDS Start-End: 534-1517
gggcagtcgtaggagactctgaaaaagcaaataaatcaatgttaaatcagaaatgtgaatgtagtaaggggctgaagagacaggggaagagaatacatgggaaaatattgaaaaggacagagtgatcaaaaagagcagggacatgggagcattgggcagcacactgggagccatttcactttatgctcttattgtatgattgagaaaaaaatgtccttagtggttaagtggcttttcaatgccacatcagacttgttccatagcagttgaattaggggaaggtgaataagttggaggttggtgacaaggagagaagctggaacagagaggagagtcagaaccagagggaaatgagagactgagtaggcatctcagggtttttgaaggagtggattttctttgttgcagtcaggggaggtttgtctgttggctgcagaaagaagtcagaatagagatatcgtggggtaggtttgtttggaacagaaatcaaagaccaatttttctgagagaaggaaataacatctgcaaatgatatgctgtttttgctacttccattgttagctgttctcccaggtgatggcaatgcagacgggctcaaggagcctctctccttccatgtcacctggatcgcatccttttacaaccattcctggaaacaaaatctggtctcaggttggctgagtgatttgcagactcatacctgggacagcaattccagcaccatcgttttcctgtgcccctggtccaggggaaacttcagcaatgaggagtggaaggaactggaaacattattccgtatacgcaccattcggtcatttgagggaattcgtagatacgcccatgaattgcagtttgaatatccttttgagatacaggtgacaggaggctgtgagctgcactctggaaaggtctcaggaagcttcttgcagttagcttatcaaggatcagactttgtgagcttccagaacaattcatggttgccatatccagtggctgggaatatggccaagcatttctgcaaagtgctcaatcagaatcagcatgaaaatgacataacacacaatcttctcagtgacacctgcccacgtttcatcttgggtcttcttgatgcaggaaaggcacatctccagcggcaagtgaagcccgaggcctggctgtcccatggccccagtcctggccctggccatctgcagcttgtgtgccatgtctcaggattctacccaaagcccgtgtgggtgatgtggatgcggggtgagcaggagcagcagggcactcagcgaggggacatcttgcccagtgctgatgggacatggtatctccgcgcaaccctggaggtggccgctggggaggcagctgacctgtcctgtcgggtgaagcacagcagtctagagggccaggacatcgtcctctactgggagcatcacagttccgtgggcttcatcatcttggcggtgatagtgcctttacttcttctgataggtcttgcgctttggttcaggaaacgctgtttctgttaagacacaccatgagcctcctcgtcacccttctccttttggggtgagagaccagcagcccaagggctccagacacacctgaacacatcgtgatgatgacgtcctctcaactctctttgtaaaaattttgttatttttgcttgtttctgattaatgattgtttgtcaatataagctcaatttaattttgcaggatttgttgttctgacctgggttctgggacttttaaattcaaattttatctccagatggaatggggtcctagcaacctccacatgttcaactattaatggatcatcaggcctgttttagatatcccttactccagagggccttccctgacttacaagtgggaagcagtctcttcctggtctgaactcccgccacattttagccgtactttgctaactgtgctcctcacttcctcttcttcattgcagttatttagatcccccctttccttctaatttttcagctccttcaatgcaaagtacatgtatttttaatatatgcatccctggtgaaggatcttgcctgcatgaaacatgttctcaataaaactctgtgttgaatttatgccaaa

SEQ ID NO: 115395 - DNA, 1395 bp, Homo sapiens
  Payload ID: 2521
  Gene Symbol: CD1B
  Gene Name: CD1b molecule
  Uniprot ID: P29016
  ENST ID: ENST00000368168
  CDS Start-End: 109-1110
ggcagttggaagagagaagaagtcactacagggtactgaggaaaagctttgctgaaattggagatcaaataccagctctgccagtaagaagttgcatctcccagtgaaatgctgctgctgccatttcaactgttagctgttctctttcctggtggtaacagtgaacatgccttccaggggccgacctcctttcatgttatccagacctcgtcctttaccaatagtacctgggcacaaactcaaggctcaggctggttggatgatttgcagattcatggctgggatagcgactcaggcactgccatattcctgaagccttggtctaaaggtaactttagtgataaggaggttgctgagttagaggagatattccgagtctacatctttggattcgctcgagaagtacaagactttgccggtgatttccagatgaaatacccctttgagatccagggcatagcaggctgtgagctacattctggaggtgccatagtaagcttcctgaggggagctctaggaggattggatttcctgagtgtcaagaatgcttcatgtgtgccttccccagaaggtggcagcagggcacagaaattctgtgcactaatcatacaatatcaaggtatcatggaaactgtgagaattctcctctatgaaacctgcccccgatatctcttgggcgtcctcaatgcaggaaaagcagatctgcaaagacaagtgaagcctgaggcctggctgtccagtggccccagtcctggacctggccgtctgcagcttgtgtgccatgtctcaggattctacccaaagcccgtgtgggtgatgtggatgcggggtgagcaggagcagcagggcactcagctaggggacatcctgcccaatgctaactggacatggtatctccgagcaaccctggatgtggcagatggggaggcggctggcctgtcctgtcgggtgaagcacagcagtttagagggccaggacatcatcctctactggagaaaccccacctccattggctcaattgttttggcaataatagtgccttccttgctccttttgctatgccttgcattatggtatatgaggcgccggtcatatcagaatatcccatgagccatcatcatgtctcctctcccattcgcaataagtaccaagaagcccaagatatcagcccaaaagtcaatcttatcatatttcaaatgattttcaaatttgatgaaatcagagttttcatgtattttaaaataaattattatttaaacatcagcaaaaaagtacttaaaactgtaaatttattatgagactgtactaacagtgtgattcaccctgattttacacacattaaaatgttagaaaaaatgtgtctcaaaataaatgaaatataatacatatgactta

SEQ ID NO: 115396 - DNA, 1024 bp, Homo sapiens
  Payload ID: 2521
  Gene Symbol: CD1B
  Gene Name: CD1b molecule
  ENST ID: ENST00000451207
  CDS Start-End: 1-739
ctcgtcctttaccaatagtacctgggcacaaactcaaggctcaggctggttggatgatttgcagattcatggctgggatagcgactcaggcactgccatattcctgaagccttggtctaaaggtaactttagtgataaggaggttgctgagttagaggagatattccgagtctacatctttggattcgctcgagaagtacaagactttgccggtgatttccagatgaaatacccctttgagatccagggcatagcaggctgtgagctacattctggaggtgccatagtaagcttcctgaggggagctctaggaggattggatttcctgagtgtcaagaatgcttcatgtgtgccttccccagaaggtggcagcagggcacagaaattctgtgcactaatcatacaatatcaaggtatcatggaaactgtgagaattctcctctatgaaacctgcccccgatatctcttgggcgtcctcaatgcaggaaaagcagatctgcaaagacaagtgaagcctgaggcctggctgtccagtggccccagtcctggacctggccgtctgcagcttgtgtgccatgtctcaggattctacccaaagcccgtgtgggtgatgtggatgcggggaaaccccacctccattggctcaattgttttggcaataatagtgccttccttgctccttttgctatgccttgcattatggtatatgaggcgccggtcatatcagaatatcccatgagccatcatcatgtctcctctcccattcgcaataagtaccaagaagcccaagatatcagcccaaaagtcaatcttatcatatttcaaatgattttcaaatttgatgaaatcagagttttcatgtattttaaaataaattattatttaaacatcagcaaaaaagtacttaaaactgtaaatttattatgagactgtactaacagtgtgattcaccctgattttacacacattaaaatgttagaaaaaatgtgtctcaaaataaatgaaatataatacatatgactta

SEQ ID NO: 115397 - DNA, 1435 bp, Homo sapiens
  Payload ID: 2522
  Gene Symbol: CD1C
  Gene Name: CD1c molecule
  Uniprot ID: P29017
  ENST ID: ENST00000368170
  CDS Start-End: 280-1281
aggcagttgaggaagggaagtagatataatggagcttagtggcagagcagctggaatcctgagagaagagaataactttagttcagagcaggtggggaaatgagagattgagtaggaggaccaaggttgagggaagcagatcttcttagttgctgtcagcggctgatggggaagattgttggtagaaggaagtcagaatataggtacagagggataagtttgctaagaacagagatcagcaaacagcttttctgagagaaagaaacatctgcaaatgacatgctgtttctgcagtttctgctgctagctcttcttctcccaggtggtgacaatgcagacgcatcccaggaacacgtctccttccatgtcatccagatcttctcatttgtcaaccaatcctgggcacgaggtcagggctcaggatggctggacgagttgcagactcatggctgggacagtgaatcaggcacaataattttcctgcataactggtccaagggcaacttcagcaatgaagagttgtcagacctagagttgttatttcgtttctacctctttggattaactcgggagattcaagaccatgcaagtcaagattactcgaaatatccctttgaagtacaggtgaaagcgggctgtgagctgcattctggaaagagcccagaaggcttctttcaggtagctttcaacggattagatttactgagtttccagaatacaacatgggtgccatctccaggctgtggaagtttggcccaaagtgtctgtcatctactcaatcatcagtatgaaggcgtcacagaaacagtgtataatctcataagaagcacttgcccccgatttctcttgggtctcctggatgcagggaagatgtatgtacacaggcaagtgaggccagaagcctggctgtccagtcgccccagccttgggtctggccagctgttgctggtttgtcatgcctccggcttctacccaaagcctgtttgggtgacatggatgcggaatgaacaggagcaactgggcactaaacatggtgatattcttcctaatgctgatgggacatggtatcttcaggtgatcctggaggtggcatctgaggagcctgctggcctgtcttgtcgagtgagacacagcagtctaggaggccaggacatcatcctctactggggacaccacttttccatgaattggattgccttggtagtgatagtgcccttggtgattctaatagtccttgtgttatggtttaagaagcactgctcatatcaggacatcctgtgagactcttccccctgactcccccattgtgttaagaacccagcaacccaggagcctagtacaatatagtgatgccatcccgtcgactctccatttaaattgtttctctttctgcataataaacatttgttaataaaaaccaaattctaatttggaa

SEQ ID NO: 115398 - DNA, 855 bp, Homo sapiens
  Payload ID: 2522
  Gene Symbol: CD1C
  Gene Name: CD1c molecule
  ENST ID: ENST00000443761
  CDS Start-End: 1-844
tttcctgcataactggtccaagggcaacttcagcaatgaagagttgtcagacctagagttgttatttcgtttctacctctttggattaactcgggagattcaagaccatgcaagtcaagattactcgaaatatccctttgaagtacaggtgaaagcgggctgtgagctgcattctggaaagagcccagaaggcttctttcaggtagctttcaacggattagatttactgagtttccagaatacaacatgggtgccatctccaggctgtggaagtttggcccaaagtgtctgtcatctactcaatcatcagtatgaaggcgtcacagaaacagtgtataatctcataagaagcacttgcccccgatttctcttgggtctcctggatgcagggaagatgtatgtacacaggcaagtgaggccagaagcctggctgtccagtcgccccagccttgggtctggccagctgttgctggtttgtcatgcctccggcttctacccaaagcctgtttgggtgacatggatgcggaatgaacaggagcaactgggcactaaacatggtgatattcttcctaatgctgatgggacatggtatcttcaggtgatcctggaggtggcatctgaggagcctgctggcctgtcttgtcgagtgagacacagcagtctaggaggccaggacatcatcctctactgggctcatatcaggacatcctgtgagactcttccccctgactcccccattgtgttaagaacccagcaacccaggagcctagtacaatatagtgatgccatcccgtcgactctccatttaaattgtttctctttctgcataataaacatttgttaataaaaaccaaa

SEQ ID NO: 115399 - DNA, 2253 bp, Homo sapiens
  Payload ID: 2523
  Gene Symbol: CD1D
  Gene Name: CD1d molecule
  Uniprot ID: P15813
  ENST ID: ENST00000368171
  CDS Start-End: 500-1507
gttttctacccaagaatgctacttcaggagatcagtcaaaaggttagggtgatggtgacggtggaaatatagaaaaaggaatttattcaagaggtattcaaaaagaagtgaaatagagatgagttggagatagattggataaaaagagtgagggagagggaggtgtcaggctgcagcccaggttctgagttgccaaagaggagtcttttcctccaggaaattgagacacgccggttgtgaaacctactgaagtgagcggcggcgccaggattcctgggaccccgacctctttgcagctcgcacagctaagggcgagggcgcccttcggcagaagcagcaaaccgccggcaagcccagcgaggagggctgccggggtctgggcttgggaattggctggcacccagcggaaagggacgtgagctgagcggcgggggagaagagtgcgcaggtcagagggcggcgcgcagcggcgctccgcgaggtccccacgccgggcgatatggggtgcctgctgtttctgctgctctgggcgctcctccaggcttggggaagcgctgaagtcccgcaaaggcttttccccctccgctgcctccagatctcgtccttcgccaatagcagctggacgcgcaccgacggcttggcgtggctgggggagctgcagacgcacagctggagcaacgactcggacaccgtccgctctctgaagccttggtcccagggcacgttcagcgaccagcagtgggagacgctgcagcatatatttcgggtttatcgaagcagcttcaccagggacgtgaaggaattcgccaaaatgctacgcttatcctatcccttggagctccaggtgtccgctggctgtgaggtgcaccctgggaacgcctcaaataacttcttccatgtagcatttcaaggaaaagatatcctgagtttccaaggaacttcttgggagccaacccaagaggccccactttgggtaaacttggccattcaagtgctcaaccaggacaagtggacgagggaaacagtgcagtggctccttaatggcacctgcccccaatttgtcagtggcctccttgagtcagggaagtcggaactgaagaagcaagtgaagcccaaggcctggctgtcccgtggccccagtcctggccctggccgtctgctgctggtgtgccatgtctcaggattctacccaaagcctgtatgggtgaagtggatgcggggtgagcaggagcagcagggcactcagccaggggacatcctgcccaatgctgacgagacatggtatctccgagcaaccctggatgtggtggctggggaggcagctggcctgtcctgtcgggtgaagcacagcagtctagagggccaggacatcgtcctctactggggtgggagctacacctccatgggcttgattgccttggcagtcctggcgtgcttgctgttcctcctcattgtgggctttacctcccggtttaagaggcaaacttcctatcagggcgtcctgtgactcgccttgccacatctgtgtctctggaacccaggacctctggacctcaggttcctaagacttcagtcctggtctgctcaggaattgaagatgtaaggaattgaagataggagagataccttgaaaaagtagagaacagtcatgaggcagctttcatcacacccttttaacatttatctaaaagaatttaaattctttttcaaaaattacactacaagtttataagcccaaatggctctgtgaaatcagaagtgcaaaggtgtgcaaacttgtatctgaagacctaccagggacaagcaggtaagagctgatgtgagtgtgtgtgatgggatctgtaaggaactggaacacacatgtcctatccaaaggaatcagctgcagctgcttgttgtcaagtataaagtcaggacctggcttggctttaaccgtttttcaagaaaactggaaatctggattttcagcgaacatgcctgattttaaaaggttgactcaagtttttacaaaatactatgtgggacacctcaaatacatacctactgactgatgacaaacccaggagtttgtgtgtcttttataaaaagtttgccctggatgtcatattggcagttggaggacacagtttctattgtaaatttggatttacgactgaagaaggacattttctctttaaaagaaagttaggttataagaaacagaggcgtctcacatttttacttggtgtaattaataaacgaagataaatcata

SEQ ID NO: 115400 - DNA, 435 bp, Homo sapiens
  Payload ID: 2524
  Gene Symbol: CD1E
  Gene Name: CD1e molecule
  Uniprot ID: P15812
  ENST ID: ENST00000368154
  CDS Start-End: 1-435
atgctgctcctgttcctcctcttcgagggtctctgctgtcctggggaaaatacagcagtgaagccagaggcctggctgtcctgtggccccagtcctggccctggccgtctgcagcttgtgtgccatgtctcaggattctacccaaagcccgtgtgggtgatgtggatgcggggtggatattccatctttctcatcctgatctgtttgactgtgatagttaccctggtcatattggttgtagttgactcacggttaaaaaaacagagttcaaataagaacattctttctccccacacacccagccctgtctttctcatgggagccaacactcaggacaccaagaattcaagacatcagttctgcttggcacaagtatcgtggatcaaaaacagagtattgaagaagtggaagacacgcctaaaccaactctggtga

SEQ ID NO: 115401 - DNA, 696 bp, Homo sapiens
  Payload ID: 2524
  Gene Symbol: CD1E
  Gene Name: CD1e molecule
  Uniprot ID: P15812
  ENST ID: ENST00000368155
  CDS Start-End: 1-696
atgctgctcctgttcctcctcttcgagggtctctgctgtcctggggaaaatacagcagctccccaggctctacaatcctatcatctagcagcagaggagcagctgtccttccgcatgctccaaacttcctcctttgccaaccacagctgggcacacagtgagggctcaggatggctgggtgacctgcagactcatggctgggacactgtcttgggcaccatccgctttctgaagccctggtcccatggaaacttcagcaagcaggagctgaaaaacttacagtcactgttccagttatacttccatagttttatccagatagtgcaagcttctgctggtcaatttcagcttgaattgaagccagaggcctggctgtcctgtggccccagtcctggccctggccgtctgcagcttgtgtgccatgtctcaggattctacccaaagcccgtgtgggtgatgtggatgcggggtggatattccatctttctcatcctgatctgtttgactgtgatagttaccctggtcatattggttgtagttgactcacggttaaaaaaacagagccctgtctttctcatgggagccaacactcaggacaccaagaattcaagacatcagttctgcttggcacaagtatcgtggatcaaaaacagagtattgaagaagtggaagacacgcctaaaccaactctggtga

SEQ ID NO: 115402 - DNA, 861 bp, Homo sapiens
  Payload ID: 2524
  Gene Symbol: CD1E
  Gene Name: CD1e molecule
  Uniprot ID: P15812
  ENST ID: ENST00000368156
  CDS Start-End: 1-861
atgctgctcctgttcctcctcttcgagggtctctgctgtcctggggaaaatacagcagctccccaggctctacaatcctatcatctagcagcagaggagcagctgtccttccgcatgctccaaacttcctcctttgccaaccacagctgggcacacagtgagggctcaggatggctgggtgacctgcagactcatggctgggacactgtcttgggcaccatccgctttctgaagccctggtcccatggaaacttcagcaagcaggagctgaaaaacttacagtcactgttccagttatacttccatagttttatccagatagtgcaagcttctgctggtcaatttcagcttgaattgaagccagaggcctggctgtcctgtggccccagtcctggccctggccgtctgcagcttgtgtgccatgtctcaggattctacccaaagcccgtgtgggtgatgtggatgcggggtgagcaggagcagcggggcactcagcgaggggacgtcctgcctaatgctgacgagacatggtatctccgagcaaccctggatgtggcggctggggaggcagctggcctgtcctgtcgggtgaaacacagcagtctagggggccatgatctaatcatccattggggtggatattccatctttctcatcctgatctgtttgactgtgatagttaccctggtcatattggttgtagttgactcacggttaaaaaaacagagccctgtctttctcatgggagccaacactcaggacaccaagaattcaagacatcagttctgcttggcacaagtatcgtggatcaaaaacagagtattgaagaagtggaagacacgcctaaaccaactctggtga

SEQ ID NO: 115403 - DNA, 399 bp, Homo sapiens
  Payload ID: 2524
  Gene Symbol: CD1E
  Gene Name: CD1e molecule
  Uniprot ID: P15812
  ENST ID: ENST00000368157
  CDS Start-End: 1-399
atgctgctcctgttcctcctcttcgagggtctctgctgtcctggggaaaatacagcagtgaagccagaggcctggctgtcctgtggccccagtcctggccctggccgtctgcagcttgtgtgccatgtctcaggattctacccaaagcccgtgtgggtgatgtggatgcggggtggatattccatctttctcatcctgatctgtttgactgtgatagttaccctggtcatattggttgtagttgactcacggttaaaaaaacagagccctgtctttctcatgggagccaacactcaggacaccaagaattcaagacatcagttctgcttggcacaagtatcgtggatcaaaaacagagtattgaagaagtggaagacacgcctaaaccaactctggtga

SEQ ID NO: 115404 - DNA, 1727 bp, Homo sapiens
  Payload ID: 2524
  Gene Symbol: CD1E
  Gene Name: CD1e molecule
  Uniprot ID: P15812
  ENST ID: ENST00000368160
  CDS Start-End: 1-1131
atgctgctcctgttcctcctcttcgagggtctctgctgtcctggggaaaatacagcagctccccaggctctacaatcctatcatctagcagcagaggagcagctgtccttccgcatgctccaaacttcctcctttgccaaccacagctgggcacacagtgagggctcaggatggctgggtgacctgcagactcatggctgggacactgtcttgggcaccatccgctttctgaagccctggtcccatggaaacttcagcaagcaggagctgaaaaacttacagtcactgttccagttatacttccatagttttatccagatagtgcaagcttctgctggtcaatttcagcttgaataccccttcgagatccagatattagctggctgtagaatgaatgccccacaaatcttcttaaatatggcatatcaagggtcagatttcctgagtttccaaggaatttcctgggagccatctccaggagcagggatccgggcccagaacatctgtaaagtgctcaatcgctacctagatattaaggaaatactgcaaagccttcttggtcacacctgccctcgatttctagcggggctcatggaagcaggggagtcagaactgaaacggaaagtgaagccagaggcctggctgtcctgtggccccagtcctggccctggccgtctgcagcttgtgtgccatgtctcaggattctacccaaagcccgtgtgggtgatgtggatgcggggtgagcaggagcagcggggcactcagcgaggggacgtcctgcctaatgctgacgagacatggtatctccgagcaaccctggatgtggcggctggggaggcagctggcctgtcctgtcgggtgaaacacagcagtctagggggccatgatctaatcatccattggggtggatattccatctttctcatcctgatctgtttgactgtgatagttaccctggtcatattggttgtagttgactcacggttaaaaaaacagagccctgtctttctcatgggagccaacactcaggacaccaagaattcaagacatcagttctgcttggcacaagtatcgtggatcaaaaacagagtattgaagaagtggaagacacgcctaaaccaactctggtgacatttgctttaccttatacataaaatccttgtctgcatcttcttaaacaccgtccatgtcccataagggaagcatgcttttatttaaacagtttatactagcaaagatactgacccctttaggaatactttttccccatcttccagagattttttttttcctgctttggctacatatccatcattgtttatttttgaaactataatccagatacttctttttcatggattcccgagatcacccaattgatagctcttctgtactccccaaattgaactgatcttcacaagcacattcatctcttcctactctgaacagtagttatttaggtttttgctctttttttttttttaatctcagttgcttgaaagtaggatttaggtatttgtgtctgtattcatgaccaaaaatcttatctgaattcagggccagcttcataagcatgtgacctgtgcagacacatggaatcgtatgctctgcaagaacccatgctagatttaatgctctgctgttgtcatcttggaatccttagtcattttcaaacaagagatattgtattttcatttttcactgaccccacaaattatatagctgat

SEQ ID NO: 115405 - DNA, 1689 bp, Homo sapiens
  Payload ID: 2524
  Gene Symbol: CD1E
  Gene Name: CD1e molecule
  Uniprot ID: P15812
  ENST ID: ENST00000368161
  CDS Start-End: 1-873
atgctgctcctgttcctcctcttcgagggtctctgctgtcctggggaaaatacagcagctccccaggctctacaatcctatcatctagcagcagaggagcagctgtccttccgcatgctccaaacttcctcctttgccaaccacagctgggcacacagtgagggctcaggatggctgggtgacctgcagactcatggctgggacactgtcttgggcaccatccgctttctgaagccctggtcccatggaaacttcagcaagcaggagctgaaaaacttacagtcactgttccagttatacttccatagttttatccagatagtgcaagcttctgctggtcaatttcagcttgaataccccttcgagatccagatattagctggctgtagaatgaatgccccacaaatcttcttaaatatggcatatcaagggtcagatttcctgagtttccaaggaatttcctgggagccatctccaggagcagggatccgggcccagaacatctgtaaagtgctcaatcgctacctagatattaaggaaatactgcaaagccttcttggtcacacctgccctcgatttctagcggggctcatggaagcaggggagtcagaactgaaacggaaagtgaagccagaggcctggctgtcctgtggccccagtcctggccctggccgtctgcagcttgtgtgccatgtctcaggattctacccaaagcccgtgtgggtgatgtggatgcggggtgagcaggagcagcggggcactcagcgaggggacgtcctgcctaatgctgacgagacatggtggatattccatctttctcatcctgatctgtttgactgtgatagttaccctggtcatattggttgtagttgactcacggttaaaaaaacagagttcaaataagaacattctttctccccacacacccagccctgtctttctcatgggagccaacactcaggacaccaagaattcaagacatcagttctgcttggcacaagtatcgtggatcaaaaacagagtattgaagaagtggaagacacgcctaaaccaactctggtgacatttgctttaccttatacataaaatccttgtctgcatcttcttaaacaccgtccatgtcccataagggaagcatgcttttatttaaacagtttatactagcaaagatactgacccctttaggaatactttttccccatcttccagagattttttttttcctgctttggctacatatccatcattgtttatttttgaaactataatccagatacttctttttcatggattcccgagatcacccaattgatagctcttctgtactccccaaattgaactgatcttcacaagcacattcatctcttcctactctgaacagtagttatttaggtttttgctctttttttttttttaatctcagttgcttgaaagtaggatttaggtatttgtgtctgtattcatgaccaaaaatcttatctgaattcagggccagcttcataagcatgtgacctgtgcagacacatggaatcgtatgctctgcaagaacccatgctagatttaatgctctgctgttgtcatcttggaatccttagtcattttcaaacaagagatattgtattttcatttttcactgaccccacaaattatatagctgattcagtgtgaatgtaatatttctcaataaat

SEQ ID NO: 115406 - DNA, 936 bp, Homo sapiens
  Payload ID: 2524
  Gene Symbol: CD1E
  Gene Name: CD1e molecule
  ENST ID: ENST00000368162
  CDS Start-End: 1-181
tgtctcaggattctacccaaagcccgtgtgggtgatgtggatgcggggtgagcaggagcagcggggcactcagcgaggggacgtcctgcctaatgctgacgagacatggtggatattccatctttctcatcctgatctgtttgactgtgatagttaccctggtcatattggttgtagttgactcacggttaaaaaaacagagccctgtctttctcatgggagccaacactcaggacaccaagaattcaagacatcagttctgcttggcacaagtatcgtggatcaaaaacagagtattgaagaagtggaagacacgcctaaaccaactctggtgacatttgctttaccttatacataaaatccttgtctgcatcttcttaaacaccgtccatgtcccataagggaagcatgcttttatttaaacagtttatactagcaaagatactgacccctttaggaatactttttccccatcttccagagattttttttttcctgctttggctacatatccatcattgtttatttttgaaactataatccagatacttctttttcatggattcccgagatcacccaattgatagctcttctgtactccccaaattgaactgatcttcacaagcacattcatctcttcctactctgaacagtagttatttaggtttttgctctttttttttttttaatctcagttgcttgaaagtaggatttaggtatttgtgtctgtattcatgaccaaaaatcttatctgaattcagggccagcttcataagcatgtgacctgtgcagacacatggaatcgtatgctctgcaagaacccatgctagatttaatgctctgctgttgtcatcttggaatccttagtcattttcaaacaagagatattgtattttcatttttcactgaccccacaaattatatagctgattcagt

SEQ ID NO: 115407 - DNA, 1678 bp, Homo sapiens
  Payload ID: 2524
  Gene Symbol: CD1E
  Gene Name: CD1e molecule
  Uniprot ID: P15812
  ENST ID: ENST00000368163
  CDS Start-End: 80-1045
gggtgtggagaggggtactgatatctgaattattagggcaggtgtcctgccaaggaatccctcctttaacagagcttcaatgctgctcctgttcctcctcttcgagggtctctgctgtcctggggaaaatacagcagctccccaggctctacaatcctatcatctagcagcagaggagcagctgtccttccgcatgctccaaacttcctcctttgccaaccacagctgggcacacagtgagggctcaggatggctgggtgacctgcagactcatggctgggacactgtcttgggcaccatccgctttctgaagccctggtcccatggaaacttcagcaagcaggagctgaaaaacttacagtcactgttccagttatacttccatagttttatccagatagtgcaagcttctgctggtcaatttcagcttgaataccccttcgagatccagatattagctggctgtagaatgaatgccccacaaatcttcttaaatatggcatatcaagggtcagatttcctgagtttccaaggaatttcctgggagccatctccaggagcagggatccgggcccagaacatctgtaaagtgctcaatcgctacctagatattaaggaaatactgcaaagccttcttggtcacacctgccctcgatttctagcggggctcatggaagcaggggagtcagaactgaaacggaaagtgaagccagaggcctggctgtcctgtggccccagtcctggccctggccgtctgcagcttgtgtgccatgtctcaggattctacccaaagcccgtgtgggtgatgtggatgcggggtggatattccatctttctcatcctgatctgtttgactgtgatagttaccctggtcatattggttgtagttgactcacggttaaaaaaacagagccctgtctttctcatgggagccaacactcaggacaccaagaattcaagacatcagttctgcttggcacaagtatcgtggatcaaaaacagagtattgaagaagtggaagacacgcctaaaccaactctggtgacatttgctttaccttatacataaaatccttgtctgcatcttcttaaacaccgtccatgtcccataagggaagcatgcttttatttaaacagtttatactagcaaagatactgacccctttaggaatactttttccccatcttccagagattttttttttcctgctttggctacatatccatcattgtttatttttgaaactataatccagatacttctttttcatggattcccgagatcacccaattgatagctcttctgtactccccaaattgaactgatcttcacaagcacattcatctcttcctactctgaacagtagttatttaggtttttgctctttttttttttttaatctcagttgcttgaaagtaggatttaggtatttgtgtctgtattcatgaccaaaaatcttatctgaattcagggccagcttcataagcatgtgacctgtgcagacacatggaatcgtatgctctgcaagaacccatgctagatttaatgctctgctgttgtcatcttggaatccttagtcattttcaaacaagagatattgtattttcatttttcactgaccccacaaattatatagctgattcagtgtgaatgtaatatttctcaataaatgctgact

SEQ ID NO: 115408 - DNA, 869 bp, Homo sapiens
  Payload ID: 2524
  Gene Symbol: CD1E
  Gene Name: CD1e molecule
  Uniprot ID: P15812
  ENST ID: ENST00000368164
  CDS Start-End: 74-379
ggagaggggtactgatatctgaattattagggcaggtgtcctgccaaggaatccctcctttaacagagcttcaatgctgctcctgttcctcctcttcgagggtctctgctgtcctggggaaaatacagcagtgaagccagaggcctggctgtcctgtggccccagtcctggccctggccgtctgcagcttgtgtgccatgtctcaggattctacccaaagcccgtgtgggtgatgtggatgcggggtgagcaggagcagcggggcactcagcgaggggacgtcctgcctaatgctgacgagacatggtggatattccatctttctcatcctgatctgtttgactgtgatagttaccctggtcatattggttgtagttgactcacggttaaaaaaacagagttcaaataagaacattctttctccccacacacccagccctgtctttctcatgggagccaacactcaggacaccaagaattcaagacatcagttctgcttggcacaagtatcgtggatcaaaaacagagtattgaagaagtggaagacacgcctaaaccaactctggtgacatttgctttaccttatacataaaatccttgtctgcatcttcttaaacaccgtccatgtcccataagggaagcatgcttttatttaaacagtttatactagcaaagatactgacccctttaggaatactttttccccatcttccagagattttttttttcctgctttggctacatatccatcattgtttatttttgaaactataatccagatacttctttttcatggattcccgagatcacccaattgatagctcttctgtactccccaaattgaactgatcttcacaagcacattcatc

SEQ ID NO: 115409 - DNA, 1003 bp, Homo sapiens
  Payload ID: 2524
  Gene Symbol: CD1E
  Gene Name: CD1e molecule
  Uniprot ID: P15812
  ENST ID: ENST00000368165
  CDS Start-End: 107-1003
caagggaagtcagacgagagtgcaagagggtgtggagaggggtactgatatctgaattattagggcaggtgtcctgccaaggaatccctcctttaacagagcttcaatgctgctcctgttcctcctcttcgagggtctctgctgtcctggggaaaatacagcagctccccaggctctacaatcctatcatctagcagcagaggagcagctgtccttccgcatgctccaaacttcctcctttgccaaccacagctgggcacacagtgagggctcaggatggctgggtgacctgcagactcatggctgggacactgtcttgggcaccatccgctttctgaagccctggtcccatggaaacttcagcaagcaggagctgaaaaacttacagtcactgttccagttatacttccatagttttatccagatagtgcaagcttctgctggtcaatttcagcttgaattgaagccagaggcctggctgtcctgtggccccagtcctggccctggccgtctgcagcttgtgtgccatgtctcaggattctacccaaagcccgtgtgggtgatgtggatgcggggtgagcaggagcagcggggcactcagcgaggggacgtcctgcctaatgctgacgagacatggtatctccgagcaaccctggatgtggcggctggggaggcagctggcctgtcctgtcgggtgaaacacagcagtctagggggccatgatctaatcatccattggggtggatattccatctttctcatcctgatctgtttgactgtgatagttaccctggtcatattggttgtagttgactcacggttaaaaaaacagagttcaaataagaacattctttctccccacacacccagccctgtctttctcatgggagccaacactcaggacaccaagaattcaagacatcagttctgcttggcacaagtatcgtggatcaaaaacagagtattgaagaagtggaagacacgcctaaaccaactctggtga

SEQ ID NO: 115410 - DNA, 1271 bp, Homo sapiens
  Payload ID: 2524
  Gene Symbol: CD1E
  Gene Name: CD1e molecule
  Uniprot ID: P15812
  ENST ID: ENST00000368166
  CDS Start-End: 105-668
agggaagtcagacgagagtgcaagagggtgtggagaggggtactgatatctgaattattagggcaggtgtcctgccaaggaatccctcctttaacagagcttcaatgctgctcctgttcctcctcttcgagggtctctgctgtcctggggaaaatacagcagtgaagccagaggcctggctgtcctgtggccccagtcctggccctggccgtctgcagcttgtgtgccatgtctcaggattctacccaaagcccgtgtgggtgatgtggatgcggggtgagcaggagcagcggggcactcagcgaggggacgtcctgcctaatgctgacgagacatggtatctccgagcaaccctggatgtggcggctggggaggcagctggcctgtcctgtcgggtgaaacacagcagtctagggggccatgatctaatcatccattggggtggatattccatctttctcatcctgatctgtttgactgtgatagttaccctggtcatattggttgtagttgactcacggttaaaaaaacagagccctgtctttctcatgggagccaacactcaggacaccaagaattcaagacatcagttctgcttggcacaagtatcgtggatcaaaaacagagtattgaagaagtggaagacacgcctaaaccaactctggtgacatttgctttaccttatacataaaatccttgtctgcatcttcttaaacaccgtccatgtcccataagggaagcatgcttttatttaaacagtttatactagcaaagatactgacccctttaggaatactttttccccatcttccagagattttttttttcctgctttggctacatatccatcattgtttatttttgaaactataatccagatacttctttttcatggattcccgagatcacccaattgatagctcttctgtactccccaaattgaactgatcttcacaagcacattcatctcttcctactctgaacagtagttatttaggtttttgctctttttttttttttaatctcagttgcttgaaagtaggatttaggtatttgtgtctgtattcatgaccaaaaatcttatctgaattcagggccagcttcataagcatgtgacctgtgcagacacatggaatcgtatgctctgcaagaacccatgctagatttaatgctctgctgttgtcatcttggaatccttagtcattttcaaacaagagatattgtattttcatttttcactgaccccacaaattatatagctgattcagtgt

SEQ ID NO: 115411 - DNA, 1458 bp, Homo sapiens
  Payload ID: 2524
  Gene Symbol: CD1E
  Gene Name: CD1e molecule
  Uniprot ID: P15812
  ENST ID: ENST00000368167
  CDS Start-End: 240-1406
gaaaatctggagccagacagtgagagaggcagaggggaaatgaaaaaccccgtgggaggctgcagcaaagcgaggcagtgtggcttctctgacagggaagtcagcagagggagaggtttgtctgtctgtacagcaagggaagtcagacgagagtgcaagagggtgtggagaggggtactgatatctgaattattagggcaggtgtcctgccaaggaatccctcctttaacagagcttcaatgctgctcctgttcctcctcttcgagggtctctgctgtcctggggaaaatacagcagctccccaggctctacaatcctatcatctagcagcagaggagcagctgtccttccgcatgctccaaacttcctcctttgccaaccacagctgggcacacagtgagggctcaggatggctgggtgacctgcagactcatggctgggacactgtcttgggcaccatccgctttctgaagccctggtcccatggaaacttcagcaagcaggagctgaaaaacttacagtcactgttccagttatacttccatagttttatccagatagtgcaagcttctgctggtcaatttcagcttgaataccccttcgagatccagatattagctggctgtagaatgaatgccccacaaatcttcttaaatatggcatatcaagggtcagatttcctgagtttccaaggaatttcctgggagccatctccaggagcagggatccgggcccagaacatctgtaaagtgctcaatcgctacctagatattaaggaaatactgcaaagccttcttggtcacacctgccctcgatttctagcggggctcatggaagcaggggagtcagaactgaaacggaaagtgaagccagaggcctggctgtcctgtggccccagtcctggccctggccgtctgcagcttgtgtgccatgtctcaggattctacccaaagcccgtgtgggtgatgtggatgcggggtgagcaggagcagcggggcactcagcgaggggacgtcctgcctaatgctgacgagacatggtatctccgagcaaccctggatgtggcggctggggaggcagctggcctgtcctgtcgggtgaaacacagcagtctagggggccatgatctaatcatccattggggtggatattccatctttctcatcctgatctgtttgactgtgatagttaccctggtcatattggttgtagttgactcacggttaaaaaaacagagttcaaataagaacattctttctccccacacacccagccctgtctttctcatgggagccaacactcaggacaccaagaattcaagacatcagttctgcttggcacaagtatcgtggatcaaaaacagagtattgaagaagtggaagacacgcctaaaccaactctggtgacatttgctttaccttatacataaaatccttgtctgcatcttcttaaacaccg

SEQ ID NO: 115412 - DNA, 1820 bp, Homo sapiens
  Payload ID: 2524
  Gene Symbol: CD1E
  Gene Name: CD1e molecule
  Uniprot ID: P15812
  ENST ID: ENST00000444681
  CDS Start-End: 294-1163
ttccagcagttagtgcaattagggaggttgggaggatgtacacaagagcagggagaaaatctggagccagacagtgagagaggcagaggggaaatgaaaaaccccgtgggaggctgcagcaaagcgaggcagtgtggcttctctgacagggaagtcagcagagggagaggtttgtctgtctgtacagcaagggaagtcagacgagagtgcaagagggtgtggagaggggtactgatatctgaattattagggcaggtgtcctgccaaggaatccctcctttaacagagcttcaatgctgctcctgttcctcctcttcgagggtctctgctgtcctggggaaaatacagcagaccccttcgagatccagatattagctggctgtagaatgaatgccccacaaatcttcttaaatatggcatatcaagggtcagatttcctgagtttccaaggaatttcctgggagccatctccaggagcagggatccgggcccagaacatctgtaaagtgctcaatcgctacctagatattaaggaaatactgcaaagccttcttggtcacacctgccctcgatttctagcggggctcatggaagcaggggagtcagaactgaaacggaaagtgaagccagaggcctggctgtcctgtggccccagtcctggccctggccgtctgcagcttgtgtgccatgtctcaggattctacccaaagcccgtgtgggtgatgtggatgcggggtgagcaggagcagcggggcactcagcgaggggacgtcctgcctaatgctgacgagacatggtatctccgagcaaccctggatgtggcggctggggaggcagctggcctgtcctgtcgggtgaaacacagcagtctagggggccatgatctaatcatccattggggtggatattccatctttctcatcctgatctgtttgactgtgatagttaccctggtcatattggttgtagttgactcacggttaaaaaaacagagttcaaataagaacattctttctccccacacacccagccctgtctttctcatgggagccaacactcaggacaccaagaattcaagacatcagttctgcttggcacaagtatcgtggatcaaaaacagagtattgaagaagtggaagacacgcctaaaccaactctggtgacatttgctttaccttatacataaaatccttgtctgcatcttcttaaacaccgtccatgtcccataagggaagcatgcttttatttaaacagtttatactagcaaagatactgacccctttaggaatactttttccccatcttccagagattttttttttcctgctttggctacatatccatcattgtttatttttgaaactataatccagatacttctttttcatggattcccgagatcacccaattgatagctcttctgtactccccaaattgaactgatcttcacaagcacattcatctcttcctactctgaacagtagttatttaggtttttgctctttttttttttttaatctcagttgcttgaaagtaggatttaggtatttgtgtctgtattcatgaccaaaaatcttatctgaattcagggccagcttcataagcatgtgacctgtgcagacacatggaatcgtatgctctgcaagaacccatgctagatttaatgctctgctgttgtcatcttggaatccttagtcattttcaaacaagagatattgtattttcatttttcactgaccccacaaattatatagctgattcagtgtgaatgtaatatttctcaataaatgctgactgaaataaatttgttgttagatcaa

SEQ ID NO: 115413 - DNA, 745 bp, Homo sapiens
  Payload ID: 2524
  Gene Symbol: CD1E
  Gene Name: CD1e molecule
  Uniprot ID: P15812
  ENST ID: ENST00000452291
  CDS Start-End: 146-745
gggaagtcagcagagggagaggtttgtctgtctgtacagcaagggaagtcagacgagagtgcaagagggtgtggagaggggtactgatatctgaattattagggcaggtgtcctgccaaggaatccctcctttaacagagcttcaatgctgctcctgttcctcctcttcgagggtctctgctgtcctggggaaaatacagcagtgaagccagaggcctggctgtcctgtggccccagtcctggccctggccgtctgcagcttgtgtgccatgtctcaggattctacccaaagcccgtgtgggtgatgtggatgcggggtgagcaggagcagcggggcactcagcgaggggacgtcctgcctaatgctgacgagacatggtatctccgagcaaccctggatgtggcggctggggaggcagctggcctgtcctgtcgggtgaaacacagcagtctagggggccatgatctaatcatccattggggtggatattccatctttctcatcctgatctgtttgactgtgatagttaccctggtcatattggttgtagttgactcacggttaaaaaaacagagttcaaataagaacattctttctccccacacacccagccctgtctttctcatgggagccaacactcaggacaccaagaattcaagacatcagttctgcttggcacaagtatcgtggatcaaaaacagagtattgaagaagtggaagacacgcctaaaccaactctggtga

SEQ ID NO: 115414 - DNA, 3421 bp, Homo sapiens
  Payload ID: 2525
  Gene Symbol: CD2BP2
  Gene Name: CD2 (cytoplasmic tail) binding protein 2
  Uniprot ID: O95400
  ENST ID: ENST00000305596
  CDS Start-End: 177-1202
agttagttccctaacccgagtgaagccacttccgggcttcccgggcgccttccgcagtcctcttccgggtgatggcggccgggtgccccggatgtagccctggcgcaagcatctcttcttttttccacctcgccttccgcggattcccagcttgagaaacacctctttgccccgtcatgccaaagaggaaagtgaccttccaaggcgtgggagatgaggaggatgaggatgaaatcattgtccccaagaagaagctggtggaccctgtggctgggtcagggggtcctgggagccgctttaaaggcaaacactctttggatagcgatgaggaggaggatgatgatgatggggggtccagcaaatatgacatcttggcctcagaggatgtagaaggtcaggaggcagccacactccccagcgaggggggtgttcggatcacaccctttaacctgcaggaggagatggaggaaggccactttgatgccgatggcaactacttcctgaaccgggatgctcagatccgagacagctggctggacaacattgactgggtgaagatccgggagcggccacctggccagcgccaggcctcagactcggaggaggaggacagcttgggccagacctcaatgagtgcccaagccctcttggagggacttttggagctcctattgcctagagagacagtggctggggcactgaggcgtctgggggcccgaggaggaggcaaagggagaaaggggcctgggcaacccagttcccctcagcgcctggaccggctctccgggttggccgaccagatggtggcccggggcaaccttggtgtgtaccaggaaacaagggaacggttggctatgcgtctgaagggtttggggtgtcagaccctaggaccccacaatcccacacccccaccctccctggacatgttcgctgaggagttggcggaggaggaactggagaccccaacccctacccagagaggagaagcagagtcgcggggagatggtctggtggatgtgatgtgggaatataagtgggagaacacgggggatgccgagctgtatgggcccttcaccagcgcccagatgcagacctgggtgagtgaaggctacttcccggacggtgtttattgccggaagctggacccccctggtggtcagttctacaactccaaacgcattgactttgacctctacacctgagcctgctgggggcccagtttggtgggcccttctttcctggactttgtggaggaggcaccaagtgtctcaggcagcgaggaaattggaggccatttttcagtcaatttccctttcccaataaaagcctttagttgtgtactggggccttggctgtgctgatggccagaagccaggggccttctccacagtccctttggacttgtcttggtccctgagtactcccatgaagatccttcttggaggtgcctgtcaggtatcctgtggcctccctgcctggactctgcttgccgtgtaaacacccccaactgcgctgctctgtgctcctctcccaggtttcttgttcgattcctcttaggtctttggctttcaggacctcagattctttatccttgtagccaccagaggacagagccccagaagtggatgttttaggcccagaaggaccagggcatcgagaagacattgggaccctgttgggggtgagcatggaaccctcttactctcgcttcaccctctcaagctccttagatgctgggcagaagtgggatgagtggcccaagaccgagatccctaaggttctgagagccagtgtcttccctaatctggctttcctctatccttgccgtcgttcccacagcccttcagtgaagtgcaaactcagtggccaagtgtgggccaagtgtgcattgtactggcacagagaggggcagtgactcactggagatcacaggaatcaaagggctggcccagacccagtgggctcctttcccagacctttcttggcacaaagcctttgctgcctggccttggaggccctgcggcctacattctctggaccccactatgtgcctggcacagggctagtgccttgaggaaactgaggtagctgggttggtccccttccaggaattcagagtctggtggcaggggcatgggaaatagacagatgtaattctatagcctgggcctggcaccctccacctccacgccccaccagcattgccttacgcctcccttgccccacgttagatggtttcttccggttttgcactctggctgccccttggagtctcctggggagctgtaatatctctttggagattcagattgagctggtctaggttgtggcccaggcattgggcattttggaagcccccaggtgttttcagcttgcagccaggccgagagagagcccctgagtcagatccccatggtttaggcacacctagcgggaggggtggctcctggaccccaccgtggttggagagctgagcatgtgtgtggctttagtggggtctgttagttatgggggtctgggcactggagctgcaggacacttgggatcccaggtcagaaagggccagatgagcaactaggaaagacttgggggccagggcggagtggggtcacctgacactcttgtgaggccccttctagtgcctgctcacaccggaatttcattcactccaagaagccatcaggggtaagataccttcctttaaacgtcactaagaaagaagaggcctgccggtgacacagtaagatgccattgatctaaagatgcgtcttgatttcagaaaggtccggaagtggaaagcaggtttcagggctgctgaggtacagggttctcctgtaggccccagggatggtctcaggggtgctgagtgcgtgcgtggtaaatggatggagcccaggggcgcctcctgccagtgtcctccaggcactcaaacctagcccttctgaagccgacctcacgtgacctcacagcccctcctgaaggcgcctcactgatgacggtgggtggaataacagcccccagagatgtccaggtttggaaccccaggacgtgggaaagtgttaccttgcgtggcaaaagggacccggcgcctgtgcttcagttcaggatttcgtggtggggagatgaccgtggatggttgaggtgggccctgagtaatcatgggggcccttataagggaaggggagtcacgagggtctgcgcatgaagcaaggaagcttctggctgtgaagatggcaagaaggcctggggccaggcgatgaggtggcccctggaggagctggaaaaggcattggattctgccccagagcctccgtggagaaacaaagccgcactgacaagacttcagcctggtgaaaaccattttggactcctgacctctagaactgtaagataataaattggtgtggttttcaacctctca

SEQ ID NO: 115415 - DNA, 1417 bp, Homo sapiens
  Payload ID: 2525
  Gene Symbol: CD2BP2
  Gene Name: CD2 (cytoplasmic tail) binding protein 2
  Uniprot ID: O95400
  ENST ID: ENST00000569466
  CDS Start-End: 254-1279
gggggatccagagggtccgctcctccgtccccgccccgtttaactcgcggatgctagacccaagtcctggaggcctcctggctgccagcttcctttcggcccctgcttttgtgctccctccgctcccaaactgtacctgtcacagaccaggaaaaatgtttgctgtgctgcgtctgttggcgagtcccctcctcacccggttcccttcctctgcatcctttcctcagcttgagaaacacctctttgccccgtcatgccaaagaggaaagtgaccttccaaggcgtgggagatgaggaggatgaggatgaaatcattgtccccaagaagaagctggtggaccctgtggctgggtcagggggtcctgggagccgctttaaaggcaaacactctttggatagcgatgaggaggaggatgatgatgatggggggtccagcaaatatgacatcttggcctcagaggatgtagaaggtcaggaggcagccacactccccagcgaggggggtgttcggatcacaccctttaacctgcaggaggagatggaggaaggccactttgatgccgatggcaactacttcctgaaccgggatgctcagatccgagacagctggctggacaacattgactgggtgaagatccgggagcggccacctggccagcgccaggcctcagactcggaggaggaggacagcttgggccagacctcaatgagtgcccaagccctcttggagggacttttggagctcctattgcctagagagacagtggctggggcactgaggcgtctgggggcccgaggaggaggcaaagggagaaaggggcctgggcaacccagttcccctcagcgcctggaccggctctccgggttggccgaccagatggtggcccggggcaaccttggtgtgtaccaggaaacaagggaacggttggctatgcgtctgaagggtttggggtgtcagaccctaggaccccacaatcccacacccccaccctccctggacatgttcgctgaggagttggcggaggaggaactggagaccccaacccctacccagagaggagaagcagagtcgcggggagatggtctggtggatgtgatgtgggaatataagtgggagaacacgggggatgccgagctgtatgggcccttcaccagcgcccagatgcagacctgggtgagtgaaggctacttcccggacggtgtttattgccggaagctggacccccctggtggtcagttctacaactccaaacgcattgactttgacctctacacctgagcctgctgggggcccagtttggtgggcccttctttcctggactttgtggaggaggcaccaagtgtctcaggcagcgaggaaattggaggccatttttcagtcaatttccctttcccaataaaagcctttagttgtgta

SEQ ID NO: 115416 - DNA, 478 bp, Homo sapiens
  Payload ID: 2526
  Gene Symbol: CD2
  Gene Name: CD2 molecule
  ENST ID: ENST00000369477
  CDS Start-End: 27-428
atcaaaagaggaaaccaacccctaagatgagctttccatgtaaatttgtagccagcttccttctgattttcaatgtttcttccaaaggtgcagtctccaaagagattacgaatgccttggaaacctggggtgccttgggtcaggacatcaacttggacattcctagttttcaaatgagtgatgatattgacgatataaaatgggaaaaaacttcagacaagaaaaagattgcacaattcagaaaagagaaagagactttcaaggaaaaagatacatataagctatttaaaaatggaactctgaaaattaagcatctgaagaccgatgatcaggatatctacaaggtatcaatatatgatacaaaaggaaaaaatgtgttggaaaaaatatttgatttgaagattcaaggtaagtgttcattcccttaattgctttatttcagtgtgggtgctatttggcaagttggaaaatagcattt

SEQ ID NO: 115417 - DNA, 1609 bp, Homo sapiens
  Payload ID: 2526
  Gene Symbol: CD2
  Gene Name: CD2 molecule
  Uniprot ID: P06729
  ENST ID: ENST00000369478
  CDS Start-End: 109-1164
gtaaagagaggcacgtggttaagctctcggggtgtggactccaccagtctcacttcagttccttttgcatgaagagctcagaatcaaaagaggaaaccaacccctaagatgagctttccatgtaaatttgtagccagcttccttctgattttcaatgtttcttccaaaggtgcagtctccaaagagattacgaatgccttggaaacctggggtgccttgggtcaggacatcaacttggacattcctagttttcaaatgagtgatgatattgacgatataaaatgggaaaaaacttcagacaagaaaaagattgcacaattcagaaaagagaaagagactttcaaggaaaaagatacatataagctatttaaaaatggaactctgaaaattaagcatctgaagaccgatgatcaggatatctacaaggtatcaatatatgatacaaaaggaaaaaatgtgttggaaaaaatatttgatttgaagattcaagagagggtctcaaaaccaaagatctcctggacttgtatcaacacaaccctgacctgtgaggtaatgaatggaactgaccccgaattaaacctgtatcaagatgggaaacatctaaaactttctcagagggtcatcacacacaagtggaccaccagcctgagtgcaaaattcaagtgcacagcagggaacaaagtcagcaaggaatccagtgtcgagcctgtcagctgtccagagaaaggtctggacatctatctcatcattggcatatgtggaggaggcagcctcttgatggtctttgtggcactgctcgttttctatatcaccaaaaggaaaaaacagaggagtcggagaaatgatgaggagctggagacaagagcccacagagtagctactgaagaaaggggccggaagccccaccaaattccagcttcaacccctcagaatccagcaacttcccaacatcctcctccaccacctggtcatcgttcccaggcacctagtcatcgtcccccgcctcctggacaccgtgttcagcaccagcctcagaagaggcctcctgctccgtcgggcacacaagttcaccagcagaaaggcccgcccctccccagacctcgagttcagccaaaacctccccatggggcagcagaaaactcattgtccccttcctctaattaaaaaagatagaaactgtctttttcaataaaaagcactgtggatttctgccctcctgatgtgcatatccgtacttccatgaggtgttttctgtgtgcagaacattgtcacctcctgaggctgtgggccacagccacctctgcatcttcgaactcagccatgtggtcaacatctggagtttttggtctcctcagagagctccatcacaccagtaaggagaagcaatataagtgtgattgcaagaatggtagaggaccgagcacagaaatcttagagatttcttgtcccctctcaggtcatgtgtagatgcgataaatcaagtgattggtgtgcctgggtctcactacaagcagcctatctgcttaagagactctggagtttcttatgtgccctggtggacacttgcccaccatcctgtgagtaaaagtgaaataaaagctttgactag

SEQ ID NO: 115418 - DNA, 2129 bp, Homo sapiens
  Payload ID: 2527
  Gene Symbol: CD200
  Gene Name: CD200 molecule
  Uniprot ID: P41217
  ENST ID: ENST00000315711
  CDS Start-End: 58-867
agagctccaggcgcacatccgcagtcagccacctcgcgcgcgcctccaggagcaaggatggagaggctggtgatcaggatgcccttctctcatctgtctacctacagcctggtttgggtcatggcagcagtggtgctgtgcacagcacaagtgcaagtggtgacccaggatgaaagagagcagctgtacacacctgcttccttaaaatgctctctgcaaaatgcccaggaagccctcattgtgacatggcagaaaaagaaagctgtaagcccagaaaacatggtcaccttcagcgagaaccatggggtggtgatccagcctgcctataaggacaagataaacattacccagctgggactccaaaactcaaccatcaccttctggaatatcaccctggaggatgaagggtgttacatgtgtctcttcaatacctttggttttgggaagatctcaggaacggcctgcctcaccgtctatgtacagcccatagtatcccttcactacaaattctctgaagaccacctaaatatcacttgctctgccactgcccgcccagcccccatggtcttctggaaggtccctcggtcagggattgaaaatagtacagtgactctgtctcacccaaatgggaccacgtctgttaccagcatcctccatatcaaagaccctaagaatcaggtggggaaggaggtgatctgccaggtgctgcacctggggactgtgaccgactttaagcaaaccgtcaacaaaggctattggttttcagttccgctattgctaagcattgtttccctggtaattcttctcgtcctaatctcaatcttactgtactggaaacgtcaccggaatcaggaccgagagccctaaataagtcacacagcaccctgaaagtgattccctggtctacttgaatttgacacaagagaaaagcaggaggaaaaggggccattctccaaaggacctgaaagagcaaaagaggtgggagcgaaagccttaaggatcccacgactttttactgccatctgagctactcagtgtttgaatcccaagaggaagtcagtttacctctcaggtctgttgtaggacttgattttgtaaagcaatgccatgttatgtggttgaaagggcactggacttagttagtatcaggagcactgagctcacagactgacttgggctcctactggtggggacctctgttagtcactttacctcatccaaagtataaaggaattggaccaaataatttaccacatagctctaaaacttaatttaaaatgtaattccagaaaaaaaaagggaataagcaaagggggaagaattgaaagagagagagaagaaagaatacagagagcttaccttttgcctttctgttgatgttacatctcttcttcctatgttcttaggtctatgagtctgtttccccatcatttggtatctagtccagttcctgcttactgctttgctaatagctggccttgctagaatccttggtttcactgctgttcttcatgtgcttctatgagatttactccaacacaaataggactgaatttattgtgaagtaacattggcaatcttaacttattcatttaacttatttttatagctagataaatattgttagtcttagacaatagctcacattttttgagaagcatgccctccctgtccatttgtcttataacatgacccagccctattttacgtcattctaaattcagcctcatataatgaaaatacattatgaaaacagatgtttaggagatttcctgtatagcagtcagccaattcatatgctttgtctctgctggcttctttttccatgcgttaacttttcccaatagcagaggaggcaaatatgagcatacaatccctttgttctaaagatattgttccagctagtggaatgatgttgaatctttaataaccataattagttgctttttcagtatcttctgctttgtctgtgtctatccagtggcctaggaattaaagtgtaagttgttttcgctgttaaattggatatttatatatatatatagcaagattttcatgtgttatttaattctgtattgtttcttatatttgtagtaaaatattgaacaattaaaagtgttgactccaaa

SEQ ID NO: 115419 - DNA, 1997 bp, Homo sapiens
  Payload ID: 2527
  Gene Symbol: CD200
  Gene Name: CD200 molecule
  ENST ID: ENST00000383681
  CDS Start-End: 176-763
agtcagccacctcgcgcgcgcctccaggagcaaggatggagaggctgtgcaagtggtgacccaggatgaaagagagcagctgtacacacctgcttccttaaaatgctctctgcaaaatgcccaggaagccctcattgtgacatggcagaaaaagaaagctgtaagcccagaaaacatggtcaccttcagcgagaaccatggggtggtgatccagcctgcctataaggacaagataaacattacccagctgggactccaaaactcaaccatcaccttctggaatatcaccctggaggatgaagggtgttacatgtgtctcttcaatacctttggttttgggaagatctcaggaacggcctgcctcaccgtctatgtacagcccatagtatcccttcactacaaattctctgaagaccacctaaatatcacttgctctgccactgcccgcccagcccccatggtcttctggaaggtccctcggtcagggattgaaaatagtacagtgactctgtctcacccaaatgggaccacgtctgttaccagcatcctccatatcaaagaccctaagaatcaggtggggaaggaggtgatctgccaggtgctgcacctggggactgtgaccgactttaagcaaaccgtcaacaaaggctattggttttcagttccgctattgctaagcattgtttccctggtaattcttctcgtcctaatctcaatcttactgtactggaaacgtcaccggaatcaggaccgagagccctaaataagtcacacagcaccctgaaagtgattccctggtctacttgaatttgacacaagagaaaagcaggaggaaaaggggccattctccaaaggacctgaaagagcaaaagaggtgggagcgaaagccttaaggatcccacgactttttactgccatctgagctactcagtgtttgaatcccaagaggaagtcagtttacctctcaggtctgttgtaggacttgattttgtaaagcaatgccatgttatgtggttgaaagggcactggacttagttagtatcaggagcactgagctcacagactgacttgggctcctactggtggggacctctgttagtcactttacctcatccaaagtataaaggaattggaccaaataatttaccacatagctctaaaacttaatttaaaatgtaattccagaaaaaaaaagggaataagcaaagggggaagaattgaaagagagagagaagaaagaatacagagagcttaccttttgcctttctgttgatgttacatctcttcttcctatgttcttaggtctatgagtctgtttccccatcatttggtatctagtccagttcctgcttactgctttgctaatagctggccttgctagaatccttggtttcactgctgttcttcatgtgcttctatgagatttactccaacacaaataggactgaatttattgtgaagtaacattggcaatcttaacttattcatttaacttatttttatagctagataaatattgttagtcttagacaatagctcacattttttgagaagcatgccctccctgtccatttgtcttataacatgacccagccctattttacgtcattctaaattcagcctcatataatgaaaatacattatgaaaacagatgtttaggagatttcctgtatagcagtcagccaattcatatgctttgtctctgctggcttctttttccatgcgttaacttttcccaatagcagaggaggcaaatatgagcatacaatccctttgttctaaagatattgttccagctagtggaatgatgttgaatctttaataaccataattagttgctttttcagtatcttctgctttgtctgtgtctatccagtggcctaggaattaaagtgtaagttgttttcgctgttaaattggatatttatatatatatatagcaagattttcatgtgttatttaattctgtattgtttcttatatttgtagtaaaata

SEQ ID NO: 115420 - DNA, 942 bp, Homo sapiens
  Payload ID: 2527
  Gene Symbol: CD200
  Gene Name: CD200 molecule
  ENST ID: ENST00000498096
  CDS Start-End: 146-598
aaaacggagtgggagaagggggctagcgaggaggaagaggcgggaggtgcggcaggggcacaggtgacgctcctcccgcctgcctagcagagctccaggcgcacatccgcagtcagccacctcgcgcgcgcctccaggagcaaggatggagaggctggtgatcaggatgcccttctctcatctgtctacctacagcctggtttgggtcatggcagcagtggtgctgtgcacagcacaagtgcaagtggtgacccaggatgaaagagagcagctgtacacacctgcttccttaaaatgctctctgcaaaatgcccaggaagccctcattgtgacatggcagaaaaagaaagctgtaagcccagaaaacatggtcaccttcagcgagaaccatggggtggtgatccagcctgcctataaggacaagataaacattacccagctgggactccaaaactcaaccatcaccttctggaatatcaccctggaggatgaagggtgttacatgtgtctcttcaatacctttggttttgggaagatctcaggaacggcctgcctcaccgtctatgcccatagtatcccttcactacaaattctctgaagaccacctaaatatcacttgctctgccactgcccgcccagcccccatggtcttctggaaggtccctcggtcagggattgaaaatagtacagtgactctgtctcacccaaatgggaccacgtctgttaccagcatcctccatatcaaagaccctaagaatcaggtggggaaggaggtgatctgccaggtgctgcacctggggactgtgaccgactttaagcaaaccgtcaacaaaggctattggttttcagttccgctattgctaagcattgtttccctggtaattcttctcgtcctaatctcaatcttactgtactggaaacgtcaccggaatcaggaccgag

SEQ ID NO: 115421 - DNA, 2017 bp, Homo sapiens
  Payload ID: 2527
  Gene Symbol: CD200
  Gene Name: CD200 molecule
  ENST ID: ENST00000478595
  CDS Start-End: 176-406
agtcagccacctcgcgcgcgcctccaggagcaaggatggagaggctgtgcaagtggtgacccaggatgaaagagagcagctgtacacacctgcttccttaaaatgctctctgcaaaatgcccaggaagccctcattgtgacatggcagaaaaagaaagctgtaagcccagaaaacatggtcaccttcagcgagaaccatggggtggtgatccagcctgcctataaggacaagataaacattacccagctgggactccaaaactcaaccatcaccttctggaatatcaccctggaggatgaagggtgttacatgtgtctcttcaatacctttggttttgggaagatctcaggaacggcctgcctcaccgtctatgcccatagtatcccttcactacaaattctctgaagaccacctaaatatcacttgctctgccactgcccgcccagcccccatggtcttctggaaggtccctcggtcagggattgaaaatagtacagtgactctgtctcacccaaatgggaccacgtctgttaccagcatcctccatatcaaagaccctaagaatcaggtggggaaggaggtgatctgccaggtgctgcacctggggactgtgaccgactttaagcaaaccgtcaacaaaggctattggttttcagttccgctattgctaagcattgtttccctggtaattcttctcgtcctaatctcaatcttactgtactggaaacgtcaccggaatcaggaccgagagccctaaataagtcacacagcaccctgaaagtgattccctggtctacttgaatttgacacaagagaaaagcaggaggaaaaggggccattctccaaaggacctgaaagagcaaaagaggtgggagcgaaagccttaaggatcccacgactttttactgccatctgagctactcagtgtttgaatcccaagaggaagtcagtttacctctcaggtctgttgtaggacttgattttgtaaagcaatgccatgttatgtggttgaaagggcactggacttagttagtatcaggagcactgagctcacagactgacttgggctcctactggtggggacctctgttagtcactttacctcatccaaagtataaaggaattggaccaaataatttaccacatagctctaaaacttaatttaaaatgtaattccagaaaaaaaaagggaataagcaaagggggaagaattgaaagagagagagaagaaagaatacagagagcttaccttttgcctttctgttgatgttacatctcttcttcctatgttcttaggtctatgagtctgtttccccatcatttggtatctagtccagttcctgcttactgctttgctaatagctggccttgctagaatccttggtttcactgctgttcttcatgtgcttctatgagatttactccaacacaaataggactgaatttattgtgaagtaacattggcaatcttaacttattcatttaacttatttttatagctagataaatattgttagtcttagacaatagctcacattttttgagaagcatgccctccctgtccatttgtcttataacatgacccagccctattttacgtcattctaaattcagcctcatataatgaaaatacattatgaaaacagatgtttaggagatttcctgtatagcagtcagccaattcatatgctttgtctctgctggcttctttttccatgcgttaacttttcccaatagcagaggaggcaaatatgagcatacaatccctttgttctaaagatattgttccagctagtggaatgatgttgaatctttaataaccataattagttgctttttcagtatcttctgctttgtctgtgtctatccagtggcctaggaattaaagtgtaagttgttttcgctgttaaattggatatttatatatatatatagcaagattttcatgtgttatttaattctgtattgtttcttatatttgtagtaaaatattgaacaattaaaagtgttgactcc

SEQ ID NO: 115422 - DNA, 1524 bp, Homo sapiens
  Payload ID: 2527
  Gene Symbol: CD200
  Gene Name: CD200 molecule
  Uniprot ID: P41217
  ENST ID: ENST00000473539
  CDS Start-End: 58-942
agagctccaggcgcacatccgcagtcagccacctcgcgcgcgcctccaggagcaaggatggagaggctgactctgaccaggacaattgggggccctctccttacagctacactcctaggaaagaccaccatcaatgattaccaggtgatcaggatgcccttctctcatctgtctacctacagcctggtttgggtcatggcagcagtggtgctgtgcacagcacaagtgcaagtggtgacccaggatgaaagagagcagctgtacacacctgcttccttaaaatgctctctgcaaaatgcccaggaagccctcattgtgacatggcagaaaaagaaagctgtaagcccagaaaacatggtcaccttcagcgagaaccatggggtggtgatccagcctgcctataaggacaagataaacattacccagctgggactccaaaactcaaccatcaccttctggaatatcaccctggaggatgaagggtgttacatgtgtctcttcaatacctttggttttgggaagatctcaggaacggcctgcctcaccgtctatgtacagcccatagtatcccttcactacaaattctctgaagaccacctaaatatcacttgctctgccactgcccgcccagcccccatggtcttctggaaggtccctcggtcagggattgaaaatagtacagtgactctgtctcacccaaatgggaccacgtctgttaccagcatcctccatatcaaagaccctaagaatcaggtggggaaggaggtgatctgccaggtgctgcacctggggactgtgaccgactttaagcaaaccgtcaacaaaggctattggttttcagttccgctattgctaagcattgtttccctggtaattcttctcgtcctaatctcaatcttactgtactggaaacgtcaccggaatcaggaccgagagccctaaataagtcacacagcaccctgaaagtgattccctggtctacttgaatttgacacaagagaaaagcaggaggaaaaggggccattctccaaaggacctgaaagagcaaaagaggtgggagcgaaagccttaaggatcccacgactttttactgccatctgagctactcagtgtttgaatcccaagaggaagtcagtttacctctcaggtctgttgtaggacttgattttgtaaagcaatgccatgttatgtggttgaaagggcactggacttagttagtatcaggagcactgagctcacagactgacttgggctcctactggtggggacctctgttagtcactttacctcatccaaagtataaaggaattggaccaaataatttaccacatagctctaaaacttaatttaaaatgtaattccagaaaaaaaaagggaataagcaaagggggaagaattgaaagagagagagaagaaagaatacagagagcttaccttttgcctttctgttgatgttacatctcttcttcctatgttcttaggtctatgagtctgtttccccatcatttggtatctagtccagtt

SEQ ID NO: 115423 - DNA, 802 bp, Homo sapiens
  Payload ID: 2527
  Gene Symbol: CD200
  Gene Name: CD200 molecule
  ENST ID: ENST00000606471
  CDS Start-End: 196-802
ggagaatggcgggaacccgggaggcggagcttgtagtgagccaagatagcgccactgcactccagcctggaccacagagcgagactccgtctcaagaagaagaagaaggagaagaaggagaaggagaagggaaaaaagaatcctcatcattaatgcaagtggaaggaaactcttcaccaaagaattgatcacatcatgaaagtgcaagtggtgacccaggatgaaagagagcagctgtacacacctgcttccttaaaatgctctctgcaaaatgcccaggaagccctcattgtgacatggcagaaaaagaaagctgtaagcccagaaaacatggtcaccttcagcgagaaccatggggtggtgatccagcctgcctataaggacaagataaacattacccagctgggactccaaaactcaaccatcaccttctggaatatcaccctggaggatgaagggtgttacatgtgtctcttcaatacctttggttttgggaagatctcaggaacggcctgcctcaccgtctatgtacagcccatagtatcccttcactacaaattctctgaagaccacctaaatatcacttgctctgccactgcccgcccagcccccatggtcttctggaaggtccctcggtcagggattgaaaatagtacagtgactctgtctcacccaaatgggaccacgtctgttaccagcatcctccatatcaaagaccctaagaatcaggtggggaaggaggtgatctgccaggtgctgcacctggggactgtgaccgactttaagcaaaccgtcaacaaag

SEQ ID NO: 115424 - DNA, 551 bp, Homo sapiens
  Payload ID: 2527
  Gene Symbol: CD200
  Gene Name: CD200 molecule
  ENST ID: ENST00000607597
  CDS Start-End: 365-551
attttgggaggccgaggcgggcggatcacgaggtcaagagaccgagaccatcctggctaacatggtgaaaccccgtctctactaaaaatacaaaaaattagccgggcatggtggcgggcgtctgtagtcccagctactcgggaggctgaggcaggagaatggcgggaacccgggaggcggagcttgtagtgagccaagatagcgccactgcactccagcctggaccacagagcgagactccgtctcaagaagaagaagaaggagaagaaggagaaggagaagggaaaaaagaatcctcatcattaatgcaagtggaaggaaactcttcaccaaagaattgatcacatcatgaaaggtgatcaggatgcccttctctcatctgtctacctacagcctggtttgggtcatggcagcagtggtgctgtgcacagcacaagtgcaagtggtgacccaggatgaaagagagcagctgtacacacctgcttccttaaaatgctctctgcaaaatgcccaggaagccctcattgtgacatggcagaaaaagaaagctg

SEQ ID NO: 115425 - DNA, 1692 bp, Homo sapiens
  Payload ID: 2528
  Gene Symbol: CD200R1
  Gene Name: CD200 receptor 1
  ENST ID: ENST00000295863
  CDS Start-End: 247-885
atacaggaaatctattgctgtgtcaagttccagagaaaagcttctgttcgtccaagttactaaccaggctaaaccacatagacgtgaaggaaggggctagaaggaagggagtgccccactgttgatggggtaagaggatcctgtactgagaagttgaccagagagggtctcaccatgcgcacagttccttctgtacctgtgtggaggaaaagtactgagtgaagggcagaaaaagagaaaacagaaatgctctgcccttggagaactgctaacctagggctactgttgattttgactatcttcttagtggccgttaacacttcatggcctgtaaagatggctacaaatgctgtgctttgttgccctcctatcgcattaagaaatttgatcataataacatgggaaataatcctgagaggccagccttcctgcacaaaagcctacaagaaagaaacaaatgagaccaaggaaaccaactgtactgatgagagaataacctgggtctccagacctgatcagaattcggaccttcagattcgtaccgtggccatcactcatgacgggtattacagatgcataatggtaacacctgatgggaatttccatcgtggatatcacctccaagtgttagttacacctgaagtgaccctgtttcaaaacaggaatagaactgcagtatgcaaggcagttgcagggaagccagctgcgcatatctcctggatcccagagggcgattgtgccactaagcaagaatactggagcaatggcacagtgactgttaagagtacatgccactgggaggtccacaatgtgtctaccgtgacctgccacgtctcccatttgactggcaacaagagtctgtacatagagctacttcctggatgaaatgcagccctatgccagctacacagagaagaacaatcctctctatgatactacaaacaaggtgaaggcatctgaggcattacaaagtgaagttgacacagacctccatactttataagttgttggactctagtaccaagaaacaacaacaaacgagatacattataattactgtctgattttcttacagttctagaatgaagacttatattgaaattaggttttccaaggttcttagaagacattttaatggattctcattcatacccttgtataattggaatttttgattcttagctgctaccagctagttctctgaagaactgatgttattacaaagaaaatacatgcccatgaccaaatattcaaattgtgcaggacagtaaataatgaaaaccaaatttcctcaagaaataactgaagaaggagcaagtgtgaacagtttcttgtgtatcctttcagaatattttaatgtacatatgacatgtgtatatgcctatggtatatgtgtcaatttatgtgtccccttacatatacatgcacatatctttgtcaaggcaccagtgggaacaatacactgcattactgttctatacatatgaaaacctaataatataagtcttagagatcattttatatcatgacaagtagagctacctcattctttttaatggttatataaaattccattgtatagttatatcattatttaattaaaaacaaccctaatgatggatatttagattcttttaagttttgtttatttcttttaagttttgtttgtggtataaacaataccacatagaa

SEQ ID NO: 115426 - DNA, 2299 bp, Homo sapiens
  Payload ID: 2528
  Gene Symbol: CD200R1
  Gene Name: CD200 receptor 1
  Uniprot ID: Q8TD46
  ENST ID: ENST00000308611
  CDS Start-End: 266-1312
gtctttgcttcagggcttcatacaggaaatctattgctgtgtcaagttccagagaaaagcttctgttcgtccaagttactaaccaggctaaaccacatagacgtgaaggaaggggctagaaggaagggagtgccccactgttgatggggtaagaggatcctgtactgagaagttgaccagagagggtctcaccatgcgcacagttccttctgtacctgtgtggaggaaaagtactgagtgaagggcagaaaaagagaaaacagaaatgctctgcccttggagaactgctaacctagggctactgttgattttgactatcttcttagtggccgaagcggagggtgctgctcaaccaaacaactcattaatgctgcaaactagcaaggagaatcatgctttagcttcaagcagtttatgtatggatgaaaaacagattacacagaactactcgaaagtactcgcagaagttaacacttcatggcctgtaaagatggctacaaatgctgtgctttgttgccctcctatcgcattaagaaatttgatcataataacatgggaaataatcctgagaggccagccttcctgcacaaaagcctacaagaaagaaacaaatgagaccaaggaaaccaactgtactgatgagagaataacctgggtctccagacctgatcagaattcggaccttcagattcgtaccgtggccatcactcatgacgggtattacagatgcataatggtaacacctgatgggaatttccatcgtggatatcacctccaagtgttagttacacctgaagtgaccctgtttcaaaacaggaatagaactgcagtatgcaaggcagttgcagggaagccagctgcgcatatctcctggatcccagagggcgattgtgccactaagcaagaatactggagcaatggcacagtgactgttaagagtacatgccactgggaggtccacaatgtgtctaccgtgacctgccacgtctcccatttgactggcaacaagagtctgtacatagagctacttcctgttccaggtgccaaaaaatcagcaaaattatatattccatatatcatccttactattattattttgaccatcgtgggattcatttggttgttgaaagtcaatggctgcagaaaatataaattgaataaaacagaatctactccagttgttgaggaggatgaaatgcagccctatgccagctacacagagaagaacaatcctctctatgatactacaaacaaggtgaaggcatctgaggcattacaaagtgaagttgacacagacctccatactttataagttgttggactctagtaccaagaaacaacaacaaacgagatacattataattactgtctgattttcttacagttctagaatgaagacttatattgaaattaggttttccaaggttcttagaagacattttaatggattctcattcatacccttgtataattggaatttttgattcttagctgctaccagctagttctctgaagaactgatgttattacaaagaaaatacatgcccatgaccaaatattcaaattgtgcaggacagtaaataatgaaaaccaaatttcctcaagaaataactgaagaaggagcaagtgtgaacagtttcttgtgtatcctttcagaatattttaatgtacatatgacatgtgtatatgcctatggtatatgtgtcaatttatgtgtccccttacatatacatgcacatatctttgtcaaggcaccagtgggaacaatacactgcattactgttctatacatatgaaaacctaataatataagtcttagagatcattttatatcatgacaagtagagctacctcattctttttaatggttatataaaattccattgtatagttatatcattatttaattaaaaacaaccctaatgatggatatttagattcttttaagttttgtttatttcttttaagttttgtttgtggtataaacaataccacatagaatgtttcttgtgcatatatctctttgtttttgagtatatctgtaggataactttcttgagtggaattgtcaggtcaaagggtttgtgcattttactattgatatatatgttaaattgtgtcaaatatatatgtcaaattccctccaacattgtttaaatgtgcctttccctaaatttctattttaataactgtactattcctgcttctacagttgccactttctctttttaatcaaccagattaaatatgatgtgagattataataagaattatactatttaataaaaatggatttata

SEQ ID NO: 115427 - DNA, 847 bp, Homo sapiens
  Payload ID: 2528
  Gene Symbol: CD200R1
  Gene Name: CD200 receptor 1
  Uniprot ID: Q8TD46
  ENST ID: ENST00000440122
  CDS Start-End: 56-622
tgtacctgtgtggaggaaaagtactgagtgaagggcagaaaaagagaaaacagaaatgctctgcccttggagaactgctaacctagggctactgttgattttgactatcttcttagtggccgaagcggagggtgctgctcaaccaaacaactcattaatgctgcaaactagcaaggagaatcatgctttagcttcaagcagtttatgtatggatgaaaaacagattacacagaactactcgaaagtactcgcagaagttaacacttcatggcctgtaaagatggctacaaatgctgtgctttgttgccctcctatcgcattaagaaatttgatcataataacatgggaaataatcctgagaggccagccttcctgcacaaaagcctacaagaaagaaacaaatgagaccaaggaaaccaactgtactgatgagagaataacctgggtctccagacctgatcagaattcggaccttcagattcgtaccgtggccatcactcatgacgggtattacagatgcataatggtaacacctgatgggaatttccatcgtggatatcacctccaagtgttaggtaaggagcatcatatattgaggtatttcacatcaccagatttgtgacggaaacaaatgtctctctgaattccatatgctttatgtgaaaaccgaagcatttttttccctctttcctctctgcagttacacctgaagtgaccctgtttcaaaacaggaatagaactgcagtatgcaaggcagttgcagggaagccagctgcgcatatctcctggatcccagagggcgattgtgccactaagcaagaatactggagcaatggcacagtgactg

SEQ ID NO: 115428 - DNA, 778 bp, Homo sapiens
  Payload ID: 2528
  Gene Symbol: CD200R1
  Gene Name: CD200 receptor 1
  Uniprot ID: Q8TD46
  ENST ID: ENST00000490004
  CDS Start-End: 56-553
tgtacctgtgtggaggaaaagtactgagtgaagggcagaaaaagagaaaacagaaatgctctgcccttggagaactgctaacctagggctactgttgattttgactatcttcttagtggccgcttcaagcagtttatgtatggatgaaaaacagattacacagaactactcgaaagtactcgcagaagttaacacttcatggcctgtaaagatggctacaaatgctgtgctttgttgccctcctatcgcattaagaaatttgatcataataacatgggaaataatcctgagaggccagccttcctgcacaaaagcctacaagaaagaaacaaatgagaccaaggaaaccaactgtactgatgagagaataacctgggtctccagacctgatcagaattcggaccttcagattcgtaccgtggccatcactcatgacgggtattacagatgcataatggtaacacctgatgggaatttccatcgtggatatcacctccaagtgttaggtaaggagcatcatatattgaggtatttcacatcaccagatttgtgacggaaacaaatgtctctctgaattccatatgctttatgtgaaaaccgaagcatttttttccctctttcctctctgcagttacacctgaagtgaccctgtttcaaaacaggaatagaactgcagtatgcaaggcagttgcagggaagccagctgcgcatatctcctggatcccagagggcgattgtgccactaagcaagaatactggagcaatggcacagtgactg

SEQ ID NO: 115429 - DNA, 3679 bp, Homo sapiens
  Payload ID: 2528
  Gene Symbol: CD200R1
  Gene Name: CD200 receptor 1
  Uniprot ID: Q8TD46
  ENST ID: ENST00000471858
  CDS Start-End: 234-1211
attgctgtgtcaagttccagagaaaagcttctgttcgtccaagttactaaccaggctaaaccacatagacgtgaaggaaggggctagaaggaagggagtgccccactgttgatggggtaagaggatcctgtactgagaagttgaccagagagggtctcaccatgcgcacagttccttctgtacctgtgtggaggaaaagtactgagtgaagggcagaaaaagagaaaacagaaatgctctgcccttggagaactgctaacctagggctactgttgattttgactatcttcttagtggccgcttcaagcagtttatgtatggatgaaaaacagattacacagaactactcgaaagtactcgcagaagttaacacttcatggcctgtaaagatggctacaaatgctgtgctttgttgccctcctatcgcattaagaaatttgatcataataacatgggaaataatcctgagaggccagccttcctgcacaaaagcctacaagaaagaaacaaatgagaccaaggaaaccaactgtactgatgagagaataacctgggtctccagacctgatcagaattcggaccttcagattcgtaccgtggccatcactcatgacgggtattacagatgcataatggtaacacctgatgggaatttccatcgtggatatcacctccaagtgttagttacacctgaagtgaccctgtttcaaaacaggaatagaactgcagtatgcaaggcagttgcagggaagccagctgcgcatatctcctggatcccagagggcgattgtgccactaagcaagaatactggagcaatggcacagtgactgttaagagtacatgccactgggaggtccacaatgtgtctaccgtgacctgccacgtctcccatttgactggcaacaagagtctgtacatagagctacttcctgttccaggtgccaaaaaatcagcaaaattatatattccatatatcatccttactattattattttgaccatcgtgggattcatttggttgttgaaagtcaatggctgcagaaaatataaattgaataaaacagaatctactccagttgttgaggaggatgaaatgcagccctatgccagctacacagagaagaacaatcctctctatgatactacaaacaaggtgaaggcatctgaggcattacaaagtgaagttgacacagacctccatactttataagttgttggactctagtaccaagaaacaacaacaaacgagatacattataattactgtctgattttcttacagttctagaatgaagacttatattgaaattaggttttccaaggttcttagaagacattttaatggattctcattcatacccttgtataattggaatttttgattcttagctgctaccagctagttctctgaagaactgatgttattacaaagaaaatacatgcccatgaccaaatattcaaattgtgcaggacagtaaataatgaaaaccaaatttcctcaagaaataactgaagaaggagcaagtgtgaacagtttcttgtgtatcctttcagaatattttaatgtacatatgacatgtgtatatgcctatggtatatgtgtcaatttatgtgtccccttacatatacatgcacatatctttgtcaaggcaccagtgggaacaatacactgcattactgttctatacatatgaaaacctaataatataagtcttagagatcattttatatcatgacaagtagagctacctcattctttttaatggttatataaaattccattgtatagttatatcattatttaattaaaaacaaccctaatgatggatatttagattcttttaagttttgtttatttcttttaagttttgtttgtggtataaacaataccacatagaatgtttcttgtgcatatatctctttgtttttgagtatatctgtaggataactttcttgagtggaattgtcaggtcaaagggtttgtgcattttactattgatatatatgttaaattgtgtcaaatatatatgtcaaattccctccaacattgtttaaatgtgcctttccctaaatttctattttaataactgtactattcctgcttctacagttgccactttctctttttaatcaaccagattaaatatgatgtgagattataataagaattatactatttaataaaaatggatttatatttttggtcatgtttgtaagagagtgaatgcacgtgtgagaacattagcttcttctgaactcattatatctccacagaggtgttgatacttgatgcctaacagttttgcagatgtgctacattggaattgtgtatttttatggtgtacattctattgtgatatatttattgaataattaatgtctattgaccatataagtggcgaaaaatgcaccatagaggacatggggtatttatttacaaactatgagctacataataagcaagtggccatgggatggcatgaccctcccctccatatttttgtggagcaaaatattggcaatgtttatgtaaatcattgttaatatcatgaaattatttttaattaaaaacataagtctatttgctccatagcagaaaaaacatgagaagttttttcatcatgatagaaattgaaacaaaatatattcattcttcaatcataccatctgagatttttaagacagctattttgtcttataagtatatttttctccctctagacatttcagttactatggattttgtcctcaaagggacttttagtctattttggatgtaaagctaatctaatgacacttggcacatgatattttgatcaagccattttgacttgaccaaaaagcagtgtccattaggtttctgcatataaatattaccaagcaatgttcacaatagacatcattacactgtccttgaaatttattaattcttcatccaaccctggttgagctgaggctcatagttaggttcaagactatctgtttaaatattactgaaaaacaaagtaagacagtactatgcttacctcttaacttgataatgtcaaaacaggcatgttaaatgacatcatagaaaagacttcaagataatttatagaagttaaattatattgtacagaaaataattgtatgaaaatctctactatggggctggaacatggttgaacattagaatgatataaaaaattatatatattctccaaatccacgctagacctgtcaaattagagaatctagagattagacctggcgtgtcagcaaggtcatccaggaagcagaggctgagacggagttaggtgtgattacttacatagtcgattacattttacaaataacattttatatgtctcatttactgtgctttctccccatcccattttgtatcttttcctttgctttgctagatttgtcaattttctctctctttctctgtctctctctctttcaatatctctaataatttgaaagtaattcatcataactaaatatctattggggttatgcttcacttacaaacttctgaaaacggctttactgagatataattgatatatttaagtgtacagtttgttaaattttgcacatatttaaaatgtggactttggtaaatgttgacatagttttacatctgtgaaaccatcagcataatcaagataataaacttgtccatcacccccc

SEQ ID NO: 115430 - DNA, 1296 bp, Homo sapiens
  Payload ID: 2529
  Gene Symbol: CD200R1L
  Gene Name: CD200 receptor 1-like
  Uniprot ID: Q6Q8B3
  ENST ID: ENST00000398214
  CDS Start-End: 227-1042
caaaactcactgacatttcccatcagtggttaatcagtcaaaaacatatagaatgacagcaaaaattaaagataagcaagataatgaagaaatatgttttgcaatcctgttgaagacagaataagcaaaagtgaccaagagaaacagattcaccaagtctgttgattgatttaaagtggatttatgtttaagtagaaaaccactccaaaagcatactttagggaagatgtcagctccaagattactgatttccatcattatcatggtgtctgcttcaagtagttcatgcatgggtggaaagcagatgacacagaactattcaacaatttttgcagaaggtaacatttcacagcctgtactgatggatataaatgctgtgctttgttgccctcctatcgcattaagaaatttgatcataataacatgggaaataatcctgagaggccagccttcctgcacaaaagcctacaagaaagaaacaaatgagaccaaggaaaccaactgtactgttgagagaataacctgggtctctagacctgatcagaattcggaccttcagattcgtccggtggacaccactcatgacgggtattacagaggcatagtggtaacacctgatgggaatttccatcgtggatatcacctccaagtgttagttacacccgaagtgaacctatttcaaagcaggaatataactgcagtatgcaaggcagttacagggaagccagctgcccagatctcctggatcccagagggatctattcttgccactaagcaagaatactggggcaatggcacagtgacggttaagagtacatgcccctgggagggccacaagtctactgtgacctgccatgtctcccatttgactggcaacaagagtctgtccgtaaagttgaattcaggtctcagaacctcaggatctccagcgttgtccttactgatcattctttatgtgaaactctctctttttgtggtcattctggtcaccacaggatttgttttcttccagaggataaatcatgtcagaaaagttctttaaagaagaaggaagggtcttcttttgcttctcctccttgtctctggactgcaacattggtgagatgagtgatggtccagcagtgaacttgggccatggatgatgttaaggatagaagccactcagtaggatagaagaaaagaaagatggaagaaggatcctgggcttgatgaccatgaagtttccctataaaccctcaaccacctattcattgacttcttttgtgttagagtgaataaaattttgttcatgccagt

SEQ ID NO: 115431 - DNA, 750 bp, Homo sapiens
  Payload ID: 2529
  Gene Symbol: CD200R1L
  Gene Name: CD200 receptor 1-like
  ENST ID: ENST00000448932
  CDS Start-End: 1-750
atgggtggaaagcagatgacacagaactattcaacaatttttgcagaaggtaacatttcacagcctgtactgatggatataaatgctgtgctttgttgccctcctatcgcattaagaaatttgatcataataacatgggaaataatcctgagaggccagccttcctgcacaaaagcctacaagaaagaaacaaatgagaccaaggaaaccaactgtactgttgagagaataacctgggtctctagacctgatcagaattcggaccttcagattcgtccggtggacaccactcatgacgggtattacagaggcatagtggtaacacctgatgggaatttccatcgtggatatcacctccaagtgttagttacacccgaagtgaacctatttcaaagcaggaatataactgcagtatgcaaggcagttacagggaagccagctgcccagatctcctggatcccagagggatctattcttgccactaagcaagaatactggggcaatggcacagtgacggttaagagtacatgcccctgggagggccacaagtctactgtgacctgccatgtctcccatttgactggcaacaagagtctgtccgtaaagttgaattcaggtctcagaacctcaggatctccagcgttgtccttactgatcattctttatgtgaaactctctctttttgtggtcattctggtcaccacaggatttgttttcttccagaggataaatcatgtcagtaaattttta

SEQ ID NO: 115432 - DNA, 1597 bp, Homo sapiens
  Payload ID: 2529
  Gene Symbol: CD200R1L
  Gene Name: CD200 receptor 1-like
  Uniprot ID: Q6Q8B3
  ENST ID: ENST00000488794
  CDS Start-End: 591-1343
aacatcactcagatctctgccttttatcttcacatggtgttcctgtgtatgcgcccagttttcctctttttataaggacaccataaaaagctaagaagtgcaaaagaagaaaaaaagaataaaccaaagacgccagtcatattggattagggaccaatctatttcagcatggccacatcttaactaattatatctccaatgaccctatttccaaataaggtcatcttctgagcaaaactcactgacatttcccatcagtggttaatcagtcaaaaacatatagaatgacagcaaaaattaaagataagcaagataatgaagaaatatgttttgcaatcctgttgaagacagaataagcaaaagtgaccaagagaaacagattcaccaagtctgttgattgatttaaagtggatttatgtttaagtagaaaaccactccaaaagcatactttagggaagatgtcagctccaagattactgatttccatcattatcatggtgtctgcctcagataataattcctgtctgatgacacaactggaaatacaaagttagagaatacgtcttaatgaagcttcaagtagttcatgcatgggtggaaagcagatgacacagaactattcaacaatttttgcagaaggtaacatttcacagcctgtactgatggatataaatgctgtgctttgttgccctcctatcgcattaagaaatttgatcataataacatgggaaataatcctgagaggccagccttcctgcacaaaagcctacaagaaagaaacaaatgagaccaaggaaaccaactgtactgttgagagaataacctgggtctctagacctgatcagaattcggaccttcagattcgtccggtggacaccactcatgacgggtattacagaggcatagtggtaacacctgatgggaatttccatcgtggatatcacctccaagtgttagttacacccgaagtgaacctatttcaaagcaggaatataactgcagtatgcaaggcagttacagggaagccagctgcccagatctcctggatcccagagggatctattcttgccactaagcaagaatactggggcaatggcacagtgacggttaagagtacatgcccctgggagggccacaagtctactgtgacctgccatgtctcccatttgactggcaacaagagtctgtccgtaaagttgaattcaggtctcagaacctcaggatctccagcgttgtccttactgatcattctttatgtgaaactctctctttttgtggtcattctggtcaccacaggatttgttttcttccagaggataaatcatgtcagaaaagttctttaaagaagaaggaagggtcttcttttgcttctcctccttgtctctggactgcaacattggtgagatgagtgatggtccagcagtgaacttgggccatggatgatgttaaggatagaagccactcagtaggatagaagaaaagaaagatggaagaaggatcctgggcttgatgaccatgaagtttccctataaaccctcaaccacctattcattgacttcttttgtgttagagtgaataaaattttgttcatgccagt

SEQ ID NO: 115433 - DNA, 1377 bp, Homo sapiens
  Payload ID: 2529
  Gene Symbol: CD200R1L
  Gene Name: CD200 receptor 1-like
  ENST ID: ENST00000486723
  CDS Start-End: 220-387
cactgacatttcccatcagtggttaatcagtcaaaaacatatagaatgacagcaaaaattaaagataagcaagataatgaagaaatatgttttgcaatcctgttgaagacagaataagcaaaagtgaccaagagaaacagattcaccaagtctgttgattgatttaaagtggatttatgtttaagtagaaaaccactccaaaagcatactttagggaagatgtcagctccaagattactgatttccatcattatcatggtgtctggctgtacaggaagcatggctgaggaggcctcaaaaaacttacaatcatggtggaaatgtgaaggggaagcaagcatgtcttcaaatggccagcagaagcctcagataataattcctgtctgatgacacaactggaaatacaaagttagagaatacgtcttaatgaagcttcaagtagttcatgcatgggtggaaagcagatgacacagaactattcaacaatttttgcagaaggtaacatttcacagcctgtactgatggatataaatgctgtgctttgttgccctcctatcgcattaagaaatttgatcataataacatgggaaataatcctgagaggccagccttcctgcacaaaagcctacaagaaagaaacaaatgagaccaaggaaaccaactgtactgttgagagaataacctgggtctctagacctgatcagaattcggaccttcagattcgtccggtggacaccactcatgacgggtattacagaggcatagtggtaacacctgatgggaatttccatcgtggatatcacctccaagtgttagttacacccgaagtgaacctatttcaaagcaggaatataactgcagtatgcaaggcagttacagggaagccagctgcccagatctcctggatcccagagggatctattcttgccactaagcaagaatactggggcaatggcacagtgacggttaagagtacatgcccctgggagggccacaagtctactgtgacctgccatgtctcccatttgactggcaacaagagtctgtccgtaaagttgaattcaggtctcagaacctcaggatctccagcgttgtccttactgatcattctttatgtgaaactctctctttttgtggtcattctggtcaccacaggatttgttttcttccagaggataaatcatgtcagaaaagttctttaaagaagaaggaagggtcttcttttgcttctcctccttgtctctggactgcaacattggtgagatgagtgatggtccagcagtgaacttgggccatggatgatgttaaggatagaagccactcagtaggatagaagaaaagaaagatggaagaaggatcctgggcttgatgaccatg

SEQ ID NO: 115434 - DNA, 762 bp, Homo sapiens
  Payload ID: 2529
  Gene Symbol: CD200R1L
  Gene Name: CD200 receptor 1-like
  ENST ID: ENST00000617549
  CDS Start-End: 1-762
gcttcaagtagttcatgcatgggtggaaagcagatgacacagaactattcaacaatttttgcagaaggtaacatttcacagcctgtactgatggatataaatgctgtgctttgttgccctcctatcgcattaagaaatttgatcataataacatgggaaataatcctgagaggccagccttcctgcacaaaagcctacaagaaagaaacaaatgagaccaaggaaaccaactgtactgttgagagaataacctgggtctctagacctgatcagaattcggaccttcagattcgtccggtggacaccactcatgacgggtattacagaggcatagtggtaacacctgatgggaatttccatcgtggatatcacctccaagtgttagttacacccgaagtgaacctatttcaaagcaggaatataactgcagtatgcaaggcagttacagggaagccagctgcccagatctcctggatcccagagggatctattcttgccactaagcaagaatactggggcaatggcacagtgacggttaagagtacatgcccctgggagggccacaagtctactgtgacctgccatgtctcccatttgactggcaacaagagtctgtccgtaaagttgaattcaggtctcagaacctcaggatctccagcgttgtccttactgatcattctttatgtgaaactctctctttttgtggtcattctggtcaccacaggatttgttttcttccagaggataaatcatgtcaggtag

SEQ ID NO: 115435 - DNA, 1869 bp, Homo sapiens
  Payload ID: 2530
  Gene Symbol: CD207
  Gene Name: CD207 molecule, langerin
  Uniprot ID: Q9UJ71
  ENST ID: ENST00000410009
  CDS Start-End: 47-1033
gcagccagaagcacctgtgctcccaggataagggtgagcactcaggatgactgtggagaaggaggcccctgatgcgcacttcactgtggacaaacagaacatctccctctggccccgagagcctcctcccaagtccggtccatctctggtcccggggaaaacacccacagtccgtgctgcattaatctgcctgacgctggtcctggtcgcctccgtcctgctgcaggccgtcctttatccccggtttatgggcaccatatcagatgtaaagaccaatgtccagttgctgaaaggtcgtgtggacaacatcagcaccctggattctgaaattaaaaagaatagtgacggcatggaggcagctggcgttcagatccagatggtgaatgagagcctgggttatgtgcgttctcagttcctgaagttaaaaaccagtgtggagaaggccaacgcacagatccagatcttaacaagaagttgggaagaagtcagtaccttaaatgcccaaatcccagagttaaaaagtgatttggagaaagccagtgctttaaatacaaagatccgggcactccagggcagcttggagaatatgagcaagttgctcaaacgacaaaatgatattctacaggtggtttctcaaggctggaagtacttcaaggggaacttctattacttttctctcattccaaagacctggtatagtgccgagcagttctgtgtgtccaggaattcacacctgacctcggtgacctcagagagtgagcaggagtttctgtataaaacagcggggggactcatctactggattggcctgactaaagcagggatggaaggggactggtcctgggtggatgacacgccattcaacaaggtccaaagtgtgaggttctggattccaggtgagcccaacaatgctgggaacaatgaacactgtggcaatataaaggctccctcacttcaggcctggaatgatgccccatgtgacaaaacgtttcttttcatttgtaagcgaccctatgtcccatcagaaccgtgacaggacaggctcccaagctcactctttgagctccaacgcttgttaaacatgaggaaatgcctctttcttccccagactccaggatgactttgcacgttaatttttcttgcttcaaaattgtcccacagtggcattctggagtccgtctgtcttggctggaaattctctgacgtcttggaggcagctggaatggaaaggagaattcaggttaaagtgggaggggtgggtagagaggatttagaagttccaattgccctgctaaggaggatcaagacccgtaatccggcataacaccctggggttttccactctttcagagaaacctcagcttcatcacatcaaagttactccagagcaaccaagcaattctcctgatattgtcatccagggcttttcttggccaaaccccctagaatttccatgtctctgcttagctgtgctggcagctagcagctggctgtgtttgcagtgcaaatagctctgttcttggaaatcctgctcatggtatgtccccagtggtttcttcatccacatcatctaaagcctgaacccgttcttctctggttcaagtcagtggctgacacggacttgtatctccttcagagctcggctggcacccagcctcccttctccttccactcccttagtacactggagtgccgagccctgccttccacccagcgtccatccagcccctgtcctcacctctccggcacctcctcctccttctgcatttcctatcttcctgtgtcttgtgcatgggaagcagccttcagtgccttcatgaattcaccttccagcttcctcagaataaaatgctgcctgggtcaaggact

SEQ ID NO: 115436 - DNA, 1083 bp, Homo sapiens
  Payload ID: 2531
  Gene Symbol: CD209
  Gene Name: CD209 molecule
  Uniprot ID: Q9NNX6
  ENST ID: ENST00000204801
  CDS Start-End: 1-1083
atgagtgactccaaggaaccaagactgcagcagctgggcctcctggtgtccaaggtccccagctccataagtcaggaacaatccaggcaagacgcgatctaccagaacctgacccagcttaaagctgcagtgggtgagctctcagagaaatccaagctgcaggagatctaccaggagctgacccagctgaaggctgcagtgggtgagcttccagagaaatctaagctgcaggagatctaccaggagctgacccggctgaaggctgcagtgggtgagcttccagagaaatctaagctgcaggagatctaccaggagctgacctggctgaaggctgcagtgggtgagcttccagagaaatctaagatgcaggagatctaccaggagctgactcggctgaaggctgcagtgggtgagcttccagagaaatctaagcagcaggagatctaccaggagctgacccggctgaaggctgcagtgggtgagcttccagagaaatctaagcagcaggagatctaccaggagctgacccggctgaaggctgcagtgggtgagcttccagagaaatctaagcagcaggagatctaccaggagctgacccagctgaaggctgcagtggaacgcctgtgccacccctgtccctgggaatggacattcttccaaggaaactgttacttcatgtctaactcccagcggaactggcacgactccatcaccgcctgcaaagaagtgggggcccagctcgtcgtaatcaaaagtgctgaggagcagaacttcctacagctgcagtcttccagaagtaaccgcttcacctggatgggactttcagatctaaatcaggaaggcacgtggcaatgggtggacggctcacctctgttgcccagcttcaagcagtattggaacagaggagagcccaacaacgttggggaggaagactgcgcggaatttagtggcaatggctggaacgacgacaaatgtaatcttgccaaattctggatctgcaaaaagtccgcagcctcctgctccagggatgaagaacagtttctttctccagcccctgccaccccaaacccccctcctgcgtag

SEQ ID NO: 115437 - DNA, 1143 bp, Homo sapiens
  Payload ID: 2531
  Gene Symbol: CD209
  Gene Name: CD209 molecule
  Uniprot ID: Q9NNX6
  ENST ID: ENST00000315591
  CDS Start-End: 1-1143
atgagtgactccaaggaaccaagactgcagcagctgggcctcctggaggaggaacagctgagaggccttggattccgacagactcgaggatacaagagcttagcagtgtccaaggtccccagctccataagtcaggaacaatccaggcaagacgcgatctaccagaacctgacccagcttaaagctgcagtgggtgagctctcagagaaatccaagctgcaggagatctaccaggagctgacccagctgaaggctgcagtgggtgagcttccagagaaatctaagctgcaggagatctaccaggagctgacccggctgaaggctgcagtgggtgagcttccagagaaatctaagctgcaggagatctaccaggagctgacctggctgaaggctgcagtgggtgagcttccagagaaatctaagatgcaggagatctaccaggagctgactcggctgaaggctgcagtgggtgagcttccagagaaatctaagcagcaggagatctaccaggagctgacccggctgaaggctgcagtgggtgagcttccagagaaatctaagcagcaggagatctaccaggagctgacccggctgaaggctgcagtgggtgagcttccagagaaatctaagcagcaggagatctaccaggagctgacccagctgaaggctgcagtggaacgcctgtgccacccctgtccctgggaatggacattcttccaaggaaactgttacttcatgtctaactcccagcggaactggcacgactccatcaccgcctgcaaagaagtgggggcccagctcgtcgtaatcaaaagtgctgaggagcagaacttcctacagctgcagtcttccagaagtaaccgcttcacctggatgggactttcagatctaaatcaggaaggcacgtggcaatgggtggacggctcacctctgttgcccagcttcaagcagtattggaacagaggagagcccaacaacgttggggaggaagactgcgcggaatttagtggcaatggctggaacgacgacaaatgtaatcttgccaaattctggatctgcaaaaagtccgcagcctcctgctccagggatgaagaacagtttctttctccagcccctgccaccccaaacccccctcctgcgtag

SEQ ID NO: 115438 - DNA, 4283 bp, Homo sapiens
  Payload ID: 2531
  Gene Symbol: CD209
  Gene Name: CD209 molecule
  Uniprot ID: Q9NNX6
  ENST ID: ENST00000315599
  CDS Start-End: 24-1238
acactgggggagagtggggtgacatgagtgactccaaggaaccaagactgcagcagctgggcctcctggaggaggaacagctgagaggccttggattccgacagactcgaggatacaagagcttagcagggtgtcttggccatggtcccctggtgctgcaactcctctccttcacgctcttggctgggctccttgtccaagtgtccaaggtccccagctccataagtcaggaacaatccaggcaagacgcgatctaccagaacctgacccagcttaaagctgcagtgggtgagctctcagagaaatccaagctgcaggagatctaccaggagctgacccagctgaaggctgcagtgggtgagcttccagagaaatctaagctgcaggagatctaccaggagctgacccggctgaaggctgcagtgggtgagcttccagagaaatctaagctgcaggagatctaccaggagctgacctggctgaaggctgcagtgggtgagcttccagagaaatctaagatgcaggagatctaccaggagctgactcggctgaaggctgcagtgggtgagcttccagagaaatctaagcagcaggagatctaccaggagctgacccggctgaaggctgcagtgggtgagcttccagagaaatctaagcagcaggagatctaccaggagctgacccggctgaaggctgcagtgggtgagcttccagagaaatctaagcagcaggagatctaccaggagctgacccagctgaaggctgcagtggaacgcctgtgccacccctgtccctgggaatggacattcttccaaggaaactgttacttcatgtctaactcccagcggaactggcacgactccatcaccgcctgcaaagaagtgggggcccagctcgtcgtaatcaaaagtgctgaggagcagaacttcctacagctgcagtcttccagaagtaaccgcttcacctggatgggactttcagatctaaatcaggaaggcacgtggcaatgggtggacggctcacctctgttgcccagcttcaagcagtattggaacagaggagagcccaacaacgttggggaggaagactgcgcggaatttagtggcaatggctggaacgacgacaaatgtaatcttgccaaattctggatctgcaaaaagtccgcagcctcctgctccagggatgaagaacagtttctttctccagcccctgccaccccaaacccccctcctgcgtagcagaacttcacccccttttaagctacagttccttctctccatccttcgaccttcacaaaatctctgggactgttctttgtcagattcttcctcctttagaaggctgggtcccattctgtccttcttgtcatgcctccaatttcccctggtgtagagcttgtttttctggcccatccttggagctttatgagtgagctggtgtgggatgcctttgggggtggacttgtgttccaagaatccactctctcttccttttggagattaggatatttgggttgccatgtgtagctgctatgtcccctggggcgttatcttatacatgcaaacctaccatctgttcaacttccacctaccacctcctgcacccctttgatcggggacttactggttgcaagagctcattttgcaggctggaagcaccagggaattaattcccccagtcaaccaatggcacccagagagggcatggaggctccacgcaaccccttccacccccacatcttcctttgtcttatacatggcttccatttggctgtttctaagttgtattctttattttattattattattactatttttcgagatggagtttcactcttgtcgctcaggctggagtgccatggcgcgatcttggctcactgcaacctctgcctcccgggttcaagtgattctcctgcctcagcctcacgagtagctggaattacaggcaggcgccaccagacccggctaattttttgtatttttagtacagatggggtttctccgtgttggtcaggctggtcttgaactcccgacctcagatgatctgcccgcctcggcctcccaaaattgctgggattacaggtgtgagccaccgcgcctggcctattattttttgtaagaataaaacaggtttattgggatttgggactctgaacagttctgtctctactacctgatctcctcctaccacgactttgggatctagaggagctttggctccggctgtgacggctccggccgttctcactgcggctgcaccggcccccgctgcggtcactatttcttcctctgctaggtgaattgtgcctctcctggctctttgacatgtgctagtgagatttcttccttttcctttcggattccccatttcttttgtaggaatggtctggactagggttctccttccccgcagcctgtagtattcatcgtggtggcccaccctctctctccccttggagctcttgccaaaggaggagacaagcagaggtctctattggatttctcaacacctgaagaaagttgcagtgttttcctcttggacattgttgtatttcaaataaaccacaaatcatcattttccaccgagccactgggcagaattcacactgaagctgtcgtcctgcgtacataccatcgtccgttaaacagagaaagagctgcttggcattcttcttccgactggtactgaacatatatacttgcccctcaggtgaggttccaagttgcaactgaccttgaactgaatcactctccccacgttattttttaattactatttttttttaaagatggggtcttgctctgtcgccaggctggagtgcagtggcgcgatctaggctcactgcaacttccgcctcccgggttcaagcgattctcctgcctcagcctcccgagtagctgggactccactaaaagtacaaaaattagctgggcgtgcaccactgcgcccagctaattcttgtatttttggtagagacggggtttcaacatgttgaccaggatggtctcgatctcttgacctcgtgattcgcccgccgcgtcctcccaaagtgctgggattacaggcctgagccaccgcgcccagtctctccccacgttcttgaactcgggcagcacatcctcacagaaatctaggaactgttggtaggtttcttcctcgctgtactccaggcttgcttcggagtcatagtcatccctcctgcactgctcctttccaaacactgtaaacatgcttttaataagaagggtaggactggatgttgggaaatcatgtgaacatctatctccaaatctgcaagctcctgttttactgtagaagggacaattaactccatccttctccatgactctgaaatccaagggggggttccgggttttgccatgtggcgccattttccaactcattttcagcctgatccagcatcttctggacagcttccggtttttgtttcttctgtcgtttctgttcctcctcctctctctctttcctctgctgttcttcccattgttcctttaactttcgctcttgttcttgccgttttctagccacctcttccttttccttctttattctgaattcttcttgtgccttctgctctctcagcaaccactcctcatgtaatctttgcctctctcttccccatagcttttctagttgttgtttttcaataaaagtgtcctcctctttctgtgagagtcctgagtccctcagtggagcaagttcctgctggcgtttctttcgtttctccttcttcagggcggccctgtactttttgtggcttggtttctctggaaatgtcaccttttcgggcgcagccatcttgccggcaccgccccgcccctctagttgtatcctttataataaactggtaaacattgtaaccgcagattcagcccaatctggttcaactttgtgtaataaaatggcgagttgtttttcagttgtcgtggacccccaggttgcaagttacataccctgggcatgtccagatgaacgaagcgtgcaaatccacgtggaacctaagtgctcagaccgaggaacagggactgagttaagaagtggacaccacgtggcatgatccttgatccaatcagattgagccctggcgtgatccagtcagatcaagcctcctgaatcccctcattacaagatccaatcatatcatgcctcactaccctctgtatataaaatctgccccagcctccaacttggagagacagatttgggccagactcctgtgtccttgcttggctgccttgcaataaatttttctctctacaaa

SEQ ID NO: 115439 - DNA, 1197 bp, Homo sapiens
  Payload ID: 2531
  Gene Symbol: CD209
  Gene Name: CD209 molecule
  Uniprot ID: Q9NNX6
  ENST ID: ENST00000354397
  CDS Start-End: 1-1197
atgagtgactccaaggaaccaagactgcagcagctgggcctcctggaggaggaacagctgagaggccttggattccgacagactcgaggatacaagagcttagcagggtgtcttggccatggtcccctggtgctgcaactcctctccttcacgctcttggctgggctccttgtccaagtgtccaaggtccccagctccataagtcaggaacaatccaggcaagacgcgatctaccagaacctgacccagcttaaagctgcagtgggtgagctctcagagaaatccaagctgcaggagatctaccaggagctgacccagctgaaggctgcagtgggtgagcttccagagaaatctaagctgcaggagatctaccaggagctgacccggctgaaggctgcagtgggtgagcttccagagaaatctaagctgcaggagatctaccaggagctgacctggctgaaggctgcagtgggtgagcttccagagaaatctaagatgcaggagatctaccaggagctgactcggctgaaggctgcagtgggtgagcttccagagaaatctaagcagcaggagatctaccaggagctgacccggctgaaggctgcagtgggtgagcttccagagaaatctaagcagcaggagatctaccaggagctgacccggctgaaggctgcagtgggtgagcttccagagaaatctaagcagcaggagatctaccaggagctgacccagctgaaggctgcagtggaacgcctgtgccacccctgtccctgggaatggacattcttccaaggaaactgttacttcatgtctaactcccagcggaactggcacgactccatcaccgcctgcaaagaagtgggggcccagctcgtcgtaatcaaaagtgctgaggagcagtcttccagaagtaaccgcttcacctggatgggactttcagatctaaatcaggaaggcacgtggcaatgggtggacggctcacctctgttgcccagcttcaagcagtattggaacagaggagagcccaacaacgttggggaggaagactgcgcggaatttagtggcaatggctggaacgacgacaaatgtaatcttgccaaattctggatctgcaaaaagtccgcagcctcctgctccagggatgaagaacagtttctttctccagcccctgccaccccaaacccccctcctgcgtag

SEQ ID NO: 115440 - DNA, 507 bp, Homo sapiens
  Payload ID: 2531
  Gene Symbol: CD209
  Gene Name: CD209 molecule
  Uniprot ID: Q9NNX6
  ENST ID: ENST00000394161
  CDS Start-End: 1-507
atgagtgactccaaggaaccaagactgcagcagctgggcctcctggaggaggaacagctgagaggccttggattccgacagactcgaggatacaagagcttagcagggtgtcttggccatggtcccctggtgctgcaactcctctccttcacgctcttggctgggctccttgtccaagtgtccaaggtccccagctccataagtcaggaacaatccagaagtaaccgcttcacctggatgggactttcagatctaaatcaggaaggcacgtggcaatgggtggacggctcacctctgttgcccagcttcaagcagtattggaacagaggagagcccaacaacgttggggaggaagactgcgcggaatttagtggcaatggctggaacgacgacaaatgtaatcttgccaaattctggatctgcaaaaagtccgcagcctcctgctccagggatgaagaacagtttctttctccagcccctgccaccccaaacccccctcctgcgtag

SEQ ID NO: 115441 - DNA, 1313 bp, Homo sapiens
  Payload ID: 2531
  Gene Symbol: CD209
  Gene Name: CD209 molecule
  ENST ID: ENST00000394173
  CDS Start-End: 54-785
aataaaagctgtggcccccaggagttctggacactgggggagagtggggtgacatgagtgactccaaggaaccaagactgcagcagctgggcctcctggaggaggaacagctgagaggccttggattccgacagactcgaggatacaagagcttagcagggtgtcttggccatggtcccctggtgctgcaactcctctccttcacgctcttggctgggctccttgtccaagtgtccaaggtccccagctccataagtcaggaacaatccaggcaagacgcgatctaccagaacctgacccagcttaaagctgcagtggaacgcctgtgccacccctgtccctgggaatggacattcttccaaggaaactgttacttcatgtctaactcccagcggaactggcacgactccatcaccgcctgcaaagaagtgggggcccagctcgtcgtaatcaaaagtgctgaggagcagaacttcctacagctgcagtcttccagaagtaaccgcttcacctggatgggactttcagatctaaatcaggaaggcacgtggcaatgggtggacggctcacctctgttgcccagcttcaagcagtattggaacagaggagagcccaacaacgttggggaggaagactgcgcggaatttagtggcaatggctggaacgacgacaaatgtaatcttgccaaattctggatctgcaaaaagtccgcagcctcctgctccagggatgaagaacagtttctttctccagcccctgccaccccaaacccccctcctgcgtagcagaacttcacccccttttaagctacagttccttctctccatccttcgaccttcacaaaatctctgggactgttctttgtcagattcttcctcctttagaaggctgggtcccattctgtccttcttgtcatgcctccaatttcccctggtgtagagcttgtttttctggcccatccttggagctttatgagtgagctggtgtgggatgcctttgggggtggacttgtgttccaagaatccactctctcttccttttggagattaggatatttgggttgccatgtgtagctgctatgtcccctggggcgttatcttatacatgcaaacctaccatctgttcaacttccacctaccacctcctgcacccctttgatcggggacttactggttgcaagagctcattttgcaggctggaagcaccagggaattaattcccccagtcaaccaatggcacccagagagggcatggaggctccacgcaaccccttccacccccacatcttcctttgtcttatacatggcttccat

SEQ ID NO: 115442 - DNA, 1439 bp, Homo sapiens
  Payload ID: 2531
  Gene Symbol: CD209
  Gene Name: CD209 molecule
  Uniprot ID: Q9NNX6
  ENST ID: ENST00000601951
  CDS Start-End: 108-1250
gggtgacatgagtgactccaaggaaccaagactgcagcagctgggcctcctgggtgaggctgggttgggacgctgggattctgggaagggggaagggatggccagccatggcctcagcctgcccaggctctgatttcacgtctatccattcagaggaggaacagctgagaggccttggattccgacagactcgaggatacaagagcttagcagtgtccaaggtccccagctccataagtcaggaacaatccaggcaagacgcgatctaccagaacctgacccagcttaaagctgcagtgggtgagctctcagagaaatccaagctgcaggagatctaccaggagctgacccagctgaaggctgcagtgggtgagcttccagagaaatctaagctgcaggagatctaccaggagctgacccggctgaaggctgcagtgggtgagcttccagagaaatctaagctgcaggagatctaccaggagctgacctggctgaaggctgcagtgggtgagcttccagagaaatctaagatgcaggagatctaccaggagctgactcggctgaaggctgcagtgggtgagcttccagagaaatctaagcagcaggagatctaccaggagctgacccggctgaaggctgcagtgggtgagcttccagagaaatctaagcagcaggagatctaccaggagctgacccggctgaaggctgcagtgggtgagcttccagagaaatctaagcagcaggagatctaccaggagctgacccagctgaaggctgcagtggaacgcctgtgccacccctgtccctgggaatggacattcttccaaggaaactgttacttcatgtctaactcccagcggaactggcacgactccatcaccgcctgcaaagaagtgggggcccagctcgtcgtaatcaaaagtgctgaggagcagaacttcctacagctgcagtcttccagaagtaaccgcttcacctggatgggactttcagatctaaatcaggaaggcacgtggcaatgggtggacggctcacctctgttgcccagcttcaagcagtattggaacagaggagagcccaacaacgttggggaggaagactgcgcggaatttagtggcaatggctggaacgacgacaaatgtaatcttgccaaattctggatctgcaaaaagtccgcagcctcctgctccagggatgaagaacagtttctttctccagcccctgccaccccaaacccccctcctgcgtagcagaacttcacccccttttaagctacagttccttctctccatccttcgaccttcacaaaatctctgggactgttctttgtcagattcttcctcctttagaaggctgggtcccattctgtccttcttgtcatgcctccaatttcccctggtgtagagcttgtttttctggcccatccttggagctttatg

SEQ ID NO: 115443 - DNA, 1497 bp, Homo sapiens
  Payload ID: 2531
  Gene Symbol: CD209
  Gene Name: CD209 molecule
  ENST ID: ENST00000593660
  CDS Start-End: 101-1105
atgagtgactccaaggaaccaagactgcagcagctgggcctcctgggtgaggctgggttgggacgctgggattctgggaagggggaagggatggccagccatggcctcagcctgcccaggctctgatttcacgtctatccattcagaggaggaacagctgagaggccttggattccgacagactcgaggatacaagagcttagcagtgtccaaggtccccagctccataagtcaggaacaatccaggcaagacgcgatctaccagaacctgacccagcttaaagctgcagtgggtgagctctcagagaaatccaagctgcaggagatctaccaggagctgacccagctgaaggctgcagtgggtgagcttccagagaaatctaagctgcaggagatctaccaggagctgacccggctgaaggctgcagtgggtgagcttccagagaaatctaagctgcaggagatctaccaggagctgacctggctgaaggctgcagtgggtgagcttccagagaaatctaagatgcaggagatctaccaggagctgactcggctgaaggctgcagtgggtgagcttccagagaaatctaagcagcaggagatctaccaggagctgacccggctgaaggctgcagtggaacgcctgtgccacccctgtccctgggaatggacattcttccaaggaaactgttacttcatgtctaactcccagcggaactggcacgactccatcaccgcctgcaaagaagtgggggcccagctcgtcgtaatcaaaagtgctgaggagcagaacttcctacagctgcagtcttccagaagtaaccgcttcacctggatgggactttcagatctaaatcaggaaggcacgtggcaatgggtggacggctcacctctgttgcccagcttcaagcagtattggaacagaggagagcccaacaacgttggggaggaagactgcgcggaatttagtggcaatggctggaacgacgacaaatgtaatcttgccaaattctggatctgcaaaaagtccgcagcctcctgctccagggatgaagaacagtttctttctccagcccctgccaccccaaacccccctcctgcgtagcagaacttcacccccttttaagctacagttccttctctccatccttcgaccttcacaaaatctctgggactgttctttgtcagattcttcctcctttagaaggctgggtcccattctgtccttcttgtcatgcctccaatttcccctggtgtagagcttgtttttctggcccatccttggagctttatgagtgagctggtgtgggatgcctttgggggtggacttgtgttccaagaatccactctctcttccttttggagattaggatatttgggttgccatgtgtagctgctatgtcccctggggcgttatcttatacatgcaaacctaccatctgttcaacttccacctaccacctcctgcacccctttgatcggggacttactggttgc

SEQ ID NO: 115444 - DNA, 994 bp, Homo sapiens
  Payload ID: 2531
  Gene Symbol: CD209
  Gene Name: CD209 molecule
  Uniprot ID: Q9NNX6
  ENST ID: ENST00000601256
  CDS Start-End: 101-994
atgagtgactccaaggaaccaagactgcagcagctgggcctcctgggtgaggctgggttgggacgctgggattctgggaagggggaagggatggccagccatggcctcagcctgcccaggctctgatttcacgtctatccattcagaggaggaacagctgagaggccttggattccgacagactcgaggatacaagagcttagcagtgtccaaggtccccagctccataagtcaggaacaatccaggcaagacgcgatctaccagaacctgacccagcttaaagctgcagtgggtgagctctcagagaaatccaagctgcaggagatctaccaggagctgacccagctgaaggctgcagtgggtgagcttccagagaaatctaagctgcaggagatctaccaggagctgacccggctgaaggctgcagtgggtgagcttccagagaaatctaagctgcaggagatctaccaggagctgacctggctgaaggctgcagtgggtgagcttccagagaaatctaagatgcaggagatctaccaggagctgactcggctgaaggctgcagtgggtgagcttccagagaaatctaagcagcaggagatctaccaggagctgacccggctgaaggctgcagtgggtgagcttccagagaaatctaagcagcaggagatctaccaggagctgacccggctgaaggctgcagtgggtgagcttccagagaaatctaagcagcaggagatctaccaggagctgacccagctgaaggctgcagtggaacgcctgtgccacccctgtccctgggaatggacattcttccaaggaaactgttacttcatgtctaactcccagcggaactggcacgactccatcaccgcctgcaaagaagtgggggcccagctcgtcgtaatcaaaagtgctgaggagcagcttcaagcagtattggaacagaggagagcccaacaacgttggggaggaagactgcgcggaatttag

SEQ ID NO: 115445 - DNA, 939 bp, Homo sapiens
  Payload ID: 2531
  Gene Symbol: CD209
  Gene Name: CD209 molecule
  Uniprot ID: Q9NNX6
  ENST ID: ENST00000602261
  CDS Start-End: 1-939
atgagtgactccaaggaaccaagactgcagcagctgggcctcctggaggaggaacagctgagaggccttggattccgacagactcgaggatacaagagcttagcagggtgtcttggccatggtcccctggtgctgcaactcctctccttcacgctcttggctgggctccttgtccaagtgtccaaggtccccagctccataagtcaggaacaatccaggcaagacgcgatctaccagaacctgacccagcttaaagctgcagtgggtgagctctcagagaaatccaagctgcaggagatctaccaggagctgacccagctgaaggctgcagtgggtgagcttccagagaaatctaagctgcaggagatctaccaggagctgacccggctgaaggctgcagtgggtgagcttccagagaaatctaagctgcaggagatctaccaggagctgacctggctgaaggctgcagtggaacgcctgtgccacccctgtccctgggaatggacattcttccaaggaaactgttacttcatgtctaactcccagcggaactggcacgactccatcaccgcctgcaaagaagtgggggcccagctcgtcgtaatcaaaagtgctgaggagcagaacttcctacagctgcagtcttccagaagtaaccgcttcacctggatgggactttcagatctaaatcaggaaggcacgtggcaatgggtggacggctcacctctgttgcccagcttcaagcagtattggaacagaggagagcccaacaacgttggggaggaagactgcgcggaatttagtggcaatggctggaacgacgacaaatgtaatcttgccaaattctggatctgcaaaaagtccgcagcctcctgctccagggatgaagaacagtttctttctccagcccctgccaccccaaacccccctcctgcgtag

SEQ ID NO: 115446 - DNA, 807 bp, Homo sapiens
  Payload ID: 2531
  Gene Symbol: CD209
  Gene Name: CD209 molecule
  ENST ID: ENST00000593821
  CDS Start-End: 1-807
atgagtgactccaaggaaccaagactgcagcagctgggcctcctggtgtccaaggtccccagctccataagtcaggaacaatccaggcaagacgcgatctaccagaacctgacccagcttaaagctgcagtgggtgagctctcagagaaatccaagctgcaggagatctaccaggagctgacccagctgaaggctgcagtgggtgagcttccagagaaatctaagctgcaggagatctaccaggagctgacccggctgaaggctgcagtgggtgagcttccagagaaatctaagctgcaggagatctaccaggagctgacctggctgaaggctgcagtggaacgcctgtgccacccctgtccctgggaatggacattcttccaaggaaactgttacttcatgtctaactcccagcggaactggcacgactccatcaccgcctgcaaagaagtgggggcccagctcgtcgtaatcaaaagtgctgaggagcagaacttcctacagctgcagtcttccagaagtaaccgcttcacctggatgggactttcagatctaaatcaggaaggcacgtggcaatgggtggacggctcacctctgttgcccagcttcaagcagtattggaacagaggagagcccaacaacgttggggaggaagactgcgcggaatttagtggcaatggctggaacgacgacaaatgtaatcttgccaaattctggatctgcaaaaagtccgcagcctcctgctccagggatgaagaacagtttctttctccagcccctgccaccccaaacccccctcctgcgtag

SEQ ID NO: 115447 - DNA, 3268 bp, Homo sapiens
  Payload ID: 2532
  Gene Symbol: CD22
  Gene Name: CD22 molecule
  Uniprot ID: P20273
  ENST ID: ENST00000085219
  CDS Start-End: 67-2610
agatgctgccagggtccctgaagagggaagacacgcggaaacaggcttgcacccagacacgacaccatgcatctcctcggcccctggctcctgctcctggttctagaatacttggctttctctgactcaagtaaatgggtttttgagcaccctgaaaccctctacgcctgggagggggcctgcgtctggatcccctgcacctacagagccctagatggtgacctggaaagcttcatcctgttccacaatcctgagtataacaagaacacctcgaagtttgatgggacaagactctatgaaagcacaaaggatgggaaggttccttctgagcagaaaagggtgcaattcctgggagacaagaataagaactgcacactgagtatccacccggtgcacctcaatgacagtggtcagctggggctgaggatggagtccaagactgagaaatggatggaacgaatacacctcaatgtctctgaaaggccttttccacctcatatccagctccctccagaaattcaagagtcccaggaagtcactctgacctgcttgctgaatttctcctgctatgggtatccgatccaattgcagtggctcctagagggggttccaatgaggcaggctgctgtcacctcgacctccttgaccatcaagtctgtcttcacccggagcgagctcaagttctccccacagtggagtcaccatgggaagattgtgacctgccagcttcaggatgcagatgggaagttcctctccaatgacacggtgcagctgaacgtgaagcacaccccgaagttggagatcaaggtcactcccagtgatgccatagtgagggagggggactctgtgaccatgacctgcgaggtcagcagcagcaacccggagtacacgacggtatcctggctcaaggatgggacctcgctgaagaagcagaatacattcacgctaaacctgcgcgaagtgaccaaggaccagagtgggaagtactgctgtcaggtctccaatgacgtgggcccgggaaggtcggaagaagtgttcctgcaagtgcagtatgccccggaaccttccacggttcagatcctccactcaccggctgtggagggaagtcaagtcgagtttctttgcatgtcactggccaatcctcttccaacaaattacacgtggtaccacaatgggaaagaaatgcagggaaggacagaggagaaagtccacatcccaaagatcctcccctggcacgctgggacttattcctgtgtggcagaaaacattcttggtactggacagaggggcccgggagctgagctggatgtccagtatcctcccaagaaggtgaccacagtgattcaaaaccccatgccgattcgagaaggagacacagtgaccctttcctgtaactacaattccagtaaccccagtgttacccggtatgaatggaaaccccatggcgcctgggaggagccatcgcttggggtgctgaagatccaaaacgttggctgggacaacacaaccatcgcctgcgcagcttgtaatagttggtgctcgtgggcctcccctgtcgccctgaatgtccagtatgccccccgagacgtgagggtccggaaaatcaagcccctttccgagattcactctggaaactcggtcagcctccaatgtgacttctcaagcagccaccccaaagaagtccagttcttctgggagaaaaatggcaggcttctggggaaagaaagccagctgaattttgactccatctccccagaagatgctgggagttacagctgctgggtgaacaactccataggacagacagcgtccaaggcctggacacttgaagtgctgtatgcacccaggaggctgcgtgtgtccatgagcccgggggaccaagtgatggaggggaagagtgcaaccctgacctgtgagagcgacgccaaccctcccgtctcccactacacctggtttgactggaataaccaaagcctcccctaccacagccagaagctgagattggagccggtgaaggtccagcactcgggtgcctactggtgccaggggaccaacagtgtgggcaagggccgttcgcctctcagcaccctcaccgtctactatagcccggagaccatcggcaggcgagtggctgtgggactcgggtcctgcctcgccatcctcatcctggcaatctgtgggctcaagctccagcgacgttggaagaggacacagagccagcaggggcttcaggagaattccagcggccagagcttctttgtgaggaataaaaaggttagaagggcccccctctctgaaggcccccactccctgggatgctacaatccaatgatggaagatggcattagctacaccaccctgcgctttcccgagatgaacataccacgaactggagatgcagagtcctcagagatgcagagacctcccccggactgcgatgacacggtcacttattcagcattgcacaagcgccaagtgggcgactatgagaacgtcattccagattttccagaagatgaggggattcattactcagagctgatccagtttggggtcggggagcggcctcaggcacaagaaaatgtggactatgtgatcctcaaacattgacactggatgggctgcagcagaggcactgggggcagcgggggccagggaagtccccgagtttccccagacaccgccacatggcttcctcctgcgcgcatgtgcgcacacacacacacacacgcacacacacacacacacactcactgcggagaaccttgtgcctggctcagagccagtctttttggtgagggtaaccccaaacctccaaaactcctgcccctgttctcttccactctccttgctacccagaaatccatctaaatacctgccctgacatgcacacctccccctgcccccaccacggccactggccatctccacccccagctgcttgtgtccctcctgggatctgctcgtcatcatttttccttcccttctccatctctctggccctctacccctgatctgacatccccactcacgaatattatgcccagtttctgcctctgagggaaagcccagaaaaggacagaaacgaagtagaaaggggcccagtcctggcctggcttctcctttggaagtgaggcattgcacggggagacgtacgtatcagcggccccttgactctggggactccgggtttgagatggacacactggtgtggattaacctgccagggagacagagctcacaataaaaatggctcagatgccacttc

SEQ ID NO: 115448 - DNA, 2106 bp, Homo sapiens
  Payload ID: 2532
  Gene Symbol: CD22
  Gene Name: CD22 molecule
  ENST ID: ENST00000270311
  CDS Start-End: 26-1969
caggcttgcacccagacacgacaccatgcatctcctcggcccctggctcctgctcctggttctagaatacttggctttctctgactcaagtaaatgggtttttgagcaccctgaaaccctctacgcctgggagggggcctgcgtctggatcccctgcacctacagagccctagatggtgacctggaaagcttcatcctgttccacaatcctgagtataacaagaacacctcgaagtttgatgggacaagactctatgaaagcacaaaggatgggaaggttccttctgagcagaaaagggtgcaattcctgggagacaagaataagaactgcacactgagtatccacccggtgcacctcaatgacagtggtcagctggggctgaggatggagtccaagactgagaaatggatggaacgaatacacctcaatgtctctgaaaggccttttccacctcatatccagctccctccagaaattcaagagtcccaggaagtcactctgacctgcttgctgaatttctcctgctatgggtatccgatccaattgcagtggctcctagagggggttccaatgaggcaggctgctgtcacctcgacctccttgaccatcaagtctgtcttcacccggagcgagctcaagttctccccacagtggagtcaccatgggaagattgtgacctgccagcttcaggatgcagatgggaagttcctctccaatgacacggtgcagctgaacgtgaagcatcctcccaagaaggtgaccacagtgattcaaaaccccatgccgattcgagaaggagacacagtgaccctttcctgtaactacaattccagtaaccccagtgttacccggtatgaatggaaaccccatggcgcctgggaggagccatcgcttggggtgctgaagatccaaaacgttggctgggacaacacaaccatcgcctgcgcagcttgtaatagttggtgctcgtgggcctcccctgtcgccctgaatgtccagtatgccccccgagacgtgagggtccggaaaatcaagcccctttccgagattcactctggaaactcggtcagcctccaatgtgacttctcaagcagccaccccaaagaagtccagttcttctgggagaaaaatggcaggcttctggggaaagaaagccagctgaattttgactccatctccccagaagatgctgggagttacagctgctgggtgaacaactccataggacagacagcgtccaaggcctggacacttgaagtgctgtatgcacccaggaggctgcgtgtgtccatgagcccgggggaccaagtgatggaggggaagagtgcaaccctgacctgtgagagcgacgccaaccctcccgtctcccactacacctggtttgactggaataaccaaagcctcccctaccacagccagaagctgagattggagccggtgaaggtccagcactcgggtgcctactggtgccaggggaccaacagtgtgggcaagggccgttcgcctctcagcaccctcaccgtctactatagcccggagaccatcggcaggcgagtggctgtgggactcgggtcctgcctcgccatcctcatcctggcaatctgtgggctcaagctccagcgacgttggaagaggacacagagccagcaggggcttcaggagaattccagcggccagagcttctttgtgaggaataaaaaggttagaagggcccccctctctgaaggcccccactccctgggatgctacaatccaatgatggaagatggcattagctacaccaccctgcgctttcccgagatgaacataccacgaactggagatgcagagtcctcagagatgcagagacctcccccggactgcgatgacacggtcacttattcagcattgcacaagcgccaagtgggcactatgagaacgtcattccagattttccagaagatgaggggattcattactcagagctgatccagtttggggtcggggagcggcctcaggcacaagaaaatgtggactatgtgatcctcaaacattgacactggatgggctgcagcagaggcactgggggcagcgggggccagggaagtccccgagtttccccagac

SEQ ID NO: 115449 - DNA, 2755 bp, Homo sapiens
  Payload ID: 2532
  Gene Symbol: CD22
  Gene Name: CD22 molecule
  Uniprot ID: P20273
  ENST ID: ENST00000341773
  CDS Start-End: 85-2097
acttctccttttgctctcagatgctgccagggtccctgaagagggaagacacgcggaaacaggcttgcacccagacacgacaccatgcatctcctcggcccctggctcctgctcctggttctagaatacttggctttctctgactcaagtaaatgggtttttgagcaccctgaaaccctctacgcctgggagggggcctgcgtctggatcccctgcacctacagagccctagatggtgacctggaaagcttcatcctgttccacaatcctgagtataacaagaacacctcgaagtttgatgggacaagactctatgaaagcacaaaggatgggaaggttccttctgagcagaaaagggtgcaattcctgggagacaagaataagaactgcacactgagtatccacccggtgcacctcaatgacagtggtcagctggggctgaggatggagtccaagactgagaaatggatggaacgaatacacctcaatgtctctgaaaggccttttccacctcatatccagctccctccagaaattcaagagtcccaggaagtcactctgacctgcttgctgaatttctcctgctatgggtatccgatccaattgcagtggctcctagagggggttccaatgaggcaggctgctgtcacctcgacctccttgaccatcaagtctgtcttcacccggagcgagctcaagttctccccacagtggagtcaccatgggaagattgtgacctgccagcttcaggatgcagatgggaagttcctctccaatgacacggtgcagctgaacgtgaagcatcctcccaagaaggtgaccacagtgattcaaaaccccatgccgattcgagaaggagacacagtgaccctttcctgtaactacaattccagtaaccccagtgttacccggtatgaatggaaaccccatggcgcctgggaggagccatcgcttggggtgctgaagatccaaaacgttggctgggacaacacaaccatcgcctgcgcagcttgtaatagttggtgctcgtgggcctcccctgtcgccctgaatgtccagtatgccccccgagacgtgagggtccggaaaatcaagcccctttccgagattcactctggaaactcggtcagcctccaatgtgacttctcaagcagccaccccaaagaagtccagttcttctgggagaaaaatggcaggcttctggggaaagaaagccagctgaattttgactccatctccccagaagatgctgggagttacagctgctgggtgaacaactccataggacagacagcgtccaaggcctggacacttgaagtgctgtatgcacccaggaggctgcgtgtgtccatgagcccgggggaccaagtgatggaggggaagagtgcaaccctgacctgtgagagcgacgccaaccctcccgtctcccactacacctggtttgactggaataaccaaagcctcccctaccacagccagaagctgagattggagccggtgaaggtccagcactcgggtgcctactggtgccaggggaccaacagtgtgggcaagggccgttcgcctctcagcaccctcaccgtctactatagcccggagaccatcggcaggcgagtggctgtgggactcgggtcctgcctcgccatcctcatcctggcaatctgtgggctcaagctccagcgacgttggaagaggacacagagccagcaggggcttcaggagaattccagcggccagagcttctttgtgaggaataaaaaggttagaagggcccccctctctgaaggcccccactccctgggatgctacaatccaatgatggaagatggcattagctacaccaccctgcgctttcccgagatgaacataccacgaactggagatgcagagtcctcagagatgcagagacctcccccggactgcgatgacacggtcacttattcagcattgcacaagcgccaagtgggcgactatgagaacgtcattccagattttccagaagatgaggggattcattactcagagctgatccagtttggggtcggggagcggcctcaggcacaagaaaatgtggactatgtgatcctcaaacattgacactggatgggctgcagcagaggcactgggggcagcgggggccagggaagtccccgagtttccccagacaccgccacatggcttcctcctgcgcgcatgtgcgcacacacacacacacacgcacacacacacacacacactcactgcggagaaccttgtgcctggctcagagccagtctttttggtgagggtaaccccaaacctccaaaactcctgcccctgttctcttccactctccttgctacccagaaatccatctaaatacctgccctgacatgcacacctccccctgcccccaccacggccactggccatctccacccccagctgcttgtgtccctcctgggatctgctcgtcatcatttttccttcccttctccatctctctggccctctacccctgatctgacatccccactcacgaatattatgcccagtttctgcctctgagggaaagcccagaaaaggacagaaacgaagtagaaaggggcccagtcctggcctggcttctcctttggaagtgaggcattgcacggggagacgtacgtatcagcggccccttgactctggggactccgggtttgagatggacacactggtgtggattaacctgccagggagacagagctcacaataaaaatggctcagatgccacttc

SEQ ID NO: 115450 - DNA, 2642 bp, Homo sapiens
  Payload ID: 2532
  Gene Symbol: CD22
  Gene Name: CD22 molecule
  Uniprot ID: P20273
  ENST ID: ENST00000419549
  CDS Start-End: 383-2410
ggaagacacgcggaaacagaatacttggctttctctgactcaagtaaatgggtttttgagcaccctgaaaccctctacgcctgggagggggcctgcgtctggatcccctgcacctacagagccctagatggtgacctggaaagcttcatcctgttccacaatcctgagtataacaagaacacctcgaagtttgatgggacaagactctatgaaagcacaaaggatgggaaggttccttctgagcagaaaagggtgcaattcctgggagacaagaataagaactgcacactgagtatccacccggtgcacctcaatgacagtggtcagctggggctgaggatggagtccaagactgagaaatggatggaacgaatacacctcaatgtctctgtggctcctagagggggttccaatgaggcaggctgctgtcacctcgacctccttgaccatcaagtctgtcttcacccggagcgagctcaagttctccccacagtggagtcaccatgggaagattgtgacctgccagcttcaggatgcagatgggaagttcctctccaatgacacggtgcagctgaacgtgaagcacaccccgaagttggagatcaaggtcactcccagtgatgccatagtgagggagggggactctgtgaccatgacctgcgaggtcagcagcagcaacccggagtacacgacggtatcctggctcaaggatgggacctcgctgaagaagcagaatacattcacgctaaacctgcgcgaagtgaccaaggaccagagtgggaagtactgctgtcaggtctccaatgacgtgggcccgggaaggtcggaagaagtgttcctgcaagtgcagtatgccccggaaccttccacggttcagatcctccactcaccggctgtggagggaagtcaagtcgagtttctttgcatgtcactggccaatcctcttccaacaaattacacgtggtaccacaatgggaaagaaatgcagggaaggacagaggagaaagtccacatcccaaagatcctcccctggcacgctgggacttattcctgtgtggcagaaaacattcttggtactggacagaggggcccgggagctgagctggatgtccagtatcctcccaagaaggtgaccacagtgattcaaaaccccatgccgattcgagaaggagacacagtgaccctttcctgtaactacaattccagtaaccccagtgttacccggtatgaatggaaaccccatggcgcctgggaggagccatcgcttggggtgctgaagatccaaaacgttggctgggacaacacaaccatcgcctgcgcagcttgtaatagttggtgctcgtgggcctcccctgtcgccctgaatgtccagtatgccccccgagacgtgagggtccggaaaatcaagcccctttccgagattcactctggaaactcggtcagcctccaatgtgacttctcaagcagccaccccaaagaagtccagttcttctgggagaaaaatggcaggcttctggggaaagaaagccagctgaattttgactccatctccccagaagatgctgggagttacagctgctgggtgaacaactccataggacagacagcgtccaaggcctggacacttgaagtgctgtatgcacccaggaggctgcgtgtgtccatgagcccgggggaccaagtgatggaggggaagagtgcaaccctgacctgtgagagcgacgccaaccctcccgtctcccactacacctggtttgactggaataaccaaagcctcccctaccacagccagaagctgagattggagccggtgaaggtccagcactcgggtgcctactggtgccaggggaccaacagtgtgggcaagggccgttcgcctctcagcaccctcaccgtctactatagcccggagaccatcggcaggcgagtggctgtgggactcgggtcctgcctcgccatcctcatcctggcaatctgtgggctcaagctccagcgacgttggaagaggacacagagccagcaggggcttcaggagaattccagcggccagagcttctttgtgaggaataaaaaggttagaagggcccccctctctgaaggcccccactccctgggatgctacaatccaatgatggaagatggcattagctacaccaccctgcgctttcccgagatgaacataccacgaactggagatgcagagtcctcagagatgcagagacctcccccggactgcgatgacacggtcacttattcagcattgcacaagcgccaagtgggcgactatgagaacgtcattccagattttccagaagatgaggggattcattactcagagctgatccagtttggggtcggggagcggcctcaggcacaagaaaatgtggactatgtgatcctcaaacattgacactggatgggctgcagcagaggcactgggggcagcgggggccagggaagtccccgagtttccccagacaccgccacatggcttcctcctgcgcgcatgtgcgcacacacacacacacacgcacacacacacacacacactcactgcggagaaccttgtgcctggctcagagccagtctttttggtgagggtaaccccaaacctccaaaactcctgcccctgttctcttcca

SEQ ID NO: 115451 - DNA, 2698 bp, Homo sapiens
  Payload ID: 2532
  Gene Symbol: CD22
  Gene Name: CD22 molecule
  Uniprot ID: P20273
  ENST ID: ENST00000544992
  CDS Start-End: 42-2297
ggaagacacgcggaaacaggcttgcacccagacacgacaccatgcatctcctcggcccctggctcctgctcctggttctagaatacttggctttctctgactcaagtaaatgggtttttgagcaccctgaaaccctctacgcctgggagggggcctgcgtctggatcccctgcacctacagagccctagatggtgacctggaaagcttcatcctgttccacaatcctgagtataacaagaacacctcgaagtttgatgggacaagactctatgaaagcacaaaggatgggaaggttccttctgagcagaaaagggtgcaattcctgggagacaagaataagaactgcacactgagtatccacccggtgcacctcaatgacagtggtcagctggggctgaggatggagtccaagactgagaaatggatggaacgaatacacctcaatgtctctgaaaggccttttccacctcatatccagctccctccagaaattcaagagtcccaggaagtcactctgacctgcttgctgaatttctcctgctatgggtatccgatccaattgcagtggctcctagagggggttccaatgaggcaggctgctgtcacctcgacctccttgaccatcaagtctgtcttcacccggagcgagctcaagttctccccacagtggagtcaccatgggaagattgtgacctgccagcttcaggatgcagatgggaagttcctctccaatgacacggtgcagctgaacgtgaagcacaccccgaagttggagatcaaggtcactcccagtgatgccatagtgagggagggggactctgtgaccatgacctgcgaggtcagcagcagcaacccggagtacacgacggtatcctggctcaaggatgggacctcgctgaagaagcagaatacattcacgctaaacctgcgcgaagtgaccaaggaccagagtgggaagtactgctgtcaggtctccaatgacgtgggcccgggaaggtcggaagaagtgttcctgcaagtgcagtatgccccggaaccttccacggttcagatcctccactcaccggctgtggagggaagtcaagtcgagtttctttgcatgtcactggccaatcctcttccaacaaattacacgtggtaccacaatgggaaagaaatgcagggaaggacagaggagaaagtccacatcccaaagatcctcccctggcacgctgggacttattcctgtgtggcagaaaacattcttggtactggacagaggggcccgggagctgagctggatgtccagtatcctcccaagaaggtgaccacagtgattcaaaaccccatgccgattcgagaaggagacacagtgaccctttcctgtaactacaattccagtaaccccagtgttacccggtatgaatggaaaccccatggcgcctgggaggagccatcgcttggggtgctgaagatccaaaacgttggctgggacaacacaaccatcgcctgcgcagcttgtaatagttggtgctcgtgggcctcccctgtcgccctgaatgtccagtatgccccccgagacgtgagggtccggaaaatcaagcccctttccgagattcactctggaaactcggtcagcctccaatgtgacttctcaagcagccaccccaaagaagtccagttcttctgggagaaaaatggcaggcttctggggaaagaaagccagctgaattttgactccatctccccagaagatgctgggagttacagctgctgggtgaacaactccataggacagacagcgtccaaggcctggacacttgaagtgctgtatgcacccaggaggctgcgtgtgtccatgagcccgggggaccaagtgatggaggggaagagtgcaaccctgacctgtgagagcgacgccaaccctcccgtctcccactacacctggtttgactggaataaccaaagcctcccctaccacagccagaagctgagattggagccggtgaaggtccagcactcgggtgcctactggtgccaggggaccaacagtgtgggcaagggccgttcgcctctcagcaccctcaccgtctactatagcccggagaccatcggcaggcgagtggctgtgggactcgggtcctgcctcgccatcctcatcctggcaatctgtgggctcaagctccagcgacgttggaagaggacacagagccagcaggggcttcaggagaattccagcggccagagcttctttgtgaggaataaaaagagatgcagagtcctcagagatgcagagacctcccccggactgcgatgacacggtcacttattcagcattgcacaagcgccaagtgggcgactatgagaacgtcattccagattttccagaagatgaggggattcattactcagagctgatccagtttggggtcggggagcggcctcaggcacaagaaaatgtggactatgtgatcctcaaacattgacactggatgggctgcagcagaggcactgggggcagcgggggccagggaagtccccgagtttccccagacaccgccacatggcttcctcctgcgcgcatgtgcgcacacacacacacacacgcacacacacacacacacactcactgcggagaaccttgtgcctggctcagagccagtctttttggtgagggtaaccccaaacctccaaaactcctgcccctgttctcttcca

SEQ ID NO: 115452 - DNA, 3004 bp, Homo sapiens
  Payload ID: 2532
  Gene Symbol: CD22
  Gene Name: CD22 molecule
  Uniprot ID: P20273
  ENST ID: ENST00000536635
  CDS Start-End: 67-2346
agatgctgccagggtccctgaagagggaagacacgcggaaacaggcttgcacccagacacgacaccatgcatctcctcggcccctggctcctgctcctggttctagaatacttggctttctctgactcaagtaaatgggtttttgagcaccctgaaaccctctacgcctgggagggggcctgcgtctggatcccctgcacctacagagccctagatggtgacctggaaagcttcatcctgttccacaatcctgagtataacaagaacacctcgaagtttgatgggacaagactctatgaaagcacaaaggatgggaaggttccttctgagcagaaaagggtgcaattcctgggagacaagaataagaactgcacactgagtatccacccggtgcacctcaatgacagtggtcagctggggctgaggatggagtccaagactgagaaatggatggaacgaatacacctcaatgtctctgaaaggccttttccacctcatatccagctccctccagaaattcaagagtcccaggaagtcactctgacctgcttgctgaatttctcctgctatgggtatccgatccaattgcagtggctcctagagggggttccaatgaggcaggctgctgtcacctcgacctccttgaccatcaagtctgtcttcacccggagcgagctcaagttctccccacagtggagtcaccatgggaagattgtgacctgccagcttcaggatgcagatgggaagttcctctccaatgacacggtgcagctgaacgtgaagcacaccccgaagttggagatcaaggtcactcccagtgatgccatagtgagggagggggactctgtgaccatgacctgcgaggtcagcagcagcaacccggagtacacgacggtatcctggctcaaggatgggacctcgctgaagaagcagaatacattcacgctaaacctgcgcgaagtgaccaaggaccagagtgggaagtactgctgtcaggtctccaatgacgtgggcccgggaaggtcggaagaagtgttcctgcaagtgcagtatcctcccaagaaggtgaccacagtgattcaaaaccccatgccgattcgagaaggagacacagtgaccctttcctgtaactacaattccagtaaccccagtgttacccggtatgaatggaaaccccatggcgcctgggaggagccatcgcttggggtgctgaagatccaaaacgttggctgggacaacacaaccatcgcctgcgcagcttgtaatagttggtgctcgtgggcctcccctgtcgccctgaatgtccagtatgccccccgagacgtgagggtccggaaaatcaagcccctttccgagattcactctggaaactcggtcagcctccaatgtgacttctcaagcagccaccccaaagaagtccagttcttctgggagaaaaatggcaggcttctggggaaagaaagccagctgaattttgactccatctccccagaagatgctgggagttacagctgctgggtgaacaactccataggacagacagcgtccaaggcctggacacttgaagtgctgtatgcacccaggaggctgcgtgtgtccatgagcccgggggaccaagtgatggaggggaagagtgcaaccctgacctgtgagagcgacgccaaccctcccgtctcccactacacctggtttgactggaataaccaaagcctcccctaccacagccagaagctgagattggagccggtgaaggtccagcactcgggtgcctactggtgccaggggaccaacagtgtgggcaagggccgttcgcctctcagcaccctcaccgtctactatagcccggagaccatcggcaggcgagtggctgtgggactcgggtcctgcctcgccatcctcatcctggcaatctgtgggctcaagctccagcgacgttggaagaggacacagagccagcaggggcttcaggagaattccagcggccagagcttctttgtgaggaataaaaaggttagaagggcccccctctctgaaggcccccactccctgggatgctacaatccaatgatggaagatggcattagctacaccaccctgcgctttcccgagatgaacataccacgaactggagatgcagagtcctcagagatgcagagacctcccccggactgcgatgacacggtcacttattcagcattgcacaagcgccaagtgggcgactatgagaacgtcattccagattttccagaagatgaggggattcattactcagagctgatccagtttggggtcggggagcggcctcaggcacaagaaaatgtggactatgtgatcctcaaacattgacactggatgggctgcagcagaggcactgggggcagcgggggccagggaagtccccgagtttccccagacaccgccacatggcttcctcctgcgcgcatgtgcgcacacacacacacacacgcacacacacacacacacactcactgcggagaaccttgtgcctggctcagagccagtctttttggtgagggtaaccccaaacctccaaaactcctgcccctgttctcttccactctccttgctacccagaaatccatctaaatacctgccctgacatgcacacctccccctgcccccaccacggccactggccatctccacccccagctgcttgtgtccctcctgggatctgctcgtcatcatttttccttcccttctccatctctctggccctctacccctgatctgacatccccactcacgaatattatgcccagtttctgcctctgagggaaagcccagaaaaggacagaaacgaagtagaaaggggcccagtcctggcctggcttctcctttggaagtgaggcattgcacggggagacgtacgtatcagcggccccttgactctggggactccgggtttgagatggacacactggtgtggattaacctgccagggagacagagctcacaataaaaatggctcagatgccacttc

SEQ ID NO: 115453 - DNA, 603 bp, Homo sapiens
  Payload ID: 2532
  Gene Symbol: CD22
  Gene Name: CD22 molecule
  ENST ID: ENST00000600131
  CDS Start-End: 170-603
cttttgctctcagatgctgccagggtccctgaagagggaagacacgcggaaacaggggaagggtcggagctcagtgggtgagcaagaaaagccacgtggaagaagtaagcggccagatggctcaaagacaaactctcccctgctcaggcttgcacccagacacgacaccatgcatctcctcggcccctggctcctgctcctggaatacttggctttctctgactcaagtaaatgggtttttgagcaccctgaaaccctctacgcctgggagggggcctgcgtctggatcccctgcacctacagagccctagatggtgacctggaaagcttcatcctgttccacaatcctgagtataacaagaacacctcgaagtttgatgggacaagactctatgaaagcacaaaggatgggaaggttccttctgagcagaaaagggtgcaattcctgggagacaagaataagaactgcacactgagtatccacccggtgcacctcaatgacagtggtcagctggggctgaggatggagtccaagactgagaaatggatggaacgaatacacctcaatgtctctgaaaggccttttccacctcatatccagct

SEQ ID NO: 115454 - DNA, 559 bp, Homo sapiens
  Payload ID: 2532
  Gene Symbol: CD22
  Gene Name: CD22 molecule
  ENST ID: ENST00000599811
  CDS Start-End: 67-559
agatgctgccagggtccctgaagagggaagacacgcggaaacaggcttgcacccagacacgacaccatgcatctcctcggcccctggctcctgctcctggttctagaatacttggctttctctgactcaagtaaatgggtttttgagcaccctgaaaccctctacgcctgggagggggcctgcgtctggatcccctgcacctacagagccctagatggtgacctggaaagcttcatcctgttccacaatcctgagtataacaagaacacctcgaagtttgatgggacaagactctatgaaagcacaaaggatgggaaggttccttctgagcagaaaagggtgcaattcctgggagacaagaataagaactgcacactgagtatccacccggtgcacctcaatgacagtggtcagctggggctgaggatggagtccaagactgagaaatggatggaacgaatacacctcaatgtctctgatcctcccaagaaggtgaccacagtgattcaaaaccccatgccgattcgagaaggagacacagtgaccctttcctgtaact

SEQ ID NO: 115455 - DNA, 554 bp, Homo sapiens
  Payload ID: 2532
  Gene Symbol: CD22
  Gene Name: CD22 molecule
  ENST ID: ENST00000598537
  CDS Start-End: 237-554
gtccctcccggtctgccaacctcctgagtcactcctgacggagatgactgatccatccctggcccgcctcccaccctgtccctgggacagtgcctggggcaggcagctccattatcctccttgatgaaagagctcccagccagcactggccactccagagcctcctccccagatgctgccagggtccctgaagagggaagacacgcggaaacaggcttgcacccagacacgacaccatgcatctcctcggcccctggctcctgctcctggttctagaatacttggctttctctgactcaagtaaatgggtttttgagcaccctgaaaccctctacgcctgggagggggcctgcgtctggatcccctgcacctacagagccctagatggtgacctggaaagcttcatcctgttccacaatcctgagtataacaagaacacctcgaagtttgatgggacaagactctatgaaagcacaaaggatgggaaggttccttctgagcagaaaagggtgcaattcctgggagacaagaataagaactgcacactgagtatc

SEQ ID NO: 115456 - DNA, 2107 bp, Homo sapiens
  Payload ID: 2532
  Gene Symbol: CD22
  Gene Name: CD22 molecule
  Uniprot ID: P20273
  ENST ID: ENST00000594250
  CDS Start-End: 26-2038
caggcttgcacccagacacgacaccatgcatctcctcggcccctggctcctgctcctggttctagaatacttggctttctctgactcaagtaaatgggtttttgagcaccctgaaaccctctacgcctgggagggggcctgcgtctggatcccctgcacctacagagccctagatggtgacctggaaagcttcatcctgttccacaatcctgagtataacaagaacacctcgaagtttgatgggacaagactctatgaaagcacaaaggatgggaaggttccttctgagcagaaaagggtgcaattcctgggagacaagaataagaactgcacactgagtatccacccggtgcacctcaatgacagtggtcagctggggctgaggatggagtccaagactgagaaatggatggaacgaatacacctcaatgtctctgaaaggccttttccacctcatatccagctccctccagaaattcaagagtcccaggaagtcactctgacctgcttgctgaatttctcctgctatgggtatccgatccaattgcagtggctcctagagggggttccaatgaggcaggctgctgtcacctcgacctccttgaccatcaagtctgtcttcacccggagcgagctcaagttctccccacagtggagtcaccatgggaagattgtgacctgccagcttcaggatgcagatgggaagttcctctccaatgacacggtgcagctgaacgtgaagcatcctcccaagaaggtgaccacagtgattcaaaaccccatgccgattcgagaaggagacacagtgaccctttcctgtaactacaattccagtaaccccagtgttacccggtatgaatggaaaccccatggcgcctgggaggagccatcgcttggggtgctgaagatccaaaacgttggctgggacaacacaaccatcgcctgcgcagcttgtaatagttggtgctcgtgggcctcccctgtcgccctgaatgtccagtatgccccccgagacgtgagggtccggaaaatcaagcccctttccgagattcactctggaaactcggtcagcctccaatgtgacttctcaagcagccaccccaaagaagtccagttcttctgggagaaaaatggcaggcttctggggaaagaaagccagctgaattttgactccatctccccagaagatgctgggagttacagctgctgggtgaacaactccataggacagacagcgtccaaggcctggacacttgaagtgctgtatgcacccaggaggctgcgtgtgtccatgagcccgggggaccaagtgatggaggggaagagtgcaaccctgacctgtgagagcgacgccaaccctcccgtctcccactacacctggtttgactggaataaccaaagcctcccctaccacagccagaagctgagattggagccggtgaaggtccagcactcgggtgcctactggtgccaggggaccaacagtgtgggcaagggccgttcgcctctcagcaccctcaccgtctactatagcccggagaccatcggcaggcgagtggctgtgggactcgggtcctgcctcgccatcctcatcctggcaatctgtgggctcaagctccagcgacgttggaagaggacacagagccagcaggggcttcaggagaattccagcggccagagcttctttgtgaggaataaaaaggttagaagggcccccctctctgaaggcccccactccctgggatgctacaatccaatgatggaagatggcattagctacaccaccctgcgctttcccgagatgaacataccacgaactggagatgcagagtcctcagagatgcagagacctcccccggactgcgatgacacggtcacttattcagcattgcacaagcgccaagtgggcgactatgagaacgtcattccagattttccagaagatgaggggattcattactcagagctgatccagtttggggtcggggagcggcctcaggcacaagaaaatgtggactatgtgatcctcaaacattgacactggatgggctgcagcagaggcactgggggcagcgggggccagggaagtccccgagtttccccagac

SEQ ID NO: 115457 - DNA, 3060 bp, Homo sapiens
  Payload ID: 2532
  Gene Symbol: CD22
  Gene Name: CD22 molecule
  ENST ID: ENST00000601769
  CDS Start-End: 67-642
agatgctgccagggtccctgaagagggaagacacgcggaaacaggcttgcacccagacacgacaccatgcatctcctcggcccctggctcctgctcctggaatacttggctttctctgactcaagtaaatgggtttttgagcaccctgaaaccctctacgcctgggagggggcctgcgtctggatcccctgcacctacagagccctagatggtgacctggaaagcttcatcctgttccacaatcctgagtataacaagaacacctcgaagtttgatgggacaagactctatgaaagcacaaaggatgggaaggttccttctgagcagaaaagggtgcaattcctgggagacaagaataagaactgcacactgagtatccacccggtgcacctcaatgacagtggtcagctggggctgaggatggagtccaagactgagaaatggatggaacgaatacacctcaatgtctctgtggctcctagagggggttccaatgaggcaggctgctgtcacctcgacctccttgaccatcaagtctgtcttcacccggagcgagctcaagttctccccacagtggagtcaccatgggaagattgtgacctgccagcttcaggatgcagatgggaagttcctctccaatgacacggtgcagctgaacgtgaagcacaccccgaagttggagatcaaggtcactcccagtgatgccatagtgagggagggggactctgtgaccatgacctgcgaggtcagcagcagcaacccggagtacacgacggtatcctggctcaaggatgggacctcgctgaagaagcagaatacattcacgctaaacctgcgcgaagtgaccaaggaccagagtgggaagtactgctgtcaggtctccaatgacgtgggcccgggaaggtcggaagaagtgttcctgcaagtgcagtatgccccggaaccttccacggttcagatcctccactcaccggctgtggagggaagtcaagtcgagtttctttgcatgtcactggccaatcctcttccaacaaattacacgtggtaccacaatgggaaagaaatgcagggaaggacagaggagaaagtccacatcccaaagatcctcccctggcacgctgggacttattcctgtgtggcagaaaacattcttggtactggacagaggggcccgggagctgagctggatgtccagtatcctcccaagaaggtgaccacagtgattcaaaaccccatgccgattcgagaaggagacacagtgaccctttcctgtaactacaattccagtaaccccagtgttacccggtatgaatggaaaccccatggcgcctgggaggagccatcgcttggggtgctgaagatccaaaacgttggctgggacaacacaaccatcgcctgcgcagcttgtaatagttggtgctcgtgggcctcccctgtcgccctgaatgtccagtatgccccccgagacgtgagggtccggaaaatcaagcccctttccgagattcactctggaaactcggtcagcctccaatgtgacttctcaagcagccaccccaaagaagtccagttcttctgggagaaaaatggcaggcttctggggaaagaaagccagctgaattttgactccatctccccagaagatgctgggagttacagctgctgggtgaacaactccataggacagacagcgtccaaggcctggacacttgaagtgctgtatgcacccaggaggctgcgtgtgtccatgagcccgggggaccaagtgatggaggggaagagtgcaaccctgacctgtgagagcgacgccaaccctcccgtctcccactacacctggtttgactggaataaccaaagcctcccctaccacagccagaagctgagattggagccggtgaaggtccagcactcgggtgcctactggtgccaggggaccaacagtgtgggcaagggccgttcgcctctcagcaccctcaccgtctactatagcccggagaccatcggcaggcgagtggctgtgggactcgggtcctgcctcgccatcctcatcctggcaatctgtgggctcaagctccagcgacgttggaagaggacacagagccagcaggggcttcaggagaattccagcggccagagcttctttgtgaggaataaaaaggttagaagggcccccctctctgaaggcccccactccctgggatgctacaatccaatgatggaagatggcattagctacaccaccctgcgctttcccgagatgaacataccacgaactggagatgcagagtcctcagagatgcagagacctcccccggactgcgatgacacggtcacttattcagcattgcacaagcgccaagtgggcgactatgagaacgtcattccagattttccagaagatgaggggattcattactcagagctgatccagtttggggtcggggagcggcctcaggcacaagaaaatgtggactatgtgatcctcaaacattgacactggatgggctgcagcagaggcactgggggcagcgggggccagggaagtccccgagtttccccagacaccgccacatggcttcctcctgcgcgcatgtgcgcacacacacacacacacgcacacacacacacacacactcactgcggagaaccttgtgcctggctcagagccagtctttttggtgagggtaaccccaaacctccaaaactcctgcccctgttctcttccactctccttgctacccagaaatccatctaaatacctgccctgacatgcacacctccccctgcccccaccacggccactggccatctccacccccagctgcttgtgtccctcctgggatctgctcgtcatcatttttccttcccttctccatctctctggccctctacccctgatctgacatccccactcacgaatattatgcccagtttctgcctctgagggaaagcccagaaaaggacagaaacgaagtagaaaggggcccagtcctggcctggcttctcctttggaagtgaggcattgcacggggagacgtacgtatcagcggccccttgactctg

SEQ ID NO: 115458 - DNA, 567 bp, Homo sapiens
  Payload ID: 2532
  Gene Symbol: CD22
  Gene Name: CD22 molecule
  ENST ID: ENST00000599717
  CDS Start-End: 88-204
tgtacttctccttttgctctcagatgctgccagggtccctgaagagggaagacacgcggaaacaggcttgcacccagacacgacaccatgcatctcctcggcccctggctcctgctcctggtaaatgggtttttgagcaccctgaaaccctctacgcctgggagggggcctgcgtctggatcccctgcacctacagagccctagatggtgacctggaaagcttcatcctgttccacaatcctgagtataacaagaacacctcgaagtttgatgggacaagactctatgaaagcacaaaggatgggaaggttccttctgagcagaaaagggtgcaattcctgggagacaagaataagaactgcacactgagtatccacccggtgcacctcaatgacagtggtcagctggggctgaggatggagtccaagactgagaaatggatggaacgaatacacctcaatgtctctgaaaggccttttccacctcatatccagctccctccagaaattcaagagtcccaggaagtcactctgacctgcttgctgaatttctcctgctatgggtatc

SEQ ID NO: 115459 - DNA, 740 bp, Homo sapiens
  Payload ID: 2532
  Gene Symbol: CD22
  Gene Name: CD22 molecule
  ENST ID: ENST00000594349
  CDS Start-End: 1-447
gttctagaatacttggctttctctgactcaagtaaatgggtttttgagcaccctgaaaccctctacgcctgggagggggcctgcgtctggatcccctgcacctacagagccctagatggtgacctggaaagcttcatcctgttccacaatcctgagtataacaagaacacctcgaagtttgatgggacaagactctatgaaagcacaaaggatgggaaggttccttctgagcagaaaagggtgcaattcctgggagacaagaataagaactgcacactgagtatccacccggtgcacctcaatgacagtggtcagctggggctgaggatggagtccaagactgagaaatggatggaacgaatacacctcaatgtctctgtggagtcaccatgggaagattgtgacctgccagcttcaggatgcagatgggaagttcctctccaatgacacggtgcagctgaacgtgaagcacaccccgaagttggagatcaaggtcactcccagtgatgccatagtgagggagggggactctgtgaccatgacctgcgaggtcagcagcagcaacccggagtacacgacggtatcctggctcaaggatgggacctcgctgaagaagcagaatacattcacgctaaacctgcgcgaagtgaccaaggaccagagtgggaagtactgctgtcaggtctccaatgacgtgggcccgggaaggtcggaagaagtgttcctgcaagtgcagtatg

SEQ ID NO: 115460 - DNA, 542 bp, Homo sapiens
  Payload ID: 2532
  Gene Symbol: CD22
  Gene Name: CD22 molecule
  ENST ID: ENST00000600424
  CDS Start-End: 67-542
agatgctgccagggtccctgaagagggaagacacgcggaaacaggcttgcacccagacacgacaccatgcatctcctcggcccctggctcctgctcctggaatacttggctttctctgactcaagtaaatgggtttttgagcaccctgaaaccctctacgcctgggagggggcctgcgtctggatcccctgcacctacagagccctagatggtgacctggaaagcttcatcctgttccacaatcctgagtataacaagaacacctcgaagtttgatgggacaagactctatgaaagcacaaaggatgggaaggttccttctgagcagaaaagggtgcaattcctgggagacaagaataagaactgcacactgagtatccacccggtgcacctcaatgacagtggtcagctggggctgaggatggagtccaagactgagaaatggatggaacgaatacacctcaatgtctctgatcctcccaagaaggtgaccacagtgattcaaaaccccatgccgattcgagaaggagacacagtgaccct

SEQ ID NO: 115461 - DNA, 831 bp, Homo sapiens
  Payload ID: 2532
  Gene Symbol: CD22
  Gene Name: CD22 molecule
  ENST ID: ENST00000593867
  CDS Start-End: 155-831
agatgctgccagggtccctgaagagggaagacacgcggaaacagatacccagcagcctttggcatgagccatgtggcccgaggagataaacagacagagagaggaacattgatgcgtgtgaaatgttggcaggcttgcacccagacacgacaccatgcatctcctcggcccctggctcctgctcctggttctagaatacttggctttctctgactcaagtaaatgggtttttgagcaccctgaaaccctctacgcctgggagggggcctgcgtctggatcccctgcacctacagagccctagatggtgacctggaaagcttcatcctgttccacaatcctgagtataacaagaacacctcgaagtttgatgggacaagactctatgaaagcacaaaggatgggaaggttccttctgagcagaaaagggtgcaattcctgggagacaagaataagaactgcacactgagtatccacccggtgcacctcaatgacagtggtcagctggggctgaggatggagtccaagactgagaaatggatggaacgaatacacctcaatgtctctgaaaggccttttccacctcatatccagctccctccagaaattcaagagtcccaggaagtcactctgacctgcttgctgaatttctcctgctatgggtatccgatccaattgcagtggctcctagagggggttccaatgaggcaggctgctgtcacctcgacctccttgaccatcaagtctgtcttcacccggagcgagctcaagttctccccacagtggagtcaccatgggaagattgtgacctgccagcttcaggatgcagatgg

SEQ ID NO: 115462 - DNA, 558 bp, Homo sapiens
  Payload ID: 2532
  Gene Symbol: CD22
  Gene Name: CD22 molecule
  ENST ID: ENST00000595780
  CDS Start-End: 159-558
agatgctgccagggtccctgaagagggaagacacgcggaaacaggggaagggtcggagctcagtgggtgagcaagaaaagccacgtggaagaagtaagcggccagatggctcaaagacaaactctcccctgctcaggcttgcacccagacacgacaccatgcatctcctcggcccctggctcctgctcctggttctagaatacttggctttctctgactcaagtaaatgggtttttgagcaccctgaaaccctctacgcctgggagggggcctgcgtctggatcccctgcacctacagagccctagatggtgacctggaaagcttcatcctgttccacaatcctgagtataacaagaacacctcgaagtttgatgggacaagactctatgaaagcacaaaggatgggaaggttccttctgagcagaaaagggtgcaattcctgggagacaagaataagaactgcacactgagtatccacccggtgcacctcaatgacagtggtcagctggggctgaggatggagtccaagactgagaaatggatggaacgaatacacc

SEQ ID NO: 115463 - DNA, 592 bp, Homo sapiens
  Payload ID: 2532
  Gene Symbol: CD22
  Gene Name: CD22 molecule
  ENST ID: ENST00000597916
  CDS Start-End: 180-592
agatgctgccagggtccctgaagagggaagacacgcggaaacagacccggtcctcccggatccaggggaagggtcggagctcagtgggtgagcaagaaaagccacgtggaagaagtaagcggccagatggctcaaagacaaactctcccctgctcaggcttgcacccagacacgacaccatgcatctcctcggcccctggctcctgctcctggaatacttggctttctctgactcaagtaaatgggtttttgagcaccctgaaaccctctacgcctgggagggggcctgcgtctggatcccctgcacctacagagccctagatggtgacctggaaagcttcatcctgttccacaatcctgagtataacaagaacacctcgaagtttgatgggacaagactctatgaaagcacaaaggatgggaaggttccttctgagcagaaaagggtgcaattcctgggagacaagaataagaactgcacactgagtatccacccggtgcacctcaatgacagtggtcagctggggctgaggatggagtccaagactgagaaatggatggaacgaatacacctcaatgtctctgaaaggcc

SEQ ID NO: 115464 - DNA, 954 bp, Homo sapiens
  Payload ID: 2532
  Gene Symbol: CD22
  Gene Name: CD22 molecule
  ENST ID: ENST00000594125
  CDS Start-End: 1-438
aatcctcttccaacaaattacacgtggtaccacaatgggaaagaaatgcagggaaggacagaggagaaagtccacatcccaaagatcctcccctggcacgctgggacttattcctgtgtggcagaaaacattcttggtactggacagaggggcccgggagctgagctggatgtccagtatcctcccaagaaggtgaccacagtgattcaaaaccccatgccgattcgagaaggagacacagtgaccctttcctgtaactacaattccagtaaccccagtgttacccggtatgaatggaaaccccatggcgcctgggaggagccatcgcttggggtgctgaagatccaaaacgttggctgggacaacacaaccatcgcctgcgcagcttgtaatagttggtgctcgtgggcctcccctgtcgccctgaatgtccagtaagatgctgggagttacagctgctgggtgaacaactccataggacagacagcgtccaaggcctggacacttgaagtgctgtatgcacccaggaggctgcgtgtgtccatgagcccgggggaccaagtgatggaggggaagagtgcaaccctgacctgtgagagcgacgccaaccctcccgtctcccactacacctggtttgactggaataaccaaagcctcccctaccacagccagaagctgagattggagccggtgaaggtccagcactcgggtgcctactggtgccaggggaccaacagtgtgggcaagggccgttcgcctctcagcaccctcaccgtctactatagcccggagaccatcggcaggcgagtggctgtgggactcgggtcctgcctcgccatcctcatcctggcaatctgtgggctcaagctccagcgacgttggaagaggacacagagccagcaggggcttcaggagaattccagcggccagagcttctttgtgaggaataaaaag

SEQ ID NO: 115465 - DNA, 609 bp, Homo sapiens
  Payload ID: 2532
  Gene Symbol: CD22
  Gene Name: CD22 molecule
  ENST ID: ENST00000613136
  CDS Start-End: 1-462
catatccagctccctccagaaattcaagagtcccaggaagtcactctgacctgcttgctgaatttctcctgctatgggtatccgatccaattgcagtggctcctagagggggttccaatgaggcaggctgctgtcacctcgacctccttgaccatcaagtctgtcttcacccggagcgagctcaagttctccccacagtggagtcaccatgggaagattgtgacctgccagcttcaggatgcagatgggaagttcctctccaatgacacggtgcagctgaacgtgaagcgtgagtctccccggcatgcctgtgggaagggcaaggtctgtgtcaccttctccccagccccgcagggggcatgcacccagggcagggggaagcctgcacagacggcggcatcctccagccctggtcacgccgccttgtcagccctggtgtttcgggaaaaagatttgctctagcctaacagaataaaatggtccatcctcaagccatgacatgaattggggattatctggttaggtctttttgttcccctcttggtggggatttttttcgcatcattatcttgtgcctcattcattcaataaatacgtatcatgaaccta

SEQ ID NO: 115466 - DNA, 12319 bp, Homo sapiens
  Payload ID: 2533
  Gene Symbol: CD226
  Gene Name: CD226 molecule
  Uniprot ID: Q15762
  ENST ID: ENST00000280200
  CDS Start-End: 270-1280
gctatctgaggaagttctggtagagagaagagctcaagagcatgggcagagtcagctcctgagtgggctgaacgctcccctcagctcctgcagtgctaattaagggagggagcagcggggagcttgcagtgaccaagagggtgttgaggctaggaggccacgataaacaggatacgataaaagtccttaaccaagacgcagatgggaagaagcgttagagcgagcagcactcacatctcaagaaccagcctttcaaacagtttccagagatggattatcctactttacttttggctcttcttcatgtatacagagctctatgtgaagaggtgctttggcatacatcagttccctttgccgagaacatgtctctagaatgtgtgtatccatcaatgggcatcttaacacaggtggagtggttcaagatcgggacccagcaggattccatagccattttcagccctactcatggcatggtcataaggaagccctatgctgagagggtttactttttgaattcaacgatggcttccaataacatgactcttttctttcggaatgcctctgaagatgatgttggctactattcctgctctctttacacttacccacagggaacttggcagaaggtgatacaggtggttcagtcagatagttttgaggcagctgtgccatcaaatagccacattgtttcggaacctggaaagaatgtcacactcacttgtcagcctcagatgacgtggcctgtgcaggcagtgaggtgggaaaagatccagccccgtcagatcgacctcttaacttactgcaacttggtccatggcagaaatttcacctccaagttcccaagacaaatagtgagcaactgcagccacggaaggtggagcgtcatcgtcatccccgatgtcacagtctcagactcggggctttaccgctgctacttgcaggccagcgcaggagaaaacgaaaccttcgtgatgagattgactgtagccgagggtaaaaccgataaccaatataccctctttgtggctggagggacagttttattgttgttgtttgttatctcaattaccaccatcattgtcattttccttaacagaaggagaaggagagagagaagagatctatttacagagtcctgggatacacagaaggcacccaataactatagaagtcccatctctaccagtcaacctaccaatcaatccatggatgatacaagagaggatatttatgtcaactatccaaccttctctcgcagaccaaagactagagtttaagcttattcttgacatgagtgcattagtaatgactcttatgtactcatgcatggatctttatgcaatttttttccactacccaaggtctaccttagatactagttgtctgaattgagttactttgataggaaaaatacttcattacctaaaatcatttttcatagaactgtttcagaaaacctgactctaactggtttatatacaaaagaaaacttactgtatcatataacagaatgatccaggggagattaagctttgggcaagggctatttaccagggcttaaatgttgtgtctagaattaagtatgggcataaactggcttctgaatccctttccagagtgttggatccatttccctggtcttggcctcactctcatgcaggctttcctcttgtgttggcaagatggctgccaactcttggcaattcatacatccttgtttctgtctggtagagagtttgcttctcaaatggagcaaacaaatttgattattttttcattgttaaataggcaacatgaccagaaaggatggaatggcttaagtaaactaagggttcacttctagagctgagaagcagggtcaaagcacaatactgggcaattcagagcatggttagaagaggaaaggggagtctcaaagctggagagtttaccaacaaatattgactgcagtgattaaccaagacatttttgttaactaaaaagtgaaatatgggatggattctagaaatggggtatctctgtccatacttctagaatccactctatcagcatagtccagaagaatacctggcagtagaagaaatgaatattcaagaggaagataaatgcgagagggcaatcctttactattctcatatttatttatctctcattctgtatagaattcttgccgccatcccaggtctagccttaggagcaaatgtagtagatagtcgaataataaataacttaatgttttggacatattttgtctacttttgagaattatttttaatatgtaaattctctcaaaagggtcaggcacctagttattattttttaatgattatgtgaaagttgaatataatataccactaaaagtgacagttgaaagtggtggcataggacggtagggtagaaatttgggagggaaaaaagaaattgggagggtacaggcaacaggagaaaggaatcaaaccacagaaaaatacaaagggaaacttctgcttcactattcagacaaagacagccctaatgacatcaccaacagtcaaagcaattagagaccatacctaatattgtttaaattctagatgtaggctaacaatgaaaagtatttgccaaactgaataaaactgtcatggttaccttgaaaggacaatggttattgttaaatatagtgatcattcatgtctaaaagattcattatttatctctaaagatttctaaagaccaccatctagaaaagattcattatgaaggctgtatttaaatatcaaagttgtggacttcatgataatcttaaataaagcaaatccaaattctcctgttgcctagacagattctaagatgtaatttacacttttaagctaattagtgagtattttatgattttagccttaaacaccatgtatgccaaataatgcacttgttttgtgaattacagaaatggtaagtgcccacatttctgtgaattataaaatttgtgagtttcttttaacccttttcaggagtgaaaaaataaaaacgaccatttcctggttgtgcttaagtatatgcaagaagggtaaactctcatttttattatgtttgcttaaagatctttttatacctggattcatgaaatgtttccacaaatatattagtgtaacaaacttgaaaggcagtttacaagaaagcactctactatcagatcaatcaaagattctgtgagtgaatttattggtttgcatggtgaagcaagcttagcatcaattaaaaggtaaataatttcttttctgaatggtaaagacaatcaaaatattactttctggaaaactccaataaccaaattctcaatgattagtgtatgtgagcaggaaaacatttttacagttgtagtatggggaaatataaatccaattttaagagagaaaattatgactgggtgtggaagggacagtatagtcagataccattgtcatggtggtttttactgggaacttcatgaaagacttttgtagcaaaccactgcagtattgcaaagcctccagaacatttggaacttgtctctttttccttgtgtgtgtttgtgtttttggtctctcattcaaaatattgatgagaactatttactctgtcctttcttctctatatattcttcctctacagagtgtagggttttttcaggaatttggagccatctgaagtcctcccaaaaattctctgacgtcttctgatgctcctgttataccctcaggggtaatgcttgtgaaattccattcattcattttctttctctggacatctttacttaccaaagcactttcattgtcatctttttaacatcattcttaattcgtgatagttttgggactctccctagtgtatgtttctccccctctactcttttgcacctatgattctgattgttactaagaaagcagatgaaaaacagatccacagaataaacgatcagaattccagtaaattctattttaaatacagatactttttacaagttgctgctttggaagcaaaatgcttcttaagttttacatatatatatatatatatacatatatatatacacatataatttatatcgatggataatacattaagaatctatgcttcctttgaatgccattaatatttatgttaaagtaaccaatgaaaggaaattactttgttataataagataggaagacttgttaatggagtacacagttttgtcagggaaagaacacatcttattgaactatgatgactatgcattgactatattattataagagataccttcaaactttatttaaagaactttaggtataatatgttgagaaaataaaatagaaatttcatttacttgtaatcatgcttaaaatgggaggcaggtaggtgaagatataatttttagtaaaaactccaatttatgttttaagtaattcagtgtattactaaaatactatatatataaacttaaaatacatgggttatcaatttaaaagacaaagtaagtaaaaatacttttagtaggcattcgtggattgtgaacatccaagttatattggtttgtatagaatggcattaagtaaaaattacagctgtataacagtagttttctaaattgagagagtccacattgtaattagagatcactgtgaccaaaatgcttctccttgatttataatgatgtactgtattttgtactgcttatatgaaatttcagcaagattgacgatattataaagatgcttataaagtgtaagtggagacgctaaattgtgagtacaaagtttctttttcacaacagtgataagaaaatatctttaaaaaatataagacaatataaacatgtcatcattagtttagctactattaaaatgtaacatctagaaagtactgatctccaccttcagacttctgtataagtatattttttcactgatctgttcattagagttcttccagccaagactctgggctcttaaaacatgtatctgaaaactaaaaacaagttaatttttttaaaagcttctctatttctagtgattcaataggtagaaaaatagcttctagaattaactgcaatgctttctaaggaaattttataaatcctcaaggtcggtttacacatatttttccagattcagagcactaactatcttgtaagatgtaagaaaaggtccatttggaagtatgagtaataaatgtctgggataattctggtttatttcgtattatccttgttagaataagttatatggtcaacctgttcagaacactttttctagtgttagtgtgtacttttggatttttggttcttgtagggtatagaaatattttcctttgtcttgtattctgttgttttgaatgaataaaacacaatgtttcacgatcactactttcatttgccatggagaaatagcagggaaaaatttctacagaataaaattaactgatgaattacatgcagaaaaaattcaaatcaatgatacattgtaatttttatctcaatgcaatgttctttgtattttattttattattatttttttgagacggagtttcacttttgttgcccgggctggagtgcaatggcacaatctcggctcaccacaacctctgcctcccggattcaagtgattctcctgcctcagcctcctgaatagctgggattacaggcatatgccaacatgcctggctaattttgtatttttagtggagacggggtttctccacgttggtcagacttgtcttgaactctggacctcaggtgatccacctgcctcagcctcctaaattgctgggattacaggcatgagcgaccactcctggccttgttctttgtattttataagtgcatgtagtgcaaagggtcaaagggctttacaggttttttgtttgtttgtttttgtttttcccgaaacatagtagtcccttgcccttcctcatttttgttaccttgagacaacaaattttactacttctaactcattattttatttatgttcacttttctgaatagcatgcttatgacactaatactttttttttcaattttagacattcattattcatttagatgtctttctctccccaaactcaccacataaaatactcttctcatgtctctttcagaaatatttgtattaaaatatgattatatcaatatttggcatttatttcttatgaccttgccagtactcttagttaaactacatggtaaaaatgattttgctttccctcctacataactttttttccacctagagctaataattgtcattctggggactgactttttctgtatttaccataaattgacctgaaactcccctgtgatgcagcaggaattctaccaacgtcaacttccttagaaagactccattagaagcttgacttggggctagaaggagaggcacacaactgccatcctggtgtctcccttcatccagaaaaagggggaggaatacatgaaacctagaatccactctaaaacattttccagaacaaaaggacatgtgtttccgtgttgtaaatgtttaacgagtgcccataacaaggaataataagtctattatgtttgcttttgtgtctgtaaaagttgggggtattggttgtaagcacgaaaacagatactgactgttgaagaaaaaaaaaaatacgaggtcaggagtttgagaccaacttggccaatatggtgaaaccctgtcttagtaaaaatagaaaaattagccaggcctggtggcacgcacctgtagtcccagctacttgggaggctgaggcagaagaatcgcttgaacccgggaggcagaggttgcagtgagccaagatcgcaccactgcactccaccctgggcaacagagcgagactccgtctcaaaaaaaaaaaaaaaaaaaaaaaaaaaaagttaagtatttgaacataggggtggctcatagaattcccaggacacccgatggagtaggcttgcaaaacacaacatgtggcaactccagtgggaaacgaggcaggaaacactcgtttcctgcagaaagcaacaatttgggcttcgataccctccctagaacacagggcagtgaatctgagcagcatcagtaccccacgttcggatgagtcctgagcccctatttttattcactgacttattccaaaatcagtgtctcttaaatatatctggaaggcagcagcttgtatctcccccttcagcttccatagtggcagtcagggtacaacttactttccaaacagaacacactgcgacattccctccaggctcgttgaagaacttcaactgacaaatgtccctcctcgaccagatgatagttttcttaaaggcagggtttaatatacccttttataaatgtttcaaggccctgtgtaatacctgagtttattccagatgtaactaaatatatccaagattgttttaaaataaattgctgaaaaaacaaataaatacagttagtatctatatcaatattctcagttggcagttttgcaataatggccgatagttcatttttagtaacactattgacattgcatttggatattagggtttactaatcatccgcatgtatacattgcatatttttctagactttaactttattcaaatctattgatttttaaacctgcaacttatgtctagacacaggtatacctttacaagaactaccattttttttggtaacatactacctccaaaatttcaagtaagaagttgatttttgtccatttttaaatggaaaacttgtaatcaaaatgccacaaaattatactgtgtatcatttgacctatagaaaccaatattattacaggaagaaagcagagccaatcttctacctgtggtcaaataagtggaggccctttctagactaagttctcatgagtttaaaataccaagcataagttctccaaattcctgaaaaggaagccttgtgttgtattgcccagccatatttgtaagacataaaaataaaacttgagaagaagctatgataacttactttcttcattcttcaaaatttacataatctcaactgattttatgtttttatgaaaatgcattcttaagatatatccttattcaatcatgtattcattacatcctttatgccaggtatccaaaagtacttacagtgactaagaccattattctttgatcagctgcctgagtaagactttgagctctccaatatactctcagtgatactaagttttctgagtaacagctttggatgtggcttcagttgagctgatttatcccacactttatttttatcgtataatggtcctcagaagcaaattttgattttagctcacataaaaaatgtacaaagaaatgtaatggctcagtagcttctagagatagagattactcttctaacctttctgtaattttgtatgtctattttataattctttcaatgtctaatgaatagctatctttttttgagacggagtctcgctctgtcgcccaggctggagtgcagtggtgcgacctcggctcaccgcaagctgcgtcttccaggttcacgccattctcctgcctcagcctcccgagtagctgggacttcaggcgcccaccaccatgcccagctaatttttttgtatttttagtagagacggggtttcaccgtgttagccagggtggtctcgatctcctgacctcgtgatccgcccgcctcggcctcccaacgtgctgggattacaggagtgagccaccgcgcccggcctccttagtttcttaaggtggaagcctagattattgattttatatgttgttttcttttccaatagtggcacttaatgctataaatttcactttgttccacaagttttggtaagctctatttttattttcatttagtccaaaatattttaaaatttcttttgatatttcttctttgagccatgaattatttacaatgtgttgtttaatctctatatattttgggatttttctactttatatctcttacagatttctaacttaatttcatcatgttttaaaaacattctttgtataatttctattcttttaaatttttcaggtgtattttatggcccagaatatggtctatcttgtagaatgtttcatgtgatcttaagaagaatgttcattctgctgttgagtgtaatattctacaaatgtccattagattaaactgattgataccaccgttcagattatctatatcctttctgattttccctcttcttgatctatcacatactgacagatcaagtgatcaagtctcgttaaagactgcaagtaaaatagtggatttttctatttctccttgcagttttgttagtttttgtctcatgtatcttgatactcttgttagtacatatactttcagaatcgttaggttttcttggagaattgacccctttaccacatgtaatgtcccttttattcttgataatctttcttgttctgtctgctttttctgatattaacataactttcagttttttaaaaaattaacattagcatctcacatctttatccttttaattttaaattatctaaatatttatatttaatgtgcctttcttatagacaatgtatagttgcgtctatttgtaatttccccacttttcttacttaaaaatgttgtagatatataggagttgtatatatttggggggtacatgtgatgttttgatacctgtatacaatatgtaatgatcatattgggtaatcgtgatatctgtcacctctaacattcatcttttttgtgtgtttaaacccaccacttctaattggtacatttagattattcaaatttaagtgattattgatatagttggattaatatctactatgtttgtaacttttctatccttgcactcgttctttcttttttatcctcctttttctgtgttctctgattttaactggggtttttacatgatttaattttctctcgtggcatatctttcattgatcaacctaggtttttctccttttcccctcttttttttggtatttattctatttagtgttatctgagctacctgagttggtgtctatcactaattttggcaagttcccagacgttattacttctaacattcttttgctccattctttcttcttcttcaattattccatagtcttgaatattctgggtttttcccactctttgaattttagtttgaaaagtttctattggcctagcttcaaagtcattcattcttccttcggggttccaagtcaactgataattgcatcaaagatatccttcctttctattactatgttttttattgctaccatttcttttttattccttcttagtgtttccatctttcttcttacattatccatctgttgtctatttttttcatgagagctcttaacatattaatgataagttccatgtctgataattctgacacgtgtcatgtctctatctggttccaatgattgctttatctcttcagaccatgacttttcttgccttttgacgttctttgacattttttttgaattttttgttgcaagccagatctggtgtgttatgtaataggaacaggtaaataagtctttagcttgcagacttatcttaatctgactaactattagactgtgtttaaagtctgttataaccataggtgctaaatttcttcaaattcctctagtgtctttgttttgtttgttcatgtgtttttccccttcttgagttcaggcttccctaagtgctcctcttcagagagactttctgtctttcagctctttcctctgcaattcactgttactatactggagccctgttggtgtagtactaagctgtgggaaaggagagtgctctgtaatcttacagtgaaatctcagtcttttagtgggtctgtgtctgggacattcacagagcttctccagtggtattgcttcctcatcctcaactctctttcctggctgcagcattcccaatgtatttctttgaaggcctgccccctgttgactgttattttccctctttccttaagtgggacagggagacttcaggggctgggatgaggtttgggaattgtgcttggcagagtcctttccatctttgttaccaagaaggttcatggcttatttctcaatggatgtccctctctatctgttgccagagccacgaggaaatttttcttggatcctcataatgagaaccttggagtttcctactggaaaagcccttgaatgtgtggagtgcctcaagagcacagcccccatgggtttcttgctcacaccagtccacaaacagatgccagcaattcacccaacttaccatataaaggctcatactagtttatggctccagtgctttgactccagataaatggctattggttgcgtatctctctggatgtatctgtatctccagattttggggtggcagtttgctcaggaccttggttctctaataggtctaataagaaaagtcattgattttcagctttccaactttccagctttgtcttgttataagcatggcagcaacatcttccatgccttaacatgatgacactaaaggcagaagtcgatctccatgtataaacattttaacacatatgttttttgttatcgtggtttctgacctgtctctttgccctgactttctgatactgcactagggttcctgttgctggactccattccatatgacttgctctcgtctaggctgctctttggctcatctttataaatcatgatccaaaatgaagcacatatttattttttaaataaatatgaaatgaagtatagacatcaaactgaagatgagtagatcatactgagtttcactgtctgtgcttggatcaacatcaggccttatacaaatattcaagtccagaggcaaaaggtaataaggaaaatttgtagcacaagccacaaggagataacatgtcaagtctatgcgattggaaataaactaaagatgaactgctggggatgctcactcatcacagagctcagtctaaagcaccagatttcacaagcattttttgggggaaattctgttaaaatgaaatatgagtcacatggtggtgtttcactcatcatatgtgttcaatattaattcattttaaggtttagttgcacaaaaggtaaatgagaattagaagactccatgggtaagaggagccacagaagtaaagcattgtcaagggttctatgtctatatatttagatattaggcttctgagaaaaaaacacaataggaaggaagatgaacacaacagagggcagaaggtctatacgtcctgaggccttttatgcaacgtttgtttgtggaatgttttttaagaatgtgtgagagtcattttaatgtgaaataaagacctacgtctac

SEQ ID NO: 115467 - DNA, 1458 bp, Homo sapiens
  Payload ID: 2533
  Gene Symbol: CD226
  Gene Name: CD226 molecule
  Uniprot ID: Q15762
  ENST ID: ENST00000582621
  CDS Start-End: 448-1458
atgcatgcaccacctttcacttattatttatatttttacatctttattttagtttctgcctcctccacatagaatgtaagttctatcatggcaatatttttttttttttgtattattgtatcctcattgcctacagctgagttaggcacagagaatgcatgcagcacatgtttgttgaatgaatgactccttgtagaaaatgaaagcccgaaaataagccgactggttccccgagagagaagaaactcaaatctgcccatcctcataaaggagcaaacctgtcttttaagctaaggcctttttcctgtgttcatacttcagaaaaagaagacacgactgataacatctgagaggaaggaaactgcattgtgctggggatctgcatgtcacattataaaaagcaatttttttttttaatagaaccagcctttcaaacagtttccagagatggattatcctactttacttttggctcttcttcatgtatacagagctctatgtgaagaggtgctttggcatacatcagttccctttgccgagaacatgtctctagaatgtgtgtatccatcaatgggcatcttaacacaggtggagtggttcaagatcgggacccagcaggattccatagccattttcagccctactcatggcatggtcataaggaagccctatgctgagagggtttactttttgaattcaacgatggcttccaataacatgactcttttctttcggaatgcctctgaagatgatgttggctactattcctgctctctttacacttacccacagggaacttggcagaaggtgatacaggtggttcagtcagatagttttgaggcagctgtgccatcaaatagccacattgtttcggaacctggaaagaatgtcacactcacttgtcagcctcagatgacgtggcctgtgcaggcagtgaggtgggaaaagatccagccccgtcagatcgacctcttaacttactgcaacttggtccatggcagaaatttcacctccaagttcccaagacaaatagtgagcaactgcagccacggaaggtggagcgtcatcgtcatccccgatgtcacagtctcagactcggggctttaccgctgctacttgcaggccagcgcaggagaaaacgaaaccttcgtgatgagattgactgtagccgagggtaaaaccgataaccaatataccctctttgtggctggagggacagttttattgttgttgtttgttatctcaattaccaccatcattgtcattttccttaacagaaggagaaggagagagagaagagatctatttacagagtcctgggatacacagaaggcacccaataactatagaagtcccatctctaccagtcaacctaccaatcaatccatggatgatacaagagaggatatttatgtcaactatccaaccttctctcgcagaccaaagactagagtttaa

SEQ ID NO: 115468 - DNA, 1009 bp, Homo sapiens
  Payload ID: 2533
  Gene Symbol: CD226
  Gene Name: CD226 molecule
  ENST ID: ENST00000577287
  CDS Start-End: 265-810
acagtttccagagatggattatcctactttacttttggctcttcttcatgtatacagagggaacttggcagaaggtgatacaggtggttcagtcaggacaaccaattgaaaacagctcaacctttcaggatagaggatggagctaacctgtagagaactaaatgatggttgttatgcaaagatagttttgaggcagctgtgccatcaaatagccacattgtttcggaacctggaaagaatgtcacactcacttgtcagcctcagatgacgtggcctgtgcaggcagtgaggtgggaaaagatccagccccgtcagatcgacctcttaacttactgcaacttggtccatggcagaaatttcacctccaagttcccaagacaaatagtgagcaactgcagccacggaaggtggagcgtcatcgtcatccccgatgtcacagtctcagactcggggctttaccgctgctacttgcaggccagcgcaggagaaaacgaaaccttcgtgatgagattgactgtagccgagggtaaaaccgataaccaatataccctctttgtggctggagggacagttttattgttgttgtttgttatctcaattaccaccatcattgtcattttccttaacagaaggagaaggagagagagaagagatctatttacagagtcctgggatacacagaaggcacccaataactatagaagtcccatctctaccagtcaacctaccaatcaatccatggatgatacaagagaggatatttatgtcaactatccaaccttctctcgcagaccaaagactagagtttaagcttattcttgacatgagtgcattagtaatgactcttatgtactcatgcatggatctttatgcaatttttttccactacccaaggtctaccttagatactagttgtctgaattgagttactttgataggaaaaatacttcattacctaaaatcatttttcatagaactgtttcagaaaacctgactctaactggtttat

SEQ ID NO: 115469 - DNA, 474 bp, Homo sapiens
  Payload ID: 2533
  Gene Symbol: CD226
  Gene Name: CD226 molecule
  ENST ID: ENST00000578928
  CDS Start-End: 1-114
atcgtcatccccgatgtcacagtctcagactcggggctttaccgctgctacttgcaggccagcgcaggagaaaacgaaaccttcgtgatgagattgactgtagccgagggttaaatggaagctgatcggcgttcacatggaatcctcctcacgtagctcagatggatggccacagggagcaacattgtcagcaacaaggaaacgctcaccagaaagacaggattgttcgctgttagtgtatagaaacactactgacaggccataatgaataatgagattgaaggagtaataaaagtcttccaccaaagaaaagcccaggacctagtggaatcactgccaacctttgcctatcagtaataccagtttcacttaaactatttcaaaaaattgaagaggagataatacttccaaacctactctatgagacatcagagctccaggcctttggactatgggacctacaccattggcttt

SEQ ID NO: 115470 - DNA, 930 bp, Homo sapiens
  Payload ID: 2533
  Gene Symbol: CD226
  Gene Name: CD226 molecule
  ENST ID: ENST00000580335
  CDS Start-End: 549-930
tagaacaaaggagaagtgcgtcctttcaaattatagattctttgggggaaaagagggacagaactttatctgagtttggaatgagtctgagtagctgcaatagtaaagttgcttccagaagcaggtaaacttgacttcaaaaaaccccgcttcatgaaatattagtgattcacttcagttgctatctgaggaagttctggtagagagaagagctcaagagcatgggcagagtcagctcctgagtgggctgaacgctcccctcagctcctgcagtgctaattaagggagggagcagcggggagcttgcagtgaccaagagggtgttgaggctaggaggccacgataaacaggatacgataaaagtccttaaccaagacgcagatgggaagaagcgttagagcgagcagcactcacatctcaagaaaaagaagacacgactgataacatctgagaggaaggaaactgcattgtgctggggatctgcatgtcacattataaaaagcaatttttttttttaatagaaccagcctttcaaacagtttccagagatggattatcctactttacttttggctcttcttcatgtatacagagctctatgtgaagaggtgctttggcatacatcagttccctttgccgagaacatgtctctagaatgtgtgtatccatcaatgggcatcttaacacaggtggagtggttcaagatcgggacccagcaggattccatagccattttcagccctactcatggcatggtcataaggaagccctatgctgagagggtttactttttgaattcaacgatggcttccaataacatgactcttttctttcggaatgcctctgaagatgatgttggctactattcctgctctctttacacttacccacagggaacttggcagaaggtgatacaggtggttcagtcag

SEQ ID NO: 115471 - DNA, 1168 bp, Homo sapiens
  Payload ID: 2533
  Gene Symbol: CD226
  Gene Name: CD226 molecule
  ENST ID: ENST00000579496
  CDS Start-End: 339-1168
tcatttagaaaaattcccaaagaagaacttagcacttacccgggcctgatgcttgaggtctggagtccttaaggtgtgtgtgtaagtacttatttccttgaaaccttgagaccctcaagagagggggactaaaaacagtggaggaagaaaagaacagtggccaagggagtcgtgggtgaagtttgctgggcccttggcaatgctaaaaccagaaaaagaagacacgactgataacatctgagaggaaggaaactgcattgtgctggggatctgcatgtcacattataaaaagcaatttttttttttaatagaaccagcctttcaaacagtttccagagatggattatcctactttacttttggctcttcttcatgtatacagagctctatgtgaagaggtgctttggcatacatcagttccctttgccgagaacatgtctctagaatgtgtgtatccatcaatgggcatcttaacacaggtggagtggttcaagatcgggacccagcaggattccatagccattttcagccctactcatggcatggtcataaggaagccctatgctgagagggtttactttttgaattcaacgatggcttccaataacatgactcttttctttcggaatgcctctgaagatgatgttggctactattcctgctctctttacacttacccacagggaacttggcagaaggtgatacaggtggttcagtcagatagttttgaggcagctgtgccatcaaatagccacattgtttcggaacctggaaagaatgtcacactcacttgtcagcctcagatgacgtggcctgtgcaggcagtgaggtgggaaaagatccagccccgtcagatcgacctcttaacttactgcaacttggtccatggcagaaatttcacctccaagttcccaagacaaatagtgagcaactgcagccacggaaggtggagcgtcatcgtcatccccgatgtcacagtctcagactcggggctttaccgctgctacttgcaggccagcgcaggagaaaacgaaaccttcgtgatgagattgactgtagccgagggtaaaaccgataaccaatataccctctttgtggctggagggacagttttattgttgttgtttgttatctcaattaccaccatcattgtcattttccttaacag

SEQ ID NO: 115472 - DNA, 2157 bp, Homo sapiens
  Payload ID: 2533
  Gene Symbol: CD226
  Gene Name: CD226 molecule
  ENST ID: ENST00000581982
  CDS Start-End: 254-799
cgctcccctcagctcctgcagtgctaattaagggagggagcagcggggagcttgcagtgaccaagagggtgttgaggctaggaggccacgataaacaggatacgataaaagtccttaaccaagacgcagatgggaagaagcgttagagcgagcagcactcacatctcaagatagttttgaggcagctgtgccatcaaatagccacattgtttcggaacctggaaagaatgtcacactcacttgtcagcctcagatgacgtggcctgtgcaggcagtgaggtgggaaaagatccagccccgtcagatcgacctcttaacttactgcaacttggtccatggcagaaatttcacctccaagttcccaagacaaatagtgagcaactgcagccacggaaggtggagcgtcatcgtcatccccgatgtcacagtctcagactcggggctttaccgctgctacttgcaggccagcgcaggagaaaacgaaaccttcgtgatgagattgactgtagccgagggtaaaaccgataaccaatataccctctttgtggctggagggacagttttattgttgttgtttgttatctcaattaccaccatcattgtcattttccttaacagaaggagaaggagagagagaagagatctatttacagagtcctgggatacacagaaggcacccaataactatagaagtcccatctctaccagtcaacctaccaatcaatccatggatgatacaagagaggatatttatgtcaactatccaaccttctctcgcagaccaaagactagagtttaagcttattcttgacatgagtgcattagtaatgactcttatgtactcatgcatggatctttatgcaatttttttccactacccaaggtctaccttagatactagttgtctgaattgagttactttgataggaaaaatacttcattacctaaaatcatttttcatagaactgtttcagaaaacctgactctaactggtttatatacaaaagaaaacttactgtatcatataacagaatgatccaggggagattaagctttgggcaagggctatttaccagggcttaaatgttgtgtctagaattaagtatgggcataaactggcttctgaatccctttccagagtgttggatccatttccctggtcttggcctcactctcatgcaggctttcctcttgtgttggcaagatggctgccaactcttggcaattcatacatccttgtttctgtctggtagagagtttgcttctcaaatggagcaaacaaatttgattattttttcattgttaaataggcaacatgaccagaaaggatggaatggcttaagtaaactaagggttcacttctagagctgagaagcagggtcaaagcacaatactgggcaattcagagcatggttagaagaggaaaggggagtctcaaagctggagagtttaccaacaaatattgactgcagtgattaaccaagacatttttgttaactaaaaagtgaaatatgggatggattctagaaatggggtatctctgtccatacttctagaatccactctatcagcatagtccagaagaatacctggcagtagaagaaatgaatattcaagaggaagataaatgcgagagggcaatcctttactattctcatatttatttatctctcattctgtatagaattcttgccgccatcccaggtctagccttaggagcaaatgtagtagatagtcgaataataaataacttaatgttttggacatattttgtctacttttgagaattatttttaatatgtaaattctctcaaaagggtcaggcacctagttattattttttaatgattatgtgaaagttgaatataatataccactaaaagtgacagttgaaagtggtggcataggacggtagggtagaaatttgggagggaaaaaagaaattgggagggtacaggcaacaggagaaaggaatcaaaccacagaaaaatacaaagggaaacttctgcttcactattcagacaaagacagccctaatgacatcaccaacagtcaaagcaattagagaccatacctaatattgtttaaattctagatgtaggctaacaatgaaaagtatttgccaaactgaataaaactgtcatggttaccttgaaa

SEQ ID NO: 115473 - DNA, 579 bp, Homo sapiens
  Payload ID: 2533
  Gene Symbol: CD226
  Gene Name: CD226 molecule
  ENST ID: ENST00000583955
  CDS Start-End: 184-579
agtgaaaccatggcaagttgatgcagcaggacaagagagttgccggaaaaagctggaaaaaagaagacacgactgataacatctgagaggaaggaaactgcattgtgctggggatctgcatgtcacattataaaaagcaatttttttttttaatagaaccagcctttcaaacagtttccagagatggattatcctactttacttttggctcttcttcatgtatacagagctctatgtgaagaggtgctttggcatacatcagttccctttgccgagaacatgtctctagaatgtgtgtatccatcaatgggcatcttaacacaggtggagtggttcaagatcgggacccagcaggattccatagccattttcagccctactcatggcatggtcataaggaagccctatgctgagagggtttactttttgaattcaacgatggcttccaataacatgactcttttctttcggaatgcctctgaagatgatgttggctactattcctgctctctttacacttacccacagggaacttggcagaaggtgatacaggtggttcagtcagatagttttgaggca

SEQ ID NO: 115474 - DNA, 2180 bp, Homo sapiens
  Payload ID: 2534
  Gene Symbol: CD24
  Gene Name: CD24 molecule
  ENST ID: ENST00000606017
  CDS Start-End: 110-352
ggtctcgccggctcgccgcgctccccaccttgcctgcgcccgcccggagccagcggttctccaagcacccagcatcctgctagacgcgccgcgcaccgacggaggggacatgggcagagcaatggtggccaggctcgggctggggctgctgctgctggcactgctcctacccacgcagatttattccagtgaaacaacaactggaacttcaagtaactcctcccagagtacttccaactctgggttggccccaaatccaactaatgccaccaccaaggcggctggtggtgccctgcagtcaacagccagtctcttcgtggtctcactctctcttctgcatctctactcttaagagactcaggccaagaaacgtcttctaaatttccccatcttctaaacccaatccaaatggcgtctggaagtccaatgtggcaaggaaaaacaggtcttcatcgaatctactaattccacaccttttattgacacagaaaatgttgagaatcccaaatttgattgatttgaagaacatgtgagaggtttgactagatgatggatgccaatattaaatctgctggagtttcatgtacaagatgaaggagaggcaacatccaaaatagttaagacatgatttccttgaatgtggcttgagaaatatggacacttaatactaccttgaaaataagaatagaaataaaggatgggattgtggaatggagattcagttttcatttggttcattaattctataaggccataaaacaggtaatataaaaagcttccatgattctatttatatgtacatgagaaggaacttccaggtgttactgtaattcctcaacgtattgtttcgacagcactaatttaatgccgatatactctagatgaagttttacattgttgagctattgctgttctcttgggaactgaactcactttcctcctgaggctttggatttgacattgcatttgaccttttatgtagtaattgacatgtgccagggcaatgatgaatgagaatctacccccagatccaagcatcctgagcaactcttgattatccatattgagtcaaatggtaggcatttcctatcacctgtttccattcaacaagagcactacattcatttagctaaacggattccaaagagtagaattgcattgaccacgactaatttcaaaatgctttttattattattattttttagacagtctcactttgtcgcccaggccggagtgcagtggtgcgatctcagatcagtgtaccatttgcctcccgggctcaagcgattctcctgcctcagcctcccaagtagctgggattacaggcacctgccaccatgcccggctaatttttgtaattttagtagagacagggtttcaccatgttgcccaggctggtttcgaactcctgacctcaggtgatccacccgcctcggcctcccaaagtgctgggattacaggcttgagcccccgcgcccagccatcaaaatgctttttatttctgcatatgttgaatactttttacaatttaaaaaaatgatctgttttgaaggcaaaattgcaaatcttgaaattaagaaggcaaaaatgtaaaggagtcaaaactataaatcaagtatttgggaagtgaagactggaagctaatttgcattaaattcacaaacttttatactctttctgtatatacattttttttctttaaaaaacaactatggatcagaatagccacatttagaacactttttgttatcagtcaatatttttagatagttagaacctggtcctaagcctaaaagtgggcttgattctgcagtaaatcttttacaactgcctcgacacacataaacctttttaaaaatagacactccccgaagtcttttgttcgcatggtcacacactgatgcttagatgttccagtaatctaatatggccacagtagtcttgatgaccaaagtcctttttttccatctttagaaaactacatgggaacaaacagatcgaacagttttgaagctactgtgtgtgtgaatgaacactcttgctttattccagaatgctgtacatctattttggattgtatattgtgtttgtgtatttacgctttgattcatagtaacttcttatggaattgatttgcattgaacacaaactgtaaataaaaagaaatggctgaaagagc

SEQ ID NO: 115475 - DNA, 586 bp, Homo sapiens
  Payload ID: 2534
  Gene Symbol: CD24
  Gene Name: CD24 molecule
  ENST ID: ENST00000620405
  CDS Start-End: 87-200
cccaccttgcctgcgcccgcccggagccagcggttctccaagcacccagcatcctgctagacgcgccgcgcaccgacggaggggacatgggcagagcaatggtggccaggctcgggctggggctgctgctgctggcactgctcctacccacgcagaaaatgttgagaatcccaaatttgattgatttgaagaacatgtgagaggtttgactagatgatggatgccaatattaaatctgctggagtttcatgtacaagatgaaggagaggcaacatccaaaatagttaagacatgatttccttgaatgtggcttgagaaatatggacacttaatactaccttgaaaataagaatagaaataaaggatgggattgtggaatggagattcagttttcatttggttcattaattctataaggccataaaacaggtaatataaaaagcttccatgattctatttatatgtacatgagaaggaacttccaggtgttactgtaattcctcaacgtattgtttcgacagcactaatttaatgccgatatactctagatgaagttttacattgttgagctattgctgttctcttg

SEQ ID NO: 115476 - DNA, 566 bp, Homo sapiens
  Payload ID: 2534
  Gene Symbol: CD24
  Gene Name: CD24 molecule
  ENST ID: ENST00000619869
  CDS Start-End: 1-265
agatcgctccggacccggacaccgcctgcgaggagcgccgaccagccgggaagggttcgcgctaggcggcgcccgggtcccgtcggccaggatttattccagtgaaacaacaactggaacttcaagtaactcctcccagagtacttccaactctgggttggccccaaatccaactaatgccaccaccaaggcggctggtggtgccctgcagtcaacagccagtctcttcgtggtctcactctctcttctgcatctctactcttaagagactcaggccaagaaacgtcttctaaatttccccatcttctaaacccaatccaaatggcgtctggaagtccaatgtggcaaggaaaaacaggtcttcatcgaatctactaattccacaccttttattgacacagaaaatgttgagaatcccaaatttgattgatttgaagaacatgtgagaggtttgactagatgatggatgccaatattaaatctgctggagtttcatgtacaagatgaaggagaggcaacatccaaaatagttaagacatgatttccttgaatgtggcttgagaaat

SEQ ID NO: 115477 - DNA, 1026 bp, Homo sapiens
  Payload ID: 2534
  Gene Symbol: CD24
  Gene Name: CD24 molecule
  ENST ID: ENST00000615659
  CDS Start-End: 1-368
ccctttcctctgcggcgggccgagagataaccctgcccgaggggtcccggcgcccgccccccacgcggtcgcactggaattcgcagcccctctcgggtccccggggcgcattttgcagtctgagtggcaatgcacttgctccaggacaggcggctaccccgccgcagcggaggcgcggacttttcttttgggggatttattccagtgaaacaacaactggaacttcaagtaactcctcccagagtacttccaactctgggttggccccaaatccaactaatgccaccaccaaggcggctggtggtgccctgcagtcaacagccagtctcttcgtggtctcactctctcttctgcatctctactcttaagagactcaggccaagaaacgtcttctaaatttccccatcttctaaacccaatccaaatggcgtctggaagtccaatgtggcaaggaaaaacaggtcttcatcgaatctactaattccacaccttttattgacacagaaaatgttgagaatcccaaatttgattgatttgaagaacatgtgagaggtttgactagatgatggatgccaatattaaatctgctggagtttcatgtacaagatgaaggagaggcaacatccaaaatagttaagacatgatttccttgaatgtggcttgagaaatatggacacttaatactaccttgaaaataagaatagaaataaaggatgggattgtggaatggagattcagttttcatttggttcattaattctataaggccataaaacaggtaatataaaaagcttccatgattctatttatatgtacatgagaaggaacttccaggtgttactgtaattcctcaacgtattgtttcgacagcactaatttaatgccgatatactctagatgaagttttacattgttgagctattgctgttctcttgggaactgaactcactttcctcctgaggctttggatttgacattgcatttgaccttttatgtagtaattgacatgtgccagggcaatgatga

SEQ ID NO: 115478 - DNA, 825 bp, Homo sapiens
  Payload ID: 2534
  Gene Symbol: CD24
  Gene Name: CD24 molecule
  ENST ID: ENST00000622315
  CDS Start-End: 155-544
ctttttaaacaaaccccggttccgggctgaagccgaggcggggaccctctcctgacgctgcgctctctgcgaggcaacctttcacgtccatcgcttgtcatcttaggatccccatgttattttagcccagattggctagttctggggaggcagcatggtgggacgattctgtcccgagtccccgccaggctttgttcgggtcgccgctaccagcgcggtctccctagatcctccatccggggaacctcgccccgggtgcgggtacccggggccgcgcagcgctgcctcgagggtgtatggatgcaccgcgccggcgagagagaccgggggctgggcctgggagaccctagcgggggcgggggcgaagaagatttattccagtgaaacaacaactggaacttcaagtaactcctcccagagtacttccaactctgggttggccccaaatccaactaatgccaccaccaaggcggctggtggtgccctgcagtcaacagccagtctcttcgtggtctcactctctcttctgcatctctactcttaagagactcaggccaagaaacgtcttctaaatttccccatcttctaaacccaatccaaatggcgtctggaagtccaatgtggcaaggaaaaacaggtcttcatcgaatctactaattccacaccttttattgacacagaaaatgttgagaatcccaaatttgattgatttgaagaacatgtgagaggtttgactagatgatggatgccaatattaaatctgctggagtttcatgtacaagatgaaggagaggcaacatccaaaatagttaagacatgatttcc

SEQ ID NO: 115479 - DNA, 802 bp, Homo sapiens
  Payload ID: 2534
  Gene Symbol: CD24
  Gene Name: CD24 molecule
  ENST ID: ENST00000610952
  CDS Start-End: 368-610
agtttgcagcgtcaggcagcgggtctgcgcccagcgagcggctccccagctcctgggaagatgcggacccgggacgcccccgtgagctcactgcgcctggctgacacgaggcgctcacagaacaaagcaagggcttcggggagggcgcggccgcggggccgagcgcgcagatcgctccggacccggacaccgcctgcgaggagcgccgaccagccgggaagggttcgcgctaggcggcgcccgggtcccgtcggccagggtctcgccggctcgccgcgctccccaccttgcctgcgcccgcccggagccagcggttctccaagcacccagcatcctgctagacgcgccgcgcaccgacggaggggacatgggcagagcaatggtggccaggctcgggctggggctgctgctgctggcactgctcctacccacgcagatttattccagtgaaacaacaactggaacttcaagtaactcctcccagagtacttccaactctgggttggccccaaatccaactaatgccaccaccaaggcggctggtggtgccctgcagtcaacagccagtctcttcgtggtctcactctctcttctgcatctctactcttaagagactcaggccaagaaacgtcttctaaatttccccatcttctaaacccaatccaaatggcgtctggaagtccaatgtggcaaggaaaaacaggtcttcatcgaatctactaattccacaccttttattgacacagaaaatgttgagaatcccaaatttgattgatttgaagaacatgtgagaggtttgact

SEQ ID NO: 115480 - DNA, 2513 bp, Homo sapiens
  Payload ID: 2534
  Gene Symbol: CD24
  Gene Name: CD24 molecule
  ENST ID: ENST00000619133
  CDS Start-End: 441-683
gcgcgcagatcgctccggacccggacaccgcctgcgaggagcgccgaccagccgggaagggttcgcgctaggcggcgcccgggtcccgtcggccagggtgagcgtccggcccgcgtccgcgccacgcccgccgcgttcccctttcctctgcggcgggccgagagataaccctgcccgaggggtcccggcgcccgccccccacgcggtcgcactggaattcgcagcccctctcgggtccccggggcgcattttgcagtctgagtggcaatgcacttgctccaggacaggcggctaccccgccgcagcggaggcgcggacttttcttttggggggtctcgccggctcgccgcgctccccaccttgcctgcgcccgcccggagccagcggttctccaagcacccagcatcctgctagacgcgccgcgcaccgacggaggggacatgggcagagcaatggtggccaggctcgggctggggctgctgctgctggcactgctcctacccacgcagatttattccagtgaaacaacaactggaacttcaagtaactcctcccagagtacttccaactctgggttggccccaaatccaactaatgccaccaccaaggcggctggtggtgccctgcagtcaacagccagtctcttcgtggtctcactctctcttctgcatctctactcttaagagactcaggccaagaaacgtcttctaaatttccccatcttctaaacccaatccaaatggcgtctggaagtccaatgtggcaaggaaaaacaggtcttcatcgaatctactaattccacaccttttattgacacagaaaatgttgagaatcccaaatttgattgatttgaagaacatgtgagaggtttgactagatgatggatgccaatattaaatctgctggagtttcatgtacaagatgaaggagaggcaacatccaaaatagttaagacatgatttccttgaatgtggcttgagaaatatggacacttaatactaccttgaaaataagaatagaaataaaggatgggattgtggaatggagattcagttttcatttggttcattaattctataaggccataaaacaggtaatataaaaagcttccatgattctatttatatgtacatgagaaggaacttccaggtgttactgtaattcctcaacgtattgtttcgacagcactaatttaatgccgatatactctagatgaagttttacattgttgagctattgctgttctcttgggaactgaactcactttcctcctgaggctttggatttgacattgcatttgaccttttatgtagtaattgacatgtgccagggcaatgatgaatgagaatctacccccagatccaagcatcctgagcaactcttgattatccatattgagtcaaatggtaggcatttcctatcacctgtttccattcaacaagagcactacattcatttagctaaacggattccaaagagtagaattgcattgaccacgactaatttcaaaatgctttttattattattattttttagacagtctcactttgtcgcccaggccggagtgcagtggtgcgatctcagatcagtgtaccatttgcctcccgggctcaagcgattctcctgcctcagcctcccaagtagctgggattacaggcacctgccaccatgcccggctaatttttgtaattttagtagagacagggtttcaccatgttgcccaggctggtttcgaactcctgacctcaggtgatccacccgcctcggcctcccaaagtgctgggattacaggcttgagcccccgcgcccagccatcaaaatgctttttatttctgcatatgttgaatactttttacaatttaaaaaaatgatctgttttgaaggcaaaattgcaaatcttgaaattaagaaggcaaaaatgtaaaggagtcaaaactataaatcaagtatttgggaagtgaagactggaagctaatttgcattaaattcacaaacttttatactctttctgtatatacattttttttctttaaaaaacaactatggatcagaatagccacatttagaacactttttgttatcagtcaatatttttagatagttagaacctggtcctaagcctaaaagtgggcttgattctgcagtaaatcttttacaactgcctcgacacacataaacctttttaaaaatagacactccccgaagtcttttgttcgcatggtcacacactgatgcttagatgttccagtaatctaatatggccacagtagtcttgatgaccaaagtcctttttttccatctttagaaaactacatgggaacaaacagatcgaacagttttgaagctactgtgtgtgtgaatgaacactcttgctttattccagaatgctgtacatctattttggattgtatattgtgtttgtgtatttacgctttgattcatagtaacttcttatggaattgatttgcattgaacacaaactgtaaataaaaagaaatggctgaaagagcaa

SEQ ID NO: 115481 - DNA, 921 bp, Homo sapiens
  Payload ID: 2535
  Gene Symbol: CD244
  Gene Name: CD244 molecule, natural killer cell receptor 2B4
  Uniprot ID: Q9BZW8
  ENST ID: ENST00000322302
  CDS Start-End: 24-845
cctggcccctctgtcctgtggaaatgctggggcaagtggtcaccctcatactcctcctgctcctcaaggtgtatcagggcaaaggatgccagggatcagctgaccatgtggttagcatctcgggagtgcctcttcagttacaaccaaacagcatacagacgaaggttgacagcattgcatggaagaagttgctgccctcacaaaatggatttcatcacatattgaagtgggagaatggctctttgccttccaatacttccaatgatagattcagttttatagtcaagaacttgagtcttctcatcaaggcagctcagcagcaggacagtggcctctactgcctggaggtcaccagtatatctggaaaagttcagacagccacgttccaggtttttgtatttgaattcagattttggccgtttttggtgatcatcgtgattctaagcgcactgttccttggcacccttgcctgcttctgtgtgtggaggagaaagaggaaggagaagcagtcagagaccagtcccaaggaatttttgacaatttacgaagatgtcaaggatctgaaaaccaggagaaatcacgagcaggagcagacttttcctggaggggggagcaccatctactctatgatccagtcccagtcttctgctcccacgtcacaagaacctgcatatacattatattcattaattcagccttccaggaagtctggatccaggaagaggaaccacagcccttccttcaatagcactatctatgaagtgattggaaagagtcaacctaaagcccagaaccctgctcgattgagccgcaaagagctggagaactttgatgtttattcctagttgctgcagcaattctcacctttcttgcacatcagcatctgctttgggaattggcacagtggatgacggcacagga

SEQ ID NO: 115482 - DNA, 1360 bp, Homo sapiens
  Payload ID: 2535
  Gene Symbol: CD244
  Gene Name: CD244 molecule, natural killer cell receptor 2B4
  Uniprot ID: Q9BZW8
  ENST ID: ENST00000368033
  CDS Start-End: 84-1196
gctgactggggactgctgagcccgtgcacggcagagagtctggtggggtggaggggctggcctggcccctctgtcctgtggaaatgctggggcaagtggtcaccctcatactcctcctgctcctcaaggtgtatcagggcaaaggatgccagggatcagctgaccatgtggttagcatctcgggagtgcctcttcagttacaaccaaacagcatacagacgaaggttgacagcattgcatggaagaagttgctgccctcacaaaatggatttcatcacatattgaagtgggagaatggctctttgccttccaatacttccaatgatagattcagttttatagtcaagaacttgagtcttctcatcaaggcagctcagcagcaggacagtggcctctactgcctggaggtcaccagtatatctggaaaagttcagacagccacgttccaggtttttgtatttgaatctctgcttccagataaagttgagaaaccccgcctacaggggcaggggaagatcctggacagagggagatgccaagtggctctgtcttgcttggtctccagggatggcaatgtgtcctatgcttggtacagagggagcaagctgatccagacagcagggaacctcacctacctggacgaggaggttgacattaatggcactcacacatatacctgcaatgtcagcaatcctgttagctgggaaagccacaccctgaatctcactcaggactgtcagaatgcccatcaggaattcagattttggccgtttttggtgatcatcgtgattctaagcgcactgttccttggcacccttgcctgcttctgtgtgtggaggagaaagaggaaggagaagcagtcagagaccagtcccaaggaatttttgacaatttacgaagatgtcaaggatctgaaaaccaggagaaatcacgagcaggagcagacttttcctggaggggggagcaccatctactctatgatccagtcccagtcttctgctcccacgtcacaagaacctgcatatacattatattcattaattcagccttccaggaagtctggatccaggaagaggaaccacagcccttccttcaatagcactatctatgaagtgattggaaagagtcaacctaaagcccagaaccctgctcgattgagccgcaaagagctggagaactttgatgtttattcctagttgctgcagcaattctcacctttcttgcacatcagcatctgctttgggaattggcacagtggatgacggcacaggagtctctatagaacagttcctagtctggagaggatatggaaatttgttcttgttctatattttgttttgaaaatgatgtctaacaacca

SEQ ID NO: 115483 - DNA, 2463 bp, Homo sapiens
  Payload ID: 2535
  Gene Symbol: CD244
  Gene Name: CD244 molecule, natural killer cell receptor 2B4
  Uniprot ID: Q9BZW8
  ENST ID: ENST00000368034
  CDS Start-End: 179-1276
ggccttgtcagctcacagcaggcgttaacagcctctaattgaggaaactgtggctggacaggttgcaaggcagttctgctccccatcgtcctcttgctgactggggactgctgagcccgtgcacggcagagagtctggtggggtggaggggctggcctggcccctctgtcctgtggaaatgctggggcaagtggtcaccctcatactcctcctgctcctcaaggtgtatcagggcaaaggatgccagggatcagctgaccatgtggttagcatctcgggagtgcctcttcagttacaaccaaacagcatacagacgaaggttgacagcattgcatggaagaagttgctgccctcacaaaatggatttcatcacatattgaagtgggagaatggctctttgccttccaatacttccaatgatagattcagttttatagtcaagaacttgagtcttctcatcaaggcagctcagcagcaggacagtggcctctactgcctggaggtcaccagtatatctggaaaagttcagacagccacgttccaggtttttgtatttgataaagttgagaaaccccgcctacaggggcaggggaagatcctggacagagggagatgccaagtggctctgtcttgcttggtctccagggatggcaatgtgtcctatgcttggtacagagggagcaagctgatccagacagcagggaacctcacctacctggacgaggaggttgacattaatggcactcacacatatacctgcaatgtcagcaatcctgttagctgggaaagccacaccctgaatctcactcaggactgtcagaatgcccatcaggaattcagattttggccgtttttggtgatcatcgtgattctaagcgcactgttccttggcacccttgcctgcttctgtgtgtggaggagaaagaggaaggagaagcagtcagagaccagtcccaaggaatttttgacaatttacgaagatgtcaaggatctgaaaaccaggagaaatcacgagcaggagcagacttttcctggaggggggagcaccatctactctatgatccagtcccagtcttctgctcccacgtcacaagaacctgcatatacattatattcattaattcagccttccaggaagtctggatccaggaagaggaaccacagcccttccttcaatagcactatctatgaagtgattggaaagagtcaacctaaagcccagaaccctgctcgattgagccgcaaagagctggagaactttgatgtttattcctagttgctgcagcaattctcacctttcttgcacatcagcatctgctttgggaattggcacagtggatgacggcacaggagtctctatagaacagttcctagtctggagaggatatggaaatttgttcttgttctatattttgttttgaaaatgatgtctaacaaccatgataagagcaaggctgttaaataatatcttccaatttacagatcagacatgaatgggtggaggggttaggttgttcacaaaaggccacattccaagtatttgtaatctagaaagtgttatgtaagtgatgttattagcatcgagattccctccacctgattttcaagctgtcacttgtttccttttctcccctctctgggttgactgcatttctagactctcgccggcccaggcccatcttccaaagcaagaggaaggaatgataatggtgactcaggggaagaagaaacagccctcctctgaaagcctggactgtccggctgtgaactggctggcaggttctgcacgtgggtgggggccagggcctgggctttactcaattgcagagaaaaaactttctccctgcatctcatacctttacctctggccagttggccaccagggggagtgggctgaagggagagtagatggtgcaaagcaagcccatctctaagtagaaaaatcacccagagcacatgctgacctgataactggggtgttgagaccagctttgtccatggtatgatgtttgatttatgaagacgcattgttagaaatccatttggcttcttcatagaagtggcttcccagaggaagaggcctctcagaaaccatgttctatttaagttctgagtcctgatgagtgttccccaggatgcacattgaagggagggctcaggcagctgagggctgagaatgaggcagttggaatctagacactatgctgggttccctgagtcgtcaggccagacatttcaacaaggctgtggggagcagggctgtgactctggctgagcccaggaaagcgacaagggtgaactgggagaggacttactcagagaccccaacaggtgatactgcacaaagcctggttcttcaattttcctaccctgtatctaacataggagtttcatataaaacggtgatatcatgcagatgcagtctgaattccttgcctgaattaaatttatgtatcctctcca

SEQ ID NO: 115484 - DNA, 1341 bp, Homo sapiens
  Payload ID: 2535
  Gene Symbol: CD244
  Gene Name: CD244 molecule, natural killer cell receptor 2B4
  Uniprot ID: Q9BZW8
  ENST ID: ENST00000492063
  CDS Start-End: 24-1013
cctggcccctctgtcctgtggaaatgctggggcaagtggtcaccctcatactcctcctgctcctcaaggtgtatcagggcaaaggatgccagggatcagctgaccatgtggttagcatctcgggagtgcctcttcagttacaaccaaacagcatacagacgaaggttgacagcattgcatggaagaagttgctgccctcacaaaatggatttcatcacatattgaagtgggagaatggctctttgccttccaatacttccaatgatagattcagttttatagtcaagaacttgagtcttctcatcaaggcagctcagcagcaggacagtggcctctactgcctggaggtcaccagtatatctggaaaagttcagacagccacgttccaggtttttgtatttgataaagttgagaaaccccgcctacaggggcaggggaagatcctggacagagggagatgccaagtggctctgtcttgcttggtctccagggatggcaatgtgtcctatgcttggtacagagggagcaagctgatccagacagcagggaacctcacctacctggacgaggaggttgacattaatggcactcacacatatacctgcaatgtcagcaatcctgttagctgggaaagccacaccctgaatctcactcaggactgtcagaatgcccatcaggaattcagattttggccgtttttggtgatcatcgtgattctaagcgcactgttccttggcacccttgcctgcttctgtgtgtggaggagaaagaggaaggagaagcagtcagagaccagtcccaaggaatttttgacaatttacgaagatgtcaaggatctgaaaaccaggagaaatcacgagcaggagcagacttttcctggaggggggagcaccatctactctatgatccagtcccagtcttctgctcccacgtcacaagaacctgcatatacattatattcattaattcagccttccaggaagggtgacagattctattcattttctggctgagagtgcctcagaatttttctgggccctgagtctcttttgggacctctcacatcacttaggagtgggagagcacttatctcgaagttaagtattctttaccttctgaatttctagtctggatccaggaagaggaaccacagcccttccttcaatagcactatctatgaagtgattggaaagagtcaacctaaagcccagaaccctgctcgattgagccgcaaagagctggagaactttgatgtttattcctagttgctgcagcaattctcacctttcttgcacatcagcatctgctttgggaattggcacagtggatgacggcacagga

SEQ ID NO: 115485 - DNA, 1609 bp, Homo sapiens
  Payload ID: 2536
  Gene Symbol: CD247
  Gene Name: CD247 molecule
  Uniprot ID: P20963
  ENST ID: ENST00000362089
  CDS Start-End: 74-568
ttttctcctaaccgtcccggccaccgctgcctcagcctctgcctcccagcctctttctgagggaaaggacaagatgaagtggaaggcgcttttcaccgcggccatcctgcaggcacagttgccgattacagaggcacagagctttggcctgctggatcccaaactctgctacctgctggatggaatcctcttcatctatggtgtcattctcactgccttgttcctgagagtgaagttcagcaggagcgcagacgcccccgcgtaccagcagggccagaaccagctctataacgagctcaatctaggacgaagagaggagtacgatgttttggacaagagacgtggccgggaccctgagatggggggaaagccgcagagaaggaagaaccctcaggaaggcctgtacaatgaactgcagaaagataagatggcggaggcctacagtgagattgggatgaaaggcgagcgccggaggggcaaggggcacgatggcctttaccagggtctcagtacagccaccaaggacacctacgacgcccttcacatgcaggccctgccccctcgctaacagccaggggatttcaccactcaaaggccagacctgcagacgcccagattatgagacacaggatgaagcatttacaacccggttcactcttctcagccactgaagtattcccctttatgtacaggatgctttggttatatttagctccaaaccttcacacacagactgttgtccctgcactctttaagggagtgtactcccagggcttacggccctggccttgggccctctggtttgccggtggtgcaggtagacctgtctcctggcggttcctcgttctccctgggaggcgggcgcactgcctctcacagctgagttgttgagtctgttttgtaaagtccccagagaaagcgcagatgctagcacatgccctaatgtctgtatcactctgtgtctgagtggcttcactcctgctgtaaatttggcttctgttgtcaccttcacctcctttcaaggtaactgtactgggccatgttgtgcctccctggtgagagggccgggcagaggggcagatggaaaggagcctaggccaggtgcaaccagggagctgcaggggcatgggaaggtgggcgggcaggggagggtcagccagggcctgcgagggcagcgggagcctccctgcctcaggcctctgtgccgcaccattgaactgtaccatgtgctacaggggccagaagatgaacagactgaccttgatgagctgtgcacaaagtggcataaaaaacatgtggttacacagtgtgaataaagtgctgcggagcaagaggaggccgttgattcacttcacgctttcagcgaatgacaaaatcatctttgtgaaggcctcgcaggaagacccaacacatgggacctataactgcccagcggacagtggcaggacaggaaaaacccgtcaatgtactaggatactgctgcgtcattacagggcacaggccatggatggaaaacgctctctactctgctttttttctactgttttaatttatactggcatgctaaagccttcctattttgcataataaatgcttcagtgaaaatgca

SEQ ID NO: 115486 - DNA, 1678 bp, Homo sapiens
  Payload ID: 2536
  Gene Symbol: CD247
  Gene Name: CD247 molecule
  Uniprot ID: P20963
  ENST ID: ENST00000392122
  CDS Start-End: 146-637
tgctttctcaaaggccccacagtcctccacttcctggggaggtagctgcagaataaaaccagcagagactccttttctcctaaccgtcccggccaccgctgcctcagcctctgcctcccagcctctttctgagggaaaggacaagatgaagtggaaggcgcttttcaccgcggccatcctgcaggcacagttgccgattacagaggcacagagctttggcctgctggatcccaaactctgctacctgctggatggaatcctcttcatctatggtgtcattctcactgccttgttcctgagagtgaagttcagcaggagcgcagacgcccccgcgtaccagcagggccagaaccagctctataacgagctcaatctaggacgaagagaggagtacgatgttttggacaagagacgtggccgggaccctgagatggggggaaagccgagaaggaagaaccctcaggaaggcctgtacaatgaactgcagaaagataagatggcggaggcctacagtgagattgggatgaaaggcgagcgccggaggggcaaggggcacgatggcctttaccagggtctcagtacagccaccaaggacacctacgacgcccttcacatgcaggccctgccccctcgctaacagccaggggatttcaccactcaaaggccagacctgcagacgcccagattatgagacacaggatgaagcatttacaacccggttcactcttctcagccactgaagtattcccctttatgtacaggatgctttggttatatttagctccaaaccttcacacacagactgttgtccctgcactctttaagggagtgtactcccagggcttacggccctggccttgggccctctggtttgccggtggtgcaggtagacctgtctcctggcggttcctcgttctccctgggaggcgggcgcactgcctctcacagctgagttgttgagtctgttttgtaaagtccccagagaaagcgcagatgctagcacatgccctaatgtctgtatcactctgtgtctgagtggcttcactcctgctgtaaatttggcttctgttgtcaccttcacctcctttcaaggtaactgtactgggccatgttgtgcctccctggtgagagggccgggcagaggggcagatggaaaggagcctaggccaggtgcaaccagggagctgcaggggcatgggaaggtgggcgggcaggggagggtcagccagggcctgcgagggcagcgggagcctccctgcctcaggcctctgtgccgcaccattgaactgtaccatgtgctacaggggccagaagatgaacagactgaccttgatgagctgtgcacaaagtggcataaaaaacatgtggttacacagtgtgaataaagtgctgcggagcaagaggaggccgttgattcacttcacgctttcagcgaatgacaaaatcatctttgtgaaggcctcgcaggaagacccaacacatgggacctataactgcccagcggacagtggcaggacaggaaaaacccgtcaatgtactaggatactgctgcgtcattacagggcacaggccatggatggaaaacgctctctactctgctttttttctactgttttaatttatactggcatgctaaagccttcctattttgcataataaatgcttcagtgaaaatgca

SEQ ID NO: 115487 - DNA, 2558 bp, Homo sapiens
  Payload ID: 2537
  Gene Symbol: CD248
  Gene Name: CD248 molecule, endosialin
  Uniprot ID: Q9HCU0
  ENST ID: ENST00000311330
  CDS Start-End: 18-2291
agtccgggggcatcgcgatgctgctgcgcctgttgctggcctgggcggccgcagggcccacactgggccaggacccctgggctgctgagccccgtgccgcctgcggccccagcagctgctacgctctcttcccacggcgccgcaccttcctggaggcctggcgggcctgccgcgagctggggggcgacctggccactcctcggacccccgaggaggcccagcgtgtggacagcctggtgggtgcgggcccagccagccggctgctgtggatcgggctgcagcggcaggcccggcaatgccagctgcagcgcccactgcgcggcttcacgtggaccacaggggaccaggacacggctttcaccaactgggcccagccagcctctggaggcccctgcccggcccagcgctgtgtggccctggaggcaagtggcgagcaccgctggctggagggctcgtgcacgctggctgtcgacggctacctgtgccagtttggcttcgagggcgcctgcccggcgctgcaagatgaggcgggccaggccggcccagccgtgtataccacgcccttccacctggtctccacagagtttgagtggctgcccttcggctctgtggccgctgtgcagtgccaggctggcaggggagcctctctgctctgcgtgaagcagcctgagggaggtgtgggctggtcacgggctgggcccctgtgcctggggactggctgcagccctgacaacgggggctgcgaacacgaatgtgtggaggaggtggatggtcacgtgtcctgccgctgcactgagggcttccggctggcagcagacgggcgcagttgcgaggacccctgtgcccaggctccgtgcgagcagcagtgtgagcccggtgggccacaaggctacagctgccactgtcgcctgggtttccggccagcggaggatgatccgcaccgctgtgtggacacagatgagtgccagattgccggtgtgtgccagcagatgtgtgtcaactacgttggtggcttcgagtgttattgtagcgagggacatgagctggaggctgatggcatcagctgcagccctgcaggggccatgggtgcccaggcttcccaggacctcggagatgagttgctggatgacggggaggatgaggaagatgaagacgaggcctggaaggccttcaacggtggctggacggagatgcctgggatcctgtggatggagcctacgcagccgcctgactttgccctggcctatagaccgagcttcccagaggacagagagccacagataccctacccggagcccacctggccacccccgctcagtgcccccagggtcccctaccactcctcagtgctctccgtcacccggcctgtggtggtctctgccacgcatcccacactgccttctgcccaccagcctcctgtgatccctgccacacacccagctttgtcccgtgaccaccagatccccgtgatcgcagccaactatccagatctgccttctgcctaccaacccggtattctctctgtctctcattcagcacagcctcctgcccaccagccccctatgatctcaaccaaatatccggagctcttccctgcccaccagtcccccatgtttccagacacccgggtcgctggcacccagaccaccactcatttgcctggaatcccacctaaccatgcccctctggtcaccaccctcggtgcccagctaccccctcaagccccagatgcccttgtcctcagaacccaggccacccagcttcccattatcccaactgcccagccctctctgaccaccacctccaggtcccctgtgtctcctgcccatcaaatctctgtgcctgctgccacccagcccgcagccctccccaccctcctgccctctcagagccccactaaccagacctcacccatcagccctacacatccccattccaaagccccccaaatcccaagggaagatggccccagtcccaagttggccctgtggctgccctcaccagctcccacagcagccccaacagccctgggggaggctggtcttgccgagcacagccagagggatgaccggtggctgctggtggcactcctggtgccaacgtgtgtctttttggtggtcctgcttgcactgggcatcgtgtactgcacccgctgtggcccccatgcacccaacaagcgcatcactgactgctatcgctgggtcatccatgctgggagcaagagcccaacagaacccatgccccccaggggcagcctcacaggggtgcagacctgcagaaccagcgtgtgatggggtgcagacccccctcatggagtatggggcgctggacacatggccggggctgcaccagggacccatgggggctgcccagctggacagatggcttcctgctccccaggcccagccagggtcctctctcaaccactagacttggctctcaggaactctgcttcctggcccagcgctcgtgaccaaggatacaccaaagcccttaagacctcagggggcgggtgctggggtcttctccaataaatggggtgtcaaccttacccaagg

SEQ ID NO: 115488 - DNA, 1338 bp, Homo sapiens
  Payload ID: 2538
  Gene Symbol: CD27
  Gene Name: CD27 molecule
  Uniprot ID: P26842
  ENST ID: ENST00000266557
  CDS Start-End: 230-1012
aatactctccccagcacacggaaggggaagggggtggaggttgctgctatgagagagaaaaaaaaaacagccacaatagagattctgccttcaaaggttggcttgccacctgaagcagccactgcccagggggtgcaaagaagagacagcagcgcccagcttggaggtgctaactccagaggccagcatcagcaactgggcacagaaaggagccgcctgggcagggaccatggcacggccacatccctggtggctgtgcgttctggggaccctggtggggctctcagctactccagcccccaagagctgcccagagaggcactactgggctcagggaaagctgtgctgccagatgtgtgagccaggaacattcctcgtgaaggactgtgaccagcatagaaaggctgctcagtgtgatccttgcataccgggggtctccttctctcctgaccaccacacccggccccactgtgagagctgtcggcactgtaactctggtcttctcgttcgcaactgcaccatcactgccaatgctgagtgtgcctgtcgcaatggctggcagtgcagggacaaggagtgcaccgagtgtgatcctcttccaaacccttcgctgaccgctcggtcgtctcaggccctgagcccacaccctcagcccacccacttaccttatgtcagtgagatgctggaggccaggacagctgggcacatgcagactctggctgacttcaggcagctgcctgcccggactctctctacccactggccaccccaaagatccctgtgcagctccgattttattcgcatccttgtgatcttctctggaatgttccttgttttcaccctggccggggccctgttcctccatcaacgaaggaaatatagatcaaacaaaggagaaagtcctgtggagcctgcagagccttgtcattacagctgccccagggaggaggagggcagcaccatccccatccaggaggattaccgaaaaccggagcctgcctgctccccctgagccagcacctgcgggagctgcactacagccctggcctccacccccaccccgccgaccatccaagggagagtgagacctggcagccacaactgcagtcccatcctcttgtcagggccctttcctgtgtacacgtgacagagtgccttttcgagactggcagggacgaggacaaatatggatgaggtggagagtgggaagcaggagcccagccagctgcgcctgcgctgcaggagggcgggggctctggttgtaaaacacacttcctgctgcgaaagacccacatgctacaagacgggcaaaataaagtgacagatgaccaccctgca

SEQ ID NO: 115489 - DNA, 3343 bp, Homo sapiens
  Payload ID: 2539
  Gene Symbol: CD274
  Gene Name: CD274 molecule
  Uniprot ID: Q9NZQ7
  ENST ID: ENST00000381573
  CDS Start-End: 109-639
ggcgcaacgctgagcagctggcgcgtcccgcgcggccccagttctgcgcagcttcccgaggctccgcaccagccgcgcttctgtccgcctgcagggcattccagaaagatgaggatatttgctgtctttatattcatgacctactggcatttgctgaacgccccatacaacaaaatcaaccaaagaattttggttgtggatccagtcacctctgaacatgaactgacatgtcaggctgagggctaccccaaggccgaagtcatctggacaagcagtgaccatcaagtcctgagtggtaagaccaccaccaccaattccaagagagaggagaagcttttcaatgtgaccagcacactgagaatcaacacaacaactaatgagattttctactgcacttttaggagattagatcctgaggaaaaccatacagctgaattggtcatcccagaactacctctggcacatcctccaaatgaaaggactcacttggtaattctgggagccatcttattatgccttggtgtagcactgacattcatcttccgtttaagaaaagggagaatgatggatgtgaaaaaatgtggcatccaagatacaaactcaaagaagcaaagtgatacacatttggaggagacgtaatccagcattggaacttctgatcttcaagcagggattctcaacctgtggtttaggggttcatcggggctgagcgtgacaagaggaaggaatgggcccgtgggatgcaggcaatgtgggacttaaaaggcccaagcactgaaaatggaacctggcgaaagcagaggaggagaatgaagaaagatggagtcaaacagggagcctggagggagaccttgatactttcaaatgcctgaggggctcatcgacgcctgtgacagggagaaaggatacttctgaacaaggagcctccaagcaaatcatccattgctcatcctaggaagacgggttgagaatccctaatttgagggtcagttcctgcagaagtgccctttgcctccactcaatgcctcaatttgttttctgcatgactgagagtctcagtgttggaacgggacagtatttatgtatgagtttttcctatttattttgagtctgtgaggtcttcttgtcatgtgagtgtggttgtgaatgatttcttttgaagatatattgtagtagatgttacaattttgtcgccaaactaaacttgctgcttaatgatttgctcacatctagtaaaacatggagtatttgtaaggtgcttggtctcctctataactacaagtatacattggaagcataaagatcaaaccgttggttgcataggatgtcacctttatttaacccattaatactctggttgacctaatcttattctcagacctcaagtgtctgtgcagtatctgttccatttaaatatcagctttacaattatgtggtagcctacacacataatctcatttcatcgctgtaaccaccctgttgtgataaccactattattttacccatcgtacagctgaggaagcaaacagattaagtaacttgcccaaaccagtaaatagcagacctcagactgccacccactgtccttttataatacaatttacagctatattttactttaagcaattcttttattcaaaaaccatttattaagtgcccttgcaatatcaatcgctgtgccaggcattgaatctacagatgtgagcaagacaaagtacctgtcctcaaggagctcatagtataatgaggagattaacaagaaaatgtattattacaatttagtccagtgtcatagcataaggatgatgcgaggggaaaacccgagcagtgttgccaagaggaggaaataggccaatgtggtctgggacggttggatatacttaaacatcttaataatcagagtaattttcatttacaaagagaggtcggtacttaaaataaccctgaaaaataacactggaattccttttctagcattatatttattcctgatttgcctttgccatataatctaatgcttgtttatatagtgtctggtattgtttaacagttctgtcttttctatttaaatgccactaaattttaaattcatacctttccatgattcaaaattcaaaagatcccatgggagatggttggaaaatctccacttcatcctccaagccattcaagtttcctttccagaagcaactgctactgcctttcattcatatgttcttctaaagatagtctacatttggaaatgtatgttaaaagcacgtatttttaaaatttttttcctaaatagtaacacattgtatgtctgctgtgtactttgctatttttatttattttagtgtttcttatatagcagatggaatgaatttgaagttcccagggctgaggatccatgccttctttgtttctaagttatctttcccatagcttttcattatctttcatatgatccagtatatgttaaatatgtcctacatatacatttagacaaccaccatttgttaagtatttgctctaggacagagtttggatttgtttatgtttgctcaaaaggagacccatgggctctccagggtgcactgagtcaatctagtcctaaaaagcaatcttattattaactctgtatgacagaatcatgtctggaacttttgttttctgctttctgtcaagtataaacttcactttgatgctgtacttgcaaaatcacattttctttctggaaattccggcagtgtaccttgactgctagctaccctgtgccagaaaagcctcattcgttgtgcttgaacccttgaatgccaccagctgtcatcactacacagccctcctaagaggcttcctggaggtttcgagattcagatgccctgggagatcccagagtttcctttccctcttggccatattctggtgtcaatgacaaggagtaccttggctttgccacatgtcaaggctgaagaaacagtgtctccaacagagctccttgtgttatctgtttgtacatgtgcatttgtacagtaattggtgtgacagtgttctttgtgtgaattacaggcaagaattgtggctgagcaaggcacatagtctactcagtctattcctaagtcctaactcctccttgtggtgttggatttgtaaggcactttatcccttttgtctcatgtttcatcgtaaatggcataggcagagatgatacctaattctgcatttgattgtcactttttgtacctgcattaatttaataaaatattcttatttattttgttacttggtacaccagcatgtccattttcttgtttattttgtgtttaataaaatgttcagtttaacatcccagtggagaaagtt

SEQ ID NO: 115490 - DNA, 3644 bp, Homo sapiens
  Payload ID: 2539
  Gene Symbol: CD274
  Gene Name: CD274 molecule
  Uniprot ID: Q9NZQ7
  ENST ID: ENST00000381577
  CDS Start-End: 87-959
gcgtcccgcgcggccccagttctgcgcagcttcccgaggctccgcaccagccgcgcttctgtccgcctgcagggcattccagaaagatgaggatatttgctgtctttatattcatgacctactggcatttgctgaacgcatttactgtcacggttcccaaggacctatatgtggtagagtatggtagcaatatgacaattgaatgcaaattcccagtagaaaaacaattagacctggctgcactaattgtctattgggaaatggaggataagaacattattcaatttgtgcatggagaggaagacctgaaggttcagcatagtagctacagacagagggcccggctgttgaaggaccagctctccctgggaaatgctgcacttcagatcacagatgtgaaattgcaggatgcaggggtgtaccgctgcatgatcagctatggtggtgccgactacaagcgaattactgtgaaagtcaatgccccatacaacaaaatcaaccaaagaattttggttgtggatccagtcacctctgaacatgaactgacatgtcaggctgagggctaccccaaggccgaagtcatctggacaagcagtgaccatcaagtcctgagtggtaagaccaccaccaccaattccaagagagaggagaagcttttcaatgtgaccagcacactgagaatcaacacaacaactaatgagattttctactgcacttttaggagattagatcctgaggaaaaccatacagctgaattggtcatcccagaactacctctggcacatcctccaaatgaaaggactcacttggtaattctgggagccatcttattatgccttggtgtagcactgacattcatcttccgtttaagaaaagggagaatgatggatgtgaaaaaatgtggcatccaagatacaaactcaaagaagcaaagtgatacacatttggaggagacgtaatccagcattggaacttctgatcttcaagcagggattctcaacctgtggtttaggggttcatcggggctgagcgtgacaagaggaaggaatgggcccgtgggatgcaggcaatgtgggacttaaaaggcccaagcactgaaaatggaacctggcgaaagcagaggaggagaatgaagaaagatggagtcaaacagggagcctggagggagaccttgatactttcaaatgcctgaggggctcatcgacgcctgtgacagggagaaaggatacttctgaacaaggagcctccaagcaaatcatccattgctcatcctaggaagacgggttgagaatccctaatttgagggtcagttcctgcagaagtgccctttgcctccactcaatgcctcaatttgttttctgcatgactgagagtctcagtgttggaacgggacagtatttatgtatgagtttttcctatttattttgagtctgtgaggtcttcttgtcatgtgagtgtggttgtgaatgatttcttttgaagatatattgtagtagatgttacaattttgtcgccaaactaaacttgctgcttaatgatttgctcacatctagtaaaacatggagtatttgtaaggtgcttggtctcctctataactacaagtatacattggaagcataaagatcaaaccgttggttgcataggatgtcacctttatttaacccattaatactctggttgacctaatcttattctcagacctcaagtgtctgtgcagtatctgttccatttaaatatcagctttacaattatgtggtagcctacacacataatctcatttcatcgctgtaaccaccctgttgtgataaccactattattttacccatcgtacagctgaggaagcaaacagattaagtaacttgcccaaaccagtaaatagcagacctcagactgccacccactgtccttttataatacaatttacagctatattttactttaagcaattcttttattcaaaaaccatttattaagtgcccttgcaatatcaatcgctgtgccaggcattgaatctacagatgtgagcaagacaaagtacctgtcctcaaggagctcatagtataatgaggagattaacaagaaaatgtattattacaatttagtccagtgtcatagcataaggatgatgcgaggggaaaacccgagcagtgttgccaagaggaggaaataggccaatgtggtctgggacggttggatatacttaaacatcttaataatcagagtaattttcatttacaaagagaggtcggtacttaaaataaccctgaaaaataacactggaattccttttctagcattatatttattcctgatttgcctttgccatataatctaatgcttgtttatatagtgtctggtattgtttaacagttctgtcttttctatttaaatgccactaaattttaaattcatacctttccatgattcaaaattcaaaagatcccatgggagatggttggaaaatctccacttcatcctccaagccattcaagtttcctttccagaagcaactgctactgcctttcattcatatgttcttctaaagatagtctacatttggaaatgtatgttaaaagcacgtatttttaaaatttttttcctaaatagtaacacattgtatgtctgctgtgtactttgctatttttatttattttagtgtttcttatatagcagatggaatgaatttgaagttcccagggctgaggatccatgccttctttgtttctaagttatctttcccatagcttttcattatctttcatatgatccagtatatgttaaatatgtcctacatatacatttagacaaccaccatttgttaagtatttgctctaggacagagtttggatttgtttatgtttgctcaaaaggagacccatgggctctccagggtgcactgagtcaatctagtcctaaaaagcaatcttattattaactctgtatgacagaatcatgtctggaacttttgttttctgctttctgtcaagtataaacttcactttgatgctgtacttgcaaaatcacattttctttctggaaattccggcagtgtaccttgactgctagctaccctgtgccagaaaagcctcattcgttgtgcttgaacccttgaatgccaccagctgtcatcactacacagccctcctaagaggcttcctggaggtttcgagattcagatgccctgggagatcccagagtttcctttccctcttggccatattctggtgtcaatgacaaggagtaccttggctttgccacatgtcaaggctgaagaaacagtgtctccaacagagctccttgtgttatctgtttgtacatgtgcatttgtacagtaattggtgtgacagtgttctttgtgtgaattacaggcaagaattgtggctgagcaaggcacatagtctactcagtctattcctaagtcctaactcctccttgtggtgttggatttgtaaggcactttatcccttttgtctcatgtttcatcgtaaatggcataggcagagatgatacctaattctgcatttgattgtcactttttgtacctgcattaatttaataaaatattcttatttattttgttacttggtacaccagcatgtccattttcttgtttattttgtgtttaataaaatgttcagtttaa

SEQ ID NO: 115491 - DNA, 2738 bp, Homo sapiens
  Payload ID: 2540
  Gene Symbol: CD276
  Gene Name: CD276 molecule
  Uniprot ID: Q5ZPR3
  ENST ID: ENST00000318424
  CDS Start-End: 235-1185
ccggcctcagggacgcaccggagccgcctttccgggcctcaggcggattctccggcgcggcccgccccgcccctcggactccccgggccgcccccggcccccattcgggccgggcctcgctgcggcggcgactgagccaggctgggccgcgtccctgagtcccagagtcggcgcggcgcggcaggggcagccttccaccacggggagcccagctgtcagccgcctcacaggaagatgctgcgtcggcggggcagccctggcatgggtgtgcatgtgggtgcagccctgggagcactgtggttctgcctcacaggagccctggaggtccaggtccctgaagacccagtggtggcactggtgggcaccgatgccaccctgtgctgctccttctcccctgagcctggcttcagcctggcacagctcaacctcatctggcagctgacagataccaaacagctggtgcacagctttgctgagggccaggaccagggcagcgcctatgccaaccgcacggccctcttcccggacctgctggcacagggcaacgcatccctgaggctgcagcgcgtgcgtgtggcggacgagggcagcttcacctgcttcgtgagcatccgggatttcggcagcgctgccgtcagcctgcaggtggccgctccctactcgaagcccagcatgaccctggagcccaacaaggacctgcggccaggggacacggtgaccatcacgtgctccagctaccggggctaccctgaggctgaggtgttctggcaggatgggcagggtgtgcccctgactggcaacgtgaccacgtcgcagatggccaacgagcagggcttgtttgatgtgcacagcgtcctgcgggtggtgctgggtgcgaatggcacctacagctgcctggtgcgcaaccccgtgctgcagcaggatgcgcacggctctgtcaccatcacagggcagcctatgacattccccccagaggccctgtgggtgaccgtggggctgtctgtctgtctcattgcactgctggtggccctggctttcgtgtgctggagaaagatcaaacagagctgtgaggaggagaatgcaggagctgaggaccaggatggggagggagaaggctccaagacagccctgcagcctctgaaacactctgacagcaaagaagatgatggacaagaaatagcctgaccatgaggaccagggagctgctacccctccctacagctcctaccctctggctgcaatggggctgcactgtgagccctgcccccaacagatgcatcctgctctgacaggtgggctccttctccaaaggatgcgatacacagaccactgtgcagccttatttctccaatggacatgattcccaagtcatcctgctgccttttttcttatagacacaatgaacagaccacccacaaccttagttctctaagtcatcctgcctgctgccttatttcacagtacatacatttcttagggacacagtacactgaccacatcaccaccctcttcttccagtgctgcgtggaccatctggctgccttttttctccaaaagatgcaatattcagactgactgaccccctgccttatttcaccaaagacacgatgcatagtcaccccggccttgtttctccaatggccgtgatacactagtgatcatgttcagccctgcttccacctgcatagaatcttttcttctcagacagggacagtgcggcctcaacatctcctggagtctagaagctgtttcctttcccctccttcctcctcttgctctagccttaatactggccttttccctccctgccccaagtgaagacagggcactctgcgcccaccacatgcacagctgtgcatggagacctgcaggtgcacgtgctggaacacgtgtggttcccccctggcccagcctcctctgcagtgcccctctcccctgcccatcctccccacggaagcatgtgctggtcacactggttctccaggggtctgtgatggggcccctgggggtcagcttctgtccctctgccttctcacctctttgttcctttcttttcatgtatccattcagttgatgtttattgagcaactacagatgtcagcactgtgttaggtgctgggggccctgcgtgggaagataaagttcctccctcaaggactccccatccagctgggagacagacaactaactacactgcaccctgcggtttgcagggggctcctgcctggctccctgctccacacctcctctgtggctcaaggcttcctggatacctcacccccatcccacccataattcttacccagagcatggggttggggcggaaacctggagagagggacatagcccctcgccacggctagagaatctggtggtgtccaaaatgtctgtccaggtgtgggcaggtgggcaggcaccaaggccctctggacctttcatagcagcagaaaaggcagagcctggggcagggcagggccaggaatgctttggggacaccgaggggactgccccccacccccaccatggtgctattctggggctggggcagtcttttcctggcttgcctctggccagctcctggcctctggtagagtgagacttcagacgttctgatgccttccggatgtcatctctccctgccccaggaatggaagatgtgaggacttctaatttaaatgtgggactcggagggattttgtaaactgggggtatattttggggaaaataaatgtctttgt

SEQ ID NO: 115492 - DNA, 3469 bp, Homo sapiens
  Payload ID: 2540
  Gene Symbol: CD276
  Gene Name: CD276 molecule
  Uniprot ID: Q5ZPR3
  ENST ID: ENST00000318443
  CDS Start-End: 303-1907
ccaggccgtgtgctctgcccagcgggctggctcaggcctcggtcagcagccgccaccgcggggccaatccggcctcagggacgcaccggagccgcctttccgggcctcaggcggattctccggcgcggcccgccccgcccctcggactccccgggccgcccccggcccccattcgggccgggcctcgctgcggcggcgactgagccaggctgggccgcgtccctgagtcccagagtcggcgcggcgcggcaggggcagccttccaccacggggagcccagctgtcagccgcctcacaggaagatgctgcgtcggcggggcagccctggcatgggtgtgcatgtgggtgcagccctgggagcactgtggttctgcctcacaggagccctggaggtccaggtccctgaagacccagtggtggcactggtgggcaccgatgccaccctgtgctgctccttctcccctgagcctggcttcagcctggcacagctcaacctcatctggcagctgacagataccaaacagctggtgcacagctttgctgagggccaggaccagggcagcgcctatgccaaccgcacggccctcttcccggacctgctggcacagggcaacgcatccctgaggctgcagcgcgtgcgtgtggcggacgagggcagcttcacctgcttcgtgagcatccgggatttcggcagcgctgccgtcagcctgcaggtggccgctccctactcgaagcccagcatgaccctggagcccaacaaggacctgcggccaggggacacggtgaccatcacgtgctccagctaccagggctaccctgaggctgaggtgttctggcaggatgggcagggtgtgcccctgactggcaacgtgaccacgtcgcagatggccaacgagcagggcttgtttgatgtgcacagcatcctgcgggtggtgctgggtgcaaatggcacctacagctgcctggtgcgcaaccccgtgctgcagcaggatgcgcacagctctgtcaccatcacaccccagagaagccccacaggagccgtggaggtccaggtccctgaggacccggtggtggccctagtgggcaccgatgccaccctgcgctgctccttctcccccgagcctggcttcagcctggcacagctcaacctcatctggcagctgacagacaccaaacagctggtgcacagtttcaccgaaggccgggaccagggcagcgcctatgccaaccgcacggccctcttcccggacctgctggcacaaggcaatgcatccctgaggctgcagcgcgtgcgtgtggcggacgagggcagcttcacctgcttcgtgagcatccgggatttcggcagcgctgccgtcagcctgcaggtggccgctccctactcgaagcccagcatgaccctggagcccaacaaggacctgcggccaggggacacggtgaccatcacgtgctccagctaccggggctaccctgaggctgaggtgttctggcaggatgggcagggtgtgcccctgactggcaacgtgaccacgtcgcagatggccaacgagcagggcttgtttgatgtgcacagcgtcctgcgggtggtgctgggtgcgaatggcacctacagctgcctggtgcgcaaccccgtgctgcagcaggatgcgcacggctctgtcaccatcacagggcagcctatgacattccccccagaggccctgtgggtgaccgtggggctgtctgtctgtctcattgcactgctggtggccctggctttcgtgtgctggagaaagatcaaacagagctgtgaggaggagaatgcaggagctgaggaccaggatggggagggagaaggctccaagacagccctgcagcctctgaaacactctgacagcaaagaagatgatggacaagaaatagcctgaccatgaggaccagggagctgctacccctccctacagctcctaccctctggctgcaatggggctgcactgtgagccctgcccccaacagatgcatcctgctctgacaggtgggctccttctccaaaggatgcgatacacagaccactgtgcagccttatttctccaatggacatgattcccaagtcatcctgctgccttttttcttatagacacaatgaacagaccacccacaaccttagttctctaagtcatcctgcctgctgccttatttcacagtacatacatttcttagggacacagtacactgaccacatcaccaccctcttcttccagtgctgcgtggaccatctggctgccttttttctccaaaagatgcaatattcagactgactgaccccctgccttatttcaccaaagacacgatgcatagtcaccccggccttgtttctccaatggccgtgatacactagtgatcatgttcagccctgcttccacctgcatagaatcttttcttctcagacagggacagtgcggcctcaacatctcctggagtctagaagctgtttcctttcccctccttcctcctcttgctctagccttaatactggccttttccctccctgccccaagtgaagacagggcactctgcgcccaccacatgcacagctgtgcatggagacctgcaggtgcacgtgctggaacacgtgtggttcccccctggcccagcctcctctgcagtgcccctctcccctgcccatcctccccacggaagcatgtgctggtcacactggttctccaggggtctgtgatggggcccctgggggtcagcttctgtccctctgccttctcacctctttgttcctttcttttcatgtatccattcagttgatgtttattgagcaactacagatgtcagcactgtgttaggtgctgggggccctgcgtgggaagataaagttcctccctcaaggactccccatccagctgggagacagacaactaactacactgcaccctgcggtttgcagggggctcctgcctggctccctgctccacacctcctctgtggctcaaggcttcctggatacctcacccccatcccacccataattcttacccagagcatggggttggggcggaaacctggagagagggacatagcccctcgccacggctagagaatctggtggtgtccaaaatgtctgtccaggtgtgggcaggtgggcaggcaccaaggccctctggacctttcatagcagcagaaaaggcagagcctggggcagggcagggccaggaatgctttggggacaccgaggggactgccccccacccccaccatggtgctattctggggctggggcagtcttttcctggcttgcctctggccagctcctggcctctggtagagtgagacttcagacgttctgatgccttccggatgtcatctctccctgccccaggaatggaagatgtgaggacttctaatttaaatgtgggactcggagggattttgtaaactgggggtatattttggggaaaataaatgtctttgtaaaaagctt

SEQ ID NO: 115493 - DNA, 2439 bp, Homo sapiens
  Payload ID: 2540
  Gene Symbol: CD276
  Gene Name: CD276 molecule
  ENST ID: ENST00000537340
  CDS Start-End: 552-1718
cgcggggccaatccggcctcagggacgcaccggagccgcctttccgggcctcaggcggattctccggcgcggcccgccccgcccctcggactccccgggccgcccccggcccccattcgggccgggcctcgctgcggcggcgactgagccaggctgggccgcgtccctgagtcccagagtcggcgcggcgcggagccctggaggtccaggtccctgaagacccagtggtggcactggtgggcaccgatgccaccctgtgctgctccttctcccctgagcctggcttcagcctggcacagctcaacctcatctggcagctgacagataccaaacagctggtgcacagctttgctgagggccaggaccagggcagcgcctatgccaaccgcacggccctcttcccggacctgctggcacagggcaacgcatccctgaggctgcagcgcgtgcgtgtggcggacgagggcagcttcacctgcttcgtgagcatccgggatttcggcagcgctgccgtcagcctgcaggtggccgctccctactcgaagcccagcatgaccctggagcccaacaaggacctgcggccaggggacacggtgaccatcacgtgctccagctaccagggctaccctgaggctgaggtgttctggcaggatgggcagggtgtgcccctgactggcaacgtgaccacgtcgcagatggccaacgagcagggcttgtttgatgtgcacagcatcctgcgggtggtgctgggtgcaaatggcacctacagctgcctggtgcgcaaccccgtgctgcagcaggatgcgcacagctctgtcaccatcacaccccagagaagccccacaggagccgtggaggtccaggtccctgaggacccggtggtggccctagtgggcaccgatgccaccctgcgctgctccttctcccccgagcctggcttcagcctggcacagctcaacctcatctggcagctgacagacaccaaacagctggtgcacagtttcaccgaaggccgggaccagggcagcgcctatgccaaccgcacggccctcttcccggacctgctggcacaaggcaatgcatccctgaggctgcagcgcgtgcgtgtggcggacgagggcagcttcacctgcttcgtgagcatccgggatttcggcagcgctgccgtcagcctgcaggtggccgctccctactcgaagcccagcatgaccctggagcccaacaaggacctgcggccaggggacacggtgaccatcacgtgctccagctaccggggctaccctgaggctgaggtgttctggcaggatgggcagggtgtgcccctgactggcaacgtgaccacgtcgcagatggccaacgagcagggcttgtttgatgtgcacagcgtcctgcgggtggtgctgggtgcgaatggcacctacagctgcctggtgcgcaaccccgtgctgcagcaggatgcgcacggctctgtcaccatcacagggcagcctatgacattccccccagaggccctgtgggtgaccgtggggctgtctgtctgtctcattgcactgctggtggccctggctttcgtgtgctggagaaagatcaaacagagctgtgaggaggagaatgcaggagctgaggaccaggatggggagggagaaggctccaagacagccctgcagcctctgaaacactctgacagcaaagaagatgatggacaagaaatagcctgaccatgaggaccagggagctgctacccctccctacagctcctaccctctggctgcaatggggctgcactgtgagccctgcccccaacagatgcatcctgctctgacaggtgggctccttctccaaaggatgcgatacacagaccactgtgcagccttatttctccaatggacatgattcccaagtcatcctgctgccttttttcttatagacacaatgaacagaccacccacaaccttagttctctaagtcatcctgcctgctgccttatttcacagtacatacatttcttagggacacagtacactgaccacatcaccaccctcttcttccagtgctgcgtggaccatctggctgccttttttctccaaaagatgcaatattcagactgactgaccccctgccttatttcaccaaagacacgatgcatagtcaccccggccttgtttctccaatggccgtgatacactagtgatcatgttcagccctgcttccacctgcatagaatcttttcttctcagacagggacagtgcggcctcaacatctcctggagtctagaagctgtttcctttcccctccttcctcctcttgctctagccttaatactggccttttccctccctgccccaagtgaagacagggcactctgcgcccaccacatgcacagctgtgcatggagacctgcaggtgcacgtgctggaacacgtgtggttcccccctgg

SEQ ID NO: 115494 - DNA, 547 bp, Homo sapiens
  Payload ID: 2540
  Gene Symbol: CD276
  Gene Name: CD276 molecule
  ENST ID: ENST00000560786
  CDS Start-End: 80-547
attcgggccgggcctcgctgcggcggcaggggcagccttccaccacggggagcccagctgtcagccgcctcacaggaagatgctgcgtcggcggggcagccctggcatgggtgtgcatgtgggtgcagccctgggagcactgtggttctgcctcacaggagccctggaggtccaggtccctgaagacccagtggtggcactggtgggcaccgatgccaccctgtgctgctccttctcccctgagcctggcttcagcctggcacagctcaacctcatctggcagctgacagataccaaacagctggtgcacagctttgctgagggccaggaccagggcagcgcctatgccaaccgcacggccctcttcccggacctgctggcacagggcaacgcatccctgaggctgcagcgcgtgcgtgtggcggacgagggcagcttcacctgcttcgtgagcatccgggatttcggcagcgctgccgtcagcctgcaggtggccgctccctactcgaagcccagcatgaccctggagcccaacaaggacctgcgg

SEQ ID NO: 115495 - DNA, 628 bp, Homo sapiens
  Payload ID: 2540
  Gene Symbol: CD276
  Gene Name: CD276 molecule
  ENST ID: ENST00000561260
  CDS Start-End: 133-628
gggcgaaggtgtgggcgactggtgcacttccacaggcagccgtgggcagcatgaggggtcagattccgggaaggacaggcaggggcagccttccaccacggggagcccagctgtcagccgcctcacaggaagatgctgcgtcggcggggcagccctggcatgggtgtgcatgtgggtgcagccctgggagcactgtggttctgcctcacaggagccctggaggtccaggtccctgaagacccagtggtggcactggtgggcaccgatgccaccctgtgctgctccttctcccctgagcctggcttcagcctggcacagctcaacctcatctggcagctgacagataccaaacagctggtgcacagctttgctgagggccaggaccagggcagcgcctatgccaaccgcacggccctcttcccggacctgctggcacagggcaacgcatccctgaggctgcagcgcgtgcgtgtggcggacgagggcagcttcacctgcttcgtgagcatccgggatttcggcagcgctgccgtcagcctgcaggtggccgctccctactcgaagcccagcatgaccctggagcccaacaaggacctgcggccaggggacacggtgaccatcacgtgct

SEQ ID NO: 115496 - DNA, 2690 bp, Homo sapiens
  Payload ID: 2540
  Gene Symbol: CD276
  Gene Name: CD276 molecule
  Uniprot ID: Q5ZPR3
  ENST ID: ENST00000561213
  CDS Start-End: 125-1726
cgggcctcgctgcggcggcgactgagccaggctgggccgcgtccctgagtcccagagtcggcgcggcgcggcaggggcagccttccaccacggggagcccagctgtcagccgcctcacaggaagatgctgcgtcggcggggcagccctggcatgggtgtgcatgtgggtgcagccctgggagcactgtggttctgcctcacaggagccctggaggtccaggtccctgaagacccagtggtggcactggtgggcaccgatgccaccctgtgctgctccttctcccctgagcctggcttcagcctggcacagctcaacctcatctggcagctgacagataccaaacagctggtgcacagctttgctgagggccaggaccagggcagcgcctatgccaaccgcacggccctcttcccggacctgctggcacagggcaacgcatccctgaggctgcagcgcgtgcgtgtggcggacgagggcagcttcacctgcttcgtgagcatccgggatttcggcagcgctgccgtcagcctgcaggtggccgctccctactcgaagcccagcatgaccctggagcccaacaaggacctgcggccaggggacacggtgaccatcacgtgctccagctaccagggctaccctgaggctgaggtgttctggcaggatgggcagggtgtgcccctgactggcaacgtgaccacgtcgcagatggccaacgagcagggcttgtttgatgtgcacagcatcctgcgggtggtgctgggtgcaaatggcacctacagctgcctggtgcgcaaccccgtgctgcagcaggatgcgcacagctctgtcaccatcacaccccagagaagccccacaggagccgtggaggtccaggtccctgaggacccggtggtggccctagtgggcaccgatgccaccctgcgctgctccttctcccccgagcctggcttcagcctggcacagctcaacctcatctggcagctgacagacaccaaacagctggtgcacagtttcaccgaaggccgggaccagggcagcgcctatgccaaccgcacggccctcttcccggacctgctggcacaaggcaatgcatccctgaggctgcagcgcgtgcgtgtggcggacgagggcagcttcacctgcttcgtgagcatccgggatttcggcagcgctgccgtcagcctgcaggtggccgctccctactcgaagcccagcatgaccctggagcccaacaaggacctgcggccaggggacacggtgaccatcacgtgctccagctaccggggctaccctgaggctgaggtgttctggcaggatgggcagggtgtgcccctgactggcaacgtgaccacgtcgcagatggccaacgagcagggcttgtttgatgtgcacagcgtcctgcgggtggtgctgggtgcgaatggcacctacagctgcctggtgcgcaaccccgtgctgcagcaggatgcgcacggctctgtcaccatcacagggcagcctatgacattccccccagaggccctgtgggtgaccgtggggctgtctgtctgtctcattgcactgctggtggccctggctttcgtgtgctggagaaagatcaaacagagctgtgaggaggagaatgcaggagctgaggaccaggatggggagggagaaggctccaagacagccctgcagcctctgaaacactctgacagcaaagaaggtaaagacacctgggcttgaggttgtgtctgtgtatgcacacatctgtgtgtgagaggctgagagggtgggtaggcatcatcctttcactagtgacctgaggccccctctgcagaagagcagcctcaacttccccctggtgagatggcagagggctgagtaaccaaggtcccagctgctctgatgggacccaaatacgacagaggcttaagcaggacaggagtttattcctccttcctgtgatagtgtgagcataggtaatcgtaaaaccactgatgacctggagccaggttccacttacctggattctgccctcttcaacttcaagctttcactcctaggtctaagaggctgtttgtgctcccacgccccctccagagccaagagggagagaaaggaaggatatgtttccttctagagcttgagtggaagtagcctgcatcacttccgcttacattccattggtcagaacccaggcatatgagccctaactcaggggaggctagaaaagtgttcagctgggtagccatgtccctggcgcacagtgggtggttagtaaatgtccatagtcattattgggcctattgttataatgtcagtgatgacatttggaaatacaggagataggtcatttccttcctgtttttcagaatcaaataaccatagaagagctgggcagatggagataaaaagtgtcagcttaggccaggcatggtacttcacacctgtaatctcagcactttgggaggccgaggtgggtggatcacttgaggtcaggagtttgagaccagcctggccaacatggtgaaaccctgtctctactaaaaatacaaaacttagccgggcgtggtggtgcatgcctgtaatcccagctacttgggaagctgaggcgggagaatcacttgaacctgggaggcagaggttgcagtgaactgagattgcacctgtgcactccagcctgggcaacagagcaagattccatctc

SEQ ID NO: 115497 - DNA, 507 bp, Homo sapiens
  Payload ID: 2540
  Gene Symbol: CD276
  Gene Name: CD276 molecule
  ENST ID: ENST00000561416
  CDS Start-End: 353-507
ctttgtctgctgcgggccgggcctggatcccgcggaggtccgcacgttcccgctcagggctgcaggagctgagcagggcgccttccctccgggctcctgctcccctgccctcccccaggtccgggcggcccccctcgcacaggagtcccgggaaccgcgggcgcccctcctgccctgggctgtggggcccgcggagagctgggggctcccggatcctaccccgcccccctttcctcgggttgagaggggcccgggcgccgtcggacctgcagaccccggaagctgcggaccgggccgggcaggggcagccttccaccacggggagcccagctgtcagccgcctcacaggaagatgctgcgtcggcggggcagccctggcatgggtgtgcatgtgggtgcagccctgggagcactgtggttctgcctcacaggagccctggaggtccaggtccctgaagacccagtggtggcactggtgggcaccgatgccaccctgtgctgctcctt

SEQ ID NO: 115498 - DNA, 640 bp, Homo sapiens
  Payload ID: 2540
  Gene Symbol: CD276
  Gene Name: CD276 molecule
  ENST ID: ENST00000561176
  CDS Start-End: 1-598
gcgcgtgcgtgtggcggacgagggcagcttcacctgcttcgtgagcatccgggatttcggcagcgctgccgtcagcctgcaggtggccgctccctactcgaagcccagcatgaccctggagcccaacaaggacctgcggccaggggacacggtgaccatcacgtgctccagctaccggggctaccctgaggctgaggtgttctggcaggatgggcagggtgtgcccctgactggcaacgtgaccacgtcgcagatggccaacgagcagggcttgtttgatgtgcacagcgtcctgcgggtggtgctgggtgcgaatggcacctacagctgcctggtgcgcaaccccgtgctgcagcaggatgcgcacggctctgtcaccatcacagaggccctgtgggtgaccgtggggctgtctgtctgtctcattgcactgctggtggccctggctttcgtgtgctggagaaagatcaaacagagctgtgaggaggagaatgcaggagctgaggaccaggatggggagggagaaggctccaagacagccctgcagcctctgaaacactctgacagcaaagaagatgatggacaagaaatagcctgaccatgaggaccagggagctgctacccctccctacagctccta

SEQ ID NO: 115499 - DNA, 2181 bp, Homo sapiens
  Payload ID: 2540
  Gene Symbol: CD276
  Gene Name: CD276 molecule
  ENST ID: ENST00000560928
  CDS Start-End: 78-194
agtcccagagtcggcgcggcgcggcaggggcagccttccaccacggggagcccagctgtcagccgcctcacaggaagatgctgcgtcggcggggcagccctggcatgggtgtgcatgtgggtgcagccctgggagcactgtggttctgcctcacagctgacagataccaaacagctggtgcacagctttgctgagggccaggaccagggcagcgcctatgccaaccgcacggccctcttcccggacctgctggcacagggcaacgcatccctgaggctgcagcgcgtgcgtgtggcggacgagggcagcttcacctgcttcgtgagcatccgggatttcggcagcgctgccgtcagcctgcaggtggccgctccctactcgaagcccagcatgaccctggagcccaacaaggacctgcggccaggggacacggtgaccatcacgtgctccagctaccagggctaccctgaggctgaggtgttctggcaggatgggcagggtgtgcccctgactggcaacgtgaccacgtcgcagatggccaacgagcagggcttgtttgatgtgcacagcatcctgcgggtggtgctgggtgcaaatggcacctacagctgcctggtgcgcaaccccgtgctgcagcaggatgcgcacagctctgtcaccatcacaccccagagaagccccacaggagccgtggaggtccaggtccctgaggacccggtggtggccctagtgggcaccgatgccaccctgcgctgctccttctcccccgagcctggcttcagcctggcacagctcaacctcatctggcagctgacagacaccaaacagctggtgcacagtttcaccgaaggccgggaccagggcagcgcctatgccaaccgcacggccctcttcccggacctgctggcacaaggcaatgcatccctgaggctgcagcgcgtgcgtgtggcggacgagggcagcttcacctgcttcgtgagcatccgggatttcggcagcgctgccgtcagcctgcaggtggccgctccctactcgaagcccagcatgaccctggagcccaacaaggacctgcggccaggggacacggtgaccatcacgtgctccagctaccggggctaccctgaggctgaggtgttctggcaggatgggcagggtgtgcccctgactggcaacgtgaccacgtcgcagatggccaacgagcagggcttgtttgatgtgcacagcgtcctgcgggtggtgctgggtgcgaatggcacctacagctgcctggtgcgcaaccccgtgctgcagcaggatgcgcacggctctgtcaccatcacagggcagcctatgacattccccccagaggccctgtgggtgaccgtggggctgtctgtctgtctcattgcactgctggtggccctggctttcgtgtgctggagaaagatcaaacagagctgtgaggaggagaatgcaggagctgaggaccaggatggggagggagaaggctccaagacagccctgcagcctctgaaacactctgacagcaaagaagatgatggacaagaaatagcctgaccatgaggaccagggagctgctacccctccctacagctcctaccctctggctgcaatggggctgcactgtgagccctgcccccaacagatgcatcctgctctgacaggtgggctccttctccaaaggatgcgatacacagaccactgtgcagccttatttctccaatggacatgattcccaagtcatcctgctgccttttttcttatagacacaatgaacagaccacccacaaccttagttctctaagtcatcctgcctgctgccttatttcacagtacatacatttcttagggacacagtacactgaccacatcaccaccctcttcttccagtgctgcgtggaccatctggctgccttttttctccaaaagatgcaatattcagactgactgaccccctgccttatttcaccaaagacacgatgcatagtcaccccggccttgtttctccaatggccgtgatacactagtgatcatgttcagccctgcttccacctgcatagaatcttttcttctcagacagggacagtgcggcctcaacatctcctggagtctagaagctgtttcctttcccctccttcctcctcttgctctagccttaatactggccttttccctccctgc

SEQ ID NO: 115500 - DNA, 621 bp, Homo sapiens
  Payload ID: 2540
  Gene Symbol: CD276
  Gene Name: CD276 molecule
  ENST ID: ENST00000560995
  CDS Start-End: 224-621
tttcctcgggttgagaggggcccgggcgccgtcggacctgcagaccccggaagctgcggaccgggccgggtgggtgaatgcgcttttgcaggccccgggtctggagcgggcatgggggcagatctgtcccgtgttgaagcttaacgaagccaccggccggcgctgggaggcaggggcagccttccaccacggggagcccagctgtcagccgcctcacaggaagatgctgcgtcggcggggcagccctggcatgggtgtgcatgtgggtgcagccctgggagcactgtggttctgcctcacaggagccctggaggtccaggtccctgaagacccagtggtggcactggtgggcaccgatgccaccctgtgctgctccttctcccctgagcctggcttcagcctggcacagctcaacctcatctggcagctgacagataccaaacagctggtgcacagctttgctgagggccaggaccagggcagcgcctatgccaaccgcacggccctcttcccggacctgctggcacagggcaacgcatccctgaggctgcagcgcgtgcgtgtggcggacgagggcagcttcacctgcttcgtgagcatccgggatttcggcagcgctgc

SEQ ID NO: 115501 - DNA, 1844 bp, Homo sapiens
  Payload ID: 2540
  Gene Symbol: CD276
  Gene Name: CD276 molecule
  ENST ID: ENST00000559073
  CDS Start-End: 1-512
tgaccctggagcccaacaaggacctgcggccaggggacacggtgaccatcacgtgctccagctaccggggctaccctgaggctgaggtgttctggcaggatgggcagggtgtgcccctgactggcaacgtgaccacgtcgcagatggccaacgagcagggcttgtttgatgtgcacagcgtcctgcgggtggtgctgggtgcgaatggcacctacagctgcctggtgcgcaaccccgtgctgcagcaggatgcgcacggctctgtcaccatcacagggcagcctatgacattccccccagaggccctgtgggtgaccgtggggctgtctgtctgtctcattgcactgctggtggccctggctttcgtgtgctggagaaagatcaaacagagctgtgaggaggagaatgcaggagctgaggaccaggatggggagggagaaggctccaagacagccctgcagcctctgaaacactctgacagcaaagaagatgatggacaagaaatagcctgaccatgaggaccagggagctgctacccctccctacagctcctaccctctggctgcaatggggctgcactgtgagccctgcccccaacagatgcatcctgctctgacagtgctgcgtggaccatctggctgccttttttctccaaaagatgcaatattcagactgactgaccccctgccttatttcaccaaagacacgatgcatagtcaccccggccttgtttctccaatggccgtgatacactagtgatcatgttcagccctgcttccacctgcatagaatcttttcttctcagacagggacagtgcggcctcaacatctcctggagtctagaagctgtttcctttcccctccttcctcctcttgctctagccttaatactggccttttccctccctgccccaagtgaagacagggcactctgcgcccaccacatgcacagctgtgcatggagacctgcaggtgcacgtgctggaacacgtgtggttcccccctggcccagcctcctctgcagtgcccctctcccctgcccatcctccccacggaagcatgtgctggtcacactggttctccaggggtctgtgatggggcccctgggggtcagcttctgtccctctgccttctcacctctttgttcctttcttttcatgtatccattcagttgatgtttattgagcaactacagatgtcagcactgtgttaggtgctgggggccctgcgtgggaagataaagttcctccctcaaggactccccatccagctgggagacagacaactaactacactgcaccctgcggtttgcagggggctcctgcctggctccctgctccacacctcctctgtggctcaaggcttcctggatacctcacccccatcccacccataattcttacccagagcatggggttggggcggaaacctggagagagggacatagcccctcgccacggctagagaatctggtggtgtccaaaatgtctgtccaggtgtgggcaggtgggcaggcaccaaggccctctggacctttcatagcagcagaaaaggcagagcctggggcagggcagggccaggaatgctttggggacaccgaggggactgccccccacccccaccatggtgctattctggggctggggcagtcttttcctggcttgcctctggccagctcctggcctctggtagagtgagacttcagacgttctgatgccttccggatgtcatctctccctgccccaggaatggaagatgtgaggacttctaatttaaatgtgggactcggagggattttgtaaactgggggtatattttggggaaaataaatgtctttgtaaaaa

SEQ ID NO: 115502 - DNA, 649 bp, Homo sapiens
  Payload ID: 2540
  Gene Symbol: CD276
  Gene Name: CD276 molecule
  ENST ID: ENST00000558689
  CDS Start-End: 240-649
attcgggccgggcctcgctgcggcggcgactgagccaggctgggccgcgtccctgagtcccagagtcggcgcggcgcgtcttgcagtatcgcccagactggagtacagtggcgcgatttccactcactacaacctccgcctcctgggttcaagcaattctcctgcctcagcctcctgagtagctggcaggggcagccttccaccacggggagcccagctgtcagccgcctcacaggaagatgctgcgtcggcggggcagccctggcatgggtgtgcatgtgggtgcagccctgggagcactgtggttctgcctcacaggagccctggaggtccaggtccctgaagacccagtggtggcactggtgggcaccgatgccaccctgtgctgctccttctcccctgagcctggcttcagcctggcacagctcaacctcatctggcagctgacagataccaaacagctggtgcacagctttgctgagggccaggaccagggcagcgcctatgccaaccgcacggccctcttcccggacctgctggcacagggcaacgcatccctgaggctgcagcgcgtgcgtgtggcggacgagggcagcttcacctgcttcgtgagcatccgggatttcggcagcgctgccgtcagcctgca

SEQ ID NO: 115503 - DNA, 505 bp, Homo sapiens
  Payload ID: 2540
  Gene Symbol: CD276
  Gene Name: CD276 molecule
  ENST ID: ENST00000563584
  CDS Start-End: 67-505
agtcccagagtcggcgcggcgcggccccacctcttaatactgttacagtggcaattaaatttcaacatgagtcttaaagcacccatgtcatctaggaagaagaaactgtatttgcagcaacactgtgaggcaggggcagccttccaccacggggagcccagctgtcagccgcctcacaggaagatgctgcgtcggcggggcagccctggcatgggtgtgcatgtgggtgcagccctgggagcactgtggttctgcctcacaggagccctggaggtccaggtccctgaagacccagtggtggcactggtgggcaccgatgccaccctgtgctgctccttctcccctgagcctggcttcagcctggcacagctcaacctcatctggcagctgacagataccaaacagctggtgcacagctttgctgagggccaggaccagggcagcgcctatgccaaccgcacggccctcttcccggacctgctggcacagggcaacgcatccctga

SEQ ID NO: 115504 - DNA, 951 bp, Homo sapiens
  Payload ID: 2540
  Gene Symbol: CD276
  Gene Name: CD276 molecule
  Uniprot ID: Q5ZPR3
  ENST ID: ENST00000564751
  CDS Start-End: 1-951
atgctgcgtcggcggggcagccctggcatgggtgtgcatgtgggtgcagccctgggagcactgtggttctgcctcacaggagccctggaggtccaggtccctgaagacccagtggtggcactggtgggcaccgatgccaccctgtgctgctccttctcccctgagcctggcttcagcctggcacagctcaacctcatctggcagctgacagataccaaacagctggtgcacagctttgctgagggccaggaccagggcagcgcctatgccaaccgcacggccctcttcccggacctgctggcacagggcaacgcatccctgaggctgcagcgcgtgcgtgtggcggacgagggcagcttcacctgcttcgtgagcatccgggatttcggcagcgctgccgtcagcctgcaggtggccgctccctactcgaagcccagcatgaccctggagcccaacaaggacctgcggccaggggacacggtgaccatcacgtgctccagctaccggggctaccctgaggctgaggtgttctggcaggatgggcagggtgtgcccctgactggcaacgtgaccacgtcgcagatggccaacgagcagggcttgtttgatgtgcacagcgtcctgcgggtggtgctgggtgcgaatggcacctacagctgcctggtgcgcaaccccgtgctgcagcaggatgcgcacggctctgtcaccatcacagggcagcctatgacattccccccagaggccctgtgggtgaccgtggggctgtctgtctgtctcattgcactgctggtggccctggctttcgtgtgctggagaaagatcaaacagagctgtgaggaggagaatgcaggagctgaggaccaggatggggagggagaaggctccaagacagccctgcagcctctgaaacactctgacagcaaagaagatgatggacaagaaatagcctga

SEQ ID NO: 115505 - DNA, 550 bp, Homo sapiens
  Payload ID: 2540
  Gene Symbol: CD276
  Gene Name: CD276 molecule
  ENST ID: ENST00000567189
  CDS Start-End: 153-550
ctttctgggctgtggtgccagcatggtgtggaggaagaacccaagactggggttggacagcaggattccagccctgttctgccgccagtcgatgaccagcaggggcagccttccaccacggggagcccagctgtcagccgcctcacaggaagatgctgcgtcggcggggcagccctggcatgggtgtgcatgtgggtgcagccctgggagcactgtggttctgcctcacaggagccctggaggtccaggtccctgaagacccagtggtggcactggtgggcaccgatgccaccctgtgctgctccttctcccctgagcctggcttcagcctggcacagctcaacctcatctggcagctgacagataccaaacagctggtgcacagctttgctgagggccaggaccagggcagcgcctatgccaaccgcacggccctcttcccggacctgctggcacagggcaacgcatccctgaggctgcagcgcgtgcgtgtggcggacgagggcagcttcacctgcttcgtgagcatccgggatttcggcagcgctgc

SEQ ID NO: 115506 - DNA, 556 bp, Homo sapiens
  Payload ID: 2540
  Gene Symbol: CD276
  Gene Name: CD276 molecule
  ENST ID: ENST00000567582
  CDS Start-End: 83-199
agaccccggaagctgcggaccgggccgggcaggggcagccttccaccacggggagcccagctgtcagccgcctcacaggaagatgctgcgtcggcggggcagccctggcatgggtgtgcatgtgggtgcagccctgggagcactgtggttctgcctcacagctgacagataccaaacagctggtgcacagctttgctgagggccaggaccagggcagcgcctatgccaaccgcacggccctcttcccggacctgctggcacagggcaacgcatccctgaggctgcagcgcgtgcgtgtggcggacgagggcagcttcacctgcttcgtgagcatccgggatttcggcagcgctgccgtcagcctgcaggtggccgctccctactcgaagcccagcatgaccctggagcccaacaaggacctgcggccaggggacacggtgaccatcacgtgctccagctaccagggctaccctgaggctgaggtgttctggcaggatgggcagggtgtgcccctgactggcaacgtgaccacgtcgcagatggccaacgagcaggg

SEQ ID NO: 115507 - DNA, 4812 bp, Homo sapiens
  Payload ID: 2541
  Gene Symbol: CD28
  Gene Name: CD28 molecule
  Uniprot ID: P10747
  ENST ID: ENST00000324106
  CDS Start-End: 150-812
atcatgtgccctaaggggatggtggcggtggtggtggccgtggatgacggagactctcaggccttggcaggtgcgtctttcagttcccctcacacttcgggttcctcggggaggaggggctggaaccctagcccatcgtcaggacaaagatgctcaggctgctcttggctctcaacttattcccttcaattcaagtaacaggaaacaagattttggtgaagcagtcgcccatgcttgtagcgtacgacaatgcggtcaaccttagctgcaagtattcctacaatctcttctcaagggagttccgggcatcccttcacaaaggactggatagtgctgtggaagtctgtgttgtatatgggaattactcccagcagcttcaggtttactcaaaaacggggttcaactgtgatgggaaattgggcaatgaatcagtgacattctacctccagaatttgtatgttaaccaaacagatatttacttctgcaaaattgaagttatgtatcctcctccttacctagacaatgagaagagcaatggaaccattatccatgtgaaagggaaacacctttgtccaagtcccctatttcccggaccttctaagcccttttgggtgctggtggtggttggtggagtcctggcttgctatagcttgctagtaacagtggcctttattattttctgggtgaggagtaagaggagcaggctcctgcacagtgactacatgaacatgactccccgccgccccgggcccacccgcaagcattaccagccctatgccccaccacgcgacttcgcagcctatcgctcctgacacggacgcctatccagaagccagccggctggcagcccccatctgctcaatatcactgctctggataggaaatgaccgccatctccagccggccacctcaggcccctgttgggccaccaatgccaatttttctcgagtgactagaccaaatatcaagatcattttgagactctgaaatgaagtaaaagagatttcctgtgacaggccaagtcttacagtgccatggcccacattccaacttaccatgtacttagtgacttgactgagaagttagggtagaaaacaaaaagggagtggattctgggagcctcttccctttctcactcacctgcacatctcagtcaagcaaagtgtggtatccacagacattttagttgcagaagaaaggctaggaaatcattccttttggttaaatgggtgtttaatcttttggttagtgggttaaacggggtaagttagagtagggggagggataggaagacatatttaaaaaccattaaaacactgtctcccactcatgaaatgagccacgtagttcctatttaatgctgttttcctttagtttagaaatacatagacattgtcttttatgaattctgatcatatttagtcattttgaccaaatgagggatttggtcaaatgagggattccctcaaagcaatatcaggtaaaccaagttgctttcctcactccctgtcatgagacttcagtgttaatgttcacaatatactttcgaaagaataaaatagttctcctacatgaagaaagaatatgtcaggaaataaggtcactttatgtcaaaattatttgagtactatgggacctggcgcagtggctcatgcttgtaatcccagcactttgggaggccgaggtgggcagatcacttgagatcaggaccagcctggtcaagatggtgaaactccgtctgtactaaaaatacaaaatttagcttggcctggtggcaggcacctgtaatcccagctgcccaagaggctgaggcatgagaatcgcttgaacctggcaggcggaggttgcagtgagccgagatagtgccacagctctccagcctgggcgacagagtgagactccatctcaaacaacaacaacaacaacaacaacaacaacaaaccacaaaattatttgagtactgtgaaggattatttgtctaacagttcattccaatcagaccaggtaggagctttcctgtttcatatgtttcagggttgcacagttggtctctttaatgtcggtgtggagatccaaagtgggttgtggaaagagcgtccataggagaagtgagaatactgtgaaaaagggatgttagcattcattagagtatgaggatgagtcccaagaaggttctttggaaggaggacgaatagaatggagtaatgaaattcttgccatgtgctgaggagatagccagcattaggtgacaatcttccagaagtggtcaggcagaaggtgccctggtgagagctcctttacagggactttatgtggtttagggctcagagctccaaaactctgggctcagctgctcctgtaccttggaggtccattcacatgggaaagtattttggaatgtgtcttttgaagagagcatcagagttcttaagggactgggtaaggcctgaccctgaaatgaccatggatatttttctacctacagtttgagtcaactagaatatgcctggggaccttgaagaatggcccttcagtggccctcaccatttgttcatgcttcagttaattcaggtgttgaaggagcttaggttttagaggcacgtagacttggttcaagtctcgttagtagttgaatagcctcaggcaagtcactgcccacctaagatgatggttcttcaactataaaatggagataatggttacaaatgtctcttcctatagtataatctccataagggcatggcccaagtctgtctttgactctgcctatccctgacatttagtagcatgcccgacatacaatgttagctattggtattattgccatatagataaattatgtataaaaattaaactgggcaatagcctaagaaggggggaatattgtaacacaaatttaaacccactacgcagggatgaggtgctataatatgaggaccttttaacttccatcattttcctgtttcttgaaatagtttatcttgtaatgaaatataaggcacctcccacttttatgtatagaaagaggtcttttaatttttttttaatgtgagaaggaagggaggagtaggaatcttgagattccagatcgaaaatactgtactttggttgatttttaagtgggcttccattccatggatttaatcagtcccaagaagatcaaactcagcagtacttgggtgctgaagaactgttggatttaccctggcacgtgtgccacttgccagcttcttgggcacacagagttcttcaatccaagttatcagattgtatttgaaaatgacagagctggagagttttttgaaatggcagtggcaaataaataaatacttttttttaaatggaaagacttgatctatggtaataaatgattttgttttctgactggaaaaataggcctactaaagatgaatcacacttgagatgtttcttactcactctgcacagaaacaaagaagaaatgttatacagggaagtccgttttcactattagtatgaaccaagaaatggttcaaaaacagtggtaggagcaatgctttcatagtttcagatatggtagttatgaagaaaacaatgtcatttgctgctattattgtaagagtcttataattaatggtactcctataatttttgattgtgagctcacctatttgggttaagcatgccaatttaaagagaccaagtgtatgtacattatgttctacatattcagtgataaaattactaaactactatatgtctgctttaaatttgtactttaatattgtcttttggtattaagaaagatatgctttcagaatagatatgcttcgctttggcaaggaatttggatagaacttgctatttaaaagaggtgtggggtaaatccttgtataaatctccagtttagccttttttgaaaaagctagactttcaaatactaatttcacttcaagcagggtacgtttctggtttgtttgcttgacttcagtcacaatttcttatcagaccaatggctgacctctttgagatgtcaggctaggcttacctatgtgttctgtgtcatgtgaatgctgagaagtttgacagagatccaacttcagccttgaccccatcagtccctcgggttaactaactgagccaccggtcctcatggctattttaatgagggtattgatggttaaatgcatgtctgatcccttatcccagccatttgcactgccagctgggaactataccagacctggatactgatcccaaagtgttaaattcaactacatgctggagattagagatggtgccaataaaggacccagaaccaggatcttgattgctatagacttattaataatccaggtcaaagagagtgacacacactctctcaagacctggggtgagggagtctgtgttatctgcaaggccatttgaggctcagaaagtctctctttcctatagatatatgcatactttctgacatataggaatgtatcaggaatactcaaccatcacaggcatgttcctacctcagggcctttacatgtcctgtttactctgtctagaatgtccttctgtagatgacctggcttgcctcgtcacccttcaggtccttgctcaagtgtcatcttctcccctagttaaactaccccacaccctgtctgctttccttgcttatttttctccatagcattttaccatctcttacattagacatttttcttatttatttgtagtttataagcttcatgaggcaagtaactttgctttgtttcttgctgtatctccagtgcccagagcagtgcctggtatataataaatatttattgactgagtgaa

SEQ ID NO: 115508 - DNA, 4526 bp, Homo sapiens
  Payload ID: 2541
  Gene Symbol: CD28
  Gene Name: CD28 molecule
  Uniprot ID: P10747
  ENST ID: ENST00000374481
  CDS Start-End: 223-528
taaagtcatcaaaacaacgttatatcctgtgtgaaatgctgcagtcaggatgccttgtggtttgagtgccttgatcatgtgccctaaggggatggtggcggtggtggtggccgtggatgacggagactctcaggccttggcaggtgcgtctttcagttcccctcacacttcgggttcctcggggaggaggggctggaaccctagcccatcgtcaggacaaagatgctcaggctgctcttggctctcaacttattcccttcaattcaagtaacagggaaacacctttgtccaagtcccctatttcccggaccttctaagcccttttgggtgctggtggtggttggtggagtcctggcttgctatagcttgctagtaacagtggcctttattattttctgggtgaggagtaagaggagcaggctcctgcacagtgactacatgaacatgactccccgccgccccgggcccacccgcaagcattaccagccctatgccccaccacgcgacttcgcagcctatcgctcctgacacggacgcctatccagaagccagccggctggcagcccccatctgctcaatatcactgctctggataggaaatgaccgccatctccagccggccacctcaggcccctgttgggccaccaatgccaatttttctcgagtgactagaccaaatatcaagatcattttgagactctgaaatgaagtaaaagagatttcctgtgacaggccaagtcttacagtgccatggcccacattccaacttaccatgtacttagtgacttgactgagaagttagggtagaaaacaaaaagggagtggattctgggagcctcttccctttctcactcacctgcacatctcagtcaagcaaagtgtggtatccacagacattttagttgcagaagaaaggctaggaaatcattccttttggttaaatgggtgtttaatcttttggttagtgggttaaacggggtaagttagagtagggggagggataggaagacatatttaaaaaccattaaaacactgtctcccactcatgaaatgagccacgtagttcctatttaatgctgttttcctttagtttagaaatacatagacattgtcttttatgaattctgatcatatttagtcattttgaccaaatgagggatttggtcaaatgagggattccctcaaagcaatatcaggtaaaccaagttgctttcctcactccctgtcatgagacttcagtgttaatgttcacaatatactttcgaaagaataaaatagttctcctacatgaagaaagaatatgtcaggaaataaggtcactttatgtcaaaattatttgagtactatgggacctggcgcagtggctcatgcttgtaatcccagcactttgggaggccgaggtgggcagatcacttgagatcaggaccagcctggtcaagatggtgaaactccgtctgtactaaaaatacaaaatttagcttggcctggtggcaggcacctgtaatcccagctgcccaagaggctgaggcatgagaatcgcttgaacctggcaggcggaggttgcagtgagccgagatagtgccacagctctccagcctgggcgacagagtgagactccatctcaaacaacaacaacaacaacaacaacaacaacaaaccacaaaattatttgagtactgtgaaggattatttgtctaacagttcattccaatcagaccaggtaggagctttcctgtttcatatgtttcagggttgcacagttggtctctttaatgtcggtgtggagatccaaagtgggttgtggaaagagcgtccataggagaagtgagaatactgtgaaaaagggatgttagcattcattagagtatgaggatgagtcccaagaaggttctttggaaggaggacgaatagaatggagtaatgaaattcttgccatgtgctgaggagatagccagcattaggtgacaatcttccagaagtggtcaggcagaaggtgccctggtgagagctcctttacagggactttatgtggtttagggctcagagctccaaaactctgggctcagctgctcctgtaccttggaggtccattcacatgggaaagtattttggaatgtgtcttttgaagagagcatcagagttcttaagggactgggtaaggcctgaccctgaaatgaccatggatatttttctacctacagtttgagtcaactagaatatgcctggggaccttgaagaatggcccttcagtggccctcaccatttgttcatgcttcagttaattcaggtgttgaaggagcttaggttttagaggcacgtagacttggttcaagtctcgttagtagttgaatagcctcaggcaagtcactgcccacctaagatgatggttcttcaactataaaatggagataatggttacaaatgtctcttcctatagtataatctccataagggcatggcccaagtctgtctttgactctgcctatccctgacatttagtagcatgcccgacatacaatgttagctattggtattattgccatatagataaattatgtataaaaattaaactgggcaatagcctaagaaggggggaatattgtaacacaaatttaaacccactacgcagggatgaggtgctataatatgaggaccttttaacttccatcattttcctgtttcttgaaatagtttatcttgtaatgaaatataaggcacctcccacttttatgtatagaaagaggtcttttaatttttttttaatgtgagaaggaagggaggagtaggaatcttgagattccagatcgaaaatactgtactttggttgatttttaagtgggcttccattccatggatttaatcagtcccaagaagatcaaactcagcagtacttgggtgctgaagaactgttggatttaccctggcacgtgtgccacttgccagcttcttgggcacacagagttcttcaatccaagttatcagattgtatttgaaaatgacagagctggagagttttttgaaatggcagtggcaaataaataaatacttttttttaaatggaaagacttgatctatggtaataaatgattttgttttctgactggaaaaataggcctactaaagatgaatcacacttgagatgtttcttactcactctgcacagaaacaaagaagaaatgttatacagggaagtccgttttcactattagtatgaaccaagaaatggttcaaaaacagtggtaggagcaatgctttcatagtttcagatatggtagttatgaagaaaacaatgtcatttgctgctattattgtaagagtcttataattaatggtactcctataatttttgattgtgagctcacctatttgggttaagcatgccaatttaaagagaccaagtgtatgtacattatgttctacatattcagtgataaaattactaaactactatatgtctgctttaaatttgtactttaatattgtcttttggtattaagaaagatatgctttcagaatagatatgcttcgctttggcaaggaatttggatagaacttgctatttaaaagaggtgtggggtaaatccttgtataaatctccagtttagccttttttgaaaaagctagactttcaaatactaatttcacttcaagcagggtacgtttctggtttgtttgcttgacttcagtcacaatttcttatcagaccaatggctgacctctttgagatgtcaggctaggcttacctatgtgttctgtgtcatgtgaatgctgagaagtttgacagagatccaacttcagccttgaccccatcagtccctcgggttaactaactgagccaccggtcctcatggctattttaatgagggtattgatggttaaatgcatgtctgatcccttatcccagccatttgcactgccagctgggaactataccagacctggatactgatcccaaagtgttaaattcaactacatgctggagattagagatggtgccaataaaggacccagaaccaggatcttgattgctatagacttattaataatccaggtcaaagagagtgacacacactctctcaagacctggggtgagggagtctgtgttatctgcaaggccatttgaggctcagaaagtctctctttcctatagatatatgcatactttctgacatataggaatgtatcaggaatactcaaccatcacaggcatgttcctacctcagggcctttacatgtcctgtttactctgtctagaatgtccttctgtagatgacctggcttgcctcgtcacccttcaggtccttgctcaagtgtcatcttctcccctagttaaactaccccacaccctgtctgctttccttgcttatttttctccatagcattttaccatctcttacattagacatttttcttatttatttgtagtttataagcttcatgaggcaagtaactttgctttgtttcttgctgtatctccagtgcccagagcagtgcctggtatataataaatatttattgactgagtg

SEQ ID NO: 115509 - DNA, 705 bp, Homo sapiens
  Payload ID: 2541
  Gene Symbol: CD28
  Gene Name: CD28 molecule
  Uniprot ID: P10747
  ENST ID: ENST00000458610
  CDS Start-End: 1-705
atgccttgtggtttgagtgccttgatcatgtgccctaaggggatggtggcggtggtggtggccgtggatgacggagactctcaggccttggcaggaaacaagattttggtgaagcagtcgcccatgcttgtagcgtacgacaatgcggtcaaccttagctgcaagtattcctacaatctcttctcaagggagttccgggcatcccttcacaaaggactggatagtgctgtggaagtctgtgttgtatatgggaattactcccagcagcttcaggtttactcaaaaacggggttcaactgtgatgggaaattgggcaatgaatcagtgacattctacctccagaatttgtatgttaaccaaacagatatttacttctgcaaaattgaagttatgtatcctcctccttacctagacaatgagaagagcaatggaaccattatccatgtgaaagggaaacacctttgtccaagtcccctatttcccggaccttctaagcccttttgggtgctggtggtggttggtggagtcctggcttgctatagcttgctagtaacagtggcctttattattttctgggtgaggagtaagaggagcaggctcctgcacagtgactacatgaacatgactccccgccgccccgggcccacccgcaagcattaccagccctatgccccaccacgcgacttcgcagcctatcgctcctga

SEQ ID NO: 115510 - DNA, 5412 bp, Homo sapiens
  Payload ID: 2542
  Gene Symbol: CD2AP
  Gene Name: CD2-associated protein
  Uniprot ID: Q9Y5K6
  ENST ID: ENST00000359314
  CDS Start-End: 457-2376
ctctgtctgggtccccaccttagtctacggtgtcgccttttctaactgcgagtgctaaggaagaggcgaggggcgggctccgaggctaggcgggcgctcggggttggagccgagggtctgggcaaaccggtgggtccctccccactgcgggagcggccagggtgggaaaaccgcggtcgggcgggcggggtagggccctcccgccgccgtggctcctggggaggccaggggtgaggagctgtcgccgcctttgcctctgcctcgagggccgcgctgaagagactggtaggagagcgccgcgggcggatggaggcgactcttcgccccgcctgagctcaggaggggctagcgcggagcgcgggtcccgcctccagccgcgggagcggccgcgcgagccaccactggaggaggaggaggaggagcggacgtcggcttctccccgcgggagcccccagcatggttgactatattgtggagtatgactatgatgctgtacatgatgatgaattaactattcgagttggagaaatcatcaggaatgtgaaaaagctacaggaggaagggtggctggaaggagaactaaatgggagaagaggaatgttccctgacaatttcgttaaggaaattaaaagagagacggaattcaaggatgacagtttgcccatcaaacgggaaaggcatgggaatgtagcaagtcttgtacaacgaataagcacctatggacttccagctggaggaattcagccacatccacaaaccaaaaacattaagaagaagaccaagaagcgtcagtgtaaagttctttttgagtacattccacaaaatgaggatgaactggagctgaaagtgggagatattattgatattaatgaagaggtagaagaaggctggtggagtggaaccctgaataacaagttgggactgtttccctcaaattttgtgaaagaattagaggtaacagatgatggtgaaactcatgaagcccaggacgattcagaaactgttttggctgggcctacttcacctataccttctctgggaaatgtgagtgaaactgcatctggatcagttacacagccaaagaaaattcgaggaattggatttggagacatttttaaagaaggctctgtgaaacttcggacaagaacatccagtagtgaaacagaagagaaaaaaccagaaaagcccttaatcctacagtcactgggacccaaaactcagagtgtggagataacaaaaacagataccgaaggtaaaattaaagctaaagaatattgtagaacattatttgcctatgaaggtactaatgaagatgaacttacttttaaagagggggagataatccatttgataagtaaggagactggagaagctggctggtggaggggcgaacttaatggtaaagaaggagtatttccagacaattttgctgtccagataaatgaacttgataaagactttccaaaaccaaagaaaccaccacctcctgctaaggctccagctccaaagcctgaactgatagctgcagagaagaaatatttttctttaaagcctgaagaaaaggatgaaaaatcaacactggaacagaaaccttctaaaccagcagctccacaagtcccacccaagaaacctactccacctaccaaagccagtaatttactgagatcttctggaacagtgtacccaaagcgacctgaaaaaccagttcctccaccacctcctatagccaagattaatggggaagtttctagcatttcatcaaaatttgaaactgagccagtatcaaaactaaagctagattctgaacagctgccccttagaccaaaatcagtagactttgattcacttacagtaaggacctccaaagaaacagatgttgtaaattttgatgacatagcttcctcagaaaacttgcttcatctcactgcaaatagaccaaagatgcctggaagaaggttgccgggccgtttcaatggtggacattctccaactcacagccccgaaaaaatcttgaagttaccaaaagaagaagacagtgccaacctgaagccatctgaattaaaaaaagatacatgctactctccaaagccatctgtgtacctttcaacaccttccagtgcttctaaagcaaatacaactgctttcctgactccattagaaatcaaagctaaagtggaaacagatgatgtgaaaaaaaattccctggatgaacttagagcccagattattgaattgttgtgcattgtagaagcactgaaaaaggatcacgggaaagaactggaaaaactgcgaaaagatttggaagaagagaagacaatgagaagtaatctagagatggaaatagagaagctgaaaaaagctgtcctgtcttcttgagtggtgtggacctggtgttcataatgttccagggattcagaagcaacgctatgaacttcagctgacttgttacttaaaaattgtgaattctgttgttgtgataaatatgagcaaatgaagtgtaatatctatagaaaagtagagtgagggtgaatttatatatatattttgttttgccaatatgaagaaaaagaggccttatttcttaactgtgctgggattgcaaacactttttaaaaaattgtttgcttgaaaatactactgaatataaataagaatgtgcacagtagtttttttattgaaacttgtattatttttaaagagatctatactataaatatggtgatatatttacaagtaatctgttaagatatactatttgagagggacagattagccttttagtaactatagtcactactttttccataatgcataagggatataaactctgtgtgtgtgtgtgtgtgtgtgtgtgtgtgtgtgtgtgtgtgtatatatatatatatatttttacttttatcctcttaccgaaggttacactgttgtgcctgtttgtctgcaatgctgtttatattttgggtgatgaaataggagtttcctagctatataaaccagattactcacccatgcatatagtaagaactaatgaataatcaaaataatttcatcaacttttagaatattttatgttgcttgcactataggagtcataaaaggaacttagttaaaatatgttggattgttaaacatttggggaaatatgaactgtattttaaatttgttaggtctgaagaatctaaaactgttaatttaacccttaacttgtgcctagaaactacagcacatataaaatatgtaaacaccagcctgttgctgtacttttctgcttattttacagcctcaaatatttctcattatcttgtcacttagttcttcatgtttctccttctgacttttaataatggtaataggaaaacaaaacccaaagcttttcagaacttcagtgtgaggtttcctattttgacaagttaacttgtaaatactcaggttttacgatgtataatttacctaatagaccaaactaactcatggagatattttgaactattatttaggtacaaactttataaagaatgttagtatgtcataaaatataacattacagcttatttaaaaccaaatatagttgaacatatttaaaatacattttcacagaatggatgaattagttgtttcttcagagttacttatgaacagttgaatgctttaaaatgttctgtctgtaggtaacatctaaaacacaagtgggtttatttaaatttttaaaatttgaaattttttatttgcaaaaaattgttttatgctttattatatcgcaaatgagtgtcagatttttgagtaccaatgatcatgcttccattttttttagttttaaaccaccaaaccaatatttttcctttaaattttaatcttataatatagaaatcttatgtaaatgaaattttgtcatgtttcaaataaagagaactgaagtagaaaatagaaatgccagtaaacaacataatgtttaatttacaacttacattaggggtttgggggaatgctaattatatattgagaatatacattagaactcttcaaaatgggctcttctaatgaggtcactactgaacaaaattgttccctcttctgttaaatagaataggtttaaatgactagtcaaatgaattattttcttcttgttaaataaattaaatcttactttcttttaatgaccaaccttaggtaaaacaaaaatattgtaatcctagaaattatcctccagctttctcacctgaaaatctattgaagtgatccctggtcatcctaataatgggatgagggaagtttccagcagatttcaggctgttcttaaagtttttgttggtcattttctcaatagtacatgaaatcaagatgcttatgagcatggaaatgtatttaaagtttttgcttgtgtcctcctcagtcagaatagaaaagtaactgaaatacttttacctttctgtccttgataaaatagtaaagaaaaccaaacaaacccaggcctgatgggaaaaatgattcctttattctagcaacttactttctgttggtatgggaaatgttattaatttctattactaaagttcatatcacaaaatgatatttaataataaccttggggtaaatcatgaattttttttctacgtgtgagtataaaagacaaaagttgaacagcatggaatctcattgccaaattattagtgaatgtatagttcaggtattctttgagacacacagtatcattaatttctgaattgtatttcagtgttattttttgtttgtgaccactaagcttctgtcttaatacaaagctgttaccttctacagaatttaagtctgaagatgtaaagagagaacaggccttgtgtaacagaagatactcttttttatgctccttactgtgatcacagaaaaattaaaaatccaagtgctctctagatttgttgataaacattttatgcttgcatttaaacttgaaatgtatgagcagaatgagacaatcagttaaatcagaaatgagaagtattataatgtaaaggccttgttttgctgtagcaataaaatgaccaagtgcaatgacttgatttaataaaatcatattttaaaagttgctgctatgaatatttttggctataaaattttaccctgacttgctttcaataactgttacgtaatgcagttgatgttgtaacctaacattccaaaaaaaaaattgagagggggaatctcaaaatagtatatacttcactaacttgtttacaggtgctgtatttaaaagcatgcttctctctcaaaaagaaaaattaaaggattttattgccagtcgtgtcagtctttattggttattttttgttaactttagcatttgtgtatttcagagtatgatgaaaattatattacttcaatttccaaatacaagaataaatagtaaaccaaaaacattaaaaa

SEQ ID NO: 115511 - DNA, 993 bp, Homo sapiens
  Payload ID: 2543
  Gene Symbol: CD300LB
  Gene Name: CD300 molecule-like family member b
  ENST ID: ENST00000314401
  CDS Start-End: 125-571
aaaggcggtctagatgtgcagaaggtgcaagccagagctcaggcagaacttccagagtgcatctgggatctgcatttgccactggttgcagatcaggcggacgaggagccgggaaggcagagccatgtggctgccccctgctctgctccttctcagcctctcaggctgtttctccatccaaggcccagagtctgtgagagccccagagcaggggtccctgacggttcaatgccactataagcaaggatgggagacctacattaagtggtggtgccgaggggtgcgctgggatacatgcaagatcctcattgaaaccagagggtcggagcaaggagagaagagtgaccgtgtgtccatcaaggacaatcagaaagaccgcacgttcactgtgaccatggaggggctcaggcgagatgacgcagatgtttactggtgtgggattgaaagaagaggacctgaccttgggactcaagtgaaagtgatcgttgacccagagggagcggcttccacaacagcaagctcacctaccaacagcaatatggcagtgttcatcggctcccacaagaggtgagtcatgtggttctttctcctgcccctacctggggtccctcctaaggggaagccaagcctgggaactcctgcctgtcaccaaatgccagcacctgttctagccagagtcaaggccccaagcccaccctccatctctctcctgcccccatcactgcaatccaccatctccccactctagctctcaccagaaaaccgctctgcagaactcttctcagtgagcatcattctcccagtcaatcagtcaaccttgcattggtggcctaatgggtgccagggggagataagataccaccctctgtggtgcaagacatcaagggacacagaacaggaagggtgatttaccagcctggagctagcattagcaggaacagaggcaggaaacacaacctgtatttggtgacctctggcgcttctgttgagctg

SEQ ID NO: 115512 - DNA, 2286 bp, Homo sapiens
  Payload ID: 2543
  Gene Symbol: CD300LB
  Gene Name: CD300 molecule-like family member b
  Uniprot ID: A8K4G0
  ENST ID: ENST00000392621
  CDS Start-End: 117-722
tctagatgtgcagaaggtgcaagccagagctcaggcagaacttccagagtgcatctgggatctgcatttgccactggttgcagatcaggcggacgaggagccgggaaggcagagccatgtggctgccccctgctctgctccttctcagcctctcaggctgtttctccatccaaggcccagagtctgtgagagccccagagcaggggtccctgacggttcaatgccactataagcaaggatgggagacctacattaagtggtggtgccgaggggtgcgctgggatacatgcaagatcctcattgaaaccagagggtcggagcaaggagagaagagtgaccgtgtgtccatcaaggacaatcagaaagaccgcacgttcactgtgaccatggaggggctcaggcgagatgacgcagatgtttactggtgtgggattgaaagaagaggacctgaccttgggactcaagtgaaagtgatcgttgacccagagggagcggcttccacaacagcaagctcacctaccaacagcaatatggcagtgttcatcggctcccacaagaggaaccactacatgctcctggtatttgtgaaggtgcccatcttgctcatcttggtcactgccatcctctggttgaaggggtctcagagggtccctgaggagccaggggaacagcctatctacatgaacttctccgaacctctgactaaagacatggccacttagagagatggatctgcagagccttcctgccctggccacgtttccagaagagactcgggctgtggaaggaacatctacgagtcctcgggatgcagtgactgagataggggccctgggcctccgccctggccttggagctggtgggcacctccctgttctgcacagctcagggacttagccaggtcctctcctgagccaccatcacctcctggggtgccagcacctgttctcttggtcaggagctgtagagatggagctcaagcactggacgactctgtccccactgctggaataactcgggcacagagcatgggaccaaagtacagaaagaggttgggggagacccccccagccctagacttccatcattccggagaccaactcaacaccgtctttgcctgagaacctgatatatccgtgtttttaaatttttttttttctagcaaagttgggttttaatgacttatgttcataggaaacctctctgatcccacacacaaggagggtgattctgggatgagttcctggttctagggcatgaggggctggatggaccctgtccccagggaggacatggctctgagtccacagggctgaggaggcaatgggaacctccctggcccggcccggtgcttgtcctccccctcccacctcttcctcctcctagctccccaagctccctgcctattcccccacctccgaggggctgcagcttgggagcctcctcagcatgacagcttgggtctcctccccaaaagagcctgtcaggcctcaagaaccacctccaggtggggagggcagtaacgaaaaccatcgcaggaaatggcaccctcccttttcggtgatgttgaaatcatgttactaatgaaaactgtcctagggaagtggttctgtctcctcacaggcttcacccacggcgatgaggcccttgaatgtggtcactttgtgctgtatggttgagggaccctcacaccaaagggaccttcccatgtgagatgtgctcccgcccccacctgcccacaagcaaacacaccacacatgttcggcatgttgccctttgaacacccatgaggacgcctccaacctgctcttggttctaatagggagtactgactgtcagcagtggataaaggagaggggaccctctggtccctagcatggcacccagagcctcccctcttcttgtccttcagccaaagagaaactttctctgactttgaactgaatttaggtctctggccaatgatgggcctgaaaattccataatggccagagaggagagttcgagcccggctaagatcccctgagtcattctgtgagggaccaagacccacagtccaccagccccagggccctacctcctggaatgctttcctggatccagcttcccgaagatccgaccagacccagggaggacggcaccgctccgcgggagggaaagccaaagcatggtgcttcaccagctggactcaggggcgaggggacatgggcgcttgtcaacgtgatgtcattcttttcccaccgtttcttcctgttgatattcaatgaatccgtcaatctctctgga

SEQ ID NO: 115513 - DNA, 1303 bp, Homo sapiens
  Payload ID: 2544
  Gene Symbol: CD300LD
  Gene Name: CD300 molecule-like family member d
  Uniprot ID: Q6UXZ3
  ENST ID: ENST00000375352
  CDS Start-End: 82-666
gttgacttccgagcttggattcaagtccctgaagggcaccagacacctgtgatcaccaaggagaggagaggagacaggaccatgtggctgtccccatctctgctgcttctcatcctcccaggttactccattgccgctaaaatcactggtccaacaacagtgaatggctcggagcagggctcattgactgtgcagtgtgcttatggctcaggctgggagacctacttgaagtggcggtgtcaaggagctgattggaattactgtaacatccttgttaaaacaaatggatcagagcaggaggtaaagaagaatcgagtttccatcagggacaatcagaaaaaccacgtgttcaccgtgaccatggagaatctcaaaagagatgatgctgacagttattggtgtgggactgagagacctggaattgatcttggggtcaaagttcaagtgaccattaacccaggcacacaaactgcagtctcagaatggacaaccacaacagcaagcctggctttcacagctgcagccacccagaagaccagcagccccctcaccaggtccccgctcaagagcacccacttcctgttcctgttcctcctggagctgcctctgctcctgagcatgctggggaccgtcctctgggtaaacagaccacaaagaaggtcttgaaggaggaggagtcagcccgatgatgagagtcccaatgcccattgacgtcctgtccagggcgaaaggccctcccacagaagaaaaaacattttcttttctcttctttttttctttctagagatagagtcttgctctgtcacccaggctggaatgcaatggtgtaatctctgctcactgcaactttcccctcccaggctcaagcgatcctcctgcctcaacctccagagtagctggggctacaggcacatgccaccacccccagctaatttttaaatttttttgtagagatgggcttccaccacgttgcccaggctggtctcgaactcttgacctcaagagatcctcccgcttcgcctcccaaagtggtgggattacaggtgtgagccaccgcacctggcagaaaaacaacatttctatggggaattgactgtggttctagaggcagtgctggccccagcttcagggaacagcctcctagtcccctatctcctgcagccgtgccacctggggctattcccttctctgcacagtccctggggcctgacagagcccttcttccttctgaggtctccaatgcagtagaaaacatgagaagaatgtgtttcccccgagaggcacctatgccgtagtggacatt

SEQ ID NO: 115514 - DNA, 1785 bp, Homo sapiens
  Payload ID: 2545
  Gene Symbol: CD300LF
  Gene Name: CD300 molecule-like family member f
  Uniprot ID: Q8TDQ1
  ENST ID: ENST00000301573
  CDS Start-End: 89-823
agtgagtaccagcagaaggctgggagtctgtagtttgttcctgctgccaggctccactgaggggaacggggacctgtctgaagagaagatgcccctgctgacactctacctgctcctcttctggctctcaggctactccattgtcactcaaatcaccggtccaacaacagtgaatggcttggagcggggctccttgaccgtgcagtgtgtttacagatcaggctgggagacctacttgaagtggtggtgtcgaggagctatttggcgtgactgcaagatccttgttaaaaccagtgggtcagagcaggaggtgaagagggaccgggtgtccatcaaggacaatcagaaaaaccgcacgttcactgtgaccatggaggatctcatgaaaactgatgctgacacttactggtgtggaattgagaaaactggaaatgaccttggggtcacagttcaagtgaccattgacccagcaccagtcacccaagaagaaactagcagctccccaactctgaccggccaccacttggacaacaggagtgagggttcccaggctgcaaactacagacctgcagctcatcaggcacaagctcctgaagctcagtgtcctcctgcccctcatcttcaccatattgctgctgcttttggtggccgcctcactcttggcttggaggatgatgaagtaccagcagaaagcagccgggatgtccccagagcaggtactgcagcccctggagggcgacctctgctatgcagacctgaccctgcagctggccggaacctccccgcaaaaggctaccacgaagctttcctctgcccaggttgaccaggtggaagtggaatatgtcaccatggcttccttgccgaaggaggacatttcctatgcatctctgaccttgggtgctgaggatcaggaaccgacctactgcaacatgggccacctcagtagccacctccccggcaggggccctgaggagcccacggaatacagcaccatcagcaggccttagcctgcactccaggctccttcttggaccccaggctgtgagcacactcctgcctcatcgaccgtctgccccctgctcccctcatcaggaccaacccggggactggtgcctctgcctgatcagccagcattgcccctagctctgggttgggcttggggccaagtctcagggggcttctaggagttggggttttctaaacgtcccctcctctcctacatagttgaggagggggctagggatatgctctggggctttcatgggaatgatgaagatgataatgagaaaaatgttatcattattatcatgaagtaccattatcgtaatacaatgaacctttatttattgcctaccacatgttatgggctgaataatggcccccaaagatatctgtgtcctaatcctcagaacctgtgactgttaccttctgtggcagaaagggacagtgcagatgtatgtaagttaaggactttgagatagagaggttattcttgctgattcaggtgggcccaaaatatcaccacaagggtcctcataagaaagaggccagaaggtcaaagaggtagagacaaagtgatgatggaagtggacgtgggtgtgacgtgagcaggggccatgaatgccgcagccttcagatgccagaaagggaaaggaatggattcccctgcctggagcctccaaaagaaaccagccctgcccacgccttgacttgagcccattgaaactgatcttgagctcctggcctccagaattgcaggagaataaatttgtgttgtttttaatg

SEQ ID NO: 115515 - DNA, 1764 bp, Homo sapiens
  Payload ID: 2545
  Gene Symbol: CD300LF
  Gene Name: CD300 molecule-like family member f
  Uniprot ID: Q8TDQ1
  ENST ID: ENST00000326165
  CDS Start-End: 113-985
tgaaggaggaagttcaagggcgagagtgagtaccagcagaaggctgggagtctgtagtttgttcctgctgccaggctccactgaggggaacggggacctgtctgaagagaagatgcccctgctgacactctacctgctcctcttctggctctcaggctactccattgtcactcaaatcaccggtccaacaacagtgaatggcttggagcggggctccttgaccgtgcagtgtgtttacagatcaggctgggagacctacttgaagtggtggtgtcgaggagctatttggcgtgactgcaagatccttgttaaaaccagtgggtcagagcaggaggtgaagagggaccgggtgtccatcaaggacaatcagaaaaaccgcacgttcactgtgaccatggaggatctcatgaaaactgatgctgacacttactggtgtggaattgagaaaactggaaatgaccttggggtcacagttcaagtgaccattgacccagcaccagtcacccaagaagaaactagcagctccccaactctgaccggccaccacttggacaacaggcacaagctcctgaagctcagtgtcctcctgcccctcatcttcaccatattgctgctgcttttggtggccgcctcactcttggcttggaggatgatgaagtaccagcagaaagcagccgggatgtccccagagcaggtactgcagcccctggagggcgacctctgctatgcagacctgaccctgcagctggccggaacctccccgcaaaaggctaccacgaagctttcctctgcccaggttgaccaggtggaagtggaatatgtcaccatggcttccttgccgaaggaggacatttcctatgcatctctgaccttgggtgctgaggatcaggaaccgacctactgcaacatgggccacctcagtagccacctccccggcaggggccctgaggagcccacggaatacagcaccatcagcaggccttagcctgcactccaggctccttcttggaccccaggctgtgagcacactcctgcctcatcgaccgtctgccccctgctcccctcatcaggaccaacccggggactggtgcctctgcctgatcagccagcattgcccctagctctgggttgggcttggggccaagtctcagggggcttctaggagttggggttttctaaacgtcccctcctctcctacatagttgaggagggggctagggatatgctctggggctttcatgggaatgatgaagatgataatgagaaaaatgttatcattattatcatgaagtaccattatcgtaatacaatgaacctttatttattgcctaccacatgttatgggctgaataatggcccccaaagatatctgtgtcctaatcctcagaacctgtgactgttaccttctgtggcagaaagggacagtgcagatgtatgtaagttaaggactttgagatagagaggttattcttgctgattcaggtgggcccaaaatatcaccacaagggtcctcataagaaagaggccagaaggtcaaagaggtagagacaaagtgatgatggaagtggacgtgggtgtgacgtgagcaggggccatgaatgccgcagccttcagatgccagaaagggaaaggaatggattcccctgcctggagcctccaaaagaaaccagccctgcccacgccttgacttgagcccattgaaactgatcttgagctcctggcctccagaattgcaggagaataaatttgtgttgtttttaatga

SEQ ID NO: 115516 - DNA, 1554 bp, Homo sapiens
  Payload ID: 2545
  Gene Symbol: CD300LF
  Gene Name: CD300 molecule-like family member f
  Uniprot ID: Q8TDQ1
  ENST ID: ENST00000343125
  CDS Start-End: 1-585
atgtggctgcctcagctcgacctcatgagggtcatcagtgctaagagtcaaggctactccattgtcactcaaatcaccggtccaacaacagtgaatggcttggagcggggctccttgaccgtgcagtgtgtttacagatcaggctgggagacctacttgaagtggtggtgtcgaggagctatttggcgtgactgcaagatccttgttaaaaccagtgggtcagagcaggaggtgaagagggaccgggtgtccatcaaggacaatcagaaaaaccgcacgttcactgtgaccatggaggatctcatgaaaactgatgctgacacttactggtgtggaattgagaaaactggaaatgaccttggggtcacagttcaagtgaccattgacccagcaccagtcacccaagaagaaactagcagctccccaactctgaccggccaccacttggacaacagcagccgggatgtccccagagcaggtactgcagcccctggagggcgacctctgctatgcagacctgaccctgcagctggccggaacctccccgcaaaaggctaccacgaagctttcctctgcccaggttgaccaggtggaagtggaatatgtcaccatggcttccttgccgaaggaggacatttcctatgcatctctgaccttgggtgctgaggatcaggaaccgacctactgcaacatgggccacctcagtagccacctccccggcaggggccctgaggagcccacggaatacagcaccatcagcaggccttagcctgcactccaggctccttcttggaccccaggctgtgagcacactcctgcctcatcgaccgtctgccccctgctcccctcatcaggaccaacccggggactggtgcctctgcctgatcagccagcattgcccctagctctgggttgggcttggggccaagtctcagggggcttctaggagttggggttttctaaacgtcccctcctctcctacatagttgaggagggggctagggatatgctctggggctttcatgggaatgatgaagatgataatgagaaaaatgttatcattattatcatgaagtaccattatcgtaatacaatgaacctttatttattgcctaccacatgttatgggctgaataatggcccccaaagatatctgtgtcctaatcctcagaacctgtgactgttaccttctgtggcagaaagggacagtgcagatgtatgtaagttaaggactttgagatagagaggttattcttgctgattcaggtgggcccaaaatatcaccacaagggtcctcataagaaagaggccagaaggtcaaagaggtagagacaaagtgatgatggaagtggacgtgggtgtgacgtgagcaggggccatgaatgccgcagccttcagatgccagaaagggaaaggaatggattcccctgcctggagcctccaaaagaaaccagccctgcccacgccttgacttgagcccattgaaactgatcttgagctcctggcctccagaattgcaggagaataaatttgtgttgtttttaatgagccacg

SEQ ID NO: 115517 - DNA, 1689 bp, Homo sapiens
  Payload ID: 2545
  Gene Symbol: CD300LF
  Gene Name: CD300 molecule-like family member f
  Uniprot ID: Q8TDQ1
  ENST ID: ENST00000361254
  CDS Start-End: 1-720
atgtggctgcctcagctcgacctcatgagggtcatcagtgctaagagtcaaggctactccattgtcactcaaatcaccggtccaacaacagtgaatggcttggagcggggctccttgaccgtgcagtgtgtttacagatcaggctgggagacctacttgaagtggtggtgtcgaggagctatttggcgtgactgcaagatccttgttaaaaccagtgggtcagagcaggaggtgaagagggaccgggtgtccatcaaggacaatcagaaaaaccgcacgttcactgtgaccatggaggatctcatgaaaactgatgctgacacttactggtgtggaattgagaaaactggaaatgaccttggggtcacagttcaagtgaccattgacccagcgtcgactcctgcccccaccacgcctacctccactacgtttacagcaccagtcacccaagaagaaactagcagctccccaactctgaccggccaccacttggacaacaggcacaagctcctgaagctcagtgtcctcctgcccctcatcttcaccatattgctgctgcttttggtggccgcctcactcttggcttggaggatgatgaagtaccagcagaaaggtactgcagcccctggagggcgacctctgctatgcagacctgaccctgcagctggccggaacctccccgcaaaaggctaccacgaagctttcctctgcccaggttgaccaggtggaagtggaatatgtcaccatggcttccttgccgaaggaggacatttcctatgcatctctgaccttgggtgctgaggatcaggaaccgacctactgcaacatgggccacctcagtagccacctccccggcaggggccctgaggagcccacggaatacagcaccatcagcaggccttagcctgcactccaggctccttcttggaccccaggctgtgagcacactcctgcctcatcgaccgtctgccccctgctcccctcatcaggaccaacccggggactggtgcctctgcctgatcagccagcattgcccctagctctgggttgggcttggggccaagtctcagggggcttctaggagttggggttttctaaacgtcccctcctctcctacatagttgaggagggggctagggatatgctctggggctttcatgggaatgatgaagatgataatgagaaaaatgttatcattattatcatgaagtaccattatcgtaatacaatgaacctttatttattgcctaccacatgttatgggctgaataatggcccccaaagatatctgtgtcctaatcctcagaacctgtgactgttaccttctgtggcagaaagggacagtgcagatgtatgtaagttaaggactttgagatagagaggttattcttgctgattcaggtgggcccaaaatatcaccacaagggtcctcataagaaagaggccagaaggtcaaagaggtagagacaaagtgatgatggaagtggacgtgggtgtgacgtgagcaggggccatgaatgccgcagccttcagatgccagaaagggaaaggaatggattcccctgcctggagcctccaaaagaaaccagccctgcccacgccttgacttgagcccattgaaactgatcttgagctcctggcctccagaattgcaggagaataaatttgtgttgtttttaatgagccacg

SEQ ID NO: 115518 - DNA, 1275 bp, Homo sapiens
  Payload ID: 2545
  Gene Symbol: CD300LF
  Gene Name: CD300 molecule-like family member f
  ENST ID: ENST00000583937
  CDS Start-End: 76-993
agaaggctgggagtctgtagtttgttcctgctgccaggctccactgaggggaacggggacctgtctgaagagaagatgcccctgctgacactctacctgctcctcttctggctctcaggctactccattgtcactcaaatcaccggtccaacaacagtgaatggcttggagcggggctccttgaccgtgcagtgtgtttacagatcaggctgggagacctacttgaagtggtggtgtcgaggagctatttggcgtgactgcaagatccttgttaaaaccagtgggtcagagcaggaggtgaagagggaccgggtgtccatcaaggacaatcagaaaaaccgcacgttcactgtgaccatggaggatctcatgaaaactgatgctgacacttactggtgtggaattgagaaaactggaaatgaccttggggtcacagttcaagtgaccattgacccagcgtcgactcctgcccccaccacgcctacctccactacgtttacagcaccagtcacccaagaagaaactagcagctccccaactctgaccggccaccacttggacaacaggcacaagctcctgaagctcagtgtcctcctgcccctcatcttcaccatattgctgctgcttttggtggccgcctcactcttggcttggaggatgatgaagtaccagcagaaagcagccgggatgtccccagagcaggtactgcagcccctggagggcgacctctgctatgcagacctgaccctgcagctggccggaacctccccgcaaaaggctaccacgaagctttcctctgcccaggttgaccaggtggaagtggaatatgtcaccatggcttccttgccgaaggaggacatttcctatgcatctctgaccttgggtgctgaggatcaggaaccgacctactgcaacatgggccacctcagtagccacctccccggcaggggccctgaggagcccacggaatacagcaccatcagcaggccttagcctgcactccaggctccttcttggaccccaggctgtgagcacactcctgcctcatcgaccgtctgccccctgctcccctcatcaggaccaacccggggactggtgcctctgcctgatcagccagcattgcccctagctctgggttgggcttggggccaagtctcagggggcttctaggagttggggttttctaaacgtcccctcctctcctacatagttgaggagggggctagggatatgctctggggctttcatgggaatgatgaagatgataatgagaaa

SEQ ID NO: 115519 - DNA, 1825 bp, Homo sapiens
  Payload ID: 2545
  Gene Symbol: CD300LF
  Gene Name: CD300 molecule-like family member f
  Uniprot ID: Q8TDQ1
  ENST ID: ENST00000469092
  CDS Start-End: 278-862
tgaaggaggaagttcaagggcgagagtgagtaccagcagaaggctgggagtctgtagtttgttcctgctgccaggctccactgaggggaacggggacctgtctgaagagaagatgcccctgctgacactctacctgctcctcttctggctctcagcacatggagaccagttgccgttgctgttttgatcaacttcaaaggcattcatccagggtggtttattccagaaccactagaaatcattaggaccaccaggacagcctctccacagccatctgatgtggctgcctcagctcgacctcatgagggtcatcagtgctaagagtcaaggctactccattgtcactcaaatcaccggtccaacaacagtgaatggcttggagcggggctccttgaccgtgcagtgtgtttacagatcaggctgggagacctacttgaagtggtggtgtcgaggagctatttggcgtgactgcaagatccttgttaaaaccagtgggtcagagcaggaggtgaagagggaccgggtgtccatcaaggacaatcagaaaaaccgcacgttcactgtgaccatggaggatctcatgaaaactgatgctgacacttactggtgtggaattgagaaaactggaaatgaccttggggtcacagttcaagtgaccattgacccagcaccagtcacccaagaagaaactagcagctccccaactctgaccggccaccacttggacaacagcagccgggatgtccccagagcaggtactgcagcccctggagggcgacctctgctatgcagacctgaccctgcagctggccggaacctccccgcaaaaggctaccacgaagctttcctctgcccaggttgaccaggtggaagtggaatatgtcaccatggcttccttgccgaaggaggacatttcctatgcatctctgaccttgggtgctgaggatcaggaaccgacctactgcaacatgggccacctcagtagccacctccccggcaggggccctgaggagcccacggaatacagcaccatcagcaggccttagcctgcactccaggctccttcttggaccccaggctgtgagcacactcctgcctcatcgaccgtctgccccctgctcccctcatcaggaccaacccggggactggtgcctctgcctgatcagccagcattgcccctagctctgggttgggcttggggccaagtctcagggggcttctaggagttggggttttctaaacgtcccctcctctcctacatagttgaggagggggctagggatatgctctggggctttcatgggaatgatgaagatgataatgagaaaaatgttatcattattatcatgaagtaccattatcgtaatacaatgaacctttatttattgcctaccacatgttatgggctgaataatggcccccaaagatatctgtgtcctaatcctcagaacctgtgactgttaccttctgtggcagaaagggacagtgcagatgtatgtaagttaaggactttgagatagagaggttattcttgctgattcaggtgggcccaaaatatcaccacaagggtcctcataagaaagaggccagaaggtcaaagaggtagagacaaagtgatgatggaagtggacgtgggtgtgacgtgagcaggggccatgaatgccgcagccttcagatgccagaaagggaaaggaatggattcccctgcctggagcctccaaaagaaaccagccctgcccacgccttgacttgagcccattgaaactgatcttgagctcctggcctccagaattgcaggagaataaatttgtgttgtttttaatga

SEQ ID NO: 115520 - DNA, 860 bp, Homo sapiens
  Payload ID: 2545
  Gene Symbol: CD300LF
  Gene Name: CD300 molecule-like family member f
  Uniprot ID: Q8TDQ1
  ENST ID: ENST00000462044
  CDS Start-End: 56-553
ccagaaccactagaaatcattaggaccaccaggacagcctctccacagccatctgatgtggctgcctcagctcgacctcatgagggtcatcagtgctaagagtcaaggctactccattgtcactcaaatcaccggtccaacaacagtgaatggcttggagcggggctccttgaccgtgcagtgtgtttacagatcaggctgggagacctacttgaagtggtggtgtcgaggagctatttggcgtgactgcaagatccttgttaaaaccagtgggtcagagcaggaggtgaagagggaccgggtgtccatcaaggacaatcagaaaaaccgcacgttcactgtgaccatggaggatctcatgaaaactgatgctgacacttactggtgtggaattgagaaaactggaaatgaccttggggtcacagttcaagtgaccattgacccagcaccagtcacccaagaagaaactagcagctccccaactctgaccggccaccacttggacaacaggtactgcagcccctggagggcgacctctgctatgcagacctgaccctgcagctggccggaacctccccgcaaaaggctaccacgaagctttcctctgcccaggttgaccaggtggaagtggaatatgtcaccatggcttccttgccgaaggaggacatttcctatgcatctctgaccttgggtgctgaggatcaggaaccgacctactgcaacatgggccacctcagtagccacctccccggcaggggccctgaggagcccacggaatacagcaccatcagcaggccttagcctgcactccaggctccttcttggaccccaggctgtgagcacactcctgcctcatcgac

SEQ ID NO: 115521 - DNA, 996 bp, Homo sapiens
  Payload ID: 2545
  Gene Symbol: CD300LF
  Gene Name: CD300 molecule-like family member f
  Uniprot ID: Q8TDQ1
  ENST ID: ENST00000464910
  CDS Start-End: 56-937
ccagaaccactagaaatcattaggaccaccaggacagcctctccacagccatctgatgtggctgcctcagctcgacctcatgagggtcatcagtgctaagagtcaaggctactccattgtcactcaaatcaccggtccaacaacagtgaatggcttggagcggggctccttgaccgtgcagtgtgtttacagatcaggctgggagacctacttgaagtggtggtgtcgaggagctatttggcgtgactgcaagatccttgttaaaaccagtgggtcagagcaggaggtgaagagggaccgggtgtccatcaaggacaatcagaaaaaccgcacgttcactgtgaccatggaggatctcatgaaaactgatgctgacacttactggtgtggaattgagaaaactggaaatgaccttggggtcacagttcaagtgaccattgacccagcaccagtcacccaagaagaaactagcagctccccaactctgaccggccaccacttggacaacaggcacaagctcctgaagctcagtgtcctcctgcccctcatcttcaccatattgctgctgcttttggtggccgcctcactcttggcttggaggatgatgaagtaccagcagaaagcagccgggatgtccccagagcaggtactgcagcccctggagggcgacctctgctatgcagacctgaccctgcagctggccggaacctccccgcaaaaggctaccacgaagctttcctctgcccaggttgaccaggtggaagtggaatatgtcaccatggcttccttgccgaaggaggacatttcctatgcatctctgaccttgggtgctgaggatcaggaaccgacctactgcaacatgggccacctcagtagccacctccccggcaggggccctgaggagcccacggaatacagcaccatcagcaggccttagcctgcactccaggctccttcttggaccccaggctgtgagcacactcctgcctcatcgac

SEQ ID NO: 115522 - DNA, 720 bp, Homo sapiens
  Payload ID: 2545
  Gene Symbol: CD300LF
  Gene Name: CD300 molecule-like family member f
  Uniprot ID: Q8TDQ1
  ENST ID: ENST00000581500
  CDS Start-End: 1-720
atgtggctgcctcagctcgacctcatgagggtcatcagtgctaagagtcaaggctactccattgtcactcaaatcaccggtccaacaacagtgaatggcttggagcggggctccttgaccgtgcagtgtgtttacagatcaggctgggagacctacttgaagtggtggtgtcgaggagctatttggcgtgactgcaagatccttgttaaaaccagtgggtcagagcaggaggtgaagagggaccgggtgtccatcaaggacaatcagaaaaaccgcacgttcactgtgaccatggaggatctcatgaaaactgatgctgacacttactggtgtggaattgagaaaactggaaatgaccttggggtcacagttcaagtgaccattgacccagcgtcgactcctgcccccaccacgcctacctccactacgtttacagcaccagtcacccaagaagaaactagcagctccccaactctgaccggccaccacttggacaacaggcacaagctcctgaagctcagtgtcctcctgcccctcatcttcaccatattgctgctgcttttggtggccgcctcactcttggcttggaggatgatgaagtaccagcagaaaggtactgcagcccctggagggcgacctctgctatgcagacctgaccctgcagctggccggaacctccccgcaaaaggctaccacgaagctttcctctgcccaggttga

SEQ ID NO: 115523 - DNA, 988 bp, Homo sapiens
  Payload ID: 2546
  Gene Symbol: CD300LG
  Gene Name: CD300 molecule-like family member g
  Uniprot ID: Q6UXG3
  ENST ID: ENST00000293396
  CDS Start-End: 62-763
gtgtgactgaagaggagctcacagttcccagcgtctgctcccacggtgtccagcgcccagaatgcggcttctggtcctgctatggggttgcctgctgctcccaggttatgaagccctggagggcccagaggaaatcagcgggttcgaaggggacactgtgtccctgcagtgcacctacagggaagagctgagggaccaccggaagtactggtgcaggaagggtgggatcctcttctctcgctgctctggcaccatctatgcagaagaagaaggccaggagacaatgaagggcagggtgtccatccgtgacagccgccaggagctctcgctcattgtgaccctgtggaacctcaccctgcaagacgctggggagtactggtgtggggtcgaaaaacggggccccgatgagtctttactgatctctctgttcgtctttccagggagctcccgcccccccatgcagctggactccacctcagcagaggacaccagtccagctctcagcagtggcagctctaagcccagggtgtccatcccgatggtccgcatactggccccagtcctggtgctgctgagccttctgtcagccgcaggcctgatcgccttctgcagccacctgctcctgtggagaaaggaagctcaacaggccacggagacacagaggaacgagaagttctgcctctcacgcttgaatcacagaacatcagagctggatccagatgaagcctttgagatctctagcctgacttttctctcagtttgaagcaaatcgcctttcagaacgcccaggggtcagggagctgttagagatgcactctccagggccccagacccagctgaaccctccaggggtggggtccagggactctggcagtgctacaaactctagtgtgcttttacaaaagatgagactgaggcccagagagggtaaaggtcttgcccatggtcacacagcaggtggtggcccaaacagagaacaggacccaga

SEQ ID NO: 115524 - DNA, 2758 bp, Homo sapiens
  Payload ID: 2546
  Gene Symbol: CD300LG
  Gene Name: CD300 molecule-like family member g
  Uniprot ID: Q6UXG3
  ENST ID: ENST00000317310
  CDS Start-End: 42-1040
acagttcccagcgtctgctcccacggtgtccagcgcccagaatgcggcttctggtcctgctatggggttgcctgctgctcccaggttatgaagccctggagggcccagaggaaatcagcgggttcgaaggggacactgtgtccctgcagtgcacctacagggaagagctgagggaccaccggaagtactggtgcaggaagggtgggatcctcttctctcgctgctctggcaccatctatgcagaagaagaaggccaggagacaatgaagggcagggtgtccatccgtgacagccgccaggagctctcgctcattgtgaccctgtggaacctcaccctgcaagacgctggggagtactggtgtggggtcgaaaaacggggccccgatgagtctttactgatctctctgttcgtctttccaggaccctgctgtcctccctccccttctcccaccttccagcctctggctacaacacgcctgcagcccaaggcaaaagctcagcaaacccagcccccaggattgacttctcctgggctctacccggcagccaccacagccaagcaggggaagacaggggctgaggcccctccattgccagggacttcccagtacgggcacgaaaggacttctcagtacacaggaacctctcctcacccagcgacctctcctcctgcagggagctcccgcccccccatgcagctggactccacctcagcagaggacaccagtccagctctcagcagtggcagctctaagcccagggtgtccatcccgatggtccgcatactggccccagtcctggtgctgctgagccttctgtcagccgcaggcctgatcgccttctgcagccacctgctcctgtggagaaaggaagctcaacaggccacggagacacagaggaacgagaagttctgcctctcacgcttgactgcggaggaaaaggaagccccttcccaggcccctgagggggacgtgatctcgatgcctcccctccacacatctgaggaggagctgggcttctcgaagtttgtctcagcgtagggcaggaggccctcctggccaggccagcagtgaagcagtatggctggctggatcagcaccgattcccgaaagctttccacctcagcctcagagtccagctgcccggactccagggctctccccaccctccccaggctctcctcttgcatgttccagcctgacctagaagcgtttgtcagccctggagcccagagcggtggccttgctcttccggctggagactgggacatccctgataggttcacatccctgggcagagtaccaggctgctgaccctcagcagggccagacaaggctcagtggatctggtctgagtttcaatctgccaggaactcctgggcctcatgcccagtgtcggaccctgccttcctcccactccagaccccaccttgtcttccctccctggcgtcctcagacttagtcccacggtctcctgcatcagctggtgatgaagaggagcatgctggggtgagactgggattctggcttctctttgaaccacctgcatcccagcccttcaggaagcctgtgaaaaacgtgattcctgggccccaccaagacccaccaaaaccatctctggggcttggtgcaggactctgaatttctaacaatgcccagtgactgtcgcacttgagtttgagggccagtgggcctgatgaacgctcagacccctccagcttagagtctgcatttgggctgtgacgtctcccacctgccccaataagatctgctctgtctgcgacaccaagatccagctggggactcccctgaggcctgcctaagtccaggccttggtcaggtcaggtgcacattgcagggataagcccaggaccggcagagagtggttgcctttccatttgccctccctggccatgccttcttgcctttggaaaaatgatgaagaaaaccttggctccttccttgtctggaaagggttacttgcctatgggttctggtggctagagagaaaagtagaaaaccagagtgcacgtaggtgtctaacacagaggagagtaggaacagggcggatacctgaaggtgactccgagtccagccccctggagaaggggtcgggggtgggggtaaagtagcacaactactattttttttctttttccattattattgttttttaagacagaatctcgtgctgctgcccaggctggagtgcagtggcacgatctgcaaactccgcctcctgggttcaagtgattcttctgcctcagcctcccgagtagctgggattacaggcacgcaccaccacacctggctaatttttgtacttttagtagagatggggtttcaccatgttggccaggctggtcttgaactcctgacctcaaatgagcctcctgcttcagtctcccaaattgccgggattacaggcatgagccactgtgtctggccctatttcctttaaaaagtgaaattaagagttgttcagtatgcaaaacttggaaagatggaggagaaaaagaaaaggaagaaaaaaatgtcacccatagtctcaccagagactatcattatttcgttttgttgtacttccttccactcttttcttcttcacataatttgccggtgttctttttacagagcaattatcttgtatatacaactttgtatcctgccttttccaccttatcgttccatcactttattccagcacttctctgtgttttacagacctttttataaataaaatgttcatcagctgcata

SEQ ID NO: 115525 - DNA, 1060 bp, Homo sapiens
  Payload ID: 2546
  Gene Symbol: CD300LG
  Gene Name: CD300 molecule-like family member g
  Uniprot ID: Q6UXG3
  ENST ID: ENST00000377203
  CDS Start-End: 70-891
aaagacccgtgtgactgaagaggagctcacagttcccagcgtctgctcccacggtgtccagcgcccagaatgcggcttctggtcctgctatggggttgcctgctgctcccaggttatgaagccctggagggcccagaggaaatcagcgggttcgaaggggacactgtgtccctgcagtgcacctacagggaagagctgagggaccaccggaagtactggtgcaggaagggtgggatcctcttctctcgctgctctggcaccatctatgcagaagaagaaggccaggagacaatgaagggcagggtgtccatccgtgacagccgccaggagctctcgctcattgtgaccctgtggaacctcaccctgcaagacgctggggagtactggtgtggggtcgaaaaacggggccccgatgagtctttactgatctctctgttcgtctttccagcttctcctgggctctacccggcagccaccacagccaagcaggggaagacaggggctgaggcccctccattgccagggacttcccagtacgggcacgaaaggacttctcagtacacaggaacctctcctcacccagcgacctctcctcctgcagggagctcccgcccccccatgcagctggactccacctcagcagaggacaccagtccagctctcagcagtggcagctctaagcccagggtgtccatcccgatggtccgcatactggccccagtcctggtgctgctgagccttctgtcagccgcaggcctgatcgccttctgcagccacctgctcctgtggagaaaggaagctcaacaggccacggagacacagaggaacgagaagttctgcctctcacgcttgaactccctgatgttttctctgagcctgccttggctctgagaccaaggtggtgtggctgctctgggacccaggctgagggtggtgctctggggaccaggggcaagagaataagggtccctgtgcccattgtctggagctgggaacctgccccaaggctactgctgcaagaagagactgtgccctccgaggccagcactccaacggaggg

SEQ ID NO: 115526 - DNA, 1399 bp, Homo sapiens
  Payload ID: 2546
  Gene Symbol: CD300LG
  Gene Name: CD300 molecule-like family member g
  Uniprot ID: Q6UXG3
  ENST ID: ENST00000539718
  CDS Start-End: 70-993
aaagacccgtgtgactgaagaggagctcacagttcccagcgtctgctcccacggtgtccagcgcccagaatgcggcttctggtcctgctatggggttgcctgctgctcccaggttatgaagccctggagggcccagaggaaatcagcgggttcgaaggggacactgtgtccctgcagtgcacctacagggaagagctgagggaccaccggaagtactggtgcaggaagggtgggatcctcttctctcgctgctctggcaccatctatgcagaagaagaaggccaggagacaatgaagggcagggtgtccatccgtgacagccgccaggagctctcgctcattgtgaccctgtggaacctcaccctgcaagacgctggggagtactggtgtggggtcgaaaaacggggccccgatgagtctttactgatctctctgttcgtctttccaggaccctgctgtcctccctccccttctcccaccttccagcctctggctacaacacgcctgcagcccaaggcaaaagctcagcaaacccagcccccaggattgacttctcctgggctctacccggcagccaccacagccaagcaggggaagacaggggctgaggcccctccattgccagggacttcccagtacgggcacgaaaggacttctcagtacacaggaacctctcctcacccagcgacctctcctcctgcagggagctcccgcccccccatgcagctggactccacctcagcagaggacaccagtccagctctcagcagtggcagctctaagcccagggtgtccatcccgatggtccgcatactggccccagtcctggtgctgctgagccttctgtcagccgcaggcctgatcgccttctgcagccacctgctcctgtggagaaaggaagctcaacaggccacggagacacagaggaacgagaagttctgcctctcacgcttgaactccctgatgttttctctgagcctgccttggctctgagaccaaggtggtgtggctgctctgggacccaggctgagggtggtgctctggggaccaggggcaagagaataagggtccctgtgcccattgtctggagctgggaacctgccccaaggctactgctgcaagaagagactgtgccctccgaggccagcactccaacggagggggctgcagcatcgcacttcaggcaacagaagcccctcctggcccctcctccctctgctgtttactgagatgcctccactccattcctttaaacacaagggcaggaaagcggagctaccattgccttctttcctggcgccagtgaggacaaaagactcaggcctggtcaccccaaggagggtctggggtggaaatgggactttgggctgtggcttaggaagcagctgttgttgtctca

SEQ ID NO: 115527 - DNA, 1459 bp, Homo sapiens
  Payload ID: 2546
  Gene Symbol: CD300LG
  Gene Name: CD300 molecule-like family member g
  ENST ID: ENST00000588884
  CDS Start-End: 65-517
cccgtgtgactgaagaggagctcacagttcccagcgtctgctcccacggtgtccagcgcccagaatgcggcttctggtcctgctatggggttgcctgctgctcccaggttatgaagccctggagggcccagaggaaatcagcgggttcgaaggggacactgtgtccctgcagtgcacctacagggaagagctgagggaccaccggaagtactggtgcaggaagggtgggatcctcttctctcgctgctctggcaccatctatgcagaagaagaaggccaggagacaatgaagggcagggtgtccatccgtgacagccgccaggagctctcgctcattgtgaccctgtggaacctcaccctgcaagacgctggggagtactggtgtggggtcgaaaaacggggccccgatgagtctttactgatctctctgttcgtctttccaggtaacagatatctctccttccccaggctggggacaggagctgcagagggaagagggaggggtggtggggcataatcctggtaccaacattatgggcactgagtcctcagggagatcatgcaggtcaagcaccgagcaaggcttggggcacagaaggagccgcctgagtcttggccattgtctcactcttgctgcccgaggtcacaccagtagtagatgtcagagcaggaccggacccagatctgtccagggctgggctcggcgcctttcctttctgcccaggtgtgctggagggagatttccataggctgggtacaagatagacatatcaggggataaagaagactcctcgcctggtgtcagagatattcctgaggcctcccgaggctgggccaaccattgctgcattccagacccagcccacagcatcaccctggacatgctggcctcgccctgcttgtgccctcaactctcccctcctggcctccacctccccagatattgaagtccagccacaggtgctagagtgcctgggaaccagcctctgggtaggatgcctgaaggagggatcgttaaatgcagggacactagggggccggggctggagctatggggcctgggtaggggataaagcacctctctgggagcccagaaccccaagtggacctgctgagctaaggagaaagaagccagagagggcccaggggagtgggagccttggtctgctggccagtgtgggcgaggtacatctttgtatccccatttcacggatgagggactgaggctccaagagactaagtgatttgcccaagatctcacagcaggaagtgatggaactgggattcaaacacaagtcgtttccagctttgatgtctgctttattcctctcctagccccatagctgggacctatcccaatcccaggcccatccctaccaccatagcccctattttttttttattcctttatccatggatctttaatttgaggaaataaagttaaacttgccaaatagca

SEQ ID NO: 115528 - DNA, 942 bp, Homo sapiens
  Payload ID: 2546
  Gene Symbol: CD300LG
  Gene Name: CD300 molecule-like family member g
  Uniprot ID: Q6UXG3
  ENST ID: ENST00000586233
  CDS Start-End: 62-730
gtgtgactgaagaggagctcacagttcccagcgtctgctcccacggtgtccagcgcccagaatgcggcttctggtcctgctatggggttgcctgctgctcccaggttatgaagccctggagggcccagaggaaatcagcgggttcgaaggggacactgtgtccctgcagtgcacctacagggaagagctgagggaccaccggaagtactggtgcaggaagggtgggatcctcttctctcgctgctctggcaccatctatgcagaagaagaaggccaggagacaatgaagggcagggtgtccatccgtgacagccgccaggagctctcgctcattgtgaccctgtggaacctcaccctgcaagacgctggggagtactggtgtggggtcgaaaaacggggccccgatgagtctttactgatctctctgttcgtctttccagggagctcccgcccccccatgcagctggactccacctcagcagaggacaccagtccagctctcagcagtggcagctctaagcccagggtgtccatcccgatggtccgcatactggccccagtcctggtgctgctgagccttctgtcagccgcaggcctgatcgccttctgcagccacctgctcctgtggagaaaggaagctcaacaggccacggagacacagaggaacgagaagttctgcctctcacgcttgaactccctgatgttttctctgagcctgccttggctctgagaccaaggtggtgtggctgctctgggacccaggctgagggtggtgctctggggaccaggggcaagagaataagggtccctgtgcccattgtctggagctgggaacctgccccaaggctactgctgcaagaagagactgtgccctccgaggccagcactccaacggagggggctgcagcatcgcacttcaggcaacagaagcccctcctggcc

SEQ ID NO: 115529 - DNA, 631 bp, Homo sapiens
  Payload ID: 2547
  Gene Symbol: CD300A
  Gene Name: CD300a molecule
  Uniprot ID: Q9UGN4
  ENST ID: ENST00000310828
  CDS Start-End: 30-590
caagtgccgcctgtgctggggaagggaccatgtggctgccttgggctctgttgcttctctgggtcccagcatcaacgtcaatgacacctgcaagtatcactgcggccaagacctcaacaatcacaactgcatttccacctgtatcatccactaccctgtttgcagtgggtgccacccacagtgccagcatccaggaggaaactgaggaggtggtgaactcacagctcccgctgctcctctccctgctggcattgttgctgcttctgttggtgggggcctccctgctagcctggaggatgtttcagaaatggatcaaagctggtgaccattcagagctgtcccagaaccccaagcaggctgccacgcagagtgagctgcactacgcaaatctggagctgctgatgtggcctctgcaggaaaagccagcaccaccaagggaggtggaggtggaatacagcactgtggcctcccccagggaagaacttcactatgcctcggtggtgtttgattctaacaccaacaggatagctgctcagaggcctcgggaggaggaaccagattcagattacagtgtgataaggaagacataggcttttgtcctgcctcgccatcggagctctcatgggcccca

SEQ ID NO: 115530 - DNA, 1858 bp, Homo sapiens
  Payload ID: 2547
  Gene Symbol: CD300A
  Gene Name: CD300a molecule
  Uniprot ID: Q9UGN4
  ENST ID: ENST00000360141
  CDS Start-End: 289-1188
gctacggagtcactacagggagaggtctcatcactagaaatagccgaagaacctgcagcctcaaccagcgttaaggaggacgtgccgtttctagggagtcttagtcggggctcaccagcttcctgcattttctgaccggctccaggaatagaaccaaaagaagctgaacaaggaagcagcgcggcaccaagaaaagcagaagtcggggccttggaggcgtgactttcccctcgggtccaggtagggcctggagctgctgcaagtgccgcctgtgctggggaagggaccatgtggctgccttgggctctgttgcttctctgggtcccaggatgttttgctctgagcaaatgcaggaccgtggcgggccccgtggggggatccctgagtgtgcagtgtccctatgagaaggaacacaggaccctcaacaaatactggtgcagaccaccacagattttcctatgtgacaagattgtggagaccaaagggtcagcaggaaaaaggaacggccgagtgtccatcagggacagtcctgcaaacctcagcttcacagtgaccctggagaatctcacagaggaggatgcaggcacctactggtgtggggtggatacaccatggctccgagactttcatgatcccgttgtcgaggttgaggtgtccgtgttcccggcatcaacgtcaatgacacctgcaagtatcactgcggccaagacctcaacaatcacaactgcatttccacctgtatcatccactaccctgtttgcagtgggtgccacccacagtgccagcatccaggaggaaactgaggaggtggtgaactcacagctcccgctgctcctctccctgctggcattgttgctgcttctgttggtgggggcctccctgctagcctggaggatgtttcagaaatggatcaaagctggtgaccattcagagctgtcccagaaccccaagcaggctgccacgcagagtgagctgcactacgcaaatctggagctgctgatgtggcctctgcaggaaaagccagcaccaccaagggaggtggaggtggaatacagcactgtggcctcccccagggaagaacttcactatgcctcggtggtgtttgattctaacaccaacaggatagctgctcagaggcctcgggaggaggaaccagattcagattacagtgtgataaggaagacataggcttttgtcctgcctcgccatcggagctctcatgggccccaggaagtccagggacagctcccttatacctggcccacgtccttctcagcctgccctcgacaacagtgaccaacagacaggcagctgggtttcccaggccatccctctgttgccatcagcttgattggcttccccgagggccagcagggctgggggctccggagagcagcaggaagcactcccagccaccagtgcctgtcacctctttcccctttgcccctgcttcatcccagctctgtgtgtggaggacaaagcttcttcctgcgtggctccaggaaaagatgtggctcacgtaggtggcacctgccaatagctttgtcaatcacagccccataggaacgtctggaattgcttgggagttggggagaactgtcaagaagagtgaagagagtgccaaagcggagatctgttcacctgggggccatggaggggggacccactaaagatcaagatcaaagattctccccatctcacagacaaggaaactgaggccagagggaggagagaattgctcatggctccagaactggtggcaagtttctctggactcttaggtttatttttaatatgaaatataaaaacagtttcaaatatcttattgagggagaagtaaaaacttatttaaacaatg

SEQ ID NO: 115531 - DNA, 382 bp, Homo sapiens
  Payload ID: 2547
  Gene Symbol: CD300A
  Gene Name: CD300a molecule
  Uniprot ID: Q9UGN4
  ENST ID: ENST00000361933
  CDS Start-End: 30-341
caagtgccgcctgtgctggggaagggaccatgtggctgccttgggctctgttgcttctctgggtcccagctggtgaccattcagagctgtcccagaaccccaagcaggctgccacgcagagtgagctgcactacgcaaatctggagctgctgatgtggcctctgcaggaaaagccagcaccaccaagggaggtggaggtggaatacagcactgtggcctcccccagggaagaacttcactatgcctcggtggtgtttgattctaacaccaacaggatagctgctcagaggcctcgggaggaggaaccagattcagattacagtgtgataaggaagacataggcttttgtcctgcctcgccatcggagctctcatgggcccca

SEQ ID NO: 115532 - DNA, 1163 bp, Homo sapiens
  Payload ID: 2547
  Gene Symbol: CD300A
  Gene Name: CD300a molecule
  Uniprot ID: Q9UGN4
  ENST ID: ENST00000392625
  CDS Start-End: 47-499
agggcctggagctgctgcaagtgccgcctgtgctggggaagggaccatgtggctgccttgggctctgttgcttctctgggtcccagcatcaacgtcaatgacacctgcaagtatcactgcggccaagacctcaacaatcacaactgcatttccacctgtatcatccactaccctgtttgcagtgggtgccacccacagtgccagcatccaggaggaaactgaggaggtggtgaactcacagctcccgctgctcctctccctgctggcattgttgctgcttctgttggtgggggcctccctgctagcctggaggatgtttcagaaatggatcaaagctggtgaccattcagagctgtcccagaaccccaagcaggcctcccccagggaagaacttcactatgcctcggtggtgtttgattctaacaccaacaggatagctgctcagaggcctcgggaggaggaaccagattcagattacagtgtgataaggaagacataggcttttgtcctgcctcgccatcggagctctcatgggccccaggaagtccagggacagctcccttatacctggcccacgtccttctcagcctgccctcgacaacagtgaccaacagacaggcagctgggtttcccaggccatccctctgttgccatcagcttgattggcttccccgagggccagcagggctgggggctccggagagcagcaggaagcactcccagccaccagtgcctgtcacctctttcccctttgcccctgcttcatcccagctctgtgtgtggaggacaaagcttcttcctgcgtggctccaggaaaagatgtggctcacgtaggtggcacctgccaatagctttgtcaatcacagccccataggaacgtctggaattgcttgggagttggggagaactgtcaagaagagtgaagagagtgccaaagcggagatctgttcacctgggggccatggaggggggacccactaaagatcaagatcaaagattctccccatctcacagacaaggaaactgaggccagagggaggagagaattgctcatggctccagaactggtggcaagtttctctggactcttaggtttatttttaatatgaaatataaaaacagtttcaaatatcttattgagggagaagtaaaaacttatttaa

SEQ ID NO: 115533 - DNA, 1459 bp, Homo sapiens
  Payload ID: 2547
  Gene Symbol: CD300A
  Gene Name: CD300a molecule
  ENST ID: ENST00000577511
  CDS Start-End: 780-1289
gcggtgcgctctgtctaccacataagatggacagatgaaggtccacacccctgggagaggaaggagccagggcctctcccggctctgcacccacgtaccttggctgaaccacagcggggcaagtgataagggttcgtgaaagatgacctggttctttctgtgttgtgtgtgggtgtgtgtgttcctcttctgacctcttgagttggacaattcagtcatttacctgagagttaatgggtcaagattctgtgatcttcaaggaaaacgttaagacgacagaggaatatcctggtagaggaccctggccccaaggtggtccccagtctcctgtttatgattagaggggtttggggtggtgattcaggttggaagagagaaagcgcagaaacacaagcctgggagcactggggatccatgtgatcgttccaggatgttttgctctgagcaaatgcaggaccgtggcgggccccgtggggggatccctgagtgtgcagtgtccctatgagaaggaacacaggaccctcaacaaatactggtgcagaccaccacagattttcctatgtgacaagattgtggagaccaaagggtcagcaggaaaaaggaacggccgagtgtccatcagggacagtcctgcaaacctcagcttcacagtgaccctggagaatctcacagaggaggatgcaggcacctactggtgtggggtggatacaccatggctccgagactttcatgatcccgttgtcgaggttgaggtgtccgtgttcccggcatcaacgtcaatgacacctgcaagtatcactgcggccaagacctcaacaatcacaactgcatttccacctgtatcatccactaccctgtttgcagtgggtgccacccacagtgccagcatccaggaggaaactgaggaggtggtgaactcacagctcccgctgctcctctccctgctggcattgttgctgcttctgttggtgggggcctccctgctagcctggaggatgtttcagaaatggatcaaagctggtgaccattcagagctgtcccagaaccccaagcaggctgccacgcagagtgagctgcactacgcaaatctggagctgctgatgtggcctctgcaggaaaagccagcaccaccaagggaggtggaggtggaatacagcactgtggcctcccccagggaagaacttcactatgcctcggtggtgtttgattctaacaccaacaggatagctgctcagaggcctcgggaggaggaaccagattcagattacagtgtgataaggaagacataggcttttgtcctgcctcgccatcggagctctcatgggccccaggaagtccagggacagctcccttatacctggcccacgtccttctcagcctgccctcgacaacagtgaccaacagacaggcagctgggtttcccaggccatccctctgttgccatcagcttgattggctt

SEQ ID NO: 115534 - DNA, 1517 bp, Homo sapiens
  Payload ID: 2548
  Gene Symbol: CD300C
  Gene Name: CD300c molecule
  Uniprot ID: Q08708
  ENST ID: ENST00000330793
  CDS Start-End: 362-1036
gaaatggcccagcttggctctgccttctgcagtgtgagtaacacactgaagccagaagctgtgggctgtggggaagtggctgcatcgccacccaagggaccctggactttgccagacgtcagggttgagaggagccactagcaccatcccagagctgtcagcaccggcctcagcccaggcggctctctccctgagcttcctgtaccctgaccctctccagcctcagacctgagacagggctggacaaggaagcagagagcagaagaaaagcagaagcgaagctcagatctgctgggaggagattacattttgtcccctcctggggtcttgcacagtggcaggtgacattcgtgttacaggaatgactgccagggcctgggcctcgtggcggtcttcagctctgctcctcctgcttgtcccaggctattttcctctgagccaccccatgaccgtggcgggccccgtggggggatccctgagtgtgcagtgtcgctatgagaaggaacacaggaccctcaacaaattctggtgcagaccaccacagattctccgatgtgacaagattgtggagaccaaagggtcagcagggaaaaggaatggccgagtgtccatcagggacagtcctgcaaacctcagcttcacagtgaccctggagaatctcacagaggaggacgcaggcacctactggtgtggggtggatacaccgtggctccgagactttcatgatcccattgtcgaggttgaggtgtccgtgttcccggccgggacgaccacagcctccagcccccagagctccatgggcacctcaggtcctcccacgaagctgcccgtgcacacctggcccagcgtgaccagaaaggacagccccgaacccagcccacaccctggctccctgttcagcaatgtccgcttcctgctcctggtcctcttggagctgcccctgctcctgagcatgctgggtgccgtcctctgggtgaacagacctcagagaagctctagaagcaggcagaattggcccaagggtgagaaccagtagcatctgctgtccatcaaggccctgtgctgcaacagagcccctctgggggactggaatgacctcctgaccactccctcccgggctgctctctccacatctcctggaatcctttgtgagcctccttcagccttttccctgtgcccgatcctcatgtgtcacatgtgaacctgacggacatggacgccctgagctgtgagtccacgtctcatgtgcacgccccggccagctaagcctcgggccgtcagcaatacctctgagtgcccggatgccctccctgcacccttccatttctccaggagcctggcactgcttcctccaccgttttcacagggagaagcaggtctaggactcccctgcacctttgccaccataatggcccacactccctgggtccaggagtgtagaatatgcggctgcttccatttgctgagtgtgtcgattcaatgatgctttcaaactttaataaatgacaatgtgtagg

SEQ ID NO: 115535 - DNA, 3501 bp, Homo sapiens
  Payload ID: 2549
  Gene Symbol: CD300E
  Gene Name: CD300e molecule
  Uniprot ID: Q496F6
  ENST ID: ENST00000392619
  CDS Start-End: 118-735
gagaacacaaaggaaacttggacaagtagaaagtggatgacccaggctccgttacatatacttggattccagctgggacctagatttgctgaggacggaagccaaggagacaggaacatgtggctgctcccagctctactccttctctgcctctcaggctgtttgtctctgaagggccccggctctgtgactggcactgcgggggactctctgacagtgtggtgtcagtatgagagcatgtacaagggatataacaagtactggtgccgaggacagtacgacacgtcatgtgagagcattgtggagaccaagggagaagagaaggtggagaggaatggccgcgtgtccatcagagaccacccggaggctctcgccttcactgtgaccatgcagaacctcaatgaagatgatgctggatcttactggtgcaaaattcagacagtgtgggtcctggattcatggtcacgcgatccctcggacctggttagggtgtatgtttccccagcaattacaaccccaaggaggaccacacatccagccacacctcccatcttcctggtggtgaaccctgggcgaaacctcagcaccggggaggtgttgacccaaaattcagggttccggctcagcagccctcacttcctgctcgtggtccttctgaagctgcccctgctcctgagcatgctgggtgctgtcttctgggtgaacaggcctcagtgggctcctcctggaagatagagccaggctgacccgaagccctgcagagccccatccccaggagtgccccgtgcagggagtcaacctttcagactggatgcgagagacctgtggactctggagggatttattgttcctgtgcctcaaaggagggtcctggctcttagaggacactcctctggagtcctcaatgtgcagcttgggggtcctcctttctcctccccagtcccctgcctccctgccctcatgcccacttcccaagggcaagaattccctggaagttggccgggcaccatagcgagtgcctataatcccagctcaggaggctgaggcaggaggatcggctgaacgtaagagttccaggccagcctgggcaacatagagagccctgtctcagagagagagagagagagagagagagagagacagagagagagagagagagagagcgagagagagagagagagagagaaaaggacggaggaagggagggaaaaaattttctggaggagcctggcccttcattcttcttggcacaaatgcttctcaggccagtttcccccagggcaataactacctccttcctgcagacaggagtctccctgaggacacacccctcacagccccagcctttaggctcacagagctccatctcttctctgggacaaccccaagggagcttggtcccggcagagcttgctcatgcagttgcccagtgtcccacatgctcagggctcctctcgtcttctgacgccccttgggtctccctggctttaaggccccttctctccctgtaaccaggcagtgtgtggctgggctcagaacatctctgcctgggtgggccgtggatgagctgctccaggttaaagttctggggcgagttgaaacagtaaagggagaaggagctggtgggtgcccctgatatcactcctggaattcccccacctggaggtgtccaatgcacaaggtcaacagagtcagttctgtccactttagaagtctggctgagaccacctgttagcaattaaccttttccacaggcagagcagatatcgtttttcaaagacaggatggagggcacagaggtgaaggatacttgtccacacttgaagtgcacagtgctatcaccactactggtgacccctggctcgggaatgagctcagttggttttctgaatgtttgtcaattactctgtttccctaaagtttgtggggaggactcccacagtctgccacaagcaagcatcaccatctccacttgctacctacatctggaccagtgctccccctctgcccccaggcctgagctcatcctgagctagtgatgccagtgtccagagcacatggagtgaccctctgagtgccgagtgcttaggcagagctgccgtgctctgaacttgagctctggtggggctcccagctccatcatgcatggtgactaggggaaagatggggctggcccaggactcatgctgaaagagaaattcaatctaacaaggcccatattaattatattaacccgggaaatatgatgatgagcaagaaaggagcttatgattcattttatgagaaggataagctcccaagtcattacagcataggaagaactctagagccacaagagatgcttcctgatgtcagggggttggtgaggagaatatcatgccaagctggccaggtcagggaaagaaggtgacattcatgttgatgttgaaggaggtataggatttcagcggagcagggatggagcaacagggagagagagaggacagagaaacagcataagtgaaagcagagaggcgggaaataatcttcataacaatagtcacttatagaagacctatcagcaaatggactgtactgttcacatacagatgctcatggtaggatgtgtctaagattccaatggagtgaaattttcctgtggcaggccagatggaactaatctagaagaactcaggtggtggcaggttcaggaggcttaggactcaactcttacttaaactttgattagctatggtgggatggatttgagcagaacaagatgggattgcagatgtgctttaggaggacttgcctagcagatgtagcaaagtctgaaaggaagaatctgggagtccggagtcttaagcctggaaaaccagaggaatcgggcatcattgacagaagtaggaaagtcaagagcaggcttggatgatgcagagcttagttttctgtgtgtttggaatcatcaggcagagaggtctagcagatagctagagatgtgggttagcagagtgttgagggctggagaggaatgtgtgtagagagattaactggaacccagcaagaagtgaaaacatggagggaagagttcagaaccaaggacagagccctcggggcacctgcatttaaagacaaagggtaggaggaagacattgatcaaggtgctggagcagaatcaaacaggtggaagatgagaagtcaagagccatgaatgtttcaaggaggagagcagagctagagaggtggaggaggaccgggattgagaggaggctattgaacttatcattcacaaggtcactaatgaagttcagaagagcagatcaacagagcaatgacagcagaagccagaagagaagagttaagaaagagtagacagatggcagacagcaggtgcaggagaaacaaacagtggcttctccatgctttgaattttcccttctcccttactccctttttttcccctattcttcctttcttttttccctttatttactcattcattcaataaacttttattgtgtg

SEQ ID NO: 115536 - DNA, 570 bp, Homo sapiens
  Payload ID: 2549
  Gene Symbol: CD300E
  Gene Name: CD300e molecule
  ENST ID: ENST00000412268
  CDS Start-End: 206-570
ctctgaagggactggctctgatcctagcagaagaagaacaaccccaagctctccagcaaggatccctttaggaagcagcacaagcaggccccggctccatcaccagactcttggctgtgacaagccctttgtaccctgccaagctcccactgtgggaaatgcagtcctgagctctgtccagaacctagaaggaggtgctgctgggatgtgccacctccaggaggaagctgggggcaggtggaagggaggaggctgtttgtctctgaagggccccggctctgtgactggcactgcgggggactctctgacagtgtggtgtcagtatgagagcatgtacaagggatataacaagtactggtgccgaggacagtacgacacgtcatgtgagagcattgtggagaccaagggagaagagaaggtggagaggaatggccgcgtgtccatcagagaccacccggaggctctcgccttcactgtgaccatgcagaacctcaatgaagatgatgctggatcttactggtgcaaaattcagacagtgtgggtcctggattcatggtcacgcgatccctc

SEQ ID NO: 115537 - DNA, 3741 bp, Homo sapiens
  Payload ID: 2550
  Gene Symbol: CD302
  Gene Name: CD302 molecule
  Uniprot ID: Q8IX05
  ENST ID: ENST00000259053
  CDS Start-End: 45-743
ctctccggccgcgcagccgctgccgcccacccgcacccgccgtcatgctccgggccgcgctgcccgcgctcctgctgccgttgctgggcctcgccgctgctgccgtcgcggactgtccttcatctacttggattcagttccaagacagttgttacatttttctccaagaagccatcaaagtagaaagcatagaggatgtcagaaatcagtgtactgaccatggagcggacatgataagcatacataatgaagaagaaaatgcttttatactggatactttgaaaaagcaatggaaaggcccagatgatatcctactaggcatgttttatgacacagatgatgcgagtttcaagtggtttgataattcaaatatgacatttgataagtggacagaccaagatgatgatgaggatttagttgacacctgtgcttttctgcacatcaagacaggtgaatggaaaaaaggaaattgtgaagtttcttctgtggaaggaacactatgcaaaacagctatcccatacaaaaggaaatatttatcagataaccacattttaatatcagcattggtgattgctagcacggtaattttgacagttttgggagcaatcatttggttcctgtacaaaaaacattctgattctcgtttcaccacagttttttcaaccgcaccccaatcaccttataatgaagactgtgttttggtagttggagaagaaaatgaatatcctgttcaatttgactaagtttttggtaatcttgcactaagacatcaacaaaatgccctggcagagataacttgggaaagattttaatataaaacttgacattggatattagagctttaatggtattccttattccagtaacatttttatgtactcatctgctgtgaaaagtctttaggttcattaaaaaaacaggttttagaaatgatcttagatctaatatagtgattttaagcatcccgtcaaaggcagaatctgtcacttgaatgaaggaaagcttaaagcccaagcagataaaaataaaagcccagcctatttgtcttgcctgctgtatcttccctatttagttgacccactttagtttatatgtttattagtaaacatgaaatggggaataagtgattttaagtacatcccatacatttaaatatctttgataattgttatttttttggcagataattcctctagaatgtgtatctttttatgatttagatgaagaaaattttacaacttttaacaccccacaccaattttagtttcattacttttacacacaccattttatcacaaatgactcaagttttaatgaatgtttataaattatttgaaacaaaatatgatcgctgtgtccaggatggcatagagaaagctggcaattaggttaacacttacatattatagtgcccctttaaggatttctctcttgccaccataccttttgtactttcccctatacaagatgtatctcattctcctcaagcatttataaatttttccttcaatgacatgaaaactgtgcaagcaaaaaccgaagaaaaacacttaagtacaactgtagtgacagtgatcaaagttttcagtgcatttattgtacattttaagaaaaaggtgaaaatcatttggggagtaaaaaaatgaaaaagctgaaacgagtaattttcctcaccatcaataaaccaaaaacaggaaagataaagaatgtataaatttcacgtaaattagtcacgtatcacttatcaatggggatacgttctaagaaatgcatagttagggaatcttgtgtgaaaatcagcttgtatttacacaaacccagatggtagagcctattttgtcccaaacctacacagcatgttactgtgctgaatactgcagacaattgtaacacaatatttgtgtatctaaatatagaaaaggtacagtaaaaatatggtctactaaggaaacactgttctatatgtggtccattactgactgaagtatactgtctagaagtctgaggctcaaagaaaagtaatccctcttctgaatccacaccccatcaattatcttactttcttctggggagatagatagatatactatctcactagcttgactaatggcaacaaagttccagcttgtgtagtctctttttattgaccacatgaatcgaaaacactcatcacaattaatggcactatcattaatgagacatgagtaactaaaaagtgatagaaaactattaacagtgcggctacatggtactgaaaatgcaggcattacaccagctgttacacaagcacaagcatgctctgtaagagctttacatttctgagattttgtatagtgattgagatgtctattttattattgatagactattactaatgtcaatattgaacactaccctggaattcctgcctggttttcctacccaaattgtaccactccttgaagaactacaggcacagtaaaaaaaatatggcgtattatgtgaactaaaagagttctaaaggagttcttaaaggagtggtagaatttgggtaggaaagtgattaagtccaacttaaaaccaacagtctcaaacgtctacaactacaatgtccaatgagccactagccacatgaggctatttaagtaaatttagtttaaaatccagttttcgaattacattagccacattgtcaagtgttcaaatcacaggtggttagtggctactgtactgggcaacatacattatagaacattttcattataggaagttttattgggcagtgctgctcttaaatcctaccttccactcaactcccatacaactttcttttgtacattttgatactttctacctaatggcagctcttccaaaatagctgctttaaactctgatttaattttcaatatttggtttcatttttcaacaggccaagaggcctctggtaatgaagtgctatatatatatatatgatggagtctcactgtgctgcccaggctacagtgcagtggctcgatcttggctctctccaatctccgccttgcaggttttcaagcaattctcctgcctcagcctccttagtagctgggaccacagacatctgtcaccacacccagctaactttttgtatttttggtagagacggggtttcgccatattgactgggctggtctcaaactcctgacctcaagtgatccacccaccttggtctcccaaagtgctgggattacatgcgtgagccaccacacttggcctacattttttctttatataccagaacatctataacaggcaccttatctactcattagtgaagagataattggattacacaggcaggcttgtttactacatccagaatgtagaaactgctttcttcaacatcttggttctagctagtaataacaatataattctttggcagatattcagaataacattttaaactacattttcttagaaaattgcattcttgtagtgagcagtgtatggtctcttttgttcagaatttaaaactgataaccaatgaaagccttttctcttattcctctaccgtcatttacatgataatctgaagctaatatgacaatatttaaatactaagtggtactagggaactacaagaatactgtaaagcttaagccattgttatcactgtcatttagcatttaataacaaaactatacagaattatgtgcataccaatgaatgttttgtaccatctagttaaattttttaaataaagttttatgggttaagcag

SEQ ID NO: 115538 - DNA, 3803 bp, Homo sapiens
  Payload ID: 2550
  Gene Symbol: CD302
  Gene Name: CD302 molecule
  Uniprot ID: Q8IX05
  ENST ID: ENST00000429078
  CDS Start-End: 58-582
ccccgccccgctcctctccggccgcgcagccgctgccgcccacccgcacccgccgtcatgctccgggccgcgctgcccgcgctcctgctgccgttgctgggcctcgccgctgctgccgtcgcggactgtccttcatctacttggattcagttccaagacagttgttacatttttctccaagaagccatcaaagtagaaagcatagaggatgtcagaaatcagtgtactgaccatggagcggacatgataagcatacataatgaagaagaaaatgcttttatactggatactttgaaaaagcaatggaaaggcccagatgatatcctactaggcatgttttatgacacagatgtcccatacaaaaggaaatatttatcagataaccacattttaatatcagcattggtgattgctagcacggtaattttgacagttttgggagcaatcatttggttcctgtacaaaaaacattctgattctcgtttcaccacagttttttcaaccgcaccccaatcaccttataatgaagactgtgttttggtagttggagaagaaaatgaatatcctgttcaatttgactaagtttttggtaatcttgcactaagacatcaacaaaatgccctggcagagataacttgggaaagattttaatataaaacttgacattggatattagagctttaatggtattccttattccagtaacatttttatgtactcatctgctgtgaaaagtctttaggttcattaaaaaaacaggttttagaaatgatcttagatctaatatagtgattttaagcatcccgtcaaaggcagaatctgtcacttgaatgaaggaaagcttaaagcccaagcagataaaaataaaagcccagcctatttgtcttgcctgctgtatcttccctatttagttgacccactttagtttatatgtttattagtaaacatgaaatggggaataagtgattttaagtacatcccatacatttaaatatctttgataattgttatttttttggcagataattcctctagaatgtgtatctttttatgatttagatgaagaaaattttacaacttttaacaccccacaccaattttagtttcattacttttacacacaccattttatcacaaatgactcaagttttaatgaatgtttataaattatttgaaacaaaatatgatcgctgtgtccaggatggcatagagaaagctggcaattaggttaacacttacatattatagtgcccctttaaggatttctctcttgccaccataccttttgtactttcccctatacaagatgtatctcattctcctcaagcatttataaatttttccttcaatgacatgaaaactgtgcaagcaaaaaccgaagaaaaacacttaagtacaactgtagtgacagtgatcaaagttttcagtgcatttattgtacattttaagaaaaaggtgaaaatcatttggggagtaaaaaaatgaaaaagctgaaacgagtaattttcctcaccatcaataaaccaaaaacaggaaagataaagaatgtataaatttcacgtaaattagtcacgtatcacttatcaatggggatacgttctaagaaatgcatagttagggaatcttgtgtgaaaatcagcttgtatttacacaaacccagatggtagagcctattttgtcccaaacctacacagcatgttactgtgctgaatactgcagacaattgtaacacaatatttgtgtatctaaatatagaaaaggtacagtaaaaatatggtctactaaggaaacactgttctatatgtggtccattactgactgaagtatactgtctagaagtctgaggctcaaagaaaagtaatccctcttctgaatccacaccccatcaattatcttactttcttctggggagatagatagatatactatctcactagcttgactaatggcaacaaagttccagcttgtgtagtctctttttattgaccacatgaatcgaaaacactcatcacaattaatggcactatcattaatgagacatgagtaactaaaaagtgatagaaaactattaacagtgcggctacatggtactgaaaatgcaggcattacaccagctgttacacaagcacaagcatgctctgtaagagctttacatttctgagattttgtatagtgattgagatgtctattttattattgatagactattactaatgtcaatattgaacactaccctggaattcctgcctggttttcctacccaaattgtaccactccttgaagaactacaggcacagtaaaaaaaatatggcgtattatgtgaactaaaagagttctaaaggagttcttaaaggagtggtagaatttgggtaggaaagtgattaagtccaacttaaaaccaacagtctcaaacgtctacaactacaatgtccaatgagccactagccacatgaggctatttaagtaaatttagtttaaaatccagttttcgaattacattagccacattgtcaagtgttcaaatcacaggtggttagtggctactgtactgggcaacatacattatagaacattttcattataggaagttttattgggcagtgctgctcttaaatcctaccttccactcaactcccatacaactttcttttgtacattttgatactttctacctaatggcagctcttccaaaatagctgctttaaactctgatttaattttcaatatttggtttcatttttcaacaggccaagaggcctctggtaatgaagtgctatatatatatatatgatggagtctcactgtgctgcccaggctacagtgcagtggctcgatcttggctctctccaatctccgccttgcaggttttcaagcaattctcctgcctcagcctccttagtagctgggaccacagacatctgtcaccacacccagctaactttttgtatttttggtagagacggggtttcgccatattgactgggctggtctcaaactcctgacctcaagtgatccacccaccttggtctcccaaagtgctgggattacatgcgtgagccaccacacttggcctacattttttctttatataccagaacatctataacaggcaccttatctactcattagtgaagagataattggattacacaggcaggcttgtttactacatccagaatgtagaaactgctttcttcaacatcttggttctagctagtaataacaatataattctttggcagatattcagaataacattttaaactacattttcttagaaaattgcattcttgtagtgagcagtgtatggtctcttttgttcagaatttaaaactgataaccaatgaaagccttttctcttattcctctaccgtcatttacatgataatctgaagctaatatgacaatatttaaatactaagtggtactagggaactacaagaatactgtaaagcttaagccattgttatcactgtcatttagcatttaataacaaaactatacagaattatgtgcataccaatgaatgttttgtaccatctagttaaattttttaaataaagttttatgggttaagcagaagacaactgtcatactgaattttattaaaagtatatatacttcaaattcaaagcatcccttaggacccacagaatatattaaaactaccacccttaaattttatatttttgctttaagacagacaatgcaaaggtaactggcaagaggtgagcaaatgttttagaacatttatattattgcttaaaatgagatttgaaattgtaataaaattcttggttatg

SEQ ID NO: 115539 - DNA, 3866 bp, Homo sapiens
  Payload ID: 2550
  Gene Symbol: CD302
  Gene Name: CD302 molecule
  ENST ID: ENST00000553424
  CDS Start-End: 58-645
ccccgccccgctcctctccggccgcgcagccgctgccgcccacccgcacccgccgtcatgctccgggccgcgctgcccgcgctcctgctgccgttgctgggcctcgccgctgctgccgtcgcgggagcggacatgataagcatacataatgaagaagaaaatgcttttatactggatactttgaaaaagcaatggaaaggcccagatgatatcctactaggcatgttttatgacacagatgatgcgagtttcaagtggtttgataattcaaatatgacatttgataagtggacagaccaagatgatgatgaggatttagttgacacctgtgcttttctgcacatcaagacaggtgaatggaaaaaaggaaattgtgaagtttcttctgtggaaggaacactatgcaaaacagctatcccatacaaaaggaaatatttatcagataaccacattttaatatcagcattggtgattgctagcacggtaattttgacagttttgggagcaatcatttggttcctgtacaaaaaacattctgattctcgtttcaccacagttttttcaaccgcaccccaatcaccttataatgaagactgtgttttggtagttggagaagaaaatgaatatcctgttcaatttgactaagtttttggtaatcttgcactaagacatcaacaaaatgccctggcagagataacttgggaaagattttaatataaaacttgacattggatattagagctttaatggtattccttattccagtaacatttttatgtactcatctgctgtgaaaagtctttaggttcattaaaaaaacaggttttagaaatgatcttagatctaatatagtgattttaagcatcccgtcaaaggcagaatctgtcacttgaatgaaggaaagcttaaagcccaagcagataaaaataaaagcccagcctatttgtcttgcctgctgtatcttccctatttagttgacccactttagtttatatgtttattagtaaacatgaaatggggaataagtgattttaagtacatcccatacatttaaatatctttgataattgttatttttttggcagataattcctctagaatgtgtatctttttatgatttagatgaagaaaattttacaacttttaacaccccacaccaattttagtttcattacttttacacacaccattttatcacaaatgactcaagttttaatgaatgtttataaattatttgaaacaaaatatgatcgctgtgtccaggatggcatagagaaagctggcaattaggttaacacttacatattatagtgcccctttaaggatttctctcttgccaccataccttttgtactttcccctatacaagatgtatctcattctcctcaagcatttataaatttttccttcaatgacatgaaaactgtgcaagcaaaaaccgaagaaaaacacttaagtacaactgtagtgacagtgatcaaagttttcagtgcatttattgtacattttaagaaaaaggtgaaaatcatttggggagtaaaaaaatgaaaaagctgaaacgagtaattttcctcaccatcaataaaccaaaaacaggaaagataaagaatgtataaatttcacgtaaattagtcacgtatcacttatcaatggggatacgttctaagaaatgcatagttagggaatcttgtgtgaaaatcagcttgtatttacacaaacccagatggtagagcctattttgtcccaaacctacacagcatgttactgtgctgaatactgcagacaattgtaacacaatatttgtgtatctaaatatagaaaaggtacagtaaaaatatggtctactaaggaaacactgttctatatgtggtccattactgactgaagtatactgtctagaagtctgaggctcaaagaaaagtaatccctcttctgaatccacaccccatcaattatcttactttcttctggggagatagatagatatactatctcactagcttgactaatggcaacaaagttccagcttgtgtagtctctttttattgaccacatgaatcgaaaacactcatcacaattaatggcactatcattaatgagacatgagtaactaaaaagtgatagaaaactattaacagtgcggctacatggtactgaaaatgcaggcattacaccagctgttacacaagcacaagcatgctctgtaagagctttacatttctgagattttgtatagtgattgagatgtctattttattattgatagactattactaatgtcaatattgaacactaccctggaattcctgcctggttttcctacccaaattgtaccactccttgaagaactacaggcacagtaaaaaaaatatggcgtattatgtgaactaaaagagttctaaaggagttcttaaaggagtggtagaatttgggtaggaaagtgattaagtccaacttaaaaccaacagtctcaaacgtctacaactacaatgtccaatgagccactagccacatgaggctatttaagtaaatttagtttaaaatccagttttcgaattacattagccacattgtcaagtgttcaaatcacaggtggttagtggctactgtactgggcaacatacattatagaacattttcattataggaagttttattgggcagtgctgctcttaaatcctaccttccactcaactcccatacaactttcttttgtacattttgatactttctacctaatggcagctcttccaaaatagctgctttaaactctgatttaattttcaatatttggtttcatttttcaacaggccaagaggcctctggtaatgaagtgctatatatatatatatgatggagtctcactgtgctgcccaggctacagtgcagtggctcgatcttggctctctccaatctccgccttgcaggttttcaagcaattctcctgcctcagcctccttagtagctgggaccacagacatctgtcaccacacccagctaactttttgtatttttggtagagacggggtttcgccatattgactgggctggtctcaaactcctgacctcaagtgatccacccaccttggtctcccaaagtgctgggattacatgcgtgagccaccacacttggcctacattttttctttatataccagaacatctataacaggcaccttatctactcattagtgaagagataattggattacacaggcaggcttgtttactacatccagaatgtagaaactgctttcttcaacatcttggttctagctagtaataacaatataattctttggcagatattcagaataacattttaaactacattttcttagaaaattgcattcttgtagtgagcagtgtatggtctcttttgttcagaatttaaaactgataaccaatgaaagccttttctcttattcctctaccgtcatttacatgataatctgaagctaatatgacaatatttaaatactaagtggtactagggaactacaagaatactgtaaagcttaagccattgttatcactgtcatttagcatttaataacaaaactatacagaattatgtgcataccaatgaatgttttgtaccatctagttaaattttttaaataaagttttatgggttaagcagaagacaactgtcatactgaattttattaaaagtatatatacttcaaattcaaagcatcccttaggacccacagaatatattaaaactaccacccttaaattttatatttttgctttaagacagacaatgcaaaggtaactggcaagaggtgagcaaatgttttagaacatttatattattgcttaaaatgagatttgaaattgtaataaaattcttggttatg

SEQ ID NO: 115540 - DNA, 1250 bp, Homo sapiens
  Payload ID: 2551
  Gene Symbol: CD320
  Gene Name: CD320 molecule
  Uniprot ID: Q9NPF0
  ENST ID: ENST00000301458
  CDS Start-End: 66-914
tgcgcgtgcgcagggataagagagcggtctggacagcgcgtggccggcgccgctgtggggacagcatgagcggcggttggatggcgcaggttggagcgtggcgaacaggggctctgggcctggcgctgctgctgctgctcggcctcggactaggcctggaggccgccgcgagcccgctttccaccccgacctctgcccaggccgcaggccccagctcaggctcgtgcccacccaccaagttccagtgccgcaccagtggcttatgcgtgcccctcacctggcgctgcgacagggacttggactgcagcgatggcagcgatgaggaggagtgcaggattgagccatgtacccagaaagggcaatgcccaccgccccctggcctcccctgcccctgcaccggcgtcagtgactgctctgggggaactgacaagaaactgcgcaactgcagccgcctggcctgcctagcaggcgagctccgttgcacgctgagcgatgactgcattccactcacgtggcgctgcgacggccacccagactgtcccgactccagcgacgagctcggctgtggaaccaatgagatcctcccggaaggggatgccacaaccatggggccccctgtgaccctggagagtgtcacctctctcaggaatgccacaaccatggggccccctgtgaccctggagagtgtcccctctgtcgggaatgccacatcctcctctgccggagaccagtctggaagcccaactgcctatggggttattgcagctgctgcggtgctcagtgcaagcctggtcaccgccaccctcctccttttgtcctggctccgagcccaggagcgcctccgcccactggggttactggtggccatgaaggagtccctgctgctgtcagaacagaagacctcgctgccctgaggacaagcacttgccaccaccgtcactcagccctgggcgtagccggacaggaggagagcagtgatgcggatgggtacccgggcacaccagccctcagagacctgagctcttctggccacgtggaacctcgaacccgagctcctgcagaagtggccctggagattgagggtccctggacactccctatggagatccggggagctaggatggggaacctgccacagccagaactgaggggctggccccaggcagctcccagggggtagaacggccctgtgcttaagacactcctgctgccccgtctgagggtggcaattaaagttgcttcacatcctc

SEQ ID NO: 115541 - DNA, 1119 bp, Homo sapiens
  Payload ID: 2551
  Gene Symbol: CD320
  Gene Name: CD320 molecule
  Uniprot ID: Q9NPF0
  ENST ID: ENST00000537716
  CDS Start-End: 61-783
gtgcgcagggataagagagcggtctggacagcgcgtggccggcgccgctgtggggacagcatgagcggcggttggatggcgcaggttggagcgtggcgaacaggggctctgggcctggcgctgctgctgctgctcggcctcggactaggcctggaggccgccgcgagcccgctttccaccccgacctctgcccaggccgcagggattgagccatgtacccagaaagggcaatgcccaccgccccctggcctcccctgcccctgcaccggcgtcagtgactgctctgggggaactgacaagaaactgcgcaactgcagccgcctggcctgcctagcaggcgagctccgttgcacgctgagcgatgactgcattccactcacgtggcgctgcgacggccacccagactgtcccgactccagcgacgagctcggctgtggaaccaatgagatcctcccggaaggggatgccacaaccatggggccccctgtgaccctggagagtgtcacctctctcaggaatgccacaaccatggggccccctgtgaccctggagagtgtcccctctgtcgggaatgccacatcctcctctgccggagaccagtctggaagcccaactgcctatggggttattgcagctgctgcggtgctcagtgcaagcctggtcaccgccaccctcctccttttgtcctggctccgagcccaggagcgcctccgcccactggggttactggtggccatgaaggagtccctgctgctgtcagaacagaagacctcgctgccctgaggacaagcacttgccaccaccgtcactcagccctgggcgtagccggacaggaggagagcagtgatgcggatgggtacccgggcacaccagccctcagagacctgagctcttctggccacgtggaacctcgaacccgagctcctgcagaagtggccctggagattgagggtccctggacactccctatggagatccggggagctaggatggggaacctgccacagccagaactgaggggctggccccaggcagctcccagggggtagaacggccctgtgcttaagacactcctgctgccccgtctgagggtggcaattaaagttgcttcacatcctc

SEQ ID NO: 115542 - DNA, 861 bp, Homo sapiens
  Payload ID: 2551
  Gene Symbol: CD320
  Gene Name: CD320 molecule
  ENST ID: ENST00000599573
  CDS Start-End: 1-266
cgcaggttggagcgtggcgaacaggggctctgggcctggcgctgctgctgctgctcggcctcggactaggcctggaggccgccgcgagcccgctttccaccccgacctctgcccaggccgcaggccccagctcaggctcgtgcccacccaccaagttccagtgccgcaccagtggcttatgcgtgcccctcacctggcgctgcgacagggacttggactgcagcgatggcagcgatgaggaggagtgcaccgcctggcctgcctagcaggcgagctccgttgcacgctgagcgatgactgcattccactcacgtggcgctgcgacggccacccagactgtcccgactccagcgacgagctcggctgtggaaccaatgagatcctcccggaaggggatgccacaaccatggggccccctgtgaccctggagagtgtcacctctctcaggaatgccacaaccatggggccccctgtgaccctggagagtgtcccctctgtcgggaatgccacatcctcctctgccggagaccagtctggaagcccaactgcctatggggttattgcagctgctgcggtgctcagtgcaagcctggtcaccgccaccctcctccttttgtcctggctccgagcccaggagcgcctccgcccactggggttactggtggccatgaaggagtccctgctgctgtcagaacagaagacctcgctgccctgaggacaagcacttgccaccaccgtcactcagccctgggcgtagccggacaggaggagagcagtgatgcggatgggtacccgggcacaccagccctcagagacctgagctcttctggccacgtggaacctcgaacccgagctcctgca

SEQ ID NO: 115543 - DNA, 1729 bp, Homo sapiens
  Payload ID: 2551
  Gene Symbol: CD320
  Gene Name: CD320 molecule
  ENST ID: ENST00000596002
  CDS Start-End: 11-256
tggggacagcatgagcggcggttggatggcgcaggttggagcgtggcgaacaggggctctgggcctggcgctgctgctgctgctcggcctcggactaggcctggaggccgccgcgagcccgctttccaccccgacctctgcccaggccgcagatcatctcgctatgaggagcctggtgaagactctgggatcagcgagacctgagttcgaagcccaactccgctaccagctcttttttttttcttttttgtggtgacggagtctcgttctgtcgcccaggctggagtgcagcagtatgatttcggttcattgcaacctccatctcccaggtttaagcgattctcatgcttcagcctcccgagtagctggcattacaggcgtgcactaccacgcccggctaatttttgtatttttaacagagacggggtttccatgtaggccaggctggtctcgaactcgtgacctcaagtgatccacctgcctcggcctgccaaagtgctgagattacaggcgtgagccactgcacccagcctctgccaccagctgtatggcctcctcttggttcctttctctgtaacctggggagtgcagtagcacctgcccagtggggctcttgagcccaggaactgctacactctgaaccccactcgtactaggggctcagtaacaagcagccgccagtgtggttcctatatcccgggacttcgcctgtctcctgcggatcacagccagtgactactgtgctcttggagaaaggtccagcctccagcttcccaggcttcatttgcatccatctcgcaggccccagctcaggctcgtgcccacccaccaagttccagtgccgcaccagtggcttatgcgtgcccctcacctggcgctgcgacagggacttggactgcagcgatggcagcgatgaggaggagtgcaccgcctggcctgcctagcaggcgagctccgttgcacgctgagcgatgactgcattccactcacgtggcgctgcgacggccacccagactgtcccgactccagcgacgagctcggctgtggaaccaatgagatcctcccggaaggggatgccacaaccatggggccccctgtgaccctggagagtgtcacctctctcaggaatgccacaaccatggggccccctgtgaccctggagagtgtcccctctgtcgggaatgccacatcctcctctgccggagaccagtctggaagcccaactgcctatggggttattgcagctgctgcggtgctcagtgcaagcctggtcaccgccaccctcctccttttgtcctggctccgagcccaggagcgcctccgcccactggggttactggtggccatgaaggagtccctgctgctgtcagaacagaagacctcgctgccctgaggacaagcacttgccaccaccgtcactcagccctgggcgtagccggacaggaggagagcagtgatgcggatgggtacccgggcacaccagccctcagagacctgagctcttctggccacgtggaacctcgaacccgagctcctgcagaagtggccctggagattgagggtccctggacactccctatggagatccggggagctaggatggggaacctgccacagccagaactgaggggctggccccaggcagctcccagggggtagaacggccctgtgcttaagacactcctgctgccccgtctgagggtggcaattaaagttgcttcacatcctc

SEQ ID NO: 115544 - DNA, 1444 bp, Homo sapiens
  Payload ID: 2552
  Gene Symbol: CD33
  Gene Name: CD33 molecule
  Uniprot ID: P20138
  ENST ID: ENST00000262262
  CDS Start-End: 22-1116
ctggaagctgcttcctcagacatgccgctgctgctactgctgcccctgctgtgggcaggggccctggctatggatccaaatttctggctgcaagtgcaggagtcagtgacggtacaggagggtttgtgcgtcctcgtgccctgcactttcttccatcccataccctactacgacaagaactccccagttcatggttactggttccgggaaggagccattatatccagggactctccagtggccacaaacaagctagatcaagaagtacaggaggagactcagggcagattccgcctccttggggatcccagtaggaacaactgctccctgagcatcgtagacgccaggaggagggataatggttcatacttctttcggatggagagaggaagtaccaaatacagttacaaatctccccagctctctgtgcatgtgacagacttgacccacaggcccaaaatcctcatccctggcactctagaacccggccactccaaaaacctgacctgctctgtgtcctgggcctgtgagcagggaacacccccgatcttctcctggttgtcagctgcccccacctccctgggccccaggactactcactcctcggtgctcataatcaccccacggccccaggaccacggcaccaacctgacctgtcaggtgaagttcgctggagctggtgtgactacggagagaaccatccagctcaacgtcacctatgttccacagaacccaacaactggtatctttccaggagatggctcagggaaacaagagaccagagcaggagtggttcatggggccattggaggagctggtgttacagccctgctcgctctttgtctctgcctcatcttcttcatagtgaagacccacaggaggaaagcagccaggacagcagtgggcaggaatgacacccaccctaccacagggtcagcctccccgaaacaccagaagaagtccaagttacatggccccactgaaacctcaagctgttcaggtgccgcccctactgtggagatggatgaggagctgcattatgcttccctcaactttcatgggatgaatccttccaaggacacctccaccgaatactcagaggtcaggacccagtgaggaacccacaagagcatcaggctcagctagaagatccacatcctctacaggtcggggaccaaaggctgattcttggagatttaacaccccacaggcaatgggtttatagacattatgtgagtttcctgctatattaacatcatcttagactttgcaagcagagagtcgtggaatcaaatctgtgctctttcatttgctaagtgtatgatgtcacacaagctccttaaccttccatgtctccattttcttctctgtgaagtaggtataagaagtcctatctcatagggatgctgtgagcattaaataaaggtacacatggaaaacacca

SEQ ID NO: 115545 - DNA, 1089 bp, Homo sapiens
  Payload ID: 2552
  Gene Symbol: CD33
  Gene Name: CD33 molecule
  Uniprot ID: P20138
  ENST ID: ENST00000391796
  CDS Start-End: 22-954
ctggaagctgcttcctcagacatgccgctgctgctactgctgcccctgctgtgggcaggggccctggctatggatccaaatttctggctgcaagtgcaggagtcagtgacggtacaggagggtttgtgcgtcctcgtgccctgcactttcttccatcccataccctactacgacaagaactccccagttcatggttactggttccgggaaggagccattatatccagggactctccagtggccacaaacaagctagatcaagaagtacaggaggagactcagggcagattccgcctccttggggatcccagtaggaacaactgctccctgagcatcgtagacgccaggaggagggataatggttcatacttctttcggatggagagaggaagtaccaaatacagttacaaatctccccagctctctgtgcatgtgacagacttgacccacaggcccaaaatcctcatccctggcactctagaacccggccactccaaaaacctgacctgctctgtgtcctgggcctgtgagcagggaacacccccgatcttctcctggttgtcagctgcccccacctccctgggccccaggactactcactcctcggtgctcataatcaccccacggccccaggaccacggcaccaacctgacctgtcaggtgaagttcgctggagctggtgtgactacggagagaaccatccagctcaacgtcacctatgttccacagaacccaacaactggtatctttccaggagatggctcagggaaacaagagaccagagcaggagtggttcatggggccattggaggagctggtgttacagccctgctcgctctttgtctctgcctcatcttcttcatagtgaagacccacaggaggaaagcagccaggacagcagtgggcaggaatgacacccaccctaccacagggtcagcctccccggtacgttgaggccaacagatcaggagatgatggccattgaaaagatagtttcttggccgggcacagtgtttcacacctgcaatcccagcacctttggaggccaaggcgggcggatcacgaggtcaggagattgagactatcctg

SEQ ID NO: 115546 - DNA, 1494 bp, Homo sapiens
  Payload ID: 2552
  Gene Symbol: CD33
  Gene Name: CD33 molecule
  ENST ID: ENST00000436584
  CDS Start-End: 56-694
actcccttcctcttttctgctcacacaggaagccctggaagctgcttcctcagacatgccgctgctgctactgctgcccctgctgtgggcagacttgacccacaggcccaaaatcctcatccctggcactctagaacccggccactccaaaaacctgacctgctctgtgtcctgggcctgtgagcagggaacacccccgatcttctcctggttgtcagctgcccccacctccctgggccccaggactactcactcctcggtgctcataatcaccccacggccccaggaccacggcaccaacctgacctgtcaggtgaagttcgctggagctggtgtgactacggagagaaccatccagctcaacgtcacctatgttccacagaacccaacaactggtatctttccaggagatggctcagggaaacaagagaccagagcaggagtggttcatggggccattggaggagctggtgttacagccctgctcgctctttgtctctgcctcatcttcttcatagtgaagacccacaggaggaaagcagccaggacagcagtgggcaggaatgacacccaccctaccacagggtcagcctccccggtgagtgatggggcatcctggcatccagtctgtcctgcagacacctcctcccaatgtggcccaccgtcatgccccattcagcatttccagaactgagcttattgtctttcctcctgtttaacagtgtaggttttaatatttttcaggtacgttgaggccaacagatcaggagatgatggccattgaaaagatagtttcttggccgggcacagtgtttcacacctgcaatcccagcacctttggaggccaaggcgggcggatcacgaggtcaggagattgagactatcctggctaacatggtgaaaccccgtctctactaaaaatacaaaaaattagccagatgtggtggctggcgcctgtagtcccagctacttgggaggctgaggcaggagaatggtatgaacccgggaggcagagcttgtagtgagccgacatagcaccactgcactccagcctgggtgacagagagagactctgtcccaaaaagaaaaaaaaaatagtttcttattcaccgttcccgagagggcacaccacaccatgcaaggccatatggagaagcaccagggtcagtcaggaagcagagggagcaaggagaaaatgggacaagagccttcactgtggctttcatggaaaagaatgggcaagacagggtaagcaagctaggcaggtttaggattggctacttagaacaatttcagcagactctggggtataggagttgtctctagttgtctggtacatggccctgggtttattaaggaggattgtggtctggagtgtaagagctcaataaaggatccagctggtagtgtgggctttagattgactggtttgcacatgaaaggtgcacttgtatgcaagtcctttattagctctagaaatctactatccttggg

SEQ ID NO: 115547 - DNA, 1023 bp, Homo sapiens
  Payload ID: 2552
  Gene Symbol: CD33
  Gene Name: CD33 molecule
  Uniprot ID: P20138
  ENST ID: ENST00000421133
  CDS Start-End: 56-769
actcccttcctcttttctgctcacacaggaagccctggaagctgcttcctcagacatgccgctgctgctactgctgcccctgctgtgggcagacttgacccacaggcccaaaatcctcatccctggcactctagaacccggccactccaaaaacctgacctgctctgtgtcctgggcctgtgagcagggaacacccccgatcttctcctggttgtcagctgcccccacctccctgggccccaggactactcactcctcggtgctcataatcaccccacggccccaggaccacggcaccaacctgacctgtcaggtgaagttcgctggagctggtgtgactacggagagaaccatccagctcaacgtcacctatgttccacagaacccaacaactggtatctttccaggagatggctcagggaaacaagagaccagagcaggagtggttcatggggccattggaggagctggtgttacagccctgctcgctctttgtctctgcctcatcttcttcatagtgaagacccacaggaggaaagcagccaggacagcagtgggcaggaatgacacccaccctaccacagggtcagcctccccgaaacaccagaagaagtccaagttacatggccccactgaaacctcaagctgttcaggtgccgcccctactgtggagatggatgaggagctgcattatgcttccctcaactttcatgggatgaatccttccaaggacacctccaccgaatactcagaggtcaggacccagtgaggaacccacaagagcatcaggctcagctagaagatccacatcctctacaggtcggggaccaaaggctgattcttggagatttaacaccccacaggcaatgggtttatagacattatgtgagtttcctgctatattaacatcatcttagactttgcaagcagagagtcgtggaatcaaatctgtgctctttcatttgctaagtgtatgatgtcacacaagctccttaaccttccatgtctccattttcttctctg

SEQ ID NO: 115548 - DNA, 8246 bp, Homo sapiens
  Payload ID: 2553
  Gene Symbol: CD34
  Gene Name: CD34 molecule
  Uniprot ID: P28906
  ENST ID: ENST00000310833
  CDS Start-End: 323-1480
aagaagtgggatggggcctctccagaaagctgaacgaggcatctggagcccgaacaaacctccaccttttttggcctcgacggcggcaacccagcctccctcctaacgccctccgcctttgggaccaaccaggggagctcaagttagtagcagccaaggagaggcgctgccttgccaagactaaaaagggaggggagaagagaggaaaaaagcaagaatcccccacccctctcccgggcggagggggcgggaagagcgcgtcctggccaagccgagtagtgtcttccactcggtgcgtctctctaggagccgcgcgggaaggatgctggtccgcaggggcgcgcgcgcagggcccaggatgccgcggggctggaccgcgctttgcttgctgagtttgctgccttctgggttcatgagtcttgacaacaacggtactgctaccccagagttacctacccagggaacattttcaaatgtttctacaaatgtatcctaccaagaaactacaacacctagtacccttggaagtaccagcctgcaccctgtgtctcaacatggcaatgaggccacaacaaacatcacagaaacgacagtcaaattcacatctacctctgtgataacctcagtttatggaaacacaaactcttctgtccagtcacagacctctgtaatcagcacagtgttcaccaccccagccaacgtttcaactccagagacaaccttgaagcctagcctgtcacctggaaatgtttcagacctttcaaccactagcactagccttgcaacatctcccactaaaccctatacatcatcttctcctatcctaagtgacatcaaggcagaaatcaaatgttcaggcatcagagaagtgaaattgactcagggcatctgcctggagcaaaataagacctccagctgtgcggagtttaagaaggacaggggagagggcctggcccgagtgctgtgtggggaggagcaggctgatgctgatgctggggcccaggtatgctccctgctccttgcccagtctgaggtgaggcctcagtgtctactgctggtcttggccaacagaacagaaatttccagcaaactccaacttatgaaaaagcaccaatctgacctgaaaaagctggggatcctagatttcactgagcaagatgttgcaagccaccagagctattcccaaaagaccctgattgcactggtcacctcgggagccctgctggctgtcttgggcatcactggctatttcctgatgaatcgccgcagctggagccccacaggagaaaggctgggcgaagacccttattacacggaaaacggtggaggccagggctatagctcaggacctgggacctcccctgaggctcagggaaaggccagtgtgaaccgaggggctcaggaaaacgggaccggccaggccacctccagaaacggccattcagcaagacaacacgtggtggctgataccgaattgtgactcggctaggtggggcaaggctgggcagtgtccgagagagcacccctctctgcatctgaccacgtgctacccccatgctggaggtgacatctcttacgcccaacccttccccactgcacacacctcagaggctgttcttggggccctacaccttgaggaggggcaggtaaactcctgtcctttacacattcggctccctggagccagactctggtcttctttgggtaaacgtgtgacgggggaaagccaaggtctggagaagctcccaggaacaatcgatggccttgcagcactcacacaggacccccttcccctaccccctcctctctgccgcaatacaggaacccccaggggaaagatgagcttttctaggctacaattttctcccaggaagctttgatttttaccgtttcttccctgtattttctttctctactttgaggaaaccaaagtaaccttttgcacctgctctcttgtaatgatatagccagaaaaacgtgttgccttgaaccacttccctcatctctcctccaagacactgtggacttggtcaccagctcctcccttgttctctaagttccactgagctccatgtgccccctctaccatttgcagagtcctgcacagttttctggctggagcctagaacaggcctcccaagttttaggacaaacagctcagttctagtctctctggggccacacagaaactctttttgggctcctttttctccctctggatcaaagtaggcaggaccatgggaccaggtcttggagctgagcctctcacctgtactcttccgaaaaatcctcttcctctgaggctggatcctagccttatcctctgatctccatggcttcctcctccctcctgccgactcctgggttgagctgttgcctcagtcccccaacagatgcttttctgtctctgcctccctcaccctgagccccttccttgctctgcacccccatatggtcatagcccagatcagctcctaacccttatcaccagctgcctcttctgtgggtgacccaggtccttgtttgctgttgatttctttccagaggggttgagcagggatcctggtttcaatgacggttggaaatagaaatttccagagaagagagtattgggtagatattttttctgaatacaaagtgatgtgtttaaatactgcaattaaagtgatactgaaacacatctgttatgtgactctgtcttagctgggtgtgtctgcatgcaagagtgacaccctccattagacctagctagactgtgcagtgatgtggtggggaggaccagccagggaagagggagcacctcagcagacacaggcaccagccaggatgctaaggacctttagccaagtctgccaactattctcctccatggggagaggaaacatccatttccagtggtagaaaggcagacccgaatgtaccagggagcttccaaatggagggtggtatgttgggttcttaggagctgtacccttcatgaacacccttctgagaagaggagcatgctgatcactgctgcaaaatatgcaaaacaaagggaaggggcaatgtcctgtgcaccctttattatcaggccacccccctccccagccccccaggtcagagtagacacagtgaaggactatgtggggactgttgttctagagacctggcagccaactcagggagggggctggtttccaccctcaagattaagacagcagcctaattaaaaaaaaaatctgtaagcatgtacctccccccagcttccaaaacaacccccaccccacccctaccaggccataggaagttggggagggagtgctgaggagctccaggaaacactcccaagtgtgtcgacagtggcagaggcagttggggccaaacaaaggttgattcttccattcttatctccataaagccagacctttcccttcagcactcctccacccccatctccttcttgcttttctccaactcctctaatcataggttcttccctaggacagaggggaggcgaaatgatgaggttcagagtcttccctcaaaggcgatggctgccttgagggttggagcaaaggatgatgagcaaaagacgatggtaatcagtagggaagtccagcccacttgcatctagttgcacatcttgccttgagagtaatccagtgagggtctgtcccagctaggacatcaagtaggaggggtgggttcagggttcagattcctaggaaatatgggaggagaggaaaaggcaacttggatgcacctccagcttcaggcctagcaacctgcaatgcatctcaccctgagtttgctggaatgtgtatgtatgctttgggaggaagggctgtgtgtgtattgcggggtggggtggggcagctggttccctctgacagctggacagcttgccctgaagaatttgcctgctttctggaaaaatccaactttcccaccgtgggcctgagcgtcctggtacagcaatggcgccacctgctggccttattgaggtcctactgctcagcctcagctcaatcgcctccatgttgggcttctctccctggctgccccaccctctagtccaatttctcttgtacacaaagctcatataactatagaacgtcactgttgaagagaactttaaagatacatttaattaaactcccttatggtatagttaaagacaaactaaggctcagagaagggaggtggcttgcccaatcacccagaattccaaagtcctgaatctgtagttttcccttccatcatatcatcctactcttctgccgagtcctccgtgttactccagttggatgtcatgaagccagtgtggcagtgtgaagataggtttgggacttcacttctggagcatttcatcaacataagctatcctaggcctggccagccaagcaggtcctggaggagccccaggacaaagatcacaggaggccatgaggttcggcttcttcggcgcccacagtgagcccaggaaaattagctgtagggtattacactgttgactatggagagcatatctggaattatcttcagccagattttcatctgaatggataaatgggaataccatctaagtccagataaatagatcacttccatctcatcccttctaggtagattaatcccacacttcctcttcacacaaaaccagtaataggtcatcgattttgtgcaacaggatgctgcttctcttcctaaagcccccatcgaagaggcttccagccaccattcaatcattcatcaagtcttatgatgtgccagacactgcgcgaaatgtgccagaacatctgttatgtgccagacactgttcttgagactggggatacagcaaacactcatgaagcttataattctagcagaagaggacagtaaacaatgtcatctcagtaagtatatacatgtgttttcaggattgagagctatgaaaaacataaaatatattgagaataatggttggtattttacatatggtggttacttttagaaaaataacagtggagagcacagcttcacttgaatgaagtggagaagcaggttgtatgccaagctgggagagattatcccacacaggggaaaggacaagtgcaaagccctatgatgaaaagctgccaagtgcagaaagcctcagatggcagggggcaagatggccatgaggttgtgtcagtgagtgggggtggggagaggcaggaggtcagactacatggggcctttttagttgtagattgggaagccactggagggttttgagcagagaagtcatatcatctgctttatgttttaaaaggatcatgctggctgctgagtagagaatagaggttgagggataagaaagtagaaggagaccgtagcaagaagaacgatcatggctgggagcaggtgatcatattggcagtgatgagatcaagcagaattcaaaaagtggtttcaaagtagaggtaacaggacttgctcagtctatttatttcttcaaataataatcatatttacaatgatagtagctaacagtttttgagtgcttactgtatgaaaattgagatatggtgccaatatttaaatagcatattttacttaacattcacagaaaccctgtgaagtaggttctattatctcagaaaaagaaactgaaactcagagaataacaagggactgtgttacgtgcacagtggcagaggcaaagatgaataggatgtgagtttatttgaaccccaaatgtttaaatcttggggataatacaacacacatttaaacaaagaagcaagaaaaaaaatgcacaacagaaagtgagaaataacacgaggaaagactaaatgaagtgctttgtatctagatgtgggcaggaccctttccagctgagaagatctgagactgggtcatgaacaggtggtttctgagtgggtcctgtaaaaatgaatacgattttgatgatagtaatgagtaaggacatttgagactgatagaagagtacatacaatatgtagtgatggggaaagataaggtactgtcaaaggacaatgtgttttctggtatgacagagaagtagaatgtgttaagggaagccgagtaccagaaagatccgggtgtcacagtttgtgtagggtgtttaaagctaaaccacagagtttaattttatccaatagaagaggagccacagaagagtttccatttattcattaatttattcatttattcaaaaaatatttgagtgcttattataagccaggtactatgccaggcacctgggataagacatagtcccttctgtcaagtctttacattgggtggatgtgggagggacagatgacagaacaatatgcattgagtgtaagtgctatggtataggaagctctgagtgggaggggcatggaagccgtggaagaccatggaaggcttcccaggagaagtgacgtctggactgatcctttggtcaagcaggagttaaagaggagaaaaggagagatatgggtgttcccgagagaggaagaagccttgtcccaggagcaaagtgagggtgattgttccagaaatgtgagtgattcttttaaggctcaagcaaagcatgtgattcttctttataccttctatttctttgctgagtgtttctgttcttttgtttcaagcatgctgcaattgctcattaaagcatgtttatgatggctgtctgttttaaaattcttgtcagatggtttcaacatctttatcatctcaatgttggcatctgttaatggttttttctcaatcaaattgagattttcctggttcttggtattaccagtgattttaattgcatctggaaatttgggatttatgttgaaagactggatcttattgaaagattctgtttagcacccctcctttgataccacactggtgggtccaggttccccattcagctgttgacaccttcagggcagagaggtgggatggggtgaagggggtacctcattattgctggcccaggttagaagttcaggcttcccagtagatctctgctgataccaccctggtgccatgtcattccttgagtccaaaagtccctcccaattctgccttcttctctctacatatcggagtctccctatgtttgacttatatataatgtccagggtttttagagttagttaacaggaggcataagaaaaagtgtgtccactccatcttgtctggaactggaagttcaagtcgaatataagagagaggagaggaaattacaagccatgagactggagagttaggcaggttctacaccagctattctcaaagccctcttacactcttaaaaatttagaacttcaaagagcttttgattttgaaagttacatctatcaattattactgtttcaaaaattaaaattgagaaaattttatttattaatttgtttaaaaataacaataattattcaattacatgataatgtaagtaatgcttttcttaatgaaaaataattatattttccaaaacaaaaacaattaggaaaaagagtgtcattgttttagactttggtaaatctctctaatatctggctgaagagaagaatgctgattctttttttttttttttttttttgagacggagtctcgctctgtcacccaggctggagtgtagtggtgtgatctcggctcactgcaagctctgcctcccgggttcacgccattctcctgcctcagcctcccaagtagctgggactacaggcacccgccaccacgcccggctaatttttttgtatttttagtagagatggggtttcaccgtgttagccaggctggtctcgatctcctgacctcatgatccacccacctcagcctcccaaagcgctgggattacaggtgtgagacaccgcgcccagcccccgaatgctgattcttttatctgcttctgtattcaatctgttgtgatatgatgggtagcctctgaaacactccactgtatacttgtgaaagaatgaatgtgaaaaaggaaaatagatttgtagtattattattcaaattgttttgacctcagagaccacttggaaatgttttagggaacccccagaggaccttggatcatgctttgagaaccgcggctctagatatgttactatttcagtagcatctaagtacatgtggctgctgagcacttgtaatgtggctagtgcaaatgagagacaggacttccagctatatgtaatttaataaactcaaatttaaaaactggaacctcataaaatgttttgttgttgttgttaaacatgaccttatagttttggtaggaa

SEQ ID NO: 115549 - DNA, 2874 bp, Homo sapiens
  Payload ID: 2553
  Gene Symbol: CD34
  Gene Name: CD34 molecule
  Uniprot ID: P28906
  ENST ID: ENST00000356522
  CDS Start-End: 323-1309
aagaagtgggatggggcctctccagaaagctgaacgaggcatctggagcccgaacaaacctccaccttttttggcctcgacggcggcaacccagcctccctcctaacgccctccgcctttgggaccaaccaggggagctcaagttagtagcagccaaggagaggcgctgccttgccaagactaaaaagggaggggagaagagaggaaaaaagcaagaatcccccacccctctcccgggcggagggggcgggaagagcgcgtcctggccaagccgagtagtgtcttccactcggtgcgtctctctaggagccgcgcgggaaggatgctggtccgcaggggcgcgcgcgcagggcccaggatgccgcggggctggaccgcgctttgcttgctgagtttgctgccttctgggttcatgagtcttgacaacaacggtactgctaccccagagttacctacccagggaacattttcaaatgtttctacaaatgtatcctaccaagaaactacaacacctagtacccttggaagtaccagcctgcaccctgtgtctcaacatggcaatgaggccacaacaaacatcacagaaacgacagtcaaattcacatctacctctgtgataacctcagtttatggaaacacaaactcttctgtccagtcacagacctctgtaatcagcacagtgttcaccaccccagccaacgtttcaactccagagacaaccttgaagcctagcctgtcacctggaaatgtttcagacctttcaaccactagcactagccttgcaacatctcccactaaaccctatacatcatcttctcctatcctaagtgacatcaaggcagaaatcaaatgttcaggcatcagagaagtgaaattgactcagggcatctgcctggagcaaaataagacctccagctgtgcggagtttaagaaggacaggggagagggcctggcccgagtgctgtgtggggaggagcaggctgatgctgatgctggggcccaggtatgctccctgctccttgcccagtctgaggtgaggcctcagtgtctactgctggtcttggccaacagaacagaaatttccagcaaactccaacttatgaaaaagcaccaatctgacctgaaaaagctggggatcctagatttcactgagcaagatgttgcaagccaccagagctattcccaaaagaccctgattgcactggtcacctcgggagccctgctggctgtcttgggcatcactggctatttcctgatgaatcgccgcagctggagccccacaggagaaaggctggagctggaaccctgaccactcttcaggaagaaaggagtctgcacatgcagctgcaccctccctccgatccttcctcccacctccccctcccccttctcccacccctgcccccacttcctgtttgggcccctctcccatccagtgtctcacagccctgcttaccagataatgctactttatttatacactgtctagggcgaagacccttattacacggaaaacggtggaggccagggctatagctcaggacctgggacctcccctgaggctcagggaaaggccagtgtgaaccgaggggctcaggaaaacgggaccggccaggccacctccagaaacggccattcagcaagacaacacgtggtggctgataccgaattgtgactcggctaggtggggcaaggctgggcagtgtccgagagagcacccctctctgcatctgaccacgtgctacccccatgctggaggtgacatctcttacgcccaacccttccccactgcacacacctcagaggctgttcttggggccctacaccttgaggaggggcaggtaaactcctgtcctttacacattcggctccctggagccagactctggtcttctttgggtaaacgtgtgacgggggaaagccaaggtctggagaagctcccaggaacaatcgatggccttgcagcactcacacaggacccccttcccctaccccctcctctctgccgcaatacaggaacccccaggggaaagatgagcttttctaggctacaattttctcccaggaagctttgatttttaccgtttcttccctgtattttctttctctactttgaggaaaccaaagtaaccttttgcacctgctctcttgtaatgatatagccagaaaaacgtgttgccttgaaccacttccctcatctctcctccaagacactgtggacttggtcaccagctcctcccttgttctctaagttccactgagctccatgtgccccctctaccatttgcagagtcctgcacagttttctggctggagcctagaacaggcctcccaagttttaggacaaacagctcagttctagtctctctggggccacacagaaactctttttgggctcctttttctccctctggatcaaagtaggcaggaccatgggaccaggtcttggagctgagcctctcacctgtactcttccgaaaaatcctcttcctctgaggctggatcctagccttatcctctgatctccatggcttcctcctccctcctgccgactcctgggttgagctgttgcctcagtcccccaacagatgcttttctgtctctgcctccctcaccctgagccccttccttgctctgcacccccatatggtcatagcccagatcagctcctaacccttatcaccagctgcctcttctgtgggtgacccaggtccttgtttgctgttgatttctttccagaggggttgagcagggatcctggtttcaatgacggttggaaatagaaatttccagagaagagagtattgggtagatattttttctgaatacaaagtgatgtgtttaaatactgcaattaaagtgatactgaaacac

SEQ ID NO: 115550 - DNA, 2538 bp, Homo sapiens
  Payload ID: 2553
  Gene Symbol: CD34
  Gene Name: CD34 molecule
  ENST ID: ENST00000367036
  CDS Start-End: 656-1339
acagagacccagttctgatgatggtcacacaccccagcagttttcccctaacaggaaagttgtcagggctgttcaggcatttccttctctgccatctgccatccggactgaagagaaagtcttagtttcaattcctttcctgttcaggggaggaggacactctgattggaggctgctggaataaattctgactcactattgaagaattatcagagtttttcttctgagtccaaattcctgggtctgatggcccagtcagcaacctgaagaaaaatctatgaacttcattaaaactgggttccatgcttttaatggaaaacagagatggaagacgagacaaaaatgccatttcagtttgagcaatgcactttttgagactcctttgggtagaaagagggaggaggccactgaggtttccactgagtgtatattatagatttgttctctcctcctcacctcccttggcttttcttccatcattggggactgctgtaatcttgaaacagaatattttctcttagttattattgcattattaatattttctgtttttggccatttcttttgagtttaatttgcatatgtgtacatgggcaatgcttcaacgagacaatttttttaagtttgttctctaacatcttagatactagaagatatggattttggtcctgggagattatttaggtttttttcttattgtgttgttgcacatatacagttagcagttttttttttttctgttggaattttagaaacaaggatccttcttgcggacggggcggagtttaagaaggacaggggagagggcctggcccgagtgctgtgtggggaggagcaggctgatgctgatgctggggcccaggtatgctccctgctccttgcccagtctgaggtgaggcctcagtgtctactgctggtcttggccaacagaacagaaatttccagcaaactccaacttatgaaaaagcaccaatctgacctgaaaaagctggggatcctagatttcactgagcaagatgttgcaagccaccagagctattcccaaaagaccctgattgcactggtcacctcgggagccctgctggctgtcttgggcatcactggctatttcctgatgaatcgccgcagctggagccccacaggagaaaggctgggcgaagacccttattacacggaaaacggtggaggccagggctatagctcaggacctgggacctcccctgaggctcagggaaaggccagtgtgaaccgaggggctcaggaaaacgggaccggccaggccacctccagaaacggccattcagcaagacaacacgtggtggctgataccgaattgtgactcggctaggtggggcaaggctgggcagtgtccgagagagcacccctctctgcatctgaccacgtgctacccccatgctggaggtgacatctcttacgcccaacccttccccactgcacacacctcagaggctgttcttggggccctacaccttgaggaggggcaggtaaactcctgtcctttacacattcggctccctggagccagactctggtcttctttgggtaaacgtgtgacgggggaaagccaaggtctggagaagctcccaggaacaatcgatggccttgcagcactcacacaggacccccttcccctaccccctcctctctgccgcaatacaggaacccccaggggaaagatgagcttttctaggctacaattttctcccaggaagctttgatttttaccgtttcttccctgtattttctttctctactttgaggaaaccaaagtaaccttttgcacctgctctcttgtaatgatatagccagaaaaacgtgttgccttgaaccacttccctcatctctcctccaagacactgtggacttggtcaccagctcctcccttgttctctaagttccactgagctccatgtgccccctctaccatttgcagagtcctgcacagttttctggctggagcctagaacaggcctcccaagttttaggacaaacagctcagttctagtctctctggggccacacagaaactctttttgggctcctttttctccctctggatcaaagtaggcaggaccatgggaccaggtcttggagctgagcctctcacctgtactcttccgaaaaatcctcttcctctgaggctggatcctagccttatcctctgatctccatggcttcctcctccctcctgccgactcctgggttgagctgttgcctcagtcccccaacagatgcttttctgtctctgcctccctcaccctgagccccttccttgctctgcacccccatatggtcatagcccagatcagctcctaacccttatcaccagctgcctcttctgtgggtgacccaggtccttgtttgctgttgatttctttccagaggggttgagcagggatcctggtttcaatgacggttggaaatagaaatttccagagaagagagtattgggtagatattttttctgaatacaaagtgatgtgtttaaatactgcaattaaagtgatactgaaacac

SEQ ID NO: 115551 - DNA, 2094 bp, Homo sapiens
  Payload ID: 2554
  Gene Symbol: CD36
  Gene Name: CD36 molecule (thrombospondin receptor)
  Uniprot ID: P16671
  ENST ID: ENST00000309881
  CDS Start-End: 414-1832
aacttgtgttaggcatgcgtccgaagagctggaaggctgaggatgtcaatggctttcagatgtcaggataaccttaaggatagatgaagggttgagagcctgtgcctcatttctgagttctcagctgctatgccgtggaaatcctgtttactttctgcatctgctcctgcaagactctggagccagtcttgaggtcctacatctccgaaagcaagctcttctagaagttgatagctttccaatgattagacgaattgattctttctgtgactcatcagttcatttcctgtaaaattcatgtcttgctgttgatttgtgaataagaaccagagcttgtagaaaccactttaatcatatccaggagtttgcaagaaacaggtgcttaacactaattcacctcctgaacaagaaaaatgggctgtgaccggaactgtgggctcatcgctggggctgtcattggtgctgtcctggctgtgtttggaggtattctaatgccagttggagacctgcttatccagaagacaattaaaaagcaagttgtcctcgaagaaggtacaattgcttttaaaaattgggttaaaacaggcacagaagtttacagacagttttggatctttgatgtgcaaaatccacaggaagtgatgatgaacagcagcaacattcaagttaagcaaagaggtccttatacgtacagagttcgttttctagccaaggaaaatgtaacccaggacgctgaggacaacacagtctctttcctgcagcccaatggtgccatcttcgaaccttcactatcagttggaacagaggctgacaacttcacagttctcaatctggctgtggcagctgcatcccatatctatcaaaatcaatttgttcaaatgatcctcaattcacttattaacaagtcaaaatcttctatgttccaagtcagaactttgagagaactgttatggggctatagggatccatttttgagtttggttccgtaccctgttactaccacagttggtctgttttatccttacaacaatactgcagatggagtttataaagttttcaatggaaaagataacataagtaaagttgccataatcgacacatataaaggtaaaaggaatctgtcctattgggaaagtcactgcgacatgattaatggtacagatgcagcctcatttccaccttttgttgagaaaagccaggtattgcagttcttttcttctgatatttgcaggtcaatctatgctgtatttgaatccgacgttaatctgaaaggaatccctgtgtatagatttgttcttccatccaaggcctttgcctctccagttgaaaacccagacaactattgtttctgcacagaaaaaattatctcaaaaaattgtacatcatatggtgtgctagacatcagcaaatgcaaagaagggagacctgtgtacatttcacttcctcattttctgtatgcaagtcctgatgtttcagaacctattgatggattaaacccaaatgaagaagaacataggacatacttggatattgaacctataactggattcactttacaatttgcaaaacggctgcaggtcaacctattggtcaagccatcagaaaaaattcaagtattaaagaatctgaagaggaactatattgtgcctattctttggcttaatgagactgggaccattggtgatgagaaggcaaacatgttcagaagtcaagtaactggaaaaataaacctccttggcctgatagaaatgatcttactcagtgttggtgtggtgatgtttgttgcttttatgatttcatattgtgcatgcagatcgaaaacaataaaataagtaagtatgtaccaaaaaatattgcttcaataatattagcttatatattacttgttttcactttatcaaagagaagttacatattaggccatatatatttctagacatgtctagccactgatcatttttaaatataggtaaataaacctataaatattatcacgcagatcactaaagtatatctttaattctgggagaaatgagataaaagatgtacttgtgaccattgtaacaatagcacaaataaagcacttgtgccaaa

SEQ ID NO: 115552 - DNA, 1942 bp, Homo sapiens
  Payload ID: 2554
  Gene Symbol: CD36
  Gene Name: CD36 molecule (thrombospondin receptor)
  Uniprot ID: P16671
  ENST ID: ENST00000394788
  CDS Start-End: 255-1673
atttgatcctattaagaattgtccaaatgttggagcatttgattgaaaaatccttcttagccattttaaagatagctttccaatgattagacgaattgattctttctgtgactcatcagttcatttcctgtaaaattcatgtcttgctgttgatttgtgaataagaaccagagcttgtagaaaccactttaatcatatccaggagtttgcaagaaacaggtgcttaacactaattcacctcctgaacaagaaaaatgggctgtgaccggaactgtgggctcatcgctggggctgtcattggtgctgtcctggctgtgtttggaggtattctaatgccagttggagacctgcttatccagaagacaattaaaaagcaagttgtcctcgaagaaggtacaattgcttttaaaaattgggttaaaacaggcacagaagtttacagacagttttggatctttgatgtgcaaaatccacaggaagtgatgatgaacagcagcaacattcaagttaagcaaagaggtccttatacgtacagagttcgttttctagccaaggaaaatgtaacccaggacgctgaggacaacacagtctctttcctgcagcccaatggtgccatcttcgaaccttcactatcagttggaacagaggctgacaacttcacagttctcaatctggctgtggcagctgcatcccatatctatcaaaatcaatttgttcaaatgatcctcaattcacttattaacaagtcaaaatcttctatgttccaagtcagaactttgagagaactgttatggggctatagggatccatttttgagtttggttccgtaccctgttactaccacagttggtctgttttatccttacaacaatactgcagatggagtttataaagttttcaatggaaaagataacataagtaaagttgccataatcgacacatataaaggtaaaaggaatctgtcctattgggaaagtcactgcgacatgattaatggtacagatgcagcctcatttccaccttttgttgagaaaagccaggtattgcagttcttttcttctgatatttgcaggtcaatctatgctgtatttgaatccgacgttaatctgaaaggaatccctgtgtatagatttgttcttccatccaaggcctttgcctctccagttgaaaacccagacaactattgtttctgcacagaaaaaattatctcaaaaaattgtacatcatatggtgtgctagacatcagcaaatgcaaagaagggagacctgtgtacatttcacttcctcattttctgtatgcaagtcctgatgtttcagaacctattgatggattaaacccaaatgaagaagaacataggacatacttggatattgaacctataactggattcactttacaatttgcaaaacggctgcaggtcaacctattggtcaagccatcagaaaaaattcaagtattaaagaatctgaagaggaactatattgtgcctattctttggcttaatgagactgggaccattggtgatgagaaggcaaacatgttcagaagtcaagtaactggaaaaataaacctccttggcctgatagaaatgatcttactcagtgttggtgtggtgatgtttgttgcttttatgatttcatattgtgcatgcagatcgaaaacaataaaataagtaagtatgtaccaaaaaatattgcttcaataatattagcttatatattacttgttttcactttatcaaagagaagttacatattaggccatatatatttctagacatgtctagccactgatcatttttaaatataggtaaataaacctataaatattatcacgcagatcactaaagtatatctttaattctgggagaaatgagataaaagatgtacttgtgaccattgtaacaatagcacaaataaagcacttgtgccaaagttgtcc

SEQ ID NO: 115553 - DNA, 1686 bp, Homo sapiens
  Payload ID: 2554
  Gene Symbol: CD36
  Gene Name: CD36 molecule (thrombospondin receptor)
  ENST ID: ENST00000419819
  CDS Start-End: 296-1686
atgacattattagttctgccactggtaggcattagaagcaagaaaagggagacggaccgaggaagccactttggtgaaacaaaaagaaaagcatttgtttatttagaacgggcaaaatgatacgtttcagtgggtgttttctttgtactttgatctttttgtactgatatttaagcttctgttttatgatctctttctaatgatagaaccagagcttgtagaaaccactttaatcatatccaggagtttgcaagaaacaggtgcttaacactaattcacctcctgaacaagaaaaatgggctgtgaccggaactgtgggctcatcgctggggctgtcattggtgctgtcctggctgtgtttggaggtattctaatgccagttggagacctgcttatccagaagacaattaaaaagcaagttgtcctcgaagaaggtacaattgcttttaaaaattgggttaaaacaggcacagaagtttacagacagttttggatctttgatgtgcaaaatccacaggaagtgatgatgaacagcagcaacattcaagttaagcaaagaggtccttatacgtacagagttcgttttctagccaaggaaaatgtaacccaggacgctgaggacaacacagtctctttcctgcagcccaatggtgccatcttcgaaccttcactatcagttggaacagaggctgacaacttcacagttctcaatctggctgtggcagctgcatcccatatctatcaaaatcaatttgttcaaatgatcctcaattcacttattaacaagtcaaaatcttctatgttccaagtcagaactttgagagaactgttatggggctatagggatccatttttgagtttggttccgtaccctgttactaccacagttggtctgttttatccttacaacaatactgcagatggagtttataaagttttcaatggaaaagataacataagtaaagttgccataatcgacacatataaaggtaaaaggaatctgtcctattgggaaagtcactgcgacatgattaatggtacagatgcagcctcatttccaccttttgttgagaaaagccaggtattgcagttcttttcttctgatatttgcaggtcaatctatgctgtatttgaatccgacgttaatctgaaaggaatccctgtgtatagatttgttcttccatccaaggcctttgcctctccagttgaaaacccagacaactattgtttctgcacagaaaaaattatctcaaaaaattgtacatcatatggtgtgctagacatcagcaaatgcaaagaagggagacctgtgtacatttcacttcctcattttctgtatgcaagtcctgatgtttcagaacctattgatggattaaacccaaatgaagaagaacataggacatacttggatattgaacctataactggattcactttacaatttgcaaaacggctgcaggtcaacctattggtcaagccatcagaaaaaattcaagtattaaagaatctgaagaggaactatattgtgcctattctttggcttaatgagactgggaccattggtgatgagaaggcaaacatgttcagaagtcaagtaactggaaaaataaacctccttggcctgatagaaatgatcttactcagtgttggtgtggtgatgtttgttgcttttatgatttcatattg

SEQ ID NO: 115554 - DNA, 545 bp, Homo sapiens
  Payload ID: 2554
  Gene Symbol: CD36
  Gene Name: CD36 molecule (thrombospondin receptor)
  ENST ID: ENST00000441034
  CDS Start-End: 33-332
cttaacactaattcacctcctgaacaagaaaaatgggctgtgaccggaactgtgggctcatcgctggggctgtcattggtgctgtcctggctgtgtttggaggtattctaatgccagttggagacctgcttatccagaagacaattaaaaagcaagttgtcctcgaagaaggtacaattgcttttaaaaattgggttaaaacaggcacagaagtttacagacagttttggatctttgatgtgcaaaatccacaggaagtgatgatgaacagcagctgcatcccatatctatcaaaatcaatttgttcaaatgatcctcaattcacttattaacaagtcaaaatcttctatgttccaagtcagaactttgagagaactgttatggggctatagggatccatttttgagtttggttccgtaccctgttactaccacagttggtctgttttatccttacaacaatactgcagatggagtttataaagttttcaatggaaaagataacataagtaaagttgccataatcgacacatataaaggtaaaag

SEQ ID NO: 115555 - DNA, 536 bp, Homo sapiens
  Payload ID: 2554
  Gene Symbol: CD36
  Gene Name: CD36 molecule (thrombospondin receptor)
  ENST ID: ENST00000436384
  CDS Start-End: 256-536
attcctggcatggtcacagtgactactgtgacttgtttgagaggtgactttgaacatttattttactttcagatagctttccaatgattagacgaattgattctttctgtgactcatcagttcatttcctgtaaaattcatgtcttgctgttgatttgtgaataagaaccagagcttgtagaaaccactttaatcatatccaggagtttgcaagaaacaggtgcttaacactaattcacctcctgaacaagaaaaatgggctgtgaccggaactgtgggctcatcgctggggctgtcattggtgctgtcctggctgtgtttggaggtattctaatgccagttggagacctgcttatccagaagacaattaaaaagcaagttgtcctcgaagaaggtacaattgcttttaaaaattgggttaaaacaggcacagaagtttacagacagttttggatctttgatgtgcaaaatccacaggaagtgatgatgaacagcagcaacattcaagttaagcaaagaggtccttatacgtacag

SEQ ID NO: 115556 - DNA, 2365 bp, Homo sapiens
  Payload ID: 2554
  Gene Symbol: CD36
  Gene Name: CD36 molecule (thrombospondin receptor)
  Uniprot ID: P16671
  ENST ID: ENST00000435819
  CDS Start-End: 685-2103
gattgcatggagacactcaggagcacaaattgcaccacggggttagtccatcacggggttagtccatccaaaagcaaggaggcagcctttggtacccctgtgccagtcaatattcattaaagggcagttttttcaaggaagtcggagctagctgctggacactaacagtcaaatctcaaaggagctgggagagaaatgcacaagcagacagggtcttgctctgttgcccaggctggagtgcagtggcgccatcacagctgctgcaacctcaacctcccaagctcaagtgaatctcccacctcagcctcccaagtagctgggactacagcaaggtttccaagaattacgttggtaggcattcaactggcatcctctggaggtaaccagatgcccagctgctcctggaggggacatatggaagtgggctcataggcggaagggacttgccttgtctcatatgaaactttggactgtggacttttgagttaacgctgaaatgagatagctttccaatgattagacgaattgattctttctgtgactcatcagttcatttcctgtaaaattcatgtcttgctgttgatttgtgaataagaaccagagcttgtagaaaccactttaatcatatccaggagtttgcaagaaacaggtgcttaacactaattcacctcctgaacaagaaaaatgggctgtgaccggaactgtgggctcatcgctggggctgtcattggtgctgtcctggctgtgtttggaggtattctaatgccagttggagacctgcttatccagaagacaattaaaaagcaagttgtcctcgaagaaggtacaattgcttttaaaaattgggttaaaacaggcacagaagtttacagacagttttggatctttgatgtgcaaaatccacaggaagtgatgatgaacagcagcaacattcaagttaagcaaagaggtccttatacgtacagagttcgttttctagccaaggaaaatgtaacccaggacgctgaggacaacacagtctctttcctgcagcccaatggtgccatcttcgaaccttcactatcagttggaacagaggctgacaacttcacagttctcaatctggctgtggcagctgcatcccatatctatcaaaatcaatttgttcaaatgatcctcaattcacttattaacaagtcaaaatcttctatgttccaagtcagaactttgagagaactgttatggggctatagggatccatttttgagtttggttccgtaccctgttactaccacagttggtctgttttatccttacaacaatactgcagatggagtttataaagttttcaatggaaaagataacataagtaaagttgccataatcgacacatataaaggtaaaaggaatctgtcctattgggaaagtcactgcgacatgattaatggtacagatgcagcctcatttccaccttttgttgagaaaagccaggtattgcagttcttttcttctgatatttgcaggtcaatctatgctgtatttgaatccgacgttaatctgaaaggaatccctgtgtatagatttgttcttccatccaaggcctttgcctctccagttgaaaacccagacaactattgtttctgcacagaaaaaattatctcaaaaaattgtacatcatatggtgtgctagacatcagcaaatgcaaagaagggagacctgtgtacatttcacttcctcattttctgtatgcaagtcctgatgtttcagaacctattgatggattaaacccaaatgaagaagaacataggacatacttggatattgaacctataactggattcactttacaatttgcaaaacggctgcaggtcaacctattggtcaagccatcagaaaaaattcaagtattaaagaatctgaagaggaactatattgtgcctattctttggcttaatgagactgggaccattggtgatgagaaggcaaacatgttcagaagtcaagtaactggaaaaataaacctccttggcctgatagaaatgatcttactcagtgttggtgtggtgatgtttgttgcttttatgatttcatattgtgcatgcagatcgaaaacaataaaataagtaagtatgtaccaaaaaatattgcttcaataatattagcttatatattacttgttttcactttatcaaagagaagttacatattaggccatatatatttctagacatgtctagccactgatcatttttaaatataggtaaataaacctataaatattatcacgcagatcactaaagtatatctttaattctgggagaaatgagataaaagatgtacttgtgaccattgtaacaatagcacaaataaagcacttgtgccaaa

SEQ ID NO: 115557 - DNA, 1985 bp, Homo sapiens
  Payload ID: 2554
  Gene Symbol: CD36
  Gene Name: CD36 molecule (thrombospondin receptor)
  Uniprot ID: P16671
  ENST ID: ENST00000433696
  CDS Start-End: 415-1716
ctttcaattcctctggcaacaaaccacacactgggatctgacactgtagagtgctttctcttctctttttttgggggggggagggggtgtggttgcatatttaaactctcacgcatttatgtactgaggactgcagtgtaggactttcctgcagaataccatttgatcctattaagaattgtccaaatgttggagcatttgattgaaaaatccttcttagccattttaaagatagctttccaatgattagacgaattgattctttctgtgactcatcagttcatttcctgtaaaattcatgtcttgctgttgatttgtgaataagaaccagagcttgtagaaaccactttaatcatatccaggagtttgcaagaaacaggtgcttaacactaattcacctcctgaacaagaaaaatgggctgtgaccggaactgtgggctcatcgctggggctgtcattggtgctgtcctggctgtgtttggaggtattctaatgccagttggagacctgcttatccagaagacaattaaaaagcaagttgtcctcgaagaaggtacaattgcttttaaaaattgggttaaaacaggcacagaagtttacagacagttttggatctttgatgtgcaaaatccacaggaagtgatgatgaacagcagcaacattcaagttaagcaaagaggtccttatacgtacagagttcgttttctagccaaggaaaatgtaacccaggacgctgaggacaacacagtctctttcctgcagcccaatggtgccatcttcgaaccttcactatcagttggaacagaggctgacaacttcacagttctcaatctggctgtggcagctgcatcccatatctatcaaaatcaatttgttcaaatgatcctcaattcacttattaacaagtcaaaatcttctatgttccaagtcagaactttgagagaactgttatggggctatagggatccatttttgagtttggttccgtaccctgttactaccacagttggtctgttttatccttacaacaatactgcagatggagtttataaagttttcaatggaaaagataacataagtaaagttgccataatcgacacatataaaggtaaaaggtcaatctatgctgtatttgaatccgacgttaatctgaaaggaatccctgtgtatagatttgttcttccatccaaggcctttgcctctccagttgaaaacccagacaactattgtttctgcacagaaaaaattatctcaaaaaattgtacatcatatggtgtgctagacatcagcaaatgcaaagaagggagacctgtgtacatttcacttcctcattttctgtatgcaagtcctgatgtttcagaacctattgatggattaaacccaaatgaagaagaacataggacatacttggatattgaacctataactggattcactttacaatttgcaaaacggctgcaggtcaacctattggtcaagccatcagaaaaaattcaagtattaaagaatctgaagaggaactatattgtgcctattctttggcttaatgagactgggaccattggtgatgagaaggcaaacatgttcagaagtcaagtaactggaaaaataaacctccttggcctgatagaaatgatcttactcagtgttggtgtggtgatgtttgttgcttttatgatttcatattgtgcatgcagatcgaaaacaataaaataagtaagtatgtaccaaaaaatattgcttcaataatattagcttatatattacttgttttcactttatcaaagagaagttacatattaggccatatatatttctagacatgtctagccactgatcatttttaaatataggtaaataaacctataaatattatcacgcagatcactaaagtatatctttaattctgggagaaatgagataaaagatgtacttgtgaccattgtaacaatagcacaaataaagcacttgtgccaaagttgtcc

SEQ ID NO: 115558 - DNA, 855 bp, Homo sapiens
  Payload ID: 2554
  Gene Symbol: CD36
  Gene Name: CD36 molecule (thrombospondin receptor)
  ENST ID: ENST00000413265
  CDS Start-End: 247-855
gagagttctccttagataagatttcaatatgttaatcatgtgtagaaagaaaattaaaaaggaggaatatgaagaaattcagatatgacattattagttctgccactggtaggcattagaagcaagaaaagggagacggaccgaggaagccactttgaaccagagcttgtagaaaccactttaatcatatccaggagtttgcaagaaacaggtgcttaacactaattcacctcctgaacaagaaaaatgggctgtgaccggaactgtgggctcatcgctggggctgtcattggtgctgtcctggctgtgtttggaggtattctaatgccagttggagacctgcttatccagaagacaattaaaaagcaagttgtcctcgaagaaggtacaattgcttttaaaaattgggttaaaacaggcacagaagtttacagacagttttggatctttgatgtgcaaaatccacaggaagtgatgatgaacagcagcaacattcaagttaagcaaagaggtccttatacgtacagagttcgttttctagccaaggaaaatgtaacccaggacgctgaggacaacacagtctctttcctgcagcccaatggtgccatcttcgaaccttcactatcagttggaacagaggctgacaacttcacagttctcaatctggctgtggcagctgcatcccatatctatcaaaatcaatttgttcaaatgatcctcaattcacttattaacaagtcaaaatcttctatgttccaagtcagaactttgagagaactgttatggggctatagggatccatttttgagtttggttccgtaccctgttactaccacagttggtctgttttatcct

SEQ ID NO: 115559 - DNA, 541 bp, Homo sapiens
  Payload ID: 2554
  Gene Symbol: CD36
  Gene Name: CD36 molecule (thrombospondin receptor)
  ENST ID: ENST00000428497
  CDS Start-End: 261-541
ttgctatggcaacccaatttattagtgactgcaaaactaacttagctggcattgtggcaaatctccatattttgctgatagctttccaatgattagacgaattgattctttctgtgactcatcagttcatttcctgtaaaattcatgtcttgctgttgatttgtgaataagaaccagagcttgtagaaaccactttaatcatatccaggagtttgcaagaaacaggtgcttaacactaattcacctcctgaacaagaaaaatgggctgtgaccggaactgtgggctcatcgctggggctgtcattggtgctgtcctggctgtgtttggaggtattctaatgccagttggagacctgcttatccagaagacaattaaaaagcaagttgtcctcgaagaaggtacaattgcttttaaaaattgggttaaaacaggcacagaagtttacagacagttttggatctttgatgtgcaaaatccacaggaagtgatgatgaacagcagcaacattcaagttaagcaaagaggtccttatacgtacag

SEQ ID NO: 115560 - DNA, 720 bp, Homo sapiens
  Payload ID: 2554
  Gene Symbol: CD36
  Gene Name: CD36 molecule (thrombospondin receptor)
  ENST ID: ENST00000438020
  CDS Start-End: 292-720
ggcaaacacaaccagagtcttcggtgttaattccctggtcttcccaactagcattctgaaagtgcattaacatttgtggccttgtgctctttcatcggacttctaatgatagctttccaatgattagacgaattgattctttctgtgactcatcagttcatttcctgtaaaattcatgtcttgctgttgatttgtgaataagaaccagagcttgtagaaaccactttaatcatatccaggagtttgcaagaaacaggtgcttaacactaattcacctcctgaacaagaaaaatgggctgtgaccggaactgtgggctcatcgctggggctgtcattggtgctgtcctggctgtgtttggaggtattctaatgccagttggagacctgcttatccagaagacaattaaaaagcaagttgtcctcgaagaaggtacaattgcttttaaaaattgggttaaaacaggcacagaagtttacagacagttttggatctttgatgtgcaaaatccacaggaagtgatgatgaacagcagcaacattcaagttaagcaaagaggtccttatacgtacagagttcgttttctagccaaggaaaatgtaacccaggacgctgaggacaacacagtctctttcctgcagcccaatggtgccatcttcgaaccttcactatcagttggaacagaggctgacaacttcacagttctcaatctggctgtggca

SEQ ID NO: 115561 - DNA, 1808 bp, Homo sapiens
  Payload ID: 2554
  Gene Symbol: CD36
  Gene Name: CD36 molecule (thrombospondin receptor)
  Uniprot ID: P16671
  ENST ID: ENST00000432207
  CDS Start-End: 121-1539
aagttgctgagacaagggaagagagatgaggaaccagagcttgtagaaaccactttaatcatatccaggagtttgcaagaaacaggtgcttaacactaattcacctcctgaacaagaaaaatgggctgtgaccggaactgtgggctcatcgctggggctgtcattggtgctgtcctggctgtgtttggaggtattctaatgccagttggagacctgcttatccagaagacaattaaaaagcaagttgtcctcgaagaaggtacaattgcttttaaaaattgggttaaaacaggcacagaagtttacagacagttttggatctttgatgtgcaaaatccacaggaagtgatgatgaacagcagcaacattcaagttaagcaaagaggtccttatacgtacagagttcgttttctagccaaggaaaatgtaacccaggacgctgaggacaacacagtctctttcctgcagcccaatggtgccatcttcgaaccttcactatcagttggaacagaggctgacaacttcacagttctcaatctggctgtggcagctgcatcccatatctatcaaaatcaatttgttcaaatgatcctcaattcacttattaacaagtcaaaatcttctatgttccaagtcagaactttgagagaactgttatggggctatagggatccatttttgagtttggttccgtaccctgttactaccacagttggtctgttttatccttacaacaatactgcagatggagtttataaagttttcaatggaaaagataacataagtaaagttgccataatcgacacatataaaggtaaaaggaatctgtcctattgggaaagtcactgcgacatgattaatggtacagatgcagcctcatttccaccttttgttgagaaaagccaggtattgcagttcttttcttctgatatttgcaggtcaatctatgctgtatttgaatccgacgttaatctgaaaggaatccctgtgtatagatttgttcttccatccaaggcctttgcctctccagttgaaaacccagacaactattgtttctgcacagaaaaaattatctcaaaaaattgtacatcatatggtgtgctagacatcagcaaatgcaaagaagggagacctgtgtacatttcacttcctcattttctgtatgcaagtcctgatgtttcagaacctattgatggattaaacccaaatgaagaagaacataggacatacttggatattgaacctataactggattcactttacaatttgcaaaacggctgcaggtcaacctattggtcaagccatcagaaaaaattcaagtattaaagaatctgaagaggaactatattgtgcctattctttggcttaatgagactgggaccattggtgatgagaaggcaaacatgttcagaagtcaagtaactggaaaaataaacctccttggcctgatagaaatgatcttactcagtgttggtgtggtgatgtttgttgcttttatgatttcatattgtgcatgcagatcgaaaacaataaaataagtaagtatgtaccaaaaaatattgcttcaataatattagcttatatattacttgttttcactttatcaaagagaagttacatattaggccatatatatttctagacatgtctagccactgatcatttttaaatataggtaaataaacctataaatattatcacgcagatcactaaagtatatctttaattctgggagaaatgagataaaagatgtacttgtgaccattgtaacaatagcacaaataaagcacttgtgccaaagttgtcc

SEQ ID NO: 115562 - DNA, 2298 bp, Homo sapiens
  Payload ID: 2554
  Gene Symbol: CD36
  Gene Name: CD36 molecule (thrombospondin receptor)
  Uniprot ID: P16671
  ENST ID: ENST00000447544
  CDS Start-End: 255-1673
atttgatcctattaagaattgtccaaatgttggagcatttgattgaaaaatccttcttagccattttaaagatagctttccaatgattagacgaattgattctttctgtgactcatcagttcatttcctgtaaaattcatgtcttgctgttgatttgtgaataagaaccagagcttgtagaaaccactttaatcatatccaggagtttgcaagaaacaggtgcttaacactaattcacctcctgaacaagaaaaatgggctgtgaccggaactgtgggctcatcgctggggctgtcattggtgctgtcctggctgtgtttggaggtattctaatgccagttggagacctgcttatccagaagacaattaaaaagcaagttgtcctcgaagaaggtacaattgcttttaaaaattgggttaaaacaggcacagaagtttacagacagttttggatctttgatgtgcaaaatccacaggaagtgatgatgaacagcagcaacattcaagttaagcaaagaggtccttatacgtacagagttcgttttctagccaaggaaaatgtaacccaggacgctgaggacaacacagtctctttcctgcagcccaatggtgccatcttcgaaccttcactatcagttggaacagaggctgacaacttcacagttctcaatctggctgtggcagctgcatcccatatctatcaaaatcaatttgttcaaatgatcctcaattcacttattaacaagtcaaaatcttctatgttccaagtcagaactttgagagaactgttatggggctatagggatccatttttgagtttggttccgtaccctgttactaccacagttggtctgttttatccttacaacaatactgcagatggagtttataaagttttcaatggaaaagataacataagtaaagttgccataatcgacacatataaaggtaaaaggaatctgtcctattgggaaagtcactgcgacatgattaatggtacagatgcagcctcatttccaccttttgttgagaaaagccaggtattgcagttcttttcttctgatatttgcaggtcaatctatgctgtatttgaatccgacgttaatctgaaaggaatccctgtgtatagatttgttcttccatccaaggcctttgcctctccagttgaaaacccagacaactattgtttctgcacagaaaaaattatctcaaaaaattgtacatcatatggtgtgctagacatcagcaaatgcaaagaagggagacctgtgtacatttcacttcctcattttctgtatgcaagtcctgatgtttcagaacctattgatggattaaacccaaatgaagaagaacataggacatacttggatattgaacctataactggattcactttacaatttgcaaaacggctgcaggtcaacctattggtcaagccatcagaaaaaattcaagtattaaagaatctgaagaggaactatattgtgcctattctttggcttaatgagactgggaccattggtgatgagaaggcaaacatgttcagaagtcaagtaactggaaaaataaacctccttggcctgatagaaatgatcttactcagtgttggtgtggtgatgtttgttgcttttatgatttcatattgtgcatgcagatcgaaaacaataaaataaacctggctcaagcacaaaccaatttgtgttgttctgattcaataattggtttctgggtggccaattcagaagaagagtgtacatgctcaacaaatcctaggccctgcattcctgtcatcctcatccgggggaaacaccatcatcccagtagctgccctattcaactgcaacagtctccaggaccatcagtatactgcatttcatgtgcaccaaatattttgaaagacatttataaataattggcttatgactcatatttctctatgaataccttcatacagcaggtataactcttttctttatgggcttaaatattttgtcactgatcctgcaaatggacatcattttagcacactagcggtttatattttaaggaccttcattctctgttctgcacctcttctggaaattgagtaaattttgcttttttttttttactcagttgcaacttacgcttggcatcttcagaatgcttttctagcattaagagatgtaaatgataaaggaattattgtatgaaatattacaaagcgtagactatgcattgttattcattataatattttttgctgtcataatcgcctcataaagacaggtttcaaccattaaaatatgttcttcctta

SEQ ID NO: 115563 - DNA, 565 bp, Homo sapiens
  Payload ID: 2554
  Gene Symbol: CD36
  Gene Name: CD36 molecule (thrombospondin receptor)
  ENST ID: ENST00000426978
  CDS Start-End: 121-565
aagttgctgagacaagggaagagagatgaggaaccagagcttgtagaaaccactttaatcatatccaggagtttgcaagaaacaggtgcttaacactaattcacctcctgaacaagaaaaatgggctgtgaccggaactgtgggctcatcgctggggctgtcattggtgctgtcctggctgtgtttggaggtattctaatgccagttggagacctgcttatccagaagacaattaaaaagcaagttgtcctcgaagaaggtacaattgcttttaaaaattgggttaaaacaggcacagaagtttacagacagttttggatctttgatgtgcaaaatccacaggaagtgatgatgaacagcagcaacattcaagttaagcaaagaggtccttatacgtacagagttcgttttctagccaaggaaaatgtaacccaggacgctgaggacaacacagtctctttcctgcagcccaatggtgccatcttcgaaccttcactatcagttggaacagaggctgacaacttcacagttctcaatctggctgtggcagctgcatcccatatct

SEQ ID NO: 115564 - DNA, 1741 bp, Homo sapiens
  Payload ID: 2554
  Gene Symbol: CD36
  Gene Name: CD36 molecule (thrombospondin receptor)
  ENST ID: ENST00000534394
  CDS Start-End: 282-1472
agatgtcaggataaccttaaggatagatgaagggttgagagcctgtgcctcatttctgagttctcagctgctatgccgtggaaatcctgtttactttctgcatctgctcctgcaagactctggagccagtcttgaggtcctacatctccgaaagcaagctcttctagaagttgcaagttgtcctcgaagaaggtacaattgcttttaaaaattgggttaaaacaggcacagaagtttacagacagttttggatctttgatgtgcaaaatccacaggaagtgatgatgaacagcagcaacattcaagttaagcaaagaggtccttatacgtacagagttcgttttctagccaaggaaaatgtaacccaggacgctgaggacaacacagtctctttcctgcagcccaatggtgccatcttcgaaccttcactatcagttggaacagaggctgacaacttcacagttctcaatctggctgtggcagctgcatcccatatctatcaaaatcaatttgttcaaatgatcctcaattcacttattaacaagtcaaaatcttctatgttccaagtcagaactttgagagaactgttatggggctatagggatccatttttgagtttggttccgtaccctgttactaccacagttggtctgttttatccttacaacaatactgcagatggagtttataaagttttcaatggaaaagataacataagtaaagttgccataatcgacacatataaaggtaaaaggaatctgtcctattgggaaagtcactgcgacatgattaatggtacagatgcagcctcatttccaccttttgttgagaaaagccaggtattgcagttcttttcttctgatatttgcaggtcaatctatgctgtatttgaatccgacgttaatctgaaaggaatccctgtgtatagatttgttcttccatccaaggcctttgcctctccagttgaaaacccagacaactattgtttctgcacagaaaaaattatctcaaaaaattgtacatcatatggtgtgctagacatcagcaaatgcaaagaagggagacctgtgtacatttcacttcctcattttctgtatgcaagtcctgatgtttcagaacctattgatggattaaacccaaatgaagaagaacataggacatacttggatattgaacctataactggattcactttacaatttgcaaaacggctgcaggtcaacctattggtcaagccatcagaaaaaattcaagtattaaagaatctgaagaggaactatattgtgcctattctttggcttaatgagactgggaccattggtgatgagaaggcaaacatgttcagaagtcaagtaactggaaaaataaacctccttggcctgatagaaatgatcttactcagtgttggtgtggtgatgtttgttgcttttatgatttcatattgtgcatgcagatcgaaaacaataaaataagtaagtatgtaccaaaaaatattgcttcaataatattagcttatatattacttgttttcactttatcaaagagaagttacatattaggccatatatatttctagacatgtctagccactgatcatttttaaatataggtaaataaacctataaatattatcacgcagatcactaaagtatatctttaattctgggagaaatgagataaaagatgtacttgtgaccattgtaacaatagcacaaataaagcacttgtgccaaagttgtcc

SEQ ID NO: 115565 - DNA, 569 bp, Homo sapiens
  Payload ID: 2554
  Gene Symbol: CD36
  Gene Name: CD36 molecule (thrombospondin receptor)
  ENST ID: ENST00000482059
  CDS Start-End: 373-569
gactgcagtgtaggactttcctgcagaataccatttgatcctattaagaattgtccaaatgttggagcatttgattgaaaaatccttcttagccattttaaagactcattagtgaaccagaacaataaaccaaacagagaaccatcagataatgggttagcctgggaagaatattaattacaactggagatagctttccaatgattagacgaattgattctttctgtgactcatcagttcatttcctgtaaaattcatgtcttgctgttgatttgtgaataagaaccagagcttgtagaaaccactttaatcatatccaggagtttgcaagaaacaggtgcttaacactaattcacctcctgaacaagaaaaatgggctgtgaccggaactgtgggctcatcgctggggctgtcattggtgctgtcctggctgtgtttggaggtattctaatgccagttggagacctgcttatccagaagacaattaaaaagcaagttgtcctcgaagaaggtacaattgcttttaaaaattgggttaaaacaggcacagaagtttacagacagttttg

SEQ ID NO: 115566 - DNA, 496 bp, Homo sapiens
  Payload ID: 2554
  Gene Symbol: CD36
  Gene Name: CD36 molecule (thrombospondin receptor)
  ENST ID: ENST00000488048
  CDS Start-End: 1-199
gaactatattgtgcctattctttggcttaatgagactgggaccattggtgatgagaaggcaaacatgttcagaagtcaagtaactggaaaaataaacctccttggcctgatagaaatgatcttactcagtgttggtgtggtgatgtttgttgcttttatgatttcatattgtgcatgcagatcgaaaacaataaaataagtagtaaatgattcttcacatttgtgcgccagctacatcatgacccttggtaataccgaccaacaggatgaaaattggatatgctttacttttacaaagcacaccttatcttttagttgaagaaatggtggcactatttctttttttgcactaagcaactgcacatttcaaaaggattattgagatgttatgaaaatctctaccttgcacaaaaaaaaacccagcagcttttaaaattcatcatttccacaactgaattgatttccgtttctacagacctggctcaagcacaaacca

SEQ ID NO: 115567 - DNA, 1922 bp, Homo sapiens
  Payload ID: 2554
  Gene Symbol: CD36
  Gene Name: CD36 molecule (thrombospondin receptor)
  Uniprot ID: P16671
  ENST ID: ENST00000538969
  CDS Start-End: 415-1653
ctttcaattcctctggcaacaaaccacacactgggatctgacactgtagagtgctttctcttctctttttttgggggggggagggggtgtggttgcatatttaaactctcacgcatttatgtactgaggactgcagtgtaggactttcctgcagaataccatttgatcctattaagaattgtccaaatgttggagcatttgattgaaaaatccttcttagccattttaaagatagctttccaatgattagacgaattgattctttctgtgactcatcagttcatttcctgtaaaattcatgtcttgctgttgatttgtgaataagaaccagagcttgtagaaaccactttaatcatatccaggagtttgcaagaaacaggtgcttaacactaattcacctcctgaacaagaaaaatgggctgtgaccggaactgtgggctcatcgctggggctgtcattggtgctgtcctggctgtgtttggaggtattctaatgccagttggagacctgcttatccagaagacaattaaaaagcaagttgtcctcgaagaaggtacaattgcttttaaaaattgggttaaaacaggcacagaagtttacagacagttttggatctttgatgtgcaaaatccacaggaagtgatgatgaacagcagcaacattcaagttaagcaaagaggtccttatacgtacagagttcgttttctagccaaggaaaatgtaacccaggacgctgaggacaacacagtctctttcctgcagcccaatggtgccatcttcgaaccttcactatcagttggaacagaggctgacaacttcacagttctcaatctggctgtggcatacaacaatactgcagatggagtttataaagttttcaatggaaaagataacataagtaaagttgccataatcgacacatataaaggtaaaaggaatctgtcctattgggaaagtcactgcgacatgattaatggtacagatgcagcctcatttccaccttttgttgagaaaagccaggtattgcagttcttttcttctgatatttgcaggtcaatctatgctgtatttgaatccgacgttaatctgaaaggaatccctgtgtatagatttgttcttccatccaaggcctttgcctctccagttgaaaacccagacaactattgtttctgcacagaaaaaattatctcaaaaaattgtacatcatatggtgtgctagacatcagcaaatgcaaagaagggagacctgtgtacatttcacttcctcattttctgtatgcaagtcctgatgtttcagaacctattgatggattaaacccaaatgaagaagaacataggacatacttggatattgaacctataactggattcactttacaatttgcaaaacggctgcaggtcaacctattggtcaagccatcagaaaaaattcaagtattaaagaatctgaagaggaactatattgtgcctattctttggcttaatgagactgggaccattggtgatgagaaggcaaacatgttcagaagtcaagtaactggaaaaataaacctccttggcctgatagaaatgatcttactcagtgttggtgtggtgatgtttgttgcttttatgatttcatattgtgcatgcagatcgaaaacaataaaataagtaagtatgtaccaaaaaatattgcttcaataatattagcttatatattacttgttttcactttatcaaagagaagttacatattaggccatatatatttctagacatgtctagccactgatcatttttaaatataggtaaataaacctataaatattatcacgcagatcactaaagtatatctttaattctgggagaaatgagataaaagatgtacttgtgaccattgtaacaatagcacaaataaagcacttgtgccaaagttgtcc

SEQ ID NO: 115568 - DNA, 1914 bp, Homo sapiens
  Payload ID: 2554
  Gene Symbol: CD36
  Gene Name: CD36 molecule (thrombospondin receptor)
  Uniprot ID: P16671
  ENST ID: ENST00000544133
  CDS Start-End: 415-1281
ctttcaattcctctggcaacaaaccacacactgggatctgacactgtagagtgctttctcttctctttttttgggggggggagggggtgtggttgcatatttaaactctcacgcatttatgtactgaggactgcagtgtaggactttcctgcagaataccatttgatcctattaagaattgtccaaatgttggagcatttgattgaaaaatccttcttagccattttaaagatagctttccaatgattagacgaattgattctttctgtgactcatcagttcatttcctgtaaaattcatgtcttgctgttgatttgtgaataagaaccagagcttgtagaaaccactttaatcatatccaggagtttgcaagaaacaggtgcttaacactaattcacctcctgaacaagaaaaatgggctgtgaccggaactgtgggctcatcgctggggctgtcattggtgctgtcctggctgtgtttggaggtattctaatgccagttggagacctgcttatccagaagacaattaaaaagcaagttgtcctcgaagaaggtacaattgcttttaaaaattgggttaaaacaggcacagaagtttacagacagttttggatctttgatgtgcaaaatccacaggaagtgatgatgaacagcagcaacattcaagttaagcaaagaggtccttatacgtacagagttcgttttctagccaaggaaaatgtaacccaggacgctgaggacaacacagtctctttcctgcagcccaatggtgccatcttcgaaccttcactatcagttggaacagaggctgacaacttcacagttctcaatctggctgtggcagctgcatcccatatctatcaaaatcaatttgttcaaatgatcctcaattcacttattaacaagtcaaaatcttctatgttccaagtcagaactttgagagaactgttatggggctatagggatccatttttgagtttggttccgtaccctgttactaccacagttggtctgttttatccttacaacaatactgcagatggagtttataaagttttcaatggaaaagataacataagtaaagttgccataatcgacacatataaaggtaaaaggaatctgtcctattgggaaagtcactgcgacatgattaatggtacagatgcagcctcatttccaccttttgttgagaaaagccaggtattgcagttcttttcttctgatatttgcagggagacctgtgtacatttcacttcctcattttctgtatgcaagtcctgatgtttcagaacctattgatggattaaacccaaatgaagaagaacataggacatacttggatattgaacctataactggattcactttacaatttgcaaaacggctgcaggtcaacctattggtcaagccatcagaaaaaattcaagtattaaagaatctgaagaggaactatattgtgcctattctttggcttaatgagactgggaccattggtgatgagaaggcaaacatgttcagaagtcaagtaactggaaaaataaacctccttggcctgatagaaatgatcttactcagtgttggtgtggtgatgtttgttgcttttatgatttcatattgtgcatgcagatcgaaaacaataaaataagtaagtatgtaccaaaaaatattgcttcaataatattagcttatatattacttgttttcactttatcaaagagaagttacatattaggccatatatatttctagacatgtctagccactgatcatttttaaatataggtaaataaacctataaatattatcacgcagatcactaaagtatatctttaattctgggagaaatgagataaaagatgtacttgtgaccattgtaacaatagcacaaataaagcacttgtgccaaagttgtcc

SEQ ID NO: 115569 - DNA, 1265 bp, Homo sapiens
  Payload ID: 2555
  Gene Symbol: CD37
  Gene Name: CD37 molecule
  Uniprot ID: P11049
  ENST ID: ENST00000323906
  CDS Start-End: 142-987
aacttcctcttttggggttcttcctttctctctcagctctccgtctctctttctctctcagcctctttctttctccctgtctcccccactgtcagcacctcttctgtgtggtgagtggaccgcttaccccactaggtgaagatgtcagcccaggagagctgcctcagcctcatcaagtacttcctcttcgttttcaacctcttcttcttcgtcctcggcagcctgatcttctgcttcggcatctggatcctcattgacaagaccagcttcgtgtcctttgtgggcttggccttcgtgcctctgcagatctggtccaaagtcctggccatctcaggaatcttcaccatgggcatcgccctcctgggttgtgtgggggccctcaaggagctccgctgcctcctgggcctgtattttgggatgctgctgctcctgtttgccacacagatcaccctgggaatcctcatctccactcagcgggcccagctggagcgaagcttgcgggacgtcgtagagaaaaccatccaaaagtacggcaccaaccccgaggagaccgcggccgaggagagctgggactatgtgcagttccagctgcgctgctgcggctggcactacccgcaggactggttccaagtcctcatcctgagaggtaacgggtcggaggcgcaccgcgtgccctgctcctgctacaacttgtcggcgaccaacgactccacaatcctagataaggtgatcttgccccagctcagcaggcttggacacctggcgcggtccagacacagtgcagacatctgcgctgtccctgcagagagccacatctaccgcgagggctgcgcgcagggcctccagaagtggctgcacaacaaccttatttccatagtgggcatttgcctgggcgtcggcctactcgagctcgggttcatgacgctctcgatattcctgtgcagaaacctggaccacgtctacaaccggctcgctcgataccgttaggccccgccctccccaaagtcccgccccgcccccgtcacgtgcgctgggcacttccctgctgcctgtaaatatttgtttaatccccagttcgcctggagccctccgccttcacattcccctggggacccacgtggctgcgtgcccctgctgctgtcacctctcccacgggacctggggctttcgtccacagcttcctgtccccatctgtcggcctaccaccacccacaagattatttttcacccaaacctcaaataaatcccctgcgtttttggtaaaa

SEQ ID NO: 115570 - DNA, 1588 bp, Homo sapiens
  Payload ID: 2555
  Gene Symbol: CD37
  Gene Name: CD37 molecule
  ENST ID: ENST00000391859
  CDS Start-End: 170-640
atgcccagaggtgggttccagtagatcaggggtccctttagatcccccagcgcctgagacatggagacctgggagggactgccccatgagtccttggtgcccacaaattccaaggcccctcagcacctcttctgtgtggtgagtggaccgcttaccccactaggtgaagatgtcagcccaggagagctgcctcagcctcatcaagtacttcctcttcgttttcaacctcttcttcttcgtcctcggcagcctgatcttctgcttcggcatctggatcctcattgacaagaccagcttcgtgtcctttgtgggcttggccttcgtgcctctgcagatctggtccaaagtcctggccatctcaggaatcttcaccatgggcatcgccctcctgggttgtgtgggggccctcaaggagctccgctgcctcctgggcctgtattttgggatgctgctgctcctgtttgccacacagatcaccctgggaatcctcatctccactcagcgggcccagaaagacacaccgacctggaccaagggagacaggcataaacagctccaaagggaaacacacgggaaaaagagagaacaagagaaagaaatagacgccctgaaagaagagacagagacttatgagccgtagaaatagtggaagaaacagaaagacagacctgaagtacacagagctagccattcagtaaggatttgagactggcccagagatgcacagggcccgcctgaggctggcacagcctgagagggggaggggtggggcggggaagataaggcccagcctcactggtggcctctcagctggagcgaagcttgcgggacgtcgtagagaaaaccatccaaaagtacggcaccaaccccgaggagaccgcggccgaggagagctgggactatgtgcagttccagctgcgctgctgcggctggcactacccgcaggactggttccaagtcctcatcctgagaggtaacgggtcggaggcgcaccgcgtgccctgctcctgctacaacttgtcggcgaccaacgactccacaatcctagataaggtgatcttgccccagctcagcaggcttggacacctggcgcggtccagacacagtgcagacatctgcgctgtccctgcagagagccacatctaccgcgagggctgcgcgcagggcctccagaagtggctgcacaacaaccttatttccatagtgggcatttgcctgggcgtcggcctactcgagctcgggttcatgacgctctcgatattcctgtgcagaaacctggaccacgtctacaaccggctcgctcgataccgttaggccccgccctccccaaagtcccgccccgcccccgtcacgtgcgctgggcacttccctgctgcctgtaaatatttgtttaatccccagttcgcctggagccctccgccttcacattcccctggggacccacgtggctgcgtgcccctgctgctgtcacctctcccacgggacctggggctttcgtccacagcttcctgtccccatctgtcggcctaccaccacccacaagattatttttcacccaaacctcaaataaatcccctgcgtttttggt

SEQ ID NO: 115571 - DNA, 1204 bp, Homo sapiens
  Payload ID: 2555
  Gene Symbol: CD37
  Gene Name: CD37 molecule
  Uniprot ID: P11049
  ENST ID: ENST00000426897
  CDS Start-End: 316-957
ctggaacttcctcttttggggttcttcctttctctctcagctctccgtctctctttctctctcagcctctttctttctccctgtctcccccactgtcagcacctcttctgtgtggtgagtggaccgcttaccccactaggtgaagatgtcagcccaggagagctgcctcagcctcatcaagtcctcggcagcctgatcttctgcttcggcatctggatcctcattgacaagaccagcttcgtgtcctttgtgggcttggccttcgtgcctctgcagatctggtccaaagtcctggccatctcaggaatcttcaccatgggcatcgccctcctgggttgtgtgggggccctcaaggagctccgctgcctcctgggcctgtattttgggatgctgctgctcctgtttgccacacagatcaccctgggaatcctcatctccactcagcgggcccagctggagcgaagcttgcgggacgtcgtagagaaaaccatccaaaagtacggcaccaaccccgaggagaccgcggccgaggagagctgggactatgtgcagttccagctgcgctgctgcggctggcactacccgcaggactggttccaagtcctcatcctgagaggtaacgggtcggaggcgcaccgcgtgccctgctcctgctacaacttgtcggcgaccaacgactccacaatcctagataaggtgatcttgccccagctcagcaggcttggacacctggcgcggtccagacacagtgcagacatctgcgctgtccctgcagagagccacatctaccgcgagggctgcgcgcagggcctccagaagtggctgcacaacaaccttatttccatagtgggcatttgcctgggcgtcggcctactcgagctcgggttcatgacgctctcgatattcctgtgcagaaacctggaccacgtctacaaccggctcgctcgataccgttaggccccgccctccccaaagtcccgccccgcccccgtcacgtgcgctgggcacttccctgctgcctgtaaatatttgtttaatccccagttcgcctggagccctccgccttcacattcccctggggacccacgtggctgcgtgcccctgctgctgtcacctctcccacgggacctggggctttcgtccacagcttcctgtccccatctgtcggcctaccaccacccacaagattatttttcacccaaac

SEQ ID NO: 115572 - DNA, 1674 bp, Homo sapiens
  Payload ID: 2555
  Gene Symbol: CD37
  Gene Name: CD37 molecule
  ENST ID: ENST00000535669
  CDS Start-End: 115-927
ctctctcagctctccgtctctctttctctctcagcctctttctttctccctgtctcccccactgtcagcacctcttctgtgtggtgagtggaccgcttaccccactaggtgaagatgtcagcccaggagagctgcctcagcctcatcaagtacttcctcttcgttttcaacctcttcttcttcgtcctcggcagcctgatcttctgcttcggcatctggatcctcattgacaagaccagcttcgtgtcctttgtgggcttggccttcgtgcctctgcagatctggtccaaagtcctggccatctcaggaatcttcaccatgggcatcgccctcctgggttgtgtgggggccctcaaggagctccgctgcctcctgggcctgtattttgggatgctgctgctcctgtttgccacacagatcaccctgggaatcctcatctccactcagcgggcccagctggagcgaagcttgcgggacgtcgtagagaaaaccatccaaaagtacggcaccaaccccgaggagaccgcggccgaggagagctgggactatgtgcagttccagctgcgctgctgcggctggcactacccgcaggactggttccaagtcctcatcctgagaggtaacgggtcggaggcgcaccgcgtgccctgctcctgctacaacttgtcggcgaccaacgactccacaatcctagataaggtgatcttgccccagctcagcaggcttggacacctggcgcggtccagacacagtgcagacatctgcgctgtccctgcagagagccacatctaccgcgagggctgcgcgcagggcctccagaagtggctgcacaacaaccttatttccatagtgggcatttgcctgggcgtcggcctactcgaggtgatctggccccgcccccacccgcgatcggccctaaatccctagatggccctgcccttcatttcgcgtccttcggttgcctgggaaggacgagctcagggcggagcgcagcccaccccggccctcccgccgctccacccagcaccggagggtgggggcggcccagcttcagggagccctgattgggtgtacgcagggaaagcctcctgctattggctgcgatctccctcccctttctccgcagatgactgtcatggtgctgagcgtacagctacagcgcagggcactccgccggaaatgcgagccgcacgtgccgggcgctggggattcgagccccgggcccagcctgatcgctgacggcggcggcgggcacagcggcagtctgtggggtggctggggcatggcgggtgcctgccccaactggggagacaaggcaccgcagggcaagctgcccatggccctggggctctggccgctgtgggttcaagacgaggaccagcctgacactggaagtgcgggcgcagaattagaggaggcacaattagaggctgaggcagagggggaagacagatgagcctccaaaataaaggaccctgggcttgcttccgaccttactccttctcagcctctacccccacttgtagcagctattcccgcctcatcagccagccctgcggcagttcccgtcgagccccgcccttttctacctatccccttctccagccccttcccgcccaattcacggccccacccctgacctttctcgcccgggtgggcatcacccccgtctcg

SEQ ID NO: 115573 - DNA, 559 bp, Homo sapiens
  Payload ID: 2555
  Gene Symbol: CD37
  Gene Name: CD37 molecule
  ENST ID: ENST00000595660
  CDS Start-End: 78-559
ctttctttctccctgtctcccccactgtcagcacctcttctgtgtggtgagtggaccgcttaccccactaggtgaagatgtcagcccaggagagctgcctcagcctcatcaagtacttcctcttcgttttcaacctcttcttcttcgtcctcggcagcctgatcttctgcttcggcatctggatcctcattgacaagaccagcttcgtgtcctttgtgggcaggctacaggctcccatccactgctcaccggaggcttcttggagcctgagtcttcttccggcaaatggggttgtgcatacaaacaacaatgatcatgagagccatttctcaagcacttcctatctgtcgggacttgtggctggcttggccttcgtgcctctgcagatctggtccaaagtcctggccatctcaggaatcttcaccatgggcatcgccctcctgggttgtgtgggggccctcaaggagctccgctgcctcctgggcctgtattttgggatgctgctgctcctgtttgccacacagatcaccctgggaatcctcatctccactcagcgggc

SEQ ID NO: 115574 - DNA, 1598 bp, Homo sapiens
  Payload ID: 2555
  Gene Symbol: CD37
  Gene Name: CD37 molecule
  Uniprot ID: P11049
  ENST ID: ENST00000598095
  CDS Start-End: 316-924
ctggaacttcctcttttggggttcttcctttctctctcagctctccgtctctctttctctctcagcctctttctttctccctgtctcccccactgtcagcacctcttctgtgtggtgagtggaccgcttaccccactaggtgaagatgtcagcccaggagagctgcctcagcctcatcaagtcctcggcagcctgatcttctgcttcggcatctggatcctcattgacaagaccagcttcgtgtcctttgtgggcttggccttcgtgcctctgcagatctggtccaaagtcctggccatctcaggaatcttcaccatgggcatcgccctcctgggttgtgtgggggccctcaaggagctccgctgcctcctgggcctgtattttgggatgctgctgctcctgtttgccacacagatcaccctgggaatcctcatctccactcagcgggcccagctggagcgaagcttgcgggacgtcgtagagaaaaccatccaaaagtacggcaccaaccccgaggagaccgcggccgaggagagctgggactatgtgcagttccagctgcgctgctgcggctggcactacccgcaggactggttccaagtcctcatcctgagaggtaacgggtcggaggcgcaccgcgtgccctgctcctgctacaacttgtcggcgaccaacgactccacaatcctagataaggtgatcttgccccagctcagcaggcttggacacctggcgcggtccagacacagtgcagacatctgcgctgtccctgcagagagccacatctaccgcgagggctgcgcgcagggcctccagaagtggctgcacaacaaccttatttccatagtgggcatttgcctgggcgtcggcctactcgaggtgatctggccccgcccccacccgcgatcggccctaaatccctagatggccctgcccttcatttcgcgtccttcggttgcctgggaaggacgagctcagggcggagcgcagcccaccccggccctcccgccgctccacccagcaccggagggtgggggcggcccagcttcagggagccctgattgggtgtacgcagggaaagcctcctgctattggctgcgatctccctcccctttctccgcagatgactgtcatggtgctgagcgtacagctacagcgcagggcactccgccggaaatgcgagccgcacgtgccgggcgctggggattcgagccccgggcccagcctgatcgctgacggcggcggcgggcacagcggcagtctgtggggtggctggggcatggcgggtgcctgccccaactggggagacaaggcaccgcagggcaagctgcccatggccctggggctctggccgctgtgggttcaagacgaggaccagcctgacactggaagtgcgggcgcagaattagaggaggcacaattagaggctgaggcagagggggaagacagatgagcctccaaaataaaggaccctgggcttgcttccgaccttactccttctcagcctctacccccacttgtagcagctattcccgcctcatcagccagccctgcggcagttcccgtcgagccccgcccttttctacctatccccttct

SEQ ID NO: 115575 - DNA, 803 bp, Homo sapiens
  Payload ID: 2555
  Gene Symbol: CD37
  Gene Name: CD37 molecule
  ENST ID: ENST00000594743
  CDS Start-End: 1-763
ggcccagctggagcgaagcttgcgggacgtcgtagagaaaaccatccaaaagtacggcaccaaccccgaggagaccgcggccgaggagagctgggactatgtgcagttccagctgcgctgctgcggctggcactacccgcaggactggttccaagtcctcatcctgagaggtaacgggtcggaggcgcaccgcgtgccctgctcctgctacaacttgtcggcgaccaacgactccacaatcctagataaggtgatcttgccccagctcagcaggcttggacacctggcgcggtccagacacagtgcagacatctgcgctgtccctgcagagagccacatctaccgcgagggctgcgcgcagggcctccagaagtggctgcacaacaaccttatttccatagtgggcatttgcctgggcgtcggcctactcgagatgactgtcatggtgctgagcgtacagctacagcgcagggcactccgccggaaatgcgagccgcacgtgccgggcgctggggattcgagccccgggcccagcctgatcgctgacggcggcggcgggcacagcggcagtctgtggggtggctggggcatggcgggtgcctgccccaactggggagacaaggcaccgcagggcaagctgcccatggccctggggctctggccgctgtgggttcaagacgaggaccagcctgacactggaagtgcgggcgcagaattagaggaggcacaattagaggctgaggcagagggggaagacagatgagcctccaaaataaaggaccctgggcttgcttccgacctta

SEQ ID NO: 115576 - DNA, 330 bp, Homo sapiens
  Payload ID: 2555
  Gene Symbol: CD37
  Gene Name: CD37 molecule
  ENST ID: ENST00000597602
  CDS Start-End: 251-330
tcagcctctttctttctccctgtctcccccactgtcagcacctcttctgtgtggtgagtggaccgcttaccccactaggtgaagatgtcagcccaggagagctgcctcagcctcatcaagtcctcggcagcctgatcttctgcttcggcatctggatcctcattgacaagaccagcttcgtgtcctttgcttggccttcgtgcctctgcagatctggtccaaagtcctggccatctcaggaatcttcaccatgggcatcgccctcctgggttgtgtgggggccctcaaggagctccgctgcctcctgggcctgtattttgggatgctgct

SEQ ID NO: 115577 - DNA, 1121 bp, Homo sapiens
  Payload ID: 2555
  Gene Symbol: CD37
  Gene Name: CD37 molecule
  ENST ID: ENST00000595725
  CDS Start-End: 142-507
aacttcctcttttggggttcttcctttctctctcagctctccgtctctctttctctctcagcctctttctttctccctgtctcccccactgtcagcacctcttctgtgtggtgagtggaccgcttaccccactaggtgaagatgtcagcccaggagagctgcctcagcctcatcaagtacttcctcttcgttttcaacctcttcttcttcgtcctcggcagcctgatcttctgcttcggcatctggatcctcattgacaagaccagcttcgtgtcctttgcttggccttcgtgcctctgcagatctggtccaaagtcctggccatctcaggaatcttcaccatgggcatcgccctcctgggttgtgtgggggccctcaaggagctccgctgcctcctgggcctgtattttgggatgctgctgctcctgtttgccacacagatcaccctgggaatcctcatctccactcagcgggcccagctggagcgaagcttgcgggacgtcgtagagaaaaccatccaaaagtacggcaccaaccccgaggagaccgcggccgaggagagctgggactatgtgcagttccagctgcgctgctgcggctggcactacccgcaggactggttccaagtcctcatcctgagaggtaacgggtcggaggcgcaccgcgtgccctgctcctgctacaacttgtcggcgaccaacgactccacaatcctagataaggtgatcttgccccagctcagcaggcttggacacctggcgcggtccagacacagtgcagacatctgcgctgtccctgcagagagccacatctaccgcgagggctgcgcgcagggcctccagaagtggctgcacaacaaccttatttccatagtgggcatttgcctgggcgtcggcctactcgagctcgggttcatgacgctctcgatattcctgtgcagaaacctggaccacgtctacaaccggctcgctcgataccgttaggccccgccctccccaaagtcccgccccgcccccgtcacgtgcgctgggcacttccctgctgcctgtaaatatttgtttaatccccagttcgcctggagccctccgccttcacattcccctggggacccacgtggctgc

SEQ ID NO: 115578 - DNA, 5668 bp, Homo sapiens
  Payload ID: 2556
  Gene Symbol: CD38
  Gene Name: CD38 molecule
  Uniprot ID: P28907
  ENST ID: ENST00000226279
  CDS Start-End: 138-1040
gggggtgggaagggaaacagagaaaaggcaagtgaaacagaaggggaggtgcagtttcagaacccagccagcctctctcttgctgcctagcctcctgccggcctcatcttcgcccagccaaccccgcctggagccctatggccaactgcgagttcagcccggtgtccggggacaaaccctgctgccggctctctaggagagcccaactctgtcttggcgtcagtatcctggtcctgatcctcgtcgtggtgctcgcggtggtcgtcccgaggtggcgccagcagtggagcggtccgggcaccaccaagcgctttcccgagaccgtcctggcgcgatgcgtcaagtacactgaaattcatcctgagatgagacatgtagactgccaaagtgtatgggatgctttcaagggtgcatttatttcaaaacatccttgcaacattactgaagaagactatcagccactaatgaagttgggaactcagaccgtaccttgcaacaagattcttctttggagcagaataaaagatctggcccatcagttcacacaggtccagcgggacatgttcaccctggaggacacgctgctaggctaccttgctgatgacctcacatggtgtggtgaattcaacacttccaaaataaactatcaatcttgcccagactggagaaaggactgcagcaacaaccctgtttcagtattctggaaaacggtttcccgcaggtttgcagaagctgcctgtgatgtggtccatgtgatgctcaatggatcccgcagtaaaatctttgacaaaaacagcacttttgggagtgtggaagtccataatttgcaaccagagaaggttcagacactagaggcctgggtgatacatggtggaagagaagattccagagacttatgccaggatcccaccataaaagagctggaatcgattataagcaaaaggaatattcaattttcctgcaagaatatctacagacctgacaagtttcttcagtgtgtgaaaaatcctgaggattcatcttgcacatctgagatctgagccagtcgctgtggttgttttagctccttgactccttgtggtttatgtcatcatacatgactcagcatacctgctggtgcagagctgaagattttggagggtcctccacaataaggtcaatgccagagacggaagcctttttccccaaagtcttaaaataacttatatcatcagcatacctttattgtgatctatcaatagtcaagaaaaattattgtataagattagaatgaaaattgtatgttaagttacttcactttaattctcatgtgatccttttatgttatttatatattggtaacatcctttctattgaaaaatcaccacaccaaacctctcttattagaacaggcaagtgaagaaaagtgaatgctcaagtttttcagaaagcattacatttccaaatgaatgaccttgttgcatgatgtatttttgtacccttcctacagatagtcaaaccataaacttcatggtcatgggtcatgttggtgaaaattattctgtaggatataagctacccacgtacttggtgctttaccccaacccttccaacagtgctgtgaggttggtattatttcattttttagatgagaaaatgggagctcagagaggttatatatttaagttggtgcaaaagtaattgcaagttttgccaccgaaaggaatggcaaaaccacaattatttttgaaccaacctaataatttaccgtaagtcctacatttagtatcaagctagagactgaatttgaactcaactctgtccaactccaaaattcatgtgctttttccttctaggcctttcataccaaactaatagtagtttatattctcttccaacaaatgcatattggattaaattgactagaatggaatctggaatatagttcttctggatggctccaaaacacatgtttttcttcccccgtcttcctcctcctcttcatgctcagtgttttatatatgtagtatacagttaaaatatacttgttgctggtactggcagcttatattttctctcttttttcatggattaaccttgcttgagggctttaacaattgtattactttttcaaagaactaagctttagcttcattgatttttttctatttaattgggttttgctcttctctttagcattggaaacatagaaatgctttctgatttctttgggtagatttacgtattcagcttcttgagatggaagtttagatcactgatccttcagcttgttttcttttttgtatacatagattttaggacgatatattttcccttgagttctgctttagctgcagctcttatgttttgatatgcctctctttattatccttcagttaaaaatatctttcaattcattgttatataaaaatatgtgcctagtttttaacatctggagattttctagttttgaaaaaaacataagccaggcatggtggctcacacctgtatccccagcactttgggaggccgagacgggaggatcgcctgagctcaggagtttttacaccagcctgggaataacagtgagacattatctccaaaaaaattacctgggtatggtgttgtgcacctgtagtcccagctactctggagactgaggtgggaggattgtttgagcttgggaggttgaggctgcagggagctgtgatcacaccactgcactctggcctgagtgacagattgagaccctgtctcaataaaagcaaaaataaagaaaataaaccatatgtgttgaacaaaggattaataaattaatttgagactccttcagggaatgaccacaatttattgaaaatagcctaaatgttggagtcaggcatttctggattcatattttgacatcatgctgtcatcttgaacaaaatgcctaacctttctgaacttcaacttccttgccactcaaataaggattacaaaacttaaaatgtggtaagtactaaagacgacagcaaaaattgagtccagcacagagcttcctaaataagcaagcactcaacagagttggttcctttcttcctcccctgcttgacaatccagtttcccacaggagcctttgtagctgtagccaccatggtcagtccagggattcttcactagccccttctcccctggcagacatccttgtgggagtttagtcttggctcgacatgaggatgggggtttgggaccagttctgagtgagaatcagacttgccccaagttgccattagctccccctgcagaatgtcttcagaatcggggcccggtcagtctcctgggtgacctgctgttttcctcttaagatcctttccactttggttgctgctttcgggactcatcgagtccttgctcaacaggataccccttgaagtggctgcctgggccacatccccttccaaacaagaaatcaaaatattagaaatcaatttttgaaatttcccctaggaagactcatttgagtgttcaagttcagagccagtggagaccttaggggagggtggtcacaaggattttgcacagtgctttagagggtcccagggagccacagaggtggtgaggggctgggtgctcttttctccgtgcatgaccttgtgtgtctatcttcattaccacaatgcctcatctctacctcctttccccctgtagttccaacgtgggtatctttgccatctctggcccgaaggactttctgacctacatgtataaataccccctcacaatatatattacttttcctataagtgacttctctactggattactggttgctcatacacctcatattttactcgtaaatctactactccctgtctgcctactccattctcatttgctgtagaaaattctcttaccatcccaactttcacccaccatcatgcttacccaaaggctgtgggaatgacctgggccctaatgccccttttctaaattcctaaggctcaccattttcctattgtaatggttcttgaccttataatgtttgaggcaccttttcaaatatagtcctttgatttcagactgaatacttgaaaggacacacacacacatacgtaagtgcatatgactgcatacacccacacacacacacgtgcctgtatacagtcatatgatacatacacaaacacacgcacacaagcctgcatacatcatatgccaacagtggggatatgttctgagaaatgcatcattagatgattttgtcattgtgtgaacatcatagagtgtacttacactaacctagatggtctaacctactacacacccaggctacatggtatcacctattcctcctaggctacaagcctgtacagcgtgtgtctgtactaaatgctgtgggcaattttaacctgatggtaaatgtttgtgtatctaaacatatctaaacatagaaaaggtacagtaaacatgcagtattataatcttatgagaccgtcatcatatatgtggtccactgtttgggccatcattggctgaaaagtggttatgcgacacatgactgtatatatactttcctgttacaacaacagtgtctctcaatccacagtaattgcagcatccagtaggtcttactttagccctgagtcaccatttgtgtcaacgtgtttagtgccatgtccacgtctctcatgtaactggcagagctatcaaatattttggcaaaacacattgtttctttggctttgccttggtaactttctgtgccttttgtagctcttgtttggaagaagctcaacccatgtctgcacactgtgatacaagggggacagcatcgacatcgacttacttcttggtgccttattcctccttagaacaattcctaaatctgtaacttaagtttctcaggaagattccatactgcacagaaaactgcttttgtgggtttttaaaaggcaagttgttatatgtgctggatagtttttaagtatgacataaaaattgtataaagtaaaatattaaaatacacctagaatactgtataactttaagtcattttatcaacacattgctaatccagatattttcccgcagtttttctttgaataacagagcaattaatttacttttactatgaagagtcatcattttagtatgtattttaagcaatccaccaagaactcagtaggcagctgagaggtgctgcccagagaagtggtgattagcttggccttagctcacccacacaaagcacaacaggctttgaactattccctaacggggcatttattcttttttttttttttttttgggagacggagtctcgctgtcgcccaggctagagtgcagtggcgcgatctcggctcactgcaggctccaccccctggggttcacgccattctcctgcctcagcctcccaagtagctgggactgcaggcgcccgccatctcgcccggctaattttttgtatttttagtagagacggggtttcaccgtgttagccaggatagggcatttattcttgaacttgattcagagaggcacacattaccattctctaatcagaatgcaagtagcgcaaggcggtggaaactatggaattcggaggcaggtgatgcattgggcgagtttattaacatctgtgactctctagtttgaaatttatttgtaacagacaaaaatgaattaaacaaacaataaaagtataataaag

SEQ ID NO: 115579 - DNA, 455 bp, Homo sapiens
  Payload ID: 2556
  Gene Symbol: CD38
  Gene Name: CD38 molecule
  ENST ID: ENST00000510674
  CDS Start-End: 1-455
cagccactaatgaagttgggaactcagaccgtaccttgcaacaagattcttctttggagcagaataaaagatctggcccatcagttcacacaggtccagcgggacatgttcaccctggaggacacgctgctaggctaccttgctgatgacctcacatggtgtgaaataaactatcaatcttgcccagactggagaaaggactgcagcaacaaccctgtttcagtattctggaaaacggtttcccgcaggtttgcagaagctgcctgtgatgtggtccatgtgatgctcaatggatcccgcagtaaaatctttgacaaaaacagcacttttgggagtgtggaagtccataatttgcaaccagagaaggttcagacactagaggcctgggtgatacatggtggaagagaagattccagagacttatgccaggatcccaccataaaagagctggaatc

SEQ ID NO: 115580 - DNA, 1560 bp, Homo sapiens
  Payload ID: 2556
  Gene Symbol: CD38
  Gene Name: CD38 molecule
  Uniprot ID: P28907
  ENST ID: ENST00000502843
  CDS Start-End: 141-509
gttgggggtgggaagggaaacagagaaaaggcaagtgaaacagaaggggaggtgcagtttcagaacccagccagcctctctcttgctgcctagcctcctgccggcctcatcttcgcccagccaaccccgcctggagccctatggccaactgcgagttcagcccggtgtccggggacaaaccctgctgccggctctctaggagagcccaactctgtcttggcgtcagtatcctggtcctgatcctcgtcgtggtgctcgcggtggtcgtcccgaggtggcgccagcagtggagcggtccgggcaccaccaagcgctttcccgagaccgtcctggcgcgatgcgtcaagtacactgaaattcatcctgagatgagacatgtagactgccaaagtgtatgggatgctttcaagggtgcatttatttcaaaacatccttgcaacattactgaagaagactatcagccactaatgaagttgggaactcagaccgtaccttgcaacaagaaataaactatcaatcttgcccagactggagaaaggactgcagcaacaaccctgtttcagtattctggaaaacggtttcccgcaggtttgcagaagctgcctgtgatgtggtccatgtgatgctcaatggatcccgcagtaaaatctttgacaaaaacagcacttttgggagtgtggaagtccataatttgcaaccagagaaggttcagacactagaggcctgggtgatacatggtggaagagaagattccagagacttatgccaggatcccaccataaaagagctggaatcgattataagcaaaaggaatattcaattttcctgcaagaatatctacagacctgacaagtttcttcagtgtgtgaaaaatcctgaggattcatcttgcacatctgagatctgagccagtcgctgtggttgttttagctccttgactccttgtggtttatgtcatcatacatgactcagcatacctgctggtgcagagctgaagattttggagggtcctccacaataaggtcaatgccagagacggaagcctttttccccaaagtcttaaaataacttatatcatcagcatacctttattgtgatctatcaatagtcaagaaaaattattgtataagattagaatgaaaattgtatgttaagttacttcactttaattctcatgtgatccttttatgttatttatatattggtaacatcctttctattgaaaaatcaccacaccaaacctctcttattagaacaggcaagtgaagaaaagtgaatgctcaagtttttcagaaagcattacatttccaaatgaatgaccttgttgcatgatgtatttttgtacccttcctacagatagtcaaaccataaacttcatggtcatgggtcatgttggtgaaaattattctgtaggatataagctacccacgtacttggtgctttaccccaacccttccaacagtgctgtgaggttggtattatttcattttttagatgagaaaatgggagctcagagaggttatatatttaagttggtgcaaaagtaattgcaagttttgc

SEQ ID NO: 115581 - DNA, 861 bp, Homo sapiens
  Payload ID: 2557
  Gene Symbol: CD3D
  Gene Name: CD3d molecule, delta (CD3-TCR complex)
  Uniprot ID: P04234
  ENST ID: ENST00000300692
  CDS Start-End: 138-653
agagaagcagacatcttctagttcctcccccactctcctctttccggtacctgtgagtcagctaggggagggcagctctcacccaggctgatagttcggtgacctggctttatctactggatgagttccgctgggagatggaacatagcacgtttctctctggcctggtactggctacccttctctcgcaagtgagccccttcaagatacctatagaggaacttgaggacagagtgtttgtgaattgcaataccagcatcacatgggtagagggaacggtgggaacactgctctcagacattacaagactggacctgggaaaacgcatcctggacccacgaggaatatataggtgtaatgggacagatatatacaaggacaaagaatctaccgtgcaagttcattatcgaatgtgccagagctgtgtggagctggatccagccaccgtggctggcatcattgtcactgatgtcattgccactctgctccttgctttgggagtcttctgctttgctggacatgagactggaaggctgtctggggctgccgacacacaagctctgttgaggaatgaccaggtctatcagcccctccgagatcgagatgatgctcagtacagccaccttggaggaaactgggctcggaacaagtgaacctgagactggtggcttctagaagcagccattaccaactgtaccttcccttcttgctcagccaataaatatatcctctttcactcagcaggtgcctgggcttcttaaggctcctgggcaaggcgtgggagttgtcctgacttgcttgggatctcgccctcctacctacctgtttcttccttcatctccttccttcctctgcctcaca

SEQ ID NO: 115582 - DNA, 476 bp, Homo sapiens
  Payload ID: 2557
  Gene Symbol: CD3D
  Gene Name: CD3d molecule, delta (CD3-TCR complex)
  Uniprot ID: P04234
  ENST ID: ENST00000392884
  CDS Start-End: 25-408
ctactggatgagttccgctgggagatggaacatagcacgtttctctctggcctggtactggctacccttctctcgcaagtgagccccttcaagatacctatagaggaacttgaggacagagtgtttgtgaattgcaataccagcatcacatgggtagagggaacggtgggaacactgctctcagacattacaagactggacctgggaaaacgcatcctggacccacgaggaatatataggtgtaatgggacagatatatacaaggacaaagaatctaccgtgcaagttcattatcgaactgccgacacacaagctctgttgaggaatgaccaggtctatcagcccctccgagatcgagatgatgctcagtacagccaccttggaggaaactgggctcggaacaagtgaacctgagactggtggcttctagaagcagccattaccaactgtaccttcccttcttgctcagccaataa

SEQ ID NO: 115583 - DNA, 483 bp, Homo sapiens
  Payload ID: 2557
  Gene Symbol: CD3D
  Gene Name: CD3d molecule, delta (CD3-TCR complex)
  ENST ID: ENST00000534687
  CDS Start-End: 1-397
ttccaggtgcttcagtggtccgtgctccccctactcctcatcagtggtctggattcatttccaggaagtgagccccttcaagatacctatagaggaacttgaggacagagtgtttgtgaattgcaataccagcatcacatgggtagagggaacggtgggaacactgctctcagacattacaagactggacctgggaaaacgcatcctggacccacgaggaatatataggtgtaatgggacagatatatacaaggacaaagaatctaccgtgcaagttcattatcgaactgccgacacacaagctctgttgaggaatgaccaggtctatcagcccctccgagatcgagatgatgctcagtacagccaccttggaggaaactgggctcggaacaagtgaacctgagactggtggcttctagaagcagccattaccaactgtaccttcccttcttgctcagccaataaatatatcctctttcactc

SEQ ID NO: 115584 - DNA, 422 bp, Homo sapiens
  Payload ID: 2557
  Gene Symbol: CD3D
  Gene Name: CD3d molecule, delta (CD3-TCR complex)
  ENST ID: ENST00000529594
  CDS Start-End: 41-337
ggtgacctggctttatctactggatgagttccgctgggagatggaacatagcacgtttctctctggcctggtactggctacccttctctcgcaagtgtgccagagctgtgtggagctggatccagccaccgtggctggcatcattgtcactgatgtcattgccactctgctccttgctttgggagtcttctgctttgctggacatgagactggaaggctgtctggggctgccgacacacaagctctgttgaggaatgaccaggtctatcagcccctccgagatcgagatgatgctcagtacagccaccttggaggaaactgggctcggaacaagtgaacctgagactggtggcttctagaagcagccattaccaactgtaccttcccttcttgctcagccaataaatatatcctctttcact

SEQ ID NO: 115585 - DNA, 1548 bp, Homo sapiens
  Payload ID: 2558
  Gene Symbol: CD3E
  Gene Name: CD3e molecule, epsilon (CD3-TCR complex)
  Uniprot ID: P07766
  ENST ID: ENST00000361763
  CDS Start-End: 292-915
gctaaatgtcatgtatttttcatggcccctccaggtattgtcagagtcctcttgtttggccttctaggaaggctgtgggacccagctttcttcaaccagtccaggtggaggcctctgccttgaacgtttccaagtgaggtaaaacccgcaggcccagaggcctctctacttcctgtgtggggttcagaaaccctcctcccctcccagcctcaggtgcctgcttcagaaaatgaagtagtaagtctgctggcctccgccatcttagtaaagtaacagtcccatgaaacaaagatgcagtcgggcactcactggagagttctgggcctctgcctcttatcagttggcgtttgggggcaagatggtaatgaagaaatgggtggtattacacagacaccatataaagtctccatctctggaaccacagtaatattgacatgccctcagtatcctggatctgaaatactatggcaacacaatgataaaaacataggcggtgatgaggatgataaaaacataggcagtgatgaggatcacctgtcactgaaggaattttcagaattggagcaaagtggttattatgtctgctaccccagaggaagcaaaccagaagatgcgaacttttatctctacctgagggcaagagtgtgtgagaactgcatggagatggatgtgatgtcggtggccacaattgtcatagtggacatctgcatcactgggggcttgctgctgctggtttactactggagcaagaatagaaaggccaaggccaagcctgtgacacgaggagcgggtgctggcggcaggcaaaggggacaaaacaaggagaggccaccacctgttcccaacccagactatgagcccatccggaaaggccagcgggacctgtattctggcctgaatcagagacgcatctgaccctctggagaacactgcctcccgctggcccaggtctcctctccagtccccctgcgactccctgtttcctgggctagtcttggaccccacgagagagaatcgttcctcagcctcatggtgaactcgcgccctccagcctgatcccccgctccctcctccctgccttctctgctggtacccagtcctaaaatattgctgcttcctcttcctttgaagcatcatcagtagtcacaccctcacagctggcctgccctcttgccaggatatttatttgtgctattcactcccttccctttggatgtaacttctccgttcagttccctccttttcttgcatgtaagttgtcccccatcccaaagtattccatctacttttctatcgccgtccccttttgcagccctctctggggatggactgggtaaatgttgacagaggccctgccccgttcacagatcctggccctgagccagccctgtgctcctccctcccccaacactccctaccaaccccctaatcccctactccctccaccccccctccactgtaggccactggatggtcatttgcatctccgtaaatgtgctctgctcctcagctgagagagaaaaaaataaactgtatttggctgcaaga

SEQ ID NO: 115586 - DNA, 1289 bp, Homo sapiens
  Payload ID: 2558
  Gene Symbol: CD3E
  Gene Name: CD3e molecule, epsilon (CD3-TCR complex)
  ENST ID: ENST00000528600
  CDS Start-End: 55-660
gtaagtctgctggcctccgccatcttagtaaagtaacagtcccatgaaacaaagatgcagtcgggcactcactggagagttctgggcctctgcctcttatcagttggcgtttgggggcaagatggtaatgaagaaatggcatataaagtctccatctctggaaccacagtaatattgacatgccctcagtatcctggatctgaaatactatggcaacacaatgataaaaacataggcggtgatgaggatgataaaaacataggcagtgatgaggatcacctgtcactgaaggaattttcagaattggagcaaagtggttattatgtctgctaccccagaggaagcaaaccagaagatgcgaacttttatctctacctgagggcaagagtgtgtgagaactgcatggagatggatgtgatgtcggtggccacaattgtcatagtggacatctgcatcactgggggcttgctgctgctggtttactactggagcaagaatagaaaggccaaggccaagcctgtgacacgaggagcgggtgctggcggcaggcaaaggggacaaaacaaggagaggccaccacctgttcccaacccagactatgagcccatccggaaaggccagcgggacctgtattctggcctgaatcagagacgcatctgaccctctggagaacactgcctcccgctggcccaggtctcctctccagtccccctgcgactccctgtttcctgggctagtcttggaccccacgagagagaatcgttcctcagcctcatggtgaactcgcgccctccagcctgatcccccgctccctcctccctgccttctctgctggtacccagtcctaaaatattgctgcttcctcttcctttgaagcatcatcagtagtcacaccctcacagctggcctgccctcttgccaggatatttatttgtgctattcactcccttccctttggatgtaacttctccgttcagttccctccttttcttgcatgtaagttgtcccccatcccaaagtattccatctacttttctatcgccgtccccttttgcagccctctctggggatggactgggtaaatgttgacagaggccctgccccgttcacagatcctggccctgagccagccctgtgctcctccctcccccaacactccctaccaaccccctaatcccctactccctccaccccccctccactgtaggccactggatggtcatttgcatctccgtaaatgtgctctgctcctcagctgagagagaaaaaaataaactgtatttggctgc

SEQ ID NO: 115587 - DNA, 3286 bp, Homo sapiens
  Payload ID: 2559
  Gene Symbol: CD3EAP
  Gene Name: CD3e molecule, epsilon associated protein
  Uniprot ID: O15446
  ENST ID: ENST00000309424
  CDS Start-End: 489-2021
aagttctgaacttgtgaggcatctgggcctccccagaagacatttaacacagaaagcacagccctactaactagtattcttacctgtctcttcaagaatttcagaccaatcgaccgtcctgtctctttaaggcttaggaagagcagtgtggctgcccctttaaggaggcgttgcaacaaaccatattggacagacgatgggggcgacccatcgggacccgacgggcctctgactccagcaatacagcgaatcagcggctttcgggaatacatttttcggaaaaagacttcttcctcggttttctgctctgcacacgttgaaattttccccagtttttcctgcagatcgggagtcgagcaatgcctacccccgcgctcccgcaccagttgggcgctcccggatgatgccctacccctttggatccacgtggtctgcaacctggtgcgagcagcccgggctacagggttgcctgaggtgtgggtcccaggatggaggagccccaggccggcgatgctgctcggttctcttgtccccccaactttaccgcgaagcccccagcctcagagtcccctcgtttctccttggaggcgctgacgggtccagatacggagctgtggcttattcaggcccctgcagactttgccccagaatgcttcaatgggcggcatgtgcctctctctggctcccagatcgtcaagggcaaattggcaggcaagcggcaccgctatcgagtcctcagcagctgtccccaagctggagaagcgaccctgctggccccctcaacggaggcaggaggtggactcacctgtgcctcagccccccagggcaccctaaggatccttgagggtccccagcaatccctgtcagggagccctctgcagcccatcccagcaagtcccccaccacagatccctcctggcctgaggcctcggttctgtgcctttgggggcaacccaccagtcacagggcctaggtcagccttggcccccaacctgctcacctcagggaagaagaaaaaggagatgcaggtgacagaggccccagtcactcaggaggcagtgaatgggcacggggccctggaggtggacatggctttggggtcgccagaaatggatgtgcggaagaagaagaagaaaaaaaatcagcagctgaaagaaccagaggcagcagggcctgtggggacagagcccacagtggagacactggagcctctgggagtgctgttcccgtccaccaccaagaagaggaagaagcccaaagggaaagaaaccttcgagccagaagacaagacagtgaagcaggaacagattaacactgagcctctagaagacacagtcctgtccccgaccaaaaagagaaagaggcaaaaggggacggaagggatggagccagaggagggggtgacagttgagtctcagccacaggtgaaggtggagccactggaggaagccatccctctgccccctacgaagaagaggaaaaaagaaaagggacagatggcaatgatggagccagggacggaggcgatggagccagtggagccggagatgaagcctctggagtccccaggggggaccatggcgcctcaacagccagaaggagcgaagcctcaggcccaggcagctctggcagctcccaaaaagaagacgaagaaagaaaaacagcaagatgccacagtggagccagagacagaggtggtggggcctgagctgccggatgaccttgagcctcaggcagctcccacatccaccaagaagaagaagaagaagaaagagagaggtcacacagtgactgagccaattcagccactagagcctgaactgccaggggagggacagcctgaagccagggcaactccgggatccaccaagaagaggaagaagcagagtcaggaaagccggatgccagagacagtgccccaagaggagatgccagggccgccactgaattcagagtctggggaggaggctcccacaggccgggacaagaagcggaagcagcagcagcagcagcctgtgtagtctgcccccgggaaactgaggaactaaagaaagctgaaggtgcccacctgggccaccagaaggtgacacccccagaatccctccccagagactgcaccagcgcagccagcaggagcctggcctgggaggacgatttattattacactgggggtttccttggcagctggggtcatcagggtactttcaagaagggctcgtgcaggacatcaaacagcctccgggcctggatgggagggagaaaaaaatgaggaaccagtcattaaaggagctgtttcctgggtaaatctagagtggggttttggttctttattttcccctataccctcaagcatttatccattgagttacaaacaatccagttacaatctttttaagttattattattattattattttttttttttttgagatggagtctcgctctgtcgcccaggttggagtgcagtggcgcaatctcggctcactgcaagctccgcctcccgggttcacgccattctcctgcctcagcctcctgagtagctgggactacaggcccctgcccagctaattttttgtatttttttttagtagagatggggtttcaccacgttagccaggatggtctcgatctcctgacctcctgatgcgcctgcctcagcctcccagtgctgggattataggtgtgagccactgcgcctggctaagttattattatttttttgagacagtctcctggtgtcacccaggctggagtgcagtggtgtgatcttggctcactgcaacctccgcctcctgggttccaacgattctcctgcctcagcctcccgagtagctgggcctaaaggtgcccaccactatacccggctaatttttgtatttttagtagagacaggggtttcaccatattggccaggctggtctcgaactcctgacctcgtgatccacctgccttgacctcccaaagtgctaggataacaggtgtgagccaccgcaccctgccaagttattttaaaatgtaccattattattgactatagtcacctggttgtgttatcaaatagtatgtcttattcattctttctttgtgtgtgtgtgtgtgtgtgtgtgtgtgtgtggtacccattaaccttccccatctccctgccagcccctaactaccctccccagcctccaggaactatccatccactcttatctccatgagttcaattgttttgatttttagatacacaaataaataagaacatgcaatgtttgtctttctgtgcctggcttatttcactt

SEQ ID NO: 115588 - DNA, 1830 bp, Homo sapiens
  Payload ID: 2559
  Gene Symbol: CD3EAP
  Gene Name: CD3e molecule, epsilon associated protein
  Uniprot ID: O15446
  ENST ID: ENST00000589804
  CDS Start-End: 7-1545
cccaggatggaggagccccaggccggcggtgaggatgctgctcggttctcttgtccccccaactttaccgcgaagcccccagcctcagagtcccctcgtttctccttggaggcgctgacgggtccagatacggagctgtggcttattcaggcccctgcagactttgccccagaatgcttcaatgggcggcatgtgcctctctctggctcccagatcgtcaagggcaaattggcaggcaagcggcaccgctatcgagtcctcagcagctgtccccaagctggagaagcgaccctgctggccccctcaacggaggcaggaggtggactcacctgtgcctcagccccccagggcaccctaaggatccttgagggtccccagcaatccctgtcagggagccctctgcagcccatcccagcaagtcccccaccacagatccctcctggcctgaggcctcggttctgtgcctttgggggcaacccaccagtcacagggcctaggtcagccttggcccccaacctgctcacctcagggaagaagaaaaaggagatgcaggtgacagaggccccagtcactcaggaggcagtgaatgggcacggggccctggaggtggacatggctttggggtcgccagaaatggatgtgcggaagaagaagaagaaaaaaaatcagcagctgaaagaaccagaggcagcagggcctgtggggacagagcccacagtggagacactggagcctctgggagtgctgttcccgtccaccaccaagaagaggaagaagcccaaagggaaagaaaccttcgagccagaagacaagacagtgaagcaggaacagattaacactgagcctctagaagacacagtcctgtccccgaccaaaaagagaaagaggcaaaaggggacggaagggatggagccagaggagggggtgacagttgagtctcagccacaggtgaaggtggagccactggaggaagccatccctctgccccctacgaagaagaggaaaaaagaaaagggacagatggcaatgatggagccagggacggaggcgatggagccagtggagccggagatgaagcctctggagtccccaggggggaccatggcgcctcaacagccagaaggagcgaagcctcaggcccaggcagctctggcagctcccaaaaagaagacgaagaaagaaaaacagcaagatgccacagtggagccagagacagaggtggtggggcctgagctgccggatgaccttgagcctcaggcagctcccacatccaccaagaagaagaagaagaagaaagagagaggtcacacagtgactgagccaattcagccactagagcctgaactgccaggggagggacagcctgaagccagggcaactccgggatccaccaagaagaggaagaagcagagtcaggaaagccggatgccagagacagtgccccaagaggagatgccagggccgccactgaattcagagtctggggaggaggctcccacaggccgggacaagaagcggaagcagcagcagcagcagcctgtgtagtctgcccccgggaaactgaggaactaaagaaagctgaaggtgcccacctgggccaccagaaggtgacacccccagaatccctccccagagactgcaccagcgcagccagcaggagcctggcctgggaggacgatttattattacactgggggtttccttggcagctggggtcatcagggtactttcaagaagggctcgtgcaggacatcaaacagcctccgggcctggatgggagggagaaaaaaatgaggaaccagtcattaaaggagctgtttcctgggtaaa

SEQ ID NO: 115589 - DNA, 489 bp, Homo sapiens
  Payload ID: 2559
  Gene Symbol: CD3EAP
  Gene Name: CD3e molecule, epsilon associated protein
  ENST ID: ENST00000590794
  CDS Start-End: 1-202
ggaggagccccaggccggcgcttcaatgggcggcatgtgcctctctctggctcccagatcgtcaagggcaaattggcaggcaagcggcaccgctatcgagtcctcagcagctgtccccaagctggagaagcgaccctgctggccccctcaacggaggcaggaggtggactcacctgtgcctcagccccccagggcaccctaaggatccttgagggtccccagcaatccctgtcagggagccctctgcagcccatcccagcaagtcccccaccacagatccctcctggcctgaggcctcggttctgtgcctttgggggcaacccaccagtcacagggcctaggtcagccttggcccccaacctgctcacctcagggaagaagaaaaaggagatgcaggtgacagaggccccagtcactcaggaggcagtgaatgggcacggggccctggaggtggacatggctttggggtcgccagaaatggatgtgcgg

SEQ ID NO: 115590 - DNA, 1061 bp, Homo sapiens
  Payload ID: 2559
  Gene Symbol: CD3EAP
  Gene Name: CD3e molecule, epsilon associated protein
  ENST ID: ENST00000592852
  CDS Start-End: 945-1061
cgggctacagggttgcctgaggtgtgggtcccaggatggaggagccccaggccggcggtgagggtgcgggttgacggggtgcggagggtgcgttggtggaaggagaaaggggcgtccgagagggttcgggcggaaaaggaggcgtacctgcaagcaggacttgcgaagagcgtgcattcccagtgggcgaacgggaattcgaacggagagagggttatcttgtggggggctacccgtggagagcaaggcgcccccaggggttggatcggtgaaattgaggtcgcccctggggaacaggtgggcagaaaggagaaaccaggttgaggggactggagtgctcacgaggttaagaccaatggaccgataggcgcgccctgcaagattggaccggcaaggaggtgtcagtcgaccccatttccccttctgctgcagatgctgctcggttctcttgtccccccaactttaccgcgaagcccccagcctcagagtcccctcgtttctccttggaggcgctgacgggtccagatacggagctgtggcttattcaggcccctgcagactttgccccagaatgcttcaatgggcggcatgtgcctctctctggctcccagatcgtcaagggcaaattggcaggcaagcggcaccgctatcgagtcctcagcagctgtccccaagctggagaagcgaccctgctggccccctcaacggaggcaggaggtggactcacctgtgcctcagccccccagggcaccctaaggatccttgagggtccccagcaatccctgtcagggagccctctgcagcccatcccagcaagtcccccaccacagatccctcctggcctgaggcctcggttctgtgcctttgggggcaacccaccagtcacagggcctaggtcagccttggcccccaacctgctcacctcagggaagaagaaaaaggagatgcaggtgacagaggccccagtcactcaggaggcagtgaatgggcacggggccctggaggtggacatggctttggggtcgccagaaatggatgtgcggaagaagaagaagaaaaaa

SEQ ID NO: 115591 - DNA, 1525 bp, Homo sapiens
  Payload ID: 2560
  Gene Symbol: CD3G
  Gene Name: CD3g molecule, gamma (CD3-TCR complex)
  ENST ID: ENST00000292144
  CDS Start-End: 60-182
ggctggctggctggctgctaagggctgctccacgcttttgccggaggacagagactgacatggaacaggggaagggcctggctgtcctcatcctggctatcattcttcttcaaggtactttggcccagtcaatcaaaggtaggagaaatggcttctttctatactcagactcagaatattgacggaaatttggcttcctacaacagtagtcctacaggagcgaacagtttagaatgaatgaaatgacggggatagagaggagaagcaggaccctagtagctagggacacatctcaaactgtgacccatgaaccagtaggaaaccacttggttaaggtgtatgactatcaagaagatggttcggtacttctgacttgtgatgcagaagccaaaaatatcacatggtttaaagatgggaagatgatcggcttcctaactgaagataaaaaaaaatggaatctgggaagtaatgccaaggaccctcgagggatgtatcagtgtaaaggatcacagaacaagtcaaaaccactccaagtgtattacagaatgtgtcagaactgcattgaactaaatgcagccaccatatctggctttctctttgctgaaatcgtcagcattttcgtccttgctgttggggtctacttcattgctggacaggatggagttcgccagtcgagagcttcagacaagcagactctgttgcccaatgaccagctctaccagcccctcaaggatcgagaagatgaccagtacagccaccttcaaggaaaccagttgaggaggaattgaactcaggactcagagtagtccaggtgttctcctcctattcagttcccagaatcaaagcaatgcattttggaaagctcctagcagagagactttcagccctaaatctagactcaaggttcccagagatgacaaatggagaagaaaggccatcagagcaaatttgggggtttctcaaataaaataaaaataaaaacaaatactgtgtttcagaagcgccacctattggggaaaattgtaaaagaaaaatgaaaagatcaaataaccccctggatttgaatataattttttgtgttgtaatttttatttcgtttttgtataggttataattcacatggctcaaatattcagtgaaagctctccctccaccgccatcccctgctacccagtgaccctgttgccctcttcagagacaaattagtttctcttttttttttttttttttttttttttgagacagtctggctctgtcacccaggctgaaatgcagtggcaccatctcggctcactgcaacctctgcctcctgggttcaagcgattctcctgcctcagcctcccgggcagctgggattacaggcacacactaccacacctggctaatttttgtatttttagtagagacagggttttgctctgttggccaagctggtctcgaactcctgacctcaagtgatccgcccgcctcagcctcccaaagtgctgggattacaggtgtgagccaccatgcctggtcttaaaac

SEQ ID NO: 115592 - DNA, 1179 bp, Homo sapiens
  Payload ID: 2560
  Gene Symbol: CD3G
  Gene Name: CD3g molecule, gamma (CD3-TCR complex)
  ENST ID: ENST00000392883
  CDS Start-End: 261-497
agtctagctgctgcacaggctggctggctggctggctgctaagggctgctccacgcttttgccggaggacagagactgacatggaacaggggaagggcctggctgtcctcatcctggctatcattcttcttcaaggtactttggcccagtcaatcaaaggaaaccacttggttaaggtgtatgactatcaagaagatggttcggtacttctgacttgtgatgcagaagccaaaaatatcacatggtttaaagatgggaagatgatcggcttcctaactgaagataaaaaaaaatggaatctgggaagtaatgccaaggaccctcgagggatgtatcagtgtaaaggatcacagaacaagtcaaaaccactccaagtgtattacagaacttcagacaagcagactctgttgcccaatgaccagctctaccagcccctcaaggatcgagaagatgaccagtacagccaccttcaaggaaaccagttgaggaggaattgaactcaggactcagagtagtccaggtgttctcctcctattcagttcccagaatcaaagcaatgcattttggaaagctcctagcagagagactttcagccctaaatctagactcaaggttcccagagatgacaaatggagaagaaaggccatcagagcaaatttgggggtttctcaaataaaataaaaataaaaacaaatactgtgtttcagaagcgccacctattggggaaaattgtaaaagaaaaatgaaaagatcaaataaccccctggatttgaatataattttttgtgttgtaatttttatttcgtttttgtataggttataattcacatggctcaaatattcagtgaaagctctccctccaccgccatcccctgctacccagtgaccctgttgccctcttcagagacaaattagtttctcttttttttttttttttttttttttttgagacagtctggctctgtcacccaggctgaaatgcagtggcaccatctcggctcactgcaacctctgcctcctgggttcaagcgattctcctgcctcagcctcccgggcagctgggattacaggcacacactaccacacctggctaatttttgtatttttagtagagacagggttttgctctgttggccaagctggtctcgaactcctgacctcaagtgatccgcccgcctc

SEQ ID NO: 115593 - DNA, 2678 bp, Homo sapiens
  Payload ID: 2560
  Gene Symbol: CD3G
  Gene Name: CD3g molecule, gamma (CD3-TCR complex)
  Uniprot ID: P09693
  ENST ID: ENST00000532917
  CDS Start-End: 69-617
gcacaggctggctggctggctggctgctaagggctgctccacgcttttgccggaggacagagactgacatggaacaggggaagggcctggctgtcctcatcctggctatcattcttcttcaaggtactttggcccagtcaatcaaaggaaaccacttggttaaggtgtatgactatcaagaagatggttcggtacttctgacttgtgatgcagaagccaaaaatatcacatggtttaaagatgggaagatgatcggcttcctaactgaagataaaaaaaaatggaatctgggaagtaatgccaaggaccctcgagggatgtatcagtgtaaaggatcacagaacaagtcaaaaccactccaagtgtattacagaatgtgtcagaactgcattgaactaaatgcagccaccatatctggctttctctttgctgaaatcgtcagcattttcgtccttgctgttggggtctacttcattgctggacaggatggagttcgccagtcgagagcttcagacaagcagactctgttgcccaatgaccagctctaccagcccctcaaggatcgagaagatgaccagtacagccaccttcaaggaaaccagttgaggaggaattgaactcaggactcagagtagtccaggtgttctcctcctattcagttcccagaatcaaagcaatgcattttggaaagctcctagcagagagactttcagccctaaatctagactcaaggttcccagagatgacaaatggagaagaaaggccatcagagcaaatttgggggtttctcaaataaaataaaaataaaaacaaatactgtgtttcagaagcgccacctattggggaaaattgtaaaagaaaaatgaaaagatcaaataaccccctggatttgaatataattttttgtgttgtaatttttatttcgtttttgtataggttataattcacatggctcaaatattcagtgaaagctctccctccaccgccatcccctgctacccagtgaccctgttgccctcttcagagacaaattagtttctcttttttttttttttttttttttttttgagacagtctggctctgtcacccaggctgaaatgcagtggcaccatctcggctcactgcaacctctgcctcctgggttcaagcgattctcctgcctcagcctcccgggcagctgggattacaggcacacactaccacacctggctaatttttgtatttttagtagagacagggttttgctctgttggccaagctggtctcgaactcctgacctcaagtgatccgcccgcctcagcctcccaaagtgctgggattacaggtgtgagccaccatgcctggtcttaaaaccagtttcttatatatctctctggaggtattctaggcatatatgagcacattctcaagtacatattatcctcccttcccctatcttttagacaaatgatatcaaactatacatcttgtgagattattgcataccattatatgaagataccattatatcctttttaatgcaaccatattgtacaaatagactatgatttatttaacctgttatctatcagtggatatttaagttggtagttggttccaatcttttgctcttacaacaattctgcaatgactaacattgtataaatatcatttttaaaaataattgcattgaagcataatgtacatgccataaaatccacccatcttaagtgatttcacctgttctcagaaatttttagtaaatttaactaattgtacagccattaccataatccagctttaggacattttcttttttttcttttcttttcttttttttcttttttttttttttttgaagtggaatcttgctctgtggcccaggctggagtgcagtggcgcgatctcagctcactgcaacctccacctcctgggttcaagcgattctcttgccttggcctcccgagtagctgagactacaggcacatgccaccacgcccagctcattttttgtgtatttagtatttgtgtatctagtatttgtgtacttagtagagacagggtttcaccatgttggccaggctggtctccaattcctgacctcaggcgatccacccgccttgacctcccaaagtgctgggattacaggtgtgagccaccgcgccaggcccgtaactgtattttaatatagccattctatggatttaatatggtattttattatggccttaatttgcatttccctagatactaaccatgctgagtgtcctgtcttgtgtttattaaccattcatatatttttagtgaaatgtgtatcaaatcttttgcccatttttaagttgacttatttgtttgtcttcttactattgggttgcatatgtttttgatataagtcctttatcagatatatgatttggaaatattttctaccaatctgtggtttgtttttcttaatggtgtcttttgaagtgcaaaaggtttgaattttgaagtacattttattgattttttcttctatatattgtgcttttggtatcatgtctaataaatctttaccaaacccacagttacaaagattttctcctgtcttctttttatactttttacagctttatggttttagctctaacaataaatgtgattttgaacatacataagactatttgtaacaaacacaaataaattgaattgttgggca

SEQ ID NO: 115594 - DNA, 3114 bp, Homo sapiens
  Payload ID: 2561
  Gene Symbol: CD4
  Gene Name: CD4 molecule
  Uniprot ID: P01730
  ENST ID: ENST00000011653
  CDS Start-End: 259-1635
gtttggggccggcccaggcctagggtgtggaggagccttgccatcgggcttcctgtctctcttcatttaagcacgactctgcagaaggaacaaagcaccctccccactgggctcctggttgcagagctccaagtcctcacacagatacgcctgtttgagaagcagcgggcaagaaagacgcaagcccagaggccctgccatttctgtgggctcaggtccctactggctcaggcccctgcctccctcggcaaggccacaatgaaccggggagtcccttttaggcacttgcttctggtgctgcaactggcgctcctcccagcagccactcagggaaagaaagtggtgctgggcaaaaaaggggatacagtggaactgacctgtacagcttcccagaagaagagcatacaattccactggaaaaactccaaccagataaagattctgggaaatcagggctccttcttaactaaaggtccatccaagctgaatgatcgcgctgactcaagaagaagcctttgggaccaaggaaactttcccctgatcatcaagaatcttaagatagaagactcagatacttacatctgtgaagtggaggaccagaaggaggaggtgcaattgctagtgttcggattgactgccaactctgacacccacctgcttcaggggcagagcctgaccctgaccttggagagcccccctggtagtagcccctcagtgcaatgtaggagtccaaggggtaaaaacatacagggggggaagaccctctccgtgtctcagctggagctccaggatagtggcacctggacatgcactgtcttgcagaaccagaagaaggtggagttcaaaatagacatcgtggtgctagctttccagaaggcctccagcatagtctataagaaagagggggaacaggtggagttctccttcccactcgcctttacagttgaaaagctgacgggcagtggcgagctgtggtggcaggcggagagggcttcctcctccaagtcttggatcacctttgacctgaagaacaaggaagtgtctgtaaaacgggttacccaggaccctaagctccagatgggcaagaagctcccgctccacctcaccctgccccaggccttgcctcagtatgctggctctggaaacctcaccctggcccttgaagcgaaaacaggaaagttgcatcaggaagtgaacctggtggtgatgagagccactcagctccagaaaaatttgacctgtgaggtgtggggacccacctcccctaagctgatgctgagtttgaaactggagaacaaggaggcaaaggtctcgaagcgggagaaggcggtgtgggtgctgaaccctgaggcggggatgtggcagtgtctgctgagtgactcgggacaggtcctgctggaatccaacatcaaggttctgcccacatggtccaccccggtgcagccaatggccctgattgtgctggggggcgtcgccggcctcctgcttttcattgggctaggcatcttcttctgtgtcaggtgccggcaccgaaggcgccaagcagagcggatgtctcagatcaagagactcctcagtgagaagaagacctgccagtgtcctcaccggtttcagaagacatgtagccccatttgaggcacgaggccaggcagatcccacttgcagcctccccaggtgtctgccccgcgtttcctgcctgcggaccagatgaatgtagcagatccccagcctctggcctcctgttcgcctcctctacaatttgccattgtttctcctgggttaggccccggcttcactggttgagtgttgctctctagtttccagaggcttaatcacaccgtcctccacgccatttccttttccttcaagcctagcccttctctcattatttctctctgaccctctccccactgctcatttggatcccaggggagtgttcagggccagccctggctggcatggagggtgaggctgggtgtctggaagcatggagcatgggactgttcttttacaagacaggaccctgggaccacagagggcaggaacttgcacaaaatcacacagccaagccagtcaaggatggatgcagatccagaggtttctggcagccagtacctcctgccccatgctgcccgcttctcaccctatgtgggtgggaccacagactcacatcctgaccttgcacaaacagcccctctggacacagccccatgtacacggcctcaagggatgtctcacatcctctgtctatttgagacttagaaaaatcctacaaggctggcagtgacagaactaagatgatcatctccagtttatagaccagaaccagagctcagagaggctagatgattgattaccaagtgccggactagcaagtgctggagtcgggactaacccaggtcccttgtcccaagttccactgctgcctcttgaatgcagggacaaatgccacacggctctcaccagtggctagtggtgggtactcaatgtgtacttttgggttcacagaagcacagcacccatgggaagggtccatctcagagaatttacgagcagggatgaaggcctccctgtctaaaatccctccttcatcccccgctggtggcagaatctgttaccagaggacaaagcctttggctcttctaatcagagcgcaagctgggagcacaggcactgcaggagagaatgcccagtgaccagtcactgaccctgtgcagaacctcctggaagcgagctttgctgggagagggggtagctagcctgagagggaaccctctaagggacctcaaaggtgattgtgccaggctctgcgcctgccccacaccctcccttaccctcctccagaccattcaggacacagggaaatcagggttacaaatcttcttgatccacttctctcaggatcccctctcttcctacccttcctcaccacttccctcagtcccaactccttttccctatttccttctcctcctgtctttaaagcctgcctcttccaggaagacccccctattgctgctggggctccccatttgcttactttgcatttgtgcccactctccacccctgctcccctgagctgaaataaaaatacaataaacttactataaagat

SEQ ID NO: 115595 - DNA, 579 bp, Homo sapiens
  Payload ID: 2561
  Gene Symbol: CD4
  Gene Name: CD4 molecule
  ENST ID: ENST00000539492
  CDS Start-End: 444-579
accctccccactgggctcctggttgcagagctccaagtcctcacacagatacgcctgtttgagaagcagcgggcaagaaagacgcaagcccagagaaaatcctctgctggctctctagtgcccaggatccagtcccagcatctcagcacggccttcaagcatttccacgtcctggcctggctccatggtctccccgccaatttgccaccttctccatgcatccttttctgatcccctcctcactcatcccagcaaagaaccccctcctggcctgagcatagcatttcgtgtggtgcaatcttggctcactgcaacctcctcctccctggttcaagtgattctcctgcctcagcttcctaagcacctgagactacaggccctgccatttctgtgggctcaggtccctactggctcaggcccctgcctccctcggcaaggccacaatgaaccggggagtcccttttaggcacttgcttctggtgctgcaactggcgctcctcccagcagccactcagggaaagaaagtggtgctgggcaaaaaaggggatacagtggaactgacctgtacagcttcccaga

SEQ ID NO: 115596 - DNA, 1187 bp, Homo sapiens
  Payload ID: 2561
  Gene Symbol: CD4
  Gene Name: CD4 molecule
  ENST ID: ENST00000541982
  CDS Start-End: 195-641
atttaagcacgactctgcagaaggaacaaagcaccctccccactgggctcctggttgcagagctccaagtcctcacacagatacgcctgtttgagaagcagcgggcaagaaagacgcaagcccagaggccctgccatttctgtgggctcaggtccctactggctcaggcccctgcctccctcggcaaggccacaatgaaccggggagtcccttttaggcacttgcttctggtgctgcaactgggtccatccaagctgaatgatcgcgctgactcaagaagaagcctttgggaccaaggaaactttcccctgatcatcaagaatcttaagatagaagactcagatacttacatctgtgaagtggaggaccagaaggaggaggtgcaattgctagtgttcggattgactgccaactctgacacccacctgcttcaggggcagagcctgaccctgaccttggagagcccccctggtagtagcccctcagtgcaatgtaggagtccaaggggtaaaaacatacagggggggaagaccctctccgtgtctcagctggagctccaggatagtggcacctggacatgcactgtcttgcagaaccagaagaaggtggagttcaaaatagacatcgtggtgctagggtgatgaatacgcctctaaggagtggaggccaaatggcttctgtggtccaggaatcctaaggacagcaaggatcccctgtggctgggctgctctgtgatggcttccgggaggagggaggtggcctgctgtaggaaaatgctgggtggaagaagggagagaaggctggagaggtaggaaggaactgaagtatctgaagtgacaaggtgggtgtctggactcgtcgggtccccttccatctccctgctgcctccacatgccaaccccactcgtgcaccctcatcttcctatctcctcacccagggtctctcccttcccacctccagctttccagaaggcctccagcatagtctataagaaagagggggaacaggtggagttctccttcccactcgcctttacagttgaaaagctgacgggcagtggcgagctgtggtggcaggcggagagggcttcctcctccaagtcttggatcacctttgacctgaagaacaaggaagtgtctgtaaaacgggttacccaggaccctaagctccagatgggcaagaagct

SEQ ID NO: 115597 - DNA, 1720 bp, Homo sapiens
  Payload ID: 2562
  Gene Symbol: CD40LG
  Gene Name: CD40 ligand
  ENST ID: ENST00000370628
  CDS Start-End: 23-745
accatttcaactttaacacagcatgatcgaaacatacaaccaaacttctccccgatctgcggccactggactgcccatcagcatgaaaatttttatgtatttacttactgtttttcttatcacccagatgattgggtcagcactttttgctgtgtatcttcatagaaggttggacaagatagaagatgaaaggaatcttcatgaagattttgtattcatgaaaacgatacagagatgcaacacaggagaaagatccttatccttactgaactgtgaggagattaaaagccagtttgaaggctttgtgaaggatataatgttaaacaaagaggagacgaagaaagaaaacagctttgaaatgcaaaaagtgttacagtgggctgaaaaaggatactacaccatgagcaacaacttggtaaccctggaaaatgggaaacagctgaccgttaaaagacaaggactctattatatctatgcccaagtcaccttctgttccaatcgggaagcttcgagtcaagctccatttatagccagcctctgcctaaagtcccccggtagattcgagagaatcttactcagagctgcaaatacccacagttccgccaaaccttgcgggcaacaatccattcacttgggaggagtatttgaattgcaaccaggtgcttcggtgtttgtcaatgtgactgatccaagccaagtgagccatggcactggcttcacgtcctttggcttactcaaactctgaacagtgtcaccttgcaggctgtggtggagctgacgctgggagtcttcataatacagcacagcggttaagcccaccccctgttaactgcctatttataaccctaggatcctccttatggagaactatttattatacactccaaggcatgtagaactgtaataagtgaattacaggtcacatgaaaccaaaacgggccctgctccataagagcttatatatctgaagcagcaaccccactgatgcagacatccagagagtcctatgaaaagacaaggccattatgcacaggttgaattctgagtaaacagcagataacttgccaagttcagttttgtttctttgcgtgcagtgtctttccatggataatgcatttgatttatcagtgaagatgcagaagggaaatggggagcctcagctcacattcagttatggttgactctgggttcctatggccttgttggagggggccaggctctagaacgtctaacacagtggagaaccgaaaccccccccccccccccgccaccctctcggacagttattcattctctttcaatctctctctctccatctctctctttcagtctctctctctcaacctctttcttccaatctctctttctcaatctctctgtttccctttgtcagtctcttccctcccccagtctctcttctcaatccccctttctaacacacacacacacacacacacacacacacacacacacacacacacacacacagagtcaggccgttgctagtcagttctcttctttccaccctgtccctatctctaccactatagatgagggtgaggagtagggagtgcagccctgagcctgcccactcctcattacgaaatgactgtatttaaaggaaatctattgtatctacctgcagtctccattgtttccagagtgaacttgtaattatcttgttatttattttttgaataataaagacctcttaacatta

SEQ ID NO: 115598 - DNA, 1817 bp, Homo sapiens
  Payload ID: 2562
  Gene Symbol: CD40LG
  Gene Name: CD40 ligand
  Uniprot ID: P29965
  ENST ID: ENST00000370629
  CDS Start-End: 57-842
catgctgcctctgccaccttctctgccagaagataccatttcaactttaacacagcatgatcgaaacatacaaccaaacttctccccgatctgcggccactggactgcccatcagcatgaaaatttttatgtatttacttactgtttttcttatcacccagatgattgggtcagcactttttgctgtgtatcttcatagaaggttggacaagatagaagatgaaaggaatcttcatgaagattttgtattcatgaaaacgatacagagatgcaacacaggagaaagatccttatccttactgaactgtgaggagattaaaagccagtttgaaggctttgtgaaggatataatgttaaacaaagaggagacgaagaaagaaaacagctttgaaatgcaaaaaggtgatcagaatcctcaaattgcggcacatgtcataagtgaggccagcagtaaaacaacatctgtgttacagtgggctgaaaaaggatactacaccatgagcaacaacttggtaaccctggaaaatgggaaacagctgaccgttaaaagacaaggactctattatatctatgcccaagtcaccttctgttccaatcgggaagcttcgagtcaagctccatttatagccagcctctgcctaaagtcccccggtagattcgagagaatcttactcagagctgcaaatacccacagttccgccaaaccttgcgggcaacaatccattcacttgggaggagtatttgaattgcaaccaggtgcttcggtgtttgtcaatgtgactgatccaagccaagtgagccatggcactggcttcacgtcctttggcttactcaaactctgaacagtgtcaccttgcaggctgtggtggagctgacgctgggagtcttcataatacagcacagcggttaagcccaccccctgttaactgcctatttataaccctaggatcctccttatggagaactatttattatacactccaaggcatgtagaactgtaataagtgaattacaggtcacatgaaaccaaaacgggccctgctccataagagcttatatatctgaagcagcaaccccactgatgcagacatccagagagtcctatgaaaagacaaggccattatgcacaggttgaattctgagtaaacagcagataacttgccaagttcagttttgtttctttgcgtgcagtgtctttccatggataatgcatttgatttatcagtgaagatgcagaagggaaatggggagcctcagctcacattcagttatggttgactctgggttcctatggccttgttggagggggccaggctctagaacgtctaacacagtggagaaccgaaaccccccccccccccccgccaccctctcggacagttattcattctctttcaatctctctctctccatctctctctttcagtctctctctctcaacctctttcttccaatctctctttctcaatctctctgtttccctttgtcagtctcttccctcccccagtctctcttctcaatccccctttctaacacacacacacacacacacacacacacacacacacacacacacacacacacagagtcaggccgttgctagtcagttctcttctttccaccctgtccctatctctaccactatagatgagggtgaggagtagggagtgcagccctgagcctgcccactcctcattacgaaatgactgtatttaaaggaaatctattgtatctacctgcagtctccattgtttccagagtgaacttgtaattatcttgttatttattttttgaataataaagacctcttaacatta

SEQ ID NO: 115599 - DNA, 1623 bp, Homo sapiens
  Payload ID: 2563
  Gene Symbol: CD40
  Gene Name: CD40 molecule, TNF receptor superfamily member 5
  Uniprot ID: P25942
  ENST ID: ENST00000372276
  CDS Start-End: 29-640
tggtcctgccgcctggtctcacctcgctatggttcgtctgcctctgcagtgcgtcctctggggctgcttgctgaccgctgtccatccagaaccacccactgcatgcagagaaaaacagtacctaataaacagtcagtgctgttctttgtgccagccaggacagaaactggtgagtgactgcacagagttcactgaaacggaatgccttccttgcggtgaaagcgaattcctagacacctggaacagagagacacactgccaccagcacaaatactgcgaccccaacctagggcttcgggtccagcagaagggcacctcagaaacagacaccatctgcacctgtgaagaaggctggcactgtacgagtgaggcctgtgagagctgtgtcctgcaccgctcatgctcgcccggctttggggtcaagcagattgctacaggggtttctgataccatctgcgagccctgcccagtcggcttcttctccaatgtgtcatctgctttcgaaaaatgtcacccttggacaaggtccccaggatcggctgagagccctggtggtgatccccatcatcttcgggatcctgtttgccatcctcttggtgctggtctttatcaaaaaggtggccaagaagccaaccaataaggccccccaccccaagcaggaaccccaggagatcaattttcccgacgatcttcctggctccaacactgctgctccagtgcaggagactttacatggatgccaaccggtcacccaggaggatggcaaagagagtcgcatctcagtgcaggagagacagtgaggctgcacccacccaggagtgtggccacgtgggcaaacaggcagttggccagagagcctggtgctgctgctgctgtggcgtgagggtgaggggctggcactgactgggcatagctccccgcttctgcctgcacccctgcagtttgagacaggagacctggcactggatgcagaaacagttcaccttgaagaacctctcacttcaccctggagcccatccagtctcccaacttgtattaaagacagaggcagaagtttggtggtggtggtgttggggtatggtttagtaatatccaccagaccttccgatccagcagtttggtgcccagagaggcatcatggtggcttccctgcgcccaggaagccatatacacagatgcccattgcagcattgtttgtgatagtgaacaactggaagctgcttaactgtccatcagcaggagactggctaaataaaattagaatatatttatacaacagaatctcaaaaacactgttgagtaaggaaaaaaaggcatgctgctgaatgatgggtatggaactttttaaaaaagtacatgcttttatgtatgtatattgcctatggatatatgtataaatacaatatgcatcatatattgatataacaagggttctggaagggtacacagaaaacccacagctcgaagagtggtgacgtctggggtggggaagaagggtctgggggagggttggttaaagggagatttggctttcccataatgcttcatcatttttcccaaaaggagagtgaattcacataatgcttatgtaattaaaaaatcatcaaacatgtaaaaagaaaa

SEQ ID NO: 115600 - DNA, 1729 bp, Homo sapiens
  Payload ID: 2563
  Gene Symbol: CD40
  Gene Name: CD40 molecule, TNF receptor superfamily member 5
  Uniprot ID: P25942
  ENST ID: ENST00000372285
  CDS Start-End: 73-906
ggctggggcaggggagtcagcagaggcctcgctcgggcgcccagtggtcctgccgcctggtctcacctcgctatggttcgtctgcctctgcagtgcgtcctctggggctgcttgctgaccgctgtccatccagaaccacccactgcatgcagagaaaaacagtacctaataaacagtcagtgctgttctttgtgccagccaggacagaaactggtgagtgactgcacagagttcactgaaacggaatgccttccttgcggtgaaagcgaattcctagacacctggaacagagagacacactgccaccagcacaaatactgcgaccccaacctagggcttcgggtccagcagaagggcacctcagaaacagacaccatctgcacctgtgaagaaggctggcactgtacgagtgaggcctgtgagagctgtgtcctgcaccgctcatgctcgcccggctttggggtcaagcagattgctacaggggtttctgataccatctgcgagccctgcccagtcggcttcttctccaatgtgtcatctgctttcgaaaaatgtcacccttggacaagctgtgagaccaaagacctggttgtgcaacaggcaggcacaaacaagactgatgttgtctgtggtccccaggatcggctgagagccctggtggtgatccccatcatcttcgggatcctgtttgccatcctcttggtgctggtctttatcaaaaaggtggccaagaagccaaccaataaggccccccaccccaagcaggaaccccaggagatcaattttcccgacgatcttcctggctccaacactgctgctccagtgcaggagactttacatggatgccaaccggtcacccaggaggatggcaaagagagtcgcatctcagtgcaggagagacagtgaggctgcacccacccaggagtgtggccacgtgggcaaacaggcagttggccagagagcctggtgctgctgctgctgtggcgtgagggtgaggggctggcactgactgggcatagctccccgcttctgcctgcacccctgcagtttgagacaggagacctggcactggatgcagaaacagttcaccttgaagaacctctcacttcaccctggagcccatccagtctcccaacttgtattaaagacagaggcagaagtttggtggtggtggtgttggggtatggtttagtaatatccaccagaccttccgatccagcagtttggtgcccagagaggcatcatggtggcttccctgcgcccaggaagccatatacacagatgcccattgcagcattgtttgtgatagtgaacaactggaagctgcttaactgtccatcagcaggagactggctaaataaaattagaatatatttatacaacagaatctcaaaaacactgttgagtaaggaaaaaaaggcatgctgctgaatgatgggtatggaactttttaaaaaagtacatgcttttatgtatgtatattgcctatggatatatgtataaatacaatatgcatcatatattgatataacaagggttctggaagggtacacagaaaacccacagctcgaagagtggtgacgtctggggtggggaagaagggtctgggggagggttggttaaagggagatttggctttcccataatgcttcatcatttttcccaaaaggagagtgaattcacataatgcttatgtaattaaaaaatcatcaaacatgtaaaaagaaaa

SEQ ID NO: 115601 - DNA, 822 bp, Homo sapiens
  Payload ID: 2563
  Gene Symbol: CD40
  Gene Name: CD40 molecule, TNF receptor superfamily member 5
  ENST ID: ENST00000466205
  CDS Start-End: 1-479
ttcgtctgcctctgcagtgcgtcctctggggctgcttgctgaccgctgtccatccagaaccacccactgcatgcagagaaaaacagtacctaataaacagtcagtgctgttctttgtgccagccaggacagaaactggtgagtgactgcacagagttcactgaaacggaatgccttccttgcggtgaaagcgaattcctagacacctggaacagagagacacactgccaccagcacaaatactgcgaccccaacctagggcttcgggtccagcagaagggcacctcagaaacagacaccatctgcacctgtgaagaaggctggcactgtacgagtgaggcctgtgagagctgtgtcctgcaccgctcatgctcgcccggctttggggtcaagcagattgctgtgagaccaaagacctggttgtgcaacaggcaggcacaaacaagactgatgttgtctgtggtccccaggatcggctgagagccctggtggtgatccccatcatcttcgggatcctgtttgccatcctcttggtgctggtctttatcaaaaaggtggccaagaagccaaccaataaggccccccaccccaagcaggaaccccaggagatcaattttcccgacgatcttcctggctccaacactgctgctccagtgcaggagactttacatggatgccaaccggtcacccaggaggatggcaaagagagtcgcatctcagtgcaggagagacagtgaggctgcacccacccaggagtgtggccacgtgggcaaacaggcagttggccagagagcctggtgctgctgctgctgtggcgtgaggg

SEQ ID NO: 115602 - DNA, 1522 bp, Homo sapiens
  Payload ID: 2563
  Gene Symbol: CD40
  Gene Name: CD40 molecule, TNF receptor superfamily member 5
  ENST ID: ENST00000620709
  CDS Start-End: 67-522
ggcaggggagtcagcagaggcctcgctcgggcgcccagtggtcctgccgcctggtctcacctcgctatggttcgtctgcctctgcagtgcgtcctctggggctgcttgctgaccgctgtccatccagaaccacccactgcatgcagagaaaaacagtacctaataaacagtcagtgctgttctttgtgccagccaggacagaaactggtgagtgactgcacagagttcactgaaacggaatgccttccttgcggtgaaagcgaattcctagacacctggaacagagagacacactgccaccagcacaaatactgcgaccccaacctagggcttcgggtccagcagaagggcacctcagaaacagacaccatctgcacctgtgaagaaggctggcactgtacgagtgaggcctgtgagagctgtgtcctgcaccgctcatgctcgcccggctttggggtcaagcagattgacatctgccagccacatttccccaaggaccgcggtttgaaccttctgatgtagatgagctctgacattggaagattctggagtctgacaagtcacagcaggttgagggtagggagaaactgcaggtgaggggtgcatgctgaagtcctgatttctccaggtccccaggatcggctgagagccctggtggtgatccccatcatcttcgggatcctgtttgccatcctcttggtgctggtctttatcaaaaaggtggccaagaagccaaccaataaggccccccaccccaagcaggaaccccaggagatcaattttcccgacgatcttcctggctccaacactgctgctccagtgcaggagactttacatggatgccaaccggtcacccaggaggatggcaaagagagtcgcatctcagtgcaggagagacagtgaggctgcacccacccaggagtgtggccacgtgggcaaacaggcagttggccagagagcctggtgctgctgctgctgtggcgtgagggtgaggggctggcactgactgggcatagctccccgcttctgcctgcacccctgcagtttgagacaggagacctggcactggatgcagaaacagttcaccttgaagaacctctcacttcaccctggagcccatccagtctcccaacttgtattaaagacagaggcagaagtttggtggtggtggtgttggggtatggtttagtaatatccaccagaccttccgatccagcagtttggtgcccagagaggcatcatggtggcttccctgcgcccaggaagccatatacacagatgcccattgcagcattgtttgtgatagtgaacaactggaagctgcttaactgtccatcagcaggagactggctaaataaaattagaatatatttatacaacagaatctcaaaaacactgttgagtaaggaaaaaaaggcatgctgctgaatgatgggtatggaactttttaaaaaagtacatgcttttatgtatgtatattgcctatggatatatgtataaatacaatatgcatcatatattg

SEQ ID NO: 115603 - DNA, 4589 bp, Homo sapiens
  Payload ID: 2564
  Gene Symbol: CD44
  Gene Name: CD44 molecule (Indian blood group)
  Uniprot ID: P16070
  ENST ID: ENST00000263398
  CDS Start-End: 435-1520
gagaagaaagccagtgcgtctctgggcgcaggggccagtggggctcggaggcacaggcaccccgcgacactccaggttccccgacccacgtccctggcagccccgattatttacagcctcagcagagcacggggcgggggcagaggggcccgcccgggagggctgctacttcttaaaacctctgcgggctgcttagtcacagccccccttgcttgggtgtgtccttcgctcgctccctccctccgtcttaggtcactgttttcaacctcgaataaaaactgcagccaacttccgaggcagcctcattgcccagcggaccccagcctctgccaggttcggtccgccatcctcgtcccgtcctccgccggcccctgccccgcgcccagggatcctccagctcctttcgcccgcgccctccgttcgctccggacaccatggacaagttttggtggcacgcagcctggggactctgcctcgtgccgctgagcctggcgcagatcgatttgaatataacctgccgctttgcaggtgtattccacgtggagaaaaatggtcgctacagcatctctcggacggaggccgctgacctctgcaaggctttcaatagcaccttgcccacaatggcccagatggagaaagctctgagcatcggatttgagacctgcaggtatgggttcatagaagggcacgtggtgattccccggatccaccccaactccatctgtgcagcaaacaacacaggggtgtacatcctcacatccaacacctcccagtatgacacatattgcttcaatgcttcagctccacctgaagaagattgtacatcagtcacagacctgcccaatgcctttgatggaccaattaccataactattgttaaccgtgatggcacccgctatgtccagaaaggagaatacagaacgaatcctgaagacatctaccccagcaaccctactgatgatgacgtgagcagcggctcctccagtgaaaggagcagcacttcaggaggttacatcttttacaccttttctactgtacaccccatcccagacgaagacagtccctggatcaccgacagcacagacagaatccctgctaccagagaccaagacacattccaccccagtggggggtcccataccactcatggatctgaatcagatggacactcacatgggagtcaagaaggtggagcaaacacaacctctggtcctataaggacaccccaaattccagaatggctgatcatcttggcatccctcttggccttggctttgattcttgcagtttgcattgcagtcaacagtcgaagaaggtgtgggcagaagaaaaagctagtgatcaacagtggcaatggagctgtggaggacagaaagccaagtggactcaacggagaggccagcaagtctcaggaaatggtgcatttggtgaacaaggagtcgtcagaaactccagaccagtttatgacagctgatgagacaaggaacctgcagaatgtggacatgaagattggggtgtaacacctacaccattatcttggaaagaaacaaccgttggaaacataaccattacagggagctgggacacttaacagatgcaatgtgctactgattgtttcattgcgaatcttttttagcataaaattttctactctttttgttttttgtgttttgttctttaaagtcaggtccaatttgtaaaaacagcattgctttctgaaattagggcccaattaataatcagcaagaatttgatcgttccagttcccacttggaggcctttcatccctcgggtgtgctatggatggcttctaacaaaaactacacatatgtattcctgatcgccaacctttcccccaccagctaaggacatttcccagggttaatagggcctggtccctgggaggaaatttgaatgggtccattttgcccttccatagcctaatccctgggcattgctttccactgaggttgggggttggggtgtactagttacacatcttcaacagaccccctctagaaatttttcagatgcttctgggagacacccaaagggtgaagctatttatctgtagtaaactatttatctgtgtttttgaaatattaaaccctggatcagtcctttgatcagtataattttttaaagttactttgtcagaggcacaaaagggtttaaactgattcataataaatatctgtacttcttcgatcttcaccttttgtgctgtgattcttcagtttctaaaccagcactgtctgggtccctacaatgtatcaggaagagctgagaatggtaaggagactcttctaagtcttcatctcagagaccctgagttcccactcagacccactcagccaaatctcatggaagaccaaggagggcagcactgtttttgttttttgttttttgttttttttttttgacactgtccaaaggttttccatcctgtcctggaatcagagttggaagctgaggagcttcagcctcttttatggtttaatggccacctgttctctcctgtgaaaggctttgcaaagtcacattaagtttgcatgacctgttatccctggggccctatttcatagaggctggccctattagtgatttccaaaaacaatatggaagtgccttttgatgtcttacaataagagaagaagccaatggaaatgaaagagattggcaaaggggaaggatgatgccatgtagatcctgtttgacatttttatggctgtatttgtaaacttaaacacaccagtgtctgttcttgatgcagttgctatttaggatgagttaagtgcctggggagtccctcaaaaggttaaagggattcccatcattggaatcttatcaccagataggcaagtttatgaccaaacaagagagtactggctttatcctctaacctcatattttctcccacttggcaagtcctttgtggcatttattcatcagtcagggtgtccgattggtcctagaacttccaaaggctgcttgtcatagaagccattgcatctataaagcaacggctcctgttaaatggtatctcctttctgaggctcctactaaaagtcatttgttacctaaacttatgtgcttaacaggcaatgcttctcagaccacaaagcagaaagaagaagaaaagctcctgactaaatcagggctgggcttagacagagttgatctgtagaatatctttaaaggagagatgtcaactttctgcactattcccagcctctgctcctccctgtctaccctctcccctccctctctccctccacttcaccccacaatcttgaaaaacttcctttctcttctgtgaacatcattggccagatccattttcagtggtctggatttctttttattttcttttcaacttgaaagaaactggacattaggccactatgtgttgttactgccactagtgttcaagtgcctcttgttttcccagagatttcctgggtctgccagaggcccagacaggctcactcaagctctttaactgaaaagcaacaagccactccaggacaaggttcaaaatggttacaacagcctctacctgtcgccccagggagaaaggggtagtgatacaagtctcatagccagagatggttttccactccttctagatattcccaaaaagaggctgagacaggaggttattttcaattttattttggaattaaatacttttttccctttattactgttgtagtccctcacttggatatacctctgttttcacgatagaaataagggaggtctagagcttctattccttggccattgtcaacggagagctggccaagtcttcacaaacccttgcaacattgcctgaagtttatggaataagatgtattctcactcccttgatctcaagggcgtaactctggaagcacagcttgactacacgtcatttttaccaatgattttcaggtgacctgggctaagtcatttaaactgggtctttataaaagtaaaaggccaacatttaattattttgcaaagcaacctaagagctaaagatgtaatttttcttgcaattgtaaatcttttgtgtctcctgaagacttcccttaaaattagctctgagtgaaaaatcaaaagagacaaaagacatcttcgaatccatatttcaagcctggtagaattggcttttctagcagaacctttccaaaagttttatattgagattcataacaacaccaagaattgattttgtagccaacattcattcaatactgttatatcagaggagtaggagagaggaaacatttgacttatctggaaaagcaaaatgtacttaagaataagaataacatggtccattcacctttatgttatagatatgtctttgtgtaaatcatttgttttgagttttcaaagaatagcccattgttcattcttgtgctgtacaatgaccactgttattgttactttgacttttcagagcacacccttcctctggtttttgtatatttattgatggatcaataataatgaggaaagcatgatatgtatattgctgagttgaaagcacttattggaaaatattaaaaggctaacattaaaagactaaaggaaacaga

SEQ ID NO: 115604 - DNA, 697 bp, Homo sapiens
  Payload ID: 2564
  Gene Symbol: CD44
  Gene Name: CD44 molecule (Indian blood group)
  ENST ID: ENST00000278385
  CDS Start-End: 1-697
cctgaagacatctaccccagcaaccctactgatgatgacgtgagcagcggctcctccagtgaaaggagcagcacttcaggaggttacatcttttacaccttttctactgtacaccccatcccagacgaagacagtccctggatcaccgacagcacagacagaatccctgctaccaatatggactccagtcatagtataacgcttcagcctactgcaaatccaaacacaggtttggtggaagatttggacaggacaggacctctttcaatgacaacgcagcagagtaattctcagagcttctctacatcacatgaaggcttggaagaagataaagaccatccaacaacttctactctgacatcaagcagagaccaagacacattccaccccagtggggggtcccataccactcatggatctgaatcagatggacactcacatgggagtcaagaaggtggagcaaacacaacctctggtcctataaggacaccccaaattccagaatggctgatcatcttggcatccctcttggccttggctttgattcttgcagtttgcattgcagtcaacagtcgaagaaggtgtgggcagaagaaaaagctagtgatcaacagtggcaatggagctgtggaggacagaaagccaagtggactcaacggagaggccagcaagtctcaggaaatggtgcatttggtga

SEQ ID NO: 115605 - DNA, 484 bp, Homo sapiens
  Payload ID: 2564
  Gene Symbol: CD44
  Gene Name: CD44 molecule (Indian blood group)
  Uniprot ID: P16070
  ENST ID: ENST00000278386
  CDS Start-End: 19-438
ccgttcgctccggacaccatggacaagttttggtggcacgcagcctggggactctgcctcgtgccgctgagcctggcgcagatcgatttgaatataacctgccgctttgcaggtgtattccacgtggagaaaaatggtcgctacagcatctctcggacggaggccgctgacctctgcaaggctttcaatagcaccttgcccacaatggcccagatggagaaagctctgagcatcggatttgagacctgcagtttgcattgcagtcaacagtcgaagaaggtgtgggcagaagaaaaagctagtgatcaacagtggcaatggagctgtggaggacagaaagccaagtggactcaacggagaggccagcaagtctcaggaaatggtgcatttggtgaacaaggagtcgtcagaaactccagaccagtttatgacagctgatgagacaaggaacctgcagaatgtggacatgaagattggggtgtaa

SEQ ID NO: 115606 - DNA, 862 bp, Homo sapiens
  Payload ID: 2564
  Gene Symbol: CD44
  Gene Name: CD44 molecule (Indian blood group)
  ENST ID: ENST00000279452
  CDS Start-End: 1-862
cgctacagcatctctcggacggaggccgctgacctctgcaaggctttcaatagcaccttgcccacaatggcccagatggagaaagctctgagcatcggatttgagacctgcaggtatgggttcatagaagggcacgtggtgattccccggatccaccccaactccatctgtgcagcaaacaacacaggggtgtacatcctcacatccaacacctcccagtatgacacatattgcttcaatgcttcagctccacctgaagaagattgtacatcagtcacagacctgcccaatgcctttgatggaccaattaccataactattgttaaccgtgatggcacccgctatgtccagaaaggagaatacagaacgaatcctgaagacatctaccccagcaaccctactgatgatgacgtgagcagcggctcctccagtgaaaggagcagcacttcaggaggagaccaagacacattccaccccagtggggggtcccataccactcatggatctgaatcagatggacactcacatgggagtcaagaaggtggagcaaacacaacctctggtcctataaggacaccccaaattccagaatggctgatcatcttggcatccctcttggccttggctttgattcttgcagtttgcattgcagtcaacagtcgaagaaggtgtgggcagaagaaaaagctagtgatcaacagtggcaatggagctgtggaggacagaaagccaagtggactcaacggagaggccagcaagtctcaggaaatggtgcatttggtgaacaaggagtcgtcagaaactccagaccagtttatgacagctgatgagacaaggaacctgcagaatgtggacatgaaga

SEQ ID NO: 115607 - DNA, 1023 bp, Homo sapiens
  Payload ID: 2564
  Gene Symbol: CD44
  Gene Name: CD44 molecule (Indian blood group)
  Uniprot ID: P16070
  ENST ID: ENST00000352818
  CDS Start-End: 1-1023
atggacaagttttggtggcacgcagcctggggactctgcctcgtgccgctgagcctggcgcagatcgatttgaatataacctgccgctttgcaggtgtattccacgtggagaaaaatggtcgctacagcatctctcggacggaggccgctgacctctgcaaggctttcaatagcaccttgcccacaatggcccagatggagaaagctctgagcatcggatttgagacctgcaggtatgggttcatagaagggcacgtggtgattccccggatccaccccaactccatctgtgcagcaaacaacacaggggtgtacatcctcacatccaacacctcccagtatgacacatattgcttcaatgcttcagctccacctgaagaagattgtacatcagtcacagacctgcccaatgcctttgatggaccaattaccataactattgttaaccgtgatggcacccgctatgtccagaaaggagaatacagaacgaatcctgaagacatctaccccagcaaccctactgatgatgacgtgagcagcggctcctccagtgaaaggagcagcacttcaggaggttacatcttttacaccttttctactgtacaccccatcccagacgaagacagtccctggatcaccgacagcacagacagaatccctgctaccagacactcacatgggagtcaagaaggtggagcaaacacaacctctggtcctataaggacaccccaaattccagaatggctgatcatcttggcatccctcttggccttggctttgattcttgcagtttgcattgcagtcaacagtcgaagaaggtgtgggcagaagaaaaagctagtgatcaacagtggcaatggagctgtggaggacagaaagccaagtggactcaacggagaggccagcaagtctcaggaaatggtgcatttggtgaacaaggagtcgtcagaaactccagaccagtttatgacagctgatgagacaaggaacctgcagaatgtggacatgaagattggggtgtaa

SEQ ID NO: 115608 - DNA, 2369 bp, Homo sapiens
  Payload ID: 2564
  Gene Symbol: CD44
  Gene Name: CD44 molecule (Indian blood group)
  Uniprot ID: P16070
  ENST ID: ENST00000415148
  CDS Start-End: 135-2234
cctcattgcccagcggaccccagcctctgccaggttcggtccgccatcctcgtcccgtcctccgccggcccctgccccgcgcccagggatcctccagctcctttcgcccgcgccctccgttcgctccggacaccatggacaagttttggtggcacgcagcctggggactctgcctcgtgccgctgagcctggcgcagatcgatttgaatataacctgccgctttgcaggtgtattccacgtggagaaaaatggtcgctacagcatctctcggacggaggccgctgacctctgcaaggctttcaatagcaccttgcccacaatggcccagatggagaaagctctgagcatcggatttgagacctgcaggtatgggttcatagaagggcacgtggtgattccccggatccaccccaactccatctgtgcagcaaacaacacaggggtgtacatcctcacatccaacacctcccagtatgacacatattgcttcaatgcttcagctccacctgaagaagattgtacatcagtcacagacctgcccaatgcctttgatggaccaattaccataactattgttaaccgtgatggcacccgctatgtccagaaaggagaatacagaacgaatcctgaagacatctaccccagcaaccctactgatgatgacgtgagcagcggctcctccagtgaaaggagcagcacttcaggaggttacatcttttacaccttttctactgtacaccccatcccagacgaagacagtccctggatcaccgacagcacagacagaatccctgctaccagtacgtcttcaaataccatctcagcaggctgggagccaaatgaagaaaatgaagatgaaagagacagacacctcagtttttctggatcaggcattgatgatgatgaagattttatctccagcaccatttcaaccacaccacgggcttttgaccacacaaaacagaaccaggactggacccagtggaacccaagccattcaaatccggaagtgctacttcagacaaccacaaggatgactgatgtagacagaaatggcaccactgcttatgaaggaaactggaacccagaagcacaccctcccctcattcaccatgagcatcatgaggaagaagagaccccacattctacaagcacaatccaggcaactcctagtagtacaacggaagaaacagctacccagaaggaacagtggtttggcaacagatggcatgagggatatcgccaaacacccaaagaagactcccattcgacaacagggacagctgcagcctcagctcataccagccatccaatgcaaggaaggacaacaccaagcccagaggacagttcctggactgatttcttcaacccaatctcacaccccatgggacgaggtcatcaagcaggaagaaggatggatatggactccagtcatagtataacgcttcagcctactgcaaatccaaacacaggtttggtggaagatttggacaggacaggacctctttcaatgacaacgcagcagagtaattctcagagcttctctacatcacatgaaggcttggaagaagataaagaccatccaacaacttctactctgacatcaagcaataggaatgatgtcacaggtggaagaagagacccaaatcattctgaaggctcaactactttactggaaggttatacctctcattacccacacacgaaggaaagcaggaccttcatcccagtgacctcagctaagactgggtcctttggagttactgcagttactgttggagattccaactctaatgtcaatcgttccttatcaggagaccaagacacattccaccccagtggggggtcccataccactcatggatctgaatcagatggacactcacatgggagtcaagaaggtggagcaaacacaacctctggtcctataaggacaccccaaattccagaatggctgatcatcttggcatccctcttggccttggctttgattcttgcagtttgcattgcagtcaacagtcgaagaaggtgtgggcagaagaaaaagctagtgatcaacagtggcaatggagctgtggaggacagaaagccaagtggactcaacggagaggccagcaagtctcaggaaatggtgcatttggtgaacaaggagtcgtcagaaactccagaccagtttatgacagctgatgagacaaggaacctgcagaatgtggacatgaagattggggtgtaacacctacaccattatcttggaaagaaacaaccgttggaaacataaccattacagggagctgggacacttaacagatgcaatgtgctactgattgtttcattgcgaatcttttttagcataaaattttctactctt

SEQ ID NO: 115609 - DNA, 2292 bp, Homo sapiens
  Payload ID: 2564
  Gene Symbol: CD44
  Gene Name: CD44 molecule (Indian blood group)
  Uniprot ID: P16070
  ENST ID: ENST00000433892
  CDS Start-End: 117-1598
cccagcctctgccaggttcggtccgccatcctcgtcccgtcctccgccggcccctgccccgcgcccagggatcctccagctcctttcgcccgcgccctccgttcgctccggacaccatggacaagttttggtggcacgcagcctggggactctgcctcgtgccgctgagcctggcgcagatcgatttgaatataacctgccgctttgcaggtgtattccacgtggagaaaaatggtcgctacagcatctctcggacggaggccgctgacctctgcaaggctttcaatagcaccttgcccacaatggcccagatggagaaagctctgagcatcggatttgagacctgcaggtatgggttcatagaagggcacgtggtgattccccggatccaccccaactccatctgtgcagcaaacaacacaggggtgtacatcctcacatccaacacctcccagtatgacacatattgcttcaatgcttcagctccacctgaagaagattgtacatcagtcacagacctgcccaatgcctttgatggaccaattaccataactattgttaaccgtgatggcacccgctatgtccagaaaggagaatacagaacgaatcctgaagacatctaccccagcaaccctactgatgatgacgtgagcagcggctcctccagtgaaaggagcagcacttcaggaggttacatcttttacaccttttctactgtacaccccatcccagacgaagacagtccctggatcaccgacagcacagacagaatccctgctaccaatatggactccagtcatagtataacgcttcagcctactgcaaatccaaacacaggtttggtggaagatttggacaggacaggacctctttcaatgacaacgcagcagagtaattctcagagcttctctacatcacatgaaggcttggaagaagataaagaccatccaacaacttctactctgacatcaagcaataggaatgatgtcacaggtggaagaagagacccaaatcattctgaaggctcaactactttactggaaggttatacctctcattacccacacacgaaggaaagcaggaccttcatcccagtgacctcagctaagactgggtcctttggagttactgcagttactgttggagattccaactctaatgtcaatcgttccttatcaggagaccaagacacattccaccccagtggggggtcccataccactcatggatctgaatcagatggacactcacatgggagtcaagaaggtggagcaaacacaacctctggtcctataaggacaccccaaattccagaatggctgatcatcttggcatccctcttggccttggctttgattcttgcagtttgcattgcagtcaacagtcgaagaaggtgtgggcagaagaaaaagctagtgatcaacagtggcaatggagctgtggaggacagaaagccaagtggactcaacggagaggccagcaagtctcaggaaatggtgcatttggtgaacaaggagtcgtcagaaactccagaccagtttatgacagctgatgagacaaggaacctgcagaatgtggacatgaagattggggtgtaacacctacaccattatcttggaaagaaacaaccgttggaaacataaccattacagggagctgggacacttaacagatgcaatgtgctactgattgtttcattgcgaatcttttttagcataaaattttctactctttttgttttttgtgttttgttctttaaagtcaggtccaatttgtaaaaacagcattgctttctgaaattagggcccaattaataatcagcaagaatttgatcgttccagttcccacttggaggcctttcatccctcgggtgtgctatggatggcttctaacaaaaactacacatatgtattcctgatcgccaacctttcccccaccagctaaggacatttcccagggttaatagggcctggtccctgggaggaaatttgaatgggtccattttgcccttccatagcctaatccctgggcattgctttccactgaggttgggggttggggtgtactagttacacatcttcaacagaccccctctagaaatttttcagatgcttctgggagacacccaaagggtgaagctatttatctgtagtaaactatttatctgtgtttttgaaatattaaaccctggatcagtcctttgatcagtataattttttaaagttactttgtcagaggcacaaaagggtttaaactgattcataataaatatctgtacttcttcgatcttca

SEQ ID NO: 115610 - DNA, 1768 bp, Homo sapiens
  Payload ID: 2564
  Gene Symbol: CD44
  Gene Name: CD44 molecule (Indian blood group)
  ENST ID: ENST00000425428
  CDS Start-End: 123-365
gcggaccccagcctctgccaggttcggtccgccatcctcgtcccgtcctccgccggcccctgccccgcgcccagggatcctccagctcctttcgcccgcgccctccgttcgctccggacaccatggacaagttttggtggcacgcagcctggggactctgcctcgtgccgctgagcctggcgcagatcgatttgaatataacctgccgctttgcaggtgtattccacgtggagaaaaatggtcgctacagcatctctcggacggaggccgctgacctctgcaaggctttcaatagcaccttgcccacaatggcccagatggagaaagctctgagcatcggatttgagacctgcagctccacctgaagaagattgtacatcagtcacagacctgcccaatgcctttgatggaccaattaccataactattgttaaccgtgatggcacccgctatgtccagaaaggagaatacagaacgaatcctgaagacatctaccccagcaaccctactgatgatgacgtgagcagcggctcctccagtgaaaggagcagcacttcaggaggttacatcttttacaccttttctactgtacaccccatcccagacgaagacagtccctggatcaccgacagcacagacagaatccctgctaccagagaccaagacacattccaccccagtggggggtcccataccactcatggatctgaatcagatggacactcacatgggagtcaagaaggtggagcaaacacaacctctggtcctataaggacaccccaaattccagaatggctgatcatcttggcatccctcttggccttggctttgattcttgcagtttgcattgcagtcaacagtcgaagaaggtgtgggcagaagaaaaagctagtgatcaacagtggcaatggagctgtggaggacagaaagccaagtggactcaacggagaggccagcaagtctcaggaaatggtgcatttggtgaacaaggagtcgtcagaaactccagaccagtttatgacagctgatgagacaaggaacctgcagaatgtggacatgaagattggggtgtaacacctacaccattatcttggaaagaaacaaccgttggaaacataaccattacagggagctgggacacttaacagatgcaatgtgctactgattgtttcattgcgaatcttttttagcataaaattttctactctttttgttttttgtgttttgttctttaaagtcaggtccaatttgtaaaaacagcattgctttctgaaattagggcccaattaataatcagcaagaatttgatcgttccagttcccacttggaggcctttcatccctcgggtgtgctatggatggcttctaacaaaaactacacatatgtattcctgatcgccaacctttcccccaccagctaaggacatttcccagggttaatagggcctggtccctgggaggaaatttgaatgggtccattttgcccttccatagcctaatccctgggcattgctttccactgaggttgggggttggggtgtactagttacacatcttcaacagaccccctctagaaatttttcagatgcttctgggagacacccaaagggtgaagctatttatctgtagtaaactatttatctgtgtttttgaaatattaaaccctggatcagtcctttgatcagtataattttttaaagttactttgtcagaggcacaaaagggtttaaactgattcataataaatatctgtacttcttcgatcttca

SEQ ID NO: 115611 - DNA, 1825 bp, Homo sapiens
  Payload ID: 2564
  Gene Symbol: CD44
  Gene Name: CD44 molecule (Indian blood group)
  ENST ID: ENST00000442151
  CDS Start-End: 1-883
ggacaagttttggtggcacgcagcctggggactctgcctcgtgccgctgagcctggcgcagatcgatttgaatataacctgccgctttgcaggtgtattccacgtggagaaaaatggtcgctacagcatctctcggacggaggccgctgacctctgcaaggctttcaatagcaccttgcccacaatggcccagatggagaaagctctgagcatcggatttgagacctgcaggtatgggttcatagaagggcacgtggtgattccccggatccaccccaactccatctgtgcagcaaacaacacaggggtgtacatcctcacatccaacacctcccagtatgacacatattgcttcaatgcttcagctccacctgaagaagattgtacatcagtcacagacctgcccaatgcctttgatggaccaattaccataactattgttaaccgtgatggcacccgctatgtccagaaaggagaatacagaacgaatcctgaagacatctaccccagcaaccctactgatgatgacgtgagcagcggctcctccagtgaaaggagcagcacttcaggaggttacatcttttacaccttttctactgtacaccccatcccagacgaagacagtccctggatcaccgacagcacagacagaatccctgctaccagagaccaagacacattccaccccagtggggggtcccataccactcatggatctgaatcagatggacactcacatgggagtcaagaaggtggagcaaacacaacctctggtcctataaggacaccccaaattccagaatggctgatcatcttggcatccctcttggccttggctttgattcttgcagtttgcattgcagtcaacagtcgaagaagttgaagagattcaggttatagcataagaagagcactgtttcatcgtcttcttgctgttaggaggtctatgaagcagagaagaactttcctttggaaaacaactaaatgaagacagtcacctcgctagaactgacacatgggctgtttttatattcttgaaggccactctctccctacctgaaccaagacctataggtttacatgttatttacattttatatataatatatatatatatatatacacatacattatatatacacaatagtaattctagcaacagaggaaatgacctttaacaggggtataaatctaaatttataaaagtataaatctaaatttcttacccaagacactttaaagatacattatttttctccaggacgtaattcataggaatattaagccttttgtaaatgtccctttagatggtttctcataaggtaaaagaaacttatttccaagcaggaccacctttattgtgtccccagatcacctcacagggcagaaaaatgcccctcagtctgggagaagacctagagagaattatggactccttactggtttttggaaagcaaccaacagctaattccaacaccatgggcagcccatacagtctctaattatctgagaaaatcaaatgatgctgttacaataattacgctggtacaagttaataaaagtgccatgttacagtcaaacagctatgttgctatctataccattgagggcatagttttaaaaagtagttatgctacctgattgtataaggaacaaaactgagagaaaaaatctaaaaggccgcctatgattgaatggaaagattttttttagttgaatttaaataatgtgacttgggggagcctttacaaagagtctttatacctcccttcagcttcctcattttcccttggattacttttgctcaattaaatatgaatttcct

SEQ ID NO: 115612 - DNA, 3046 bp, Homo sapiens
  Payload ID: 2564
  Gene Symbol: CD44
  Gene Name: CD44 molecule (Indian blood group)
  Uniprot ID: P16070
  ENST ID: ENST00000428726
  CDS Start-End: 124-2352
agcggaccccagcctctgccaggttcggtccgccatcctcgtcccgtcctccgccggcccctgccccgcgcccagggatcctccagctcctttcgcccgcgccctccgttcgctccggacaccatggacaagttttggtggcacgcagcctggggactctgcctcgtgccgctgagcctggcgcagatcgatttgaatataacctgccgctttgcaggtgtattccacgtggagaaaaatggtcgctacagcatctctcggacggaggccgctgacctctgcaaggctttcaatagcaccttgcccacaatggcccagatggagaaagctctgagcatcggatttgagacctgcaggtatgggttcatagaagggcacgtggtgattccccggatccaccccaactccatctgtgcagcaaacaacacaggggtgtacatcctcacatccaacacctcccagtatgacacatattgcttcaatgcttcagctccacctgaagaagattgtacatcagtcacagacctgcccaatgcctttgatggaccaattaccataactattgttaaccgtgatggcacccgctatgtccagaaaggagaatacagaacgaatcctgaagacatctaccccagcaaccctactgatgatgacgtgagcagcggctcctccagtgaaaggagcagcacttcaggaggttacatcttttacaccttttctactgtacaccccatcccagacgaagacagtccctggatcaccgacagcacagacagaatccctgctaccactttgatgagcactagtgctacagcaactgagacagcaaccaagaggcaagaaacctgggattggttttcatggttgtttctaccatcagagtcaaagaatcatcttcacacaacaacacaaatggctggtacgtcttcaaataccatctcagcaggctgggagccaaatgaagaaaatgaagatgaaagagacagacacctcagtttttctggatcaggcattgatgatgatgaagattttatctccagcaccatttcaaccacaccacgggcttttgaccacacaaaacagaaccaggactggacccagtggaacccaagccattcaaatccggaagtgctacttcagacaaccacaaggatgactgatgtagacagaaatggcaccactgcttatgaaggaaactggaacccagaagcacaccctcccctcattcaccatgagcatcatgaggaagaagagaccccacattctacaagcacaatccaggcaactcctagtagtacaacggaagaaacagctacccagaaggaacagtggtttggcaacagatggcatgagggatatcgccaaacacccaaagaagactcccattcgacaacagggacagctgcagcctcagctcataccagccatccaatgcaaggaaggacaacaccaagcccagaggacagttcctggactgatttcttcaacccaatctcacaccccatgggacgaggtcatcaagcaggaagaaggatggatatggactccagtcatagtataacgcttcagcctactgcaaatccaaacacaggtttggtggaagatttggacaggacaggacctctttcaatgacaacgcagcagagtaattctcagagcttctctacatcacatgaaggcttggaagaagataaagaccatccaacaacttctactctgacatcaagcaataggaatgatgtcacaggtggaagaagagacccaaatcattctgaaggctcaactactttactggaaggttatacctctcattacccacacacgaaggaaagcaggaccttcatcccagtgacctcagctaagactgggtcctttggagttactgcagttactgttggagattccaactctaatgtcaatcgttccttatcaggagaccaagacacattccaccccagtggggggtcccataccactcatggatctgaatcagatggacactcacatgggagtcaagaaggtggagcaaacacaacctctggtcctataaggacaccccaaattccagaatggctgatcatcttggcatccctcttggccttggctttgattcttgcagtttgcattgcagtcaacagtcgaagaaggtgtgggcagaagaaaaagctagtgatcaacagtggcaatggagctgtggaggacagaaagccaagtggactcaacggagaggccagcaagtctcaggaaatggtgcatttggtgaacaaggagtcgtcagaaactccagaccagtttatgacagctgatgagacaaggaacctgcagaatgtggacatgaagattggggtgtaacacctacaccattatcttggaaagaaacaaccgttggaaacataaccattacagggagctgggacacttaacagatgcaatgtgctactgattgtttcattgcgaatcttttttagcataaaattttctactctttttgttttttgtgttttgttctttaaagtcaggtccaatttgtaaaaacagcattgctttctgaaattagggcccaattaataatcagcaagaatttgatcgttccagttcccacttggaggcctttcatccctcgggtgtgctatggatggcttctaacaaaaactacacatatgtattcctgatcgccaacctttcccccaccagctaaggacatttcccagggttaatagggcctggtccctgggaggaaatttgaatgggtccattttgcccttccatagcctaatccctgggcattgctttccactgaggttgggggttggggtgtactagttacacatcttcaacagaccccctctagaaatttttcagatgcttctgggagacacccaaagggtgaagctatttatctgtagtaaactatttatctgtgtttttgaaatattaaaccctggatcagtcctttgatcagtataattttttaaagttactttgtcagaggcacaaaagggtttaaactgattcataataaatatctgtacttcttcgatcttca

SEQ ID NO: 115613 - DNA, 1634 bp, Homo sapiens
  Payload ID: 2564
  Gene Symbol: CD44
  Gene Name: CD44 molecule (Indian blood group)
  Uniprot ID: P16070
  ENST ID: ENST00000434472
  CDS Start-End: 12-1301
ctccggacaccatggacaagttttggtggcacgcagcctggggactctgcctcgtgccgctgagcctggcgcagatcgatttgaatataacctgccgctttgcaggtgtattccacgtggagaaaaatggtcgctacagcatctctcggacggaggccgctgacctctgcaaggctttcaatagcaccttgcccacaatggcccagatggagaaagctctgagcatcggatttgagacctgcaggtatgggttcatagaagggcacgtggtgattccccggatccaccccaactccatctgtgcagcaaacaacacaggggtgtacatcctcacatccaacacctcccagtatgacacatattgcttcaatgcttcagctccacctgaagaagattgtacatcagtcacagacctgcccaatgcctttgatggaccaattaccataactattgttaaccgtgatggcacccgctatgtccagaaaggagaatacagaacgaatcctgaagacatctaccccagcaaccctactgatgatgacgtgagcagcggctcctccagtgaaaggagcagcacttcaggaggttacatcttttacaccttttctactgtacaccccatcccagacgaagacagtccctggatcaccgacagcacagacagaatccctgctaccaataggaatgatgtcacaggtggaagaagagacccaaatcattctgaaggctcaactactttactggaaggttatacctctcattacccacacacgaaggaaagcaggaccttcatcccagtgacctcagctaagactgggtcctttggagttactgcagttactgttggagattccaactctaatgtcaatcgttccttatcaggagaccaagacacattccaccccagtggggggtcccataccactcatggatctgaatcagatggacactcacatgggagtcaagaaggtggagcaaacacaacctctggtcctataaggacaccccaaattccagaatggctgatcatcttggcatccctcttggccttggctttgattcttgcagtttgcattgcagtcaacagtcgaagaaggtgtgggcagaagaaaaagctagtgatcaacagtggcaatggagctgtggaggacagaaagccaagtggactcaacggagaggccagcaagtctcaggaaatggtgcatttggtgaacaaggagtcgtcagaaactccagaccagtttatgacagctgatgagacaaggaacctgcagaatgtggacatgaagattggggtgtaacacctacaccattatcttggaaagaaacaaccgttggaaacataaccattacagggagctgggacacttaacagatgcaatgtgctactgattgtttcattgcgaatcttttttagcataaaattttctactctttttgttttttgtgttttgttctttaaagtcaggtccaatttgtaaaaacagcattgctttctgaaattagggcccaattaataatcagcaagaatttgatcgttccagttcccacttggaggcctttcatccctcgggtgtgctatggatggcttctaacaaaaactacacatatgtattcctgatcgccaacctttc

SEQ ID NO: 115614 - DNA, 586 bp, Homo sapiens
  Payload ID: 2564
  Gene Symbol: CD44
  Gene Name: CD44 molecule (Indian blood group)
  ENST ID: ENST00000528672
  CDS Start-End: 1-586
agaaatggcaccactgcttatgaaggaaactggaacccagaagcacaccctcccctcattcaccatgagcatcatgaggaagaagagaccccacattctacaagcacaatccaggcaactcctagtagtacaacggaagaaacagctacccagaaggaacagtggtttggcaacagatggcatgagggatatcgccaaacacccaaagaagactcccattcgacaacagggacagctgatatggactccagtcatagtataacgcttcagcctactgcaaatccaaacacaggtttggtggaagatttggacaggacaggacctctttcaatgacaacgcagcagagtaattctcagagcttctctacatcacatgaaggcttggaagaagataaagaccatccaacaacttctactctgacatcaagcaataggaatgatgtcacaggtggaagaagagacccaaatcattctgaaggctcaactactttactggaaggttatacctctcattacccacacacgaaggaaagcaggaccttcatcccagtgacctcagctaagactgggtcctttggagttactg

SEQ ID NO: 115615 - DNA, 747 bp, Homo sapiens
  Payload ID: 2564
  Gene Symbol: CD44
  Gene Name: CD44 molecule (Indian blood group)
  ENST ID: ENST00000525211
  CDS Start-End: 1-747
atagatttgaatataacctgccgctttgcaggtgtattccacgtggagaaaaatggtcgctacagcatctctcggacggaggccgctgacctctgcaaggctttcaatagcaccttgcccacaatggcccagatggagaaagctctgagcatcggatttgagacctgcaggtatgggttcatagaagggcacgtggtgattccccggatccaccccaactccatctgtgcagcaaacaacacaggggtgtacatcctcacatccaacacctcccagtatgacacatattgcttcaatgcttcagctccacctgaagaagattgtacatcagtcacagacctgcccaatgcctttgatggaccaattaccataactattgttaaccgtgatggcacccgctatgtccagaaaggagaatacagaacgaatcctgaagacatctaccccagcaaccctactgatgatgacgtgagcagcggctcctccagtgaaaggagcagcacttcaggaggttacatcttttacaccttttctactgtacaccccatcccagacgaagacagtccctggatcaccgacagcacagacagaatccctgctaccacagcctcagctcataccagccatccaatgcaaggaaggacaacaccaagcccagaggacagttcctggactgatttcttcaacccaatctcacaccccatgggacgaggtcatcaagcaggaagaaggatgggtaatagcctc

SEQ ID NO: 115616 - DNA, 870 bp, Homo sapiens
  Payload ID: 2564
  Gene Symbol: CD44
  Gene Name: CD44 molecule (Indian blood group)
  ENST ID: ENST00000526669
  CDS Start-End: 123-743
gcggaccccagcctctgccaggttcggtccgccatcctcgtcccgtcctccgccggcccctgccccgcgcccagggatcctccagctcctttcgcccgcgccctccgttcgctccggacaccatggacaagttttggtggcacgcagcctggggactctgcctcgtgccgctgagcctggcgcagatcgatttgaatataacctgccgctttgcaggtgtattccacgtggagaaaaatggtcgctacagcatctctcggacggaggccgctgacctctgcaaggctttcaatagcaccttgcccacaatggcccagatggagaaagctctgagcatcggatttgagacctgcaggtatgggttcatagaagggcacgtggtgattccccggatccaccccaactccatctgtggagcaaacacaacctctggtcctataaggacaccccaaattccagaatggctgatcatcttggcatccctcttggccttggctttgattcttgcagtttgcattgcagtcaacagtcgaagaaggtgtgggcagaagaaaaagctagtgatcaacagtggcaatggagctgtggaggacagaaagccaagtggactcaacggagaggccagcaagtctcaggaaatggtgcatttggtgaacaaggagtcgtcagaaactccagaccagtttatgacagctgatgagacaaggaacctgcagaatgtggacatgaagattggggtgtaacacctacaccattatcttggaaagaaacaaccgttggaaacataaccattacagggagctgggacacttaacagatgcaatgtgctactgattgtttcattgcgaatcttttttagcataaaatttt

SEQ ID NO: 115617 - DNA, 687 bp, Homo sapiens
  Payload ID: 2564
  Gene Symbol: CD44
  Gene Name: CD44 molecule (Indian blood group)
  ENST ID: ENST00000528455
  CDS Start-End: 1-687
ccagatggagaaagctctgagcatcggatttgagacctgcaggtatgggttcatagaagggcacgtggtgattccccggatccaccccaactccatctgtgcagcaaacaacacaggggtgtacatcctcacatccaacacctcccagtatgacacatattgcttcaatgcttcagctccacctgaagaagattgtacatcagtcacagacctgcccaatgcctttgatggaccaattaccataactattgttaaccgtgatggcacccgctatgtccagaaaggagaatacagaacgaatcctgaagacatctaccccagcaaccctactgatgatgacgtgagcagcggctcctccagtgaaaggagcagcacttcaggaggttacatcttttacaccttttctactgtacaccccatcccagacgaagacagtccctggatcaccgacagcacagacagaatccctgctaccatttcaaccacaccacgggcttttgaccacacaaaacagaaccaggactggacccagtggaacccaagccattcaaatccggaagtgctacttcagacaaccacaaggatgactgatgtagacagaaatggcaccactgcttatgaaggaaactggaacccagaagcacaccctcccctcattcaccatgagcatcatgaggaagaagagac

SEQ ID NO: 115618 - DNA, 584 bp, Homo sapiens
  Payload ID: 2564
  Gene Symbol: CD44
  Gene Name: CD44 molecule (Indian blood group)
  ENST ID: ENST00000531873
  CDS Start-End: 1-584
ggttcatagaagggcacgtggtgattccccggatccaccccaactccatctgtgcagcaaacaacacaggggtgtacatcctcacatccaacacctcccagtatgacacatattgcttcaatgcttcagctccacctgaagaagattgtacatcagtcacagacctgcccaatgcctttgatggaccaattaccataactattgttaaccgtgatggcacccgctatgtccagaaaggagaatacagaacgaatcctgaagacatctaccccagcaaccctactgatgatgacgtgagcagcggctcctccagtgaaaggagcagcacttcaggaggttacatcttttacaccttttctactgtacaccccatcccagacgaagacagtccctggatcaccgacagcacagacagaatccctgctaccaagcagagtaattctcagagcttctctacatcacatgaaggcttggaagaagataaagaccatccaacaacttctactctgacatcaagcaataggaatgatgtcacaggtggaagaagagacccaaatcattctgaaggctcaactactttactg

SEQ ID NO: 115619 - DNA, 571 bp, Homo sapiens
  Payload ID: 2564
  Gene Symbol: CD44
  Gene Name: CD44 molecule (Indian blood group)
  ENST ID: ENST00000526553
  CDS Start-End: 1-571
ttcaaccacaccacgggcttttgaccacacaaaacagaaccaggactggacccagtggaacccaagccattcaaatccggaagtgctacttcagacaaccacaaggatgactgtccaggcaactcctagtagtacaacggaagaaacagctacccagaaggaacagtggtttggcaacagatggcatgagggatatcgccaaacacccaaagaagactcccattcgacaacagggacagctgcctcagctcataccagccatccaatgcaaggaaggacaacaccaagcccagaggacagttcctggactgatttcttcaacccaatctcacaccccatgggacgaggtcatcaagcaggaagaaggatggatatggactccagtcatagtataacgcttcagcctactgcaaatccaaacacaggtttggtggaagatttggacaggacaggacctctttcaatgacaacgcagcagagtaattctcagagcttctctacatcacatgaaggcttggaagaagataaagaccatccaacaacttctactctgacatcaagcagtaaggat

SEQ ID NO: 115620 - DNA, 722 bp, Homo sapiens
  Payload ID: 2564
  Gene Symbol: CD44
  Gene Name: CD44 molecule (Indian blood group)
  ENST ID: ENST00000526000
  CDS Start-End: 1-722
gatttgaatataacctgccgctttgcaggtgtattccacgtggagaaaaatggtcgctacagcatctctcggacggaggccgctgacctctgcaaggctttcaatagcaccttgcccacaatggcccagatggagaaagctctgagcatcggatttgagacctgcaggtatgggttcatagaagggcacgtggtgattccccggatccaccccaactccatctgtgcagcaaacaacacaggggtgtacatcctcacatccaacacctcccagtatgacacatattgcttcaatgcttcagctccacctgaagaagattgtacatcagtcacagacctgcccaatgcctttgatggaccaattaccataactattgttaaccgtgatggcacccgctatgtccagaaaggagaatacagaacgaatcctgaagacatctaccccagcaaccctactgatgatgacgtgagcagcggctcctccagtgaaaggagcagcacttcaggagataggaatgatgtcacaggtggaagaagagacccaaatcattctgaaggctcaactactttactggaaggttatacctctcattacccacacacgaaggaaagcaggaccttcatcccagtgacctcagctaagactgggtcctttggagttactgcagttactgttggagattccaactctaatgtcaatcgttccttatcaggagaccaaga

SEQ ID NO: 115621 - DNA, 543 bp, Homo sapiens
  Payload ID: 2564
  Gene Symbol: CD44
  Gene Name: CD44 molecule (Indian blood group)
  ENST ID: ENST00000527889
  CDS Start-End: 1-543
ctcggacggaggccgctgacctctgcaaggctttcaatagcaccttgcccacaatggcccagatggagaaagctctgagcatcggatttgagacctgcaggtatgggttcatagaagggcacgtggtgattccccggatccaccccaactccatctgtgcagcaaacaacacaggggtgtacatcctcacatccaacacctcccagtatgacacatattgcttcaatgcttcagctccacctgaagaagattgtacatcagtcacagacctgcccaatgcctttgatggaccaattaccataactattgttaaccgtgatggcacccgctatgtccagaaaggagaatacagaacgaatcctgaagacatctaccccagcaaccctactgatgatgacgtgagcagcggctcctccagtgaaaggagcagcacttcaggagatatggactccagtcatagtataacgcttcagcctactgcaaatccaaacacaggtttggtggaagatttggacaggacaggacctctttcaatgacaacgc

SEQ ID NO: 115622 - DNA, 705 bp, Homo sapiens
  Payload ID: 2564
  Gene Symbol: CD44
  Gene Name: CD44 molecule (Indian blood group)
  ENST ID: ENST00000525469
  CDS Start-End: 1-249
agcaaacacaacctctggtcctataaggacaccccaaattccaggtgtgggcagaagaaaaagctagtgatcaacagtggcaatggagctgtggaggacagaaagccaagtggactcaacggagaggccagcaagtctcaggaaatggtgcatttggtgaacaaggagtcgtcagaaactccagaccagtttatgacagctgatgagacaaggaacctgcagaatgtggacatgaagattggggtgtaacacctacaccattatcttggaaagaaacaaccgttggaaacataaccattacagggagctgggacacttaacagatgcaatgtgctactgattgtttcattgcgaatcttttttagcataaaattttctactctttttgttttttgtgttttgttctttaaagtcaggtccaatttgtaaaaacagcattgctttctgaaattagggcccaattaataatcagcaagaatttgatcgttccagttcccacttggaggcctttcatccctcgggtgtgctatggatggcttctaacaaaaactacacatatgtattcctgatcgccaacctttcccccaccagctaaggacatttcccagggttaatagggcctggtccctgggaggaaatttgaatgggtccattttgcccttccatagcctaatccctgggcattgctttccactgaggttgggg

SEQ ID NO: 115623 - DNA, 581 bp, Homo sapiens
  Payload ID: 2564
  Gene Symbol: CD44
  Gene Name: CD44 molecule (Indian blood group)
  ENST ID: ENST00000533222
  CDS Start-End: 1-581
atctaccccagcaaccctactgatgatgacgtgagcagcggctcctccagtgaaaggagcagcacttcaggaggttacatcttttacaccttttctactgtacaccccatcccagacgaagacagtccctggatcaccgacagcacagacagaatccctgctaccagtacgtcttcaaataccatctcagcaggctgggagccaaatgaagaaaatgaagatgaaagagacagacacctcagtttttctggatcaggcattgatgatgatgaagattttatctccagcaccaatatggactccagtcatagtataacgcttcagcctactgcaaatccaaacacaggtttggtggaagatttggacaggacaggacctctttcaatgacaacgcagcagagtaattctcagagcttctctacatcacatgaaggcttggaagaagataaagaccatccaacaacttctactctgacatcaagcaataggaatgatgtcacaggtggaagaagagacccaaatcattctgaaggctcaactactttactggaaggttatacctctcattacccacacacgaa

SEQ ID NO: 115624 - DNA, 1052 bp, Homo sapiens
  Payload ID: 2564
  Gene Symbol: CD44
  Gene Name: CD44 molecule (Indian blood group)
  ENST ID: ENST00000526025
  CDS Start-End: 423-659
agtgcgtctctgggcgcaggggccagtggggctcggaggcacaggcaccccgcgacactccaggttccccgacccacgtccctggcagccccgattatttacagcctcagcagagcacggggcgggggcagaggggcccgcccgggagggctgctacttcttaaaacctctgcgggctgcttagtcacagccccccttgcttgggtgtgtccttcgctcgctccctccctccgtcttaggtcactgttttcaacctcgaataaaaactgcagccaacttccgaggcagcctcattgcccagcggaccccagcctctgccaggttcggtccgccatcctcgtcccgtcctccgccggcccctgccccgcgcccagggatcctccagctcctttcgcccgcgccctccgttcgctccggacaccatggacaagttttggtggcacgcagcctggggactctgcctcgtgccgctgagcctggcgcagatcgatttgaatataacctgccgctttgcaggtgtattccacgtggagaaaaatggtcgctacagcatctctcggacggaggccgctgacctctgcaaggctttcaatagcaccttgcccacaatggcccagatggagaaagctctgagcatcggatttgagacctgcaggtaagagaccagcacccgaccactggggaaagctggcggcctgggaccaggcagctgggcttagaactggaaggctcctttcccacagctgaatggattattgcctaaggagtcaaccccacgtattaatttggccaagtcaatctgcaacctgtatgacaactggagtttaaagtcagctaaagacacctttgtgaatcatagagcgggaacccagaggaagccattaggggtcctctcggctggaatcctcttgtctaacctgcttccacagagctctcctggctttgaagaagctgcagtatcattgtcagaaccacaagaaaacataaaccaaataacagtgtttgaaataaatatgtggctgttagagtcttggccctgcagacttggatca

SEQ ID NO: 115625 - DNA, 352 bp, Homo sapiens
  Payload ID: 2564
  Gene Symbol: CD44
  Gene Name: CD44 molecule (Indian blood group)
  ENST ID: ENST00000524922
  CDS Start-End: 1-352
cccagacgaagacagtccctggatcaccgacagcacagacagaatccctgctaccagctgggagccaaatgaagaaaatgaagatgaaagagacagacacctcagtttttctggatcaggcattgatgatgatgaagattttatctccagcaccatttcaaccacaccacgggcttttgaccacacaaaacagaaccaggactggacccagtggaacccaagccattcaaatccggaagtgctacttcagacaaccacaaggatgactgatgtagacagaaatggcaccactgcttatgaaggaaactggaacccagaagcacaccctcccctcattcaccatgagcatcat

SEQ ID NO: 115626 - DNA, 749 bp, Homo sapiens
  Payload ID: 2564
  Gene Symbol: CD44
  Gene Name: CD44 molecule (Indian blood group)
  ENST ID: ENST00000531110
  CDS Start-End: 1-749
gaagattgtacatcagtcacagacctgcccaatgcctttgatggaccaattaccataactattgttaaccgtgatggcacccgctatgtccagaaaggagaatacagaacgaatcctgaagacatctaccccagcaaccctactgatgatgacgtgagcagcggctcctccagtgaaaggagcagcacttcaggaggttacatcttttacaccttttctactgtacaccccatcccagacgaagacagtccctggatcaccgacagcacagacagaatccctgctaccatccaggcaactcctagtagtacaacggaagaaacagctacccagaaggaacagtggtttggcaacagatggcatgagggatatcgccaaacacccaaagaagactcccattcgacaacagggacagctgcagcctcagctcataccagccatccaatgcaaggaaggacaacaccaagcccagaggacagttcctggactgatttcttcaacccaatctcacaccccatgggacgaggtcatcaagcaggaagaaggatggatatggactccagtcatagtataacgcttcagcctactgcaaatccaaacacaggtttggtggaagatttggacaggacaggacctctttcaatgacaacgcagcagagtaattctcagagcttctctacatcacatgaaggcttggaagaagataaagaccatccaacaacttctactctgacatcaagcagtaagga

SEQ ID NO: 115627 - DNA, 728 bp, Homo sapiens
  Payload ID: 2564
  Gene Symbol: CD44
  Gene Name: CD44 molecule (Indian blood group)
  ENST ID: ENST00000525685
  CDS Start-End: 1-728
cagacctgcccaatgcctttgatggaccaattaccataactattgttaaccgtgatggcacccgctatgtccagaaaggagaatacagaacgaatcctgaagacatctaccccagcaaccctactgatgatgacgtgagcagcggctcctccagtgaaaggagcagcacttcaggaggttacatcttttacaccttttctactgtacaccccatcccagacgaagacagtccctggatcaccgacagcacagacagaatccctgctaccactttgatgagcactagtgctacagcaactgagacagcaaccaagaggcaagaaacctgggattggttttcatggttgtttctaccatcagagtcaaagaatcatcttcacacaacaacacaaatggctggtacgtcttcaaataccatctcagcaggctgggagccaaatgaagaaaatgaagatgaaagagacagacacctcagtttttctggatcaggcattgatgatgatgaagattttatctccagcaccaatatggactccagtcatagtataacgcttcagcctactgcaaatccaaacacaggtttggtggaagatttggacaggacaggacctctttcaatgacaacgcagcagagtaattctcagagcttctctacatcacatgaaggcttggaagaagataaagaccatccaacaacttctactctgacatcaagcagtaaggattat

SEQ ID NO: 115628 - DNA, 560 bp, Homo sapiens
  Payload ID: 2564
  Gene Symbol: CD44
  Gene Name: CD44 molecule (Indian blood group)
  ENST ID: ENST00000525688
  CDS Start-End: 1-560
agaacgaatcctgaagacatctaccccagcaaccctactgatgatgacgtgagcagcggctcctccagtgaaaggagcagcacttcaggaggttacatcttttacaccttttctactgtacaccccatcccagacgaagacagtccctggatcaccgacagcacagacagaatccctgctaccagtacgtcttcaaataccatctcagcaggctgggagccaaatgaagaaaatgaagatgaaagagacagacacctcagtttttctggatcaggcattgatgatgatgaagattttatctccagcaccagagaccaagacacattccaccccagtggggggtcccataccactcatggatctgaatcagatggacactcacatgggagtcaagaaggtggagcaaacacaacctctggtcctataaggacaccccaaattccagaatggctgatcatcttggcatccctcttggccttggctttgattcttgcagtttgcattgcagtcaacagtcgaagaaggtgtgggcagaagaaaaagctagtgatcaacagtgg

SEQ ID NO: 115629 - DNA, 3278 bp, Homo sapiens
  Payload ID: 2565
  Gene Symbol: CD46
  Gene Name: CD46 molecule, complement regulatory protein
  Uniprot ID: P15529
  ENST ID: ENST00000322875
  CDS Start-End: 157-1356
gctcgggccacgcccacctgtcctgcagcactggatgctttgtgagttggggattgttgcgtcccatatctggacccagaagggacttccctgctcggctggctctcggtttctctgctttcctccggagaaataacagcgtcttccgcgccgcgcatggagcctcccggccgccgcgagtgtccctttccttcctggcgctttcctgggttgcttctggcggccatggtgttgctgctgtactccttctccgatgcctgtgaggagccaccaacatttgaagctatggagctcattggtaaaccaaaaccctactatgagattggtgaacgagtagattataagtgtaaaaaaggatacttctatatacctcctcttgccacccatactatttgtgatcggaatcatacatggctacctgtctcagatgacgcctgttatagagaaacatgtccatatatacgggatcctttaaatggccaagcagtccctgcaaatgggacttacgagtttggttatcagatgcactttatttgtaatgagggttattacttaattggtgaagaaattctatattgtgaacttaaaggatcagtagcaatttggagcggtaagcccccaatatgtgaaaaggttttgtgtacaccacctccaaaaataaaaaatggaaaacacacctttagtgaagtagaagtatttgagtatcttgatgcagtaacttatagttgtgatcctgcacctggaccagatccattttcacttattggagagagcacgatttattgtggtgacaattcagtgtggagtcgtgctgctccagagtgtaaagtggtcaaatgtcgatttccagtagtcgaaaatggaaaacagatatcaggatttggaaaaaaattttactacaaagcaacagttatgtttgaatgcgataagggtttttacctcgatggcagcgacacaattgtctgtgacagtaacagtacttgggatcccccagttccaaagtgtcttaaagtgctgcctccatctagtacaaaacctccagctttgagtcattcagtgtcgacttcttccactacaaaatctccagcgtccagtgcctcaggtcctaggcctacttacaagcctccagtctcaaattatccaggatatcctaaacctgaggaaggaatacttgacagtttggatgtttgggtcattgctgtgattgttattgccatagttgttggagttgcagtaatttgtgttgtcccgtacagatatcttcaaaggaggaagaagaaagggaaagcagatggtggagctgaatatgccacttaccagactaaatcaaccactccagcagagcagagaggctgaatagattccacaacctggtttgccagttcatcttttgactctattaaaatcttcaatagttgttattctgtagtttcactctcatgagtgcaactgtggcttagctaatattgcaatgtggcttgaatgtaggtagcatcctttgatgcttctttgaaacttgtatgaatttgggtatgaacagattgcctgctttcccttaaataacacttagatttattggaccagtcagcacagcatgcctggttgtattaaagcagggatatgctgtattttataaaattggcaaaattagagaaatatagttcacaatgaaattatattttctttgtaaagaaagtggcttgaaatcttttttgttcaaagattaatgccaactcttaagattattctttcaccaactatagaatgtattttatatatcgttcattgtaaaaagcccttaaaaatatgtgtatactactttggctcttgtgcataaaaacaagaacactgaaaattgggaatatgcacaaacttggcttctttaaccaagaatattattggaaaattctctaaaagttaatagggtaaattctctattttttgtaatgtgttcggtgatttcagaaagctagaaagtgtatgtgtggcatttgttttcactttttaaaacatccctaactgatcgaatatatcagtaatttcagaatcagatgcatcctttcataagaagtgagaggactctgacagccataacaggagtgccacttcatggtgcgaagtgaacactgtagtcttgttgttttcccaaagagaactccgtatgttctcttaggttgagtaacccactctgaattctggttacatgtgtttttctctccctccttaaataaagagaggggttaaacatgccctctaaaagtaggtggttttgaagagaataaattcatcagataacctcaagtcacatgagaatcttagtccatttacattgccttggctagtaaaagccatctatgtatatgtcttacctcatctcctaaaaggcagagtacaaagtaagccatgtatctcaggaaggtaacttcattttgtctatttgctgttgattgtaccaagggatggaagaagtaaatatagctcaggtagcactttatactcaggcagatctcagccctctactgagtcccttagccaagcagtttctttcaaagaagccagcaggcgaaaagcagggactgccactgcatttcatatcacactgttaaaagttgtgttttgaaattttatgtttagttgcacaaattgggccaaagaaacattgccttgaggaagatatgattggaaaatcaagagtgtagaagaataaatactgttttactgtccaaagacatgtttatagtgctctgtaaatgttcctttcctttgtagtctctggcaagatgctttaggaagataaaagtttgaggagaacaaacaggaattctgaattaagcacagagttgaagtttatacccgtttcacatgcttttcaagaatgtcgcaattactaagaagcagataatggtgttttttagaaacctaattgaagtatattcaaccaaatactttaatgtataaaataaatattatacaatatacttgtatagcagtttctgcttcacatttgattttttcaaatttaatatttatattagagatctatatatgtataaatatgtattttgtcaaatttgttacttaaatatatagagaccagttttctctggaagtttgtttaaatgacagaagcgtatatgaattcaagaaaatttaagctgcaaaaatgtatttgctataaaatgagaagtctcactgatagaggttctttattgctcattttttaaaaaatggactcttgaaatctgttaaaataaaattgtacatttggagatgtttca

SEQ ID NO: 115630 - DNA, 3124 bp, Homo sapiens
  Payload ID: 2565
  Gene Symbol: CD46
  Gene Name: CD46 molecule, complement regulatory protein
  Uniprot ID: P15529
  ENST ID: ENST00000322918
  CDS Start-End: 157-1206
gctcgggccacgcccacctgtcctgcagcactggatgctttgtgagttggggattgttgcgtcccatatctggacccagaagggacttccctgctcggctggctctcggtttctctgctttcctccggagaaataacagcgtcttccgcgccgcgcatggagcctcccggccgccgcgagtgtccctttccttcctggcgctttcctgggttgcttctggcggccatggtgttgctgctgtactccttctccgatgcctgtgaggagccaccaacatttgaagctatggagctcattggtaaaccaaaaccctactatgagattggtgaacgagtagattataagtgtaaaaaaggatacttctatatacctcctcttgccacccatactatttgtgatcggaatcatacatggctacctgtctcagatgacgcctgttatagagaaacatgtccatatatacgggatcctttaaatggccaagcagtccctgcaaatgggacttacgagtttggttatcagatgcactttatttgtaatgagggttattacttaattggtgaagaaattctatattgtgaacttaaaggatcagtagcaatttggagcggtaagcccccaatatgtgaaaaggttttgtgtacaccacctccaaaaataaaaaatggaaaacacacctttagtgaagtagaagtatttgagtatcttgatgcagtaacttatagttgtgatcctgcacctggaccagatccattttcacttattggagagagcacgatttattgtggtgacaattcagtgtggagtcgtgctgctccagagtgtaaagtggtcaaatgtcgatttccagtagtcgaaaatggaaaacagatatcaggatttggaaaaaaattttactacaaagcaacagttatgtttgaatgcgataagggtttttacctcgatggcagcgacacaattgtctgtgacagtaacagtacttgggatcccccagttccaaagtgtcttaaaggtcctaggcctacttacaagcctccagtctcaaattatccaggatatcctaaacctgaggaaggaatacttgacagtttggatgtttgggtcattgctgtgattgttattgccataggaaagcagatggtggagctgaatatgccacttaccagactaaatcaaccactccagcagagcagagaggctgaatagattccacaacctggtttgccagttcatcttttgactctattaaaatcttcaatagttgttattctgtagtttcactctcatgagtgcaactgtggcttagctaatattgcaatgtggcttgaatgtaggtagcatcctttgatgcttctttgaaacttgtatgaatttgggtatgaacagattgcctgctttcccttaaataacacttagatttattggaccagtcagcacagcatgcctggttgtattaaagcagggatatgctgtattttataaaattggcaaaattagagaaatatagttcacaatgaaattatattttctttgtaaagaaagtggcttgaaatcttttttgttcaaagattaatgccaactcttaagattattctttcaccaactatagaatgtattttatatatcgttcattgtaaaaagcccttaaaaatatgtgtatactactttggctcttgtgcataaaaacaagaacactgaaaattgggaatatgcacaaacttggcttctttaaccaagaatattattggaaaattctctaaaagttaatagggtaaattctctattttttgtaatgtgttcggtgatttcagaaagctagaaagtgtatgtgtggcatttgttttcactttttaaaacatccctaactgatcgaatatatcagtaatttcagaatcagatgcatcctttcataagaagtgagaggactctgacagccataacaggagtgccacttcatggtgcgaagtgaacactgtagtcttgttgttttcccaaagagaactccgtatgttctcttaggttgagtaacccactctgaattctggttacatgtgtttttctctccctccttaaataaagagaggggttaaacatgccctctaaaagtaggtggttttgaagagaataaattcatcagataacctcaagtcacatgagaatcttagtccatttacattgccttggctagtaaaagccatctatgtatatgtcttacctcatctcctaaaaggcagagtacaaagtaagccatgtatctcaggaaggtaacttcattttgtctatttgctgttgattgtaccaagggatggaagaagtaaatatagctcaggtagcactttatactcaggcagatctcagccctctactgagtcccttagccaagcagtttctttcaaagaagccagcaggcgaaaagcagggactgccactgcatttcatatcacactgttaaaagttgtgttttgaaattttatgtttagttgcacaaattgggccaaagaaacattgccttgaggaagatatgattggaaaatcaagagtgtagaagaataaatactgttttactgtccaaagacatgtttatagtgctctgtaaatgttcctttcctttgtagtctctggcaagatgctttaggaagataaaagtttgaggagaacaaacaggaattctgaattaagcacagagttgaagtttatacccgtttcacatgcttttcaagaatgtcgcaattactaagaagcagataatggtgttttttagaaacctaattgaagtatattcaaccaaatactttaatgtataaaataaatattatacaatatacttgtatagcagtttctgcttcacatttgattttttcaaatttaatatttatattagagatctatatatgtataaatatgtattttgtcaaatttgttacttaaatatatagagaccagttttctctggaagtttgtttaaatgacagaagcgtatatgaattcaagaaaatttaagctgcaaaaatgtatttgctataaaatgagaagtctcactgatagaggttctttattgctcattttttaaaaaatggactcttgaaatctgttaaaataaaattgtacatttggagatgtttca

SEQ ID NO: 115631 - DNA, 3233 bp, Homo sapiens
  Payload ID: 2565
  Gene Symbol: CD46
  Gene Name: CD46 molecule, complement regulatory protein
  Uniprot ID: P15529
  ENST ID: ENST00000354848
  CDS Start-End: 157-1311
gctcgggccacgcccacctgtcctgcagcactggatgctttgtgagttggggattgttgcgtcccatatctggacccagaagggacttccctgctcggctggctctcggtttctctgctttcctccggagaaataacagcgtcttccgcgccgcgcatggagcctcccggccgccgcgagtgtccctttccttcctggcgctttcctgggttgcttctggcggccatggtgttgctgctgtactccttctccgatgcctgtgaggagccaccaacatttgaagctatggagctcattggtaaaccaaaaccctactatgagattggtgaacgagtagattataagtgtaaaaaaggatacttctatatacctcctcttgccacccatactatttgtgatcggaatcatacatggctacctgtctcagatgacgcctgttatagagaaacatgtccatatatacgggatcctttaaatggccaagcagtccctgcaaatgggacttacgagtttggttatcagatgcactttatttgtaatgagggttattacttaattggtgaagaaattctatattgtgaacttaaaggatcagtagcaatttggagcggtaagcccccaatatgtgaaaaggttttgtgtacaccacctccaaaaataaaaaatggaaaacacacctttagtgaagtagaagtatttgagtatcttgatgcagtaacttatagttgtgatcctgcacctggaccagatccattttcacttattggagagagcacgatttattgtggtgacaattcagtgtggagtcgtgctgctccagagtgtaaagtggtcaaatgtcgatttccagtagtcgaaaatggaaaacagatatcaggatttggaaaaaaattttactacaaagcaacagttatgtttgaatgcgataagggtttttacctcgatggcagcgacacaattgtctgtgacagtaacagtacttgggatcccccagttccaaagtgtcttaaagtgtcgacttcttccactacaaaatctccagcgtccagtgcctcaggtcctaggcctacttacaagcctccagtctcaaattatccaggatatcctaaacctgaggaaggaatacttgacagtttggatgtttgggtcattgctgtgattgttattgccatagttgttggagttgcagtaatttgtgttgtcccgtacagatatcttcaaaggaggaagaagaaagggaaagcagatggtggagctgaatatgccacttaccagactaaatcaaccactccagcagagcagagaggctgaatagattccacaacctggtttgccagttcatcttttgactctattaaaatcttcaatagttgttattctgtagtttcactctcatgagtgcaactgtggcttagctaatattgcaatgtggcttgaatgtaggtagcatcctttgatgcttctttgaaacttgtatgaatttgggtatgaacagattgcctgctttcccttaaataacacttagatttattggaccagtcagcacagcatgcctggttgtattaaagcagggatatgctgtattttataaaattggcaaaattagagaaatatagttcacaatgaaattatattttctttgtaaagaaagtggcttgaaatcttttttgttcaaagattaatgccaactcttaagattattctttcaccaactatagaatgtattttatatatcgttcattgtaaaaagcccttaaaaatatgtgtatactactttggctcttgtgcataaaaacaagaacactgaaaattgggaatatgcacaaacttggcttctttaaccaagaatattattggaaaattctctaaaagttaatagggtaaattctctattttttgtaatgtgttcggtgatttcagaaagctagaaagtgtatgtgtggcatttgttttcactttttaaaacatccctaactgatcgaatatatcagtaatttcagaatcagatgcatcctttcataagaagtgagaggactctgacagccataacaggagtgccacttcatggtgcgaagtgaacactgtagtcttgttgttttcccaaagagaactccgtatgttctcttaggttgagtaacccactctgaattctggttacatgtgtttttctctccctccttaaataaagagaggggttaaacatgccctctaaaagtaggtggttttgaagagaataaattcatcagataacctcaagtcacatgagaatcttagtccatttacattgccttggctagtaaaagccatctatgtatatgtcttacctcatctcctaaaaggcagagtacaaagtaagccatgtatctcaggaaggtaacttcattttgtctatttgctgttgattgtaccaagggatggaagaagtaaatatagctcaggtagcactttatactcaggcagatctcagccctctactgagtcccttagccaagcagtttctttcaaagaagccagcaggcgaaaagcagggactgccactgcatttcatatcacactgttaaaagttgtgttttgaaattttatgtttagttgcacaaattgggccaaagaaacattgccttgaggaagatatgattggaaaatcaagagtgtagaagaataaatactgttttactgtccaaagacatgtttatagtgctctgtaaatgttcctttcctttgtagtctctggcaagatgctttaggaagataaaagtttgaggagaacaaacaggaattctgaattaagcacagagttgaagtttatacccgtttcacatgcttttcaagaatgtcgcaattactaagaagcagataatggtgttttttagaaacctaattgaagtatattcaaccaaatactttaatgtataaaataaatattatacaatatacttgtatagcagtttctgcttcacatttgattttttcaaatttaatatttatattagagatctatatatgtataaatatgtattttgtcaaatttgttacttaaatatatagagaccagttttctctggaagtttgtttaaatgacagaagcgtatatgaattcaagaaaatttaagctgcaaaaatgtatttgctataaaatgagaagtctcactgatagaggttctttattgctcattttttaaaaaatggactcttgaaatctgttaaaataaaattgtacatttggagatgtttca

SEQ ID NO: 115632 - DNA, 3188 bp, Homo sapiens
  Payload ID: 2565
  Gene Symbol: CD46
  Gene Name: CD46 molecule, complement regulatory protein
  Uniprot ID: P15529
  ENST ID: ENST00000357714
  CDS Start-End: 157-1266
gctcgggccacgcccacctgtcctgcagcactggatgctttgtgagttggggattgttgcgtcccatatctggacccagaagggacttccctgctcggctggctctcggtttctctgctttcctccggagaaataacagcgtcttccgcgccgcgcatggagcctcccggccgccgcgagtgtccctttccttcctggcgctttcctgggttgcttctggcggccatggtgttgctgctgtactccttctccgatgcctgtgaggagccaccaacatttgaagctatggagctcattggtaaaccaaaaccctactatgagattggtgaacgagtagattataagtgtaaaaaaggatacttctatatacctcctcttgccacccatactatttgtgatcggaatcatacatggctacctgtctcagatgacgcctgttatagagaaacatgtccatatatacgggatcctttaaatggccaagcagtccctgcaaatgggacttacgagtttggttatcagatgcactttatttgtaatgagggttattacttaattggtgaagaaattctatattgtgaacttaaaggatcagtagcaatttggagcggtaagcccccaatatgtgaaaaggttttgtgtacaccacctccaaaaataaaaaatggaaaacacacctttagtgaagtagaagtatttgagtatcttgatgcagtaacttatagttgtgatcctgcacctggaccagatccattttcacttattggagagagcacgatttattgtggtgacaattcagtgtggagtcgtgctgctccagagtgtaaagtggtcaaatgtcgatttccagtagtcgaaaatggaaaacagatatcaggatttggaaaaaaattttactacaaagcaacagttatgtttgaatgcgataagggtttttacctcgatggcagcgacacaattgtctgtgacagtaacagtacttgggatcccccagttccaaagtgtcttaaaggtcctaggcctacttacaagcctccagtctcaaattatccaggatatcctaaacctgaggaaggaatacttgacagtttggatgtttgggtcattgctgtgattgttattgccatagttgttggagttgcagtaatttgtgttgtcccgtacagatatcttcaaaggaggaagaagaaagggaaagcagatggtggagctgaatatgccacttaccagactaaatcaaccactccagcagagcagagaggctgaatagattccacaacctggtttgccagttcatcttttgactctattaaaatcttcaatagttgttattctgtagtttcactctcatgagtgcaactgtggcttagctaatattgcaatgtggcttgaatgtaggtagcatcctttgatgcttctttgaaacttgtatgaatttgggtatgaacagattgcctgctttcccttaaataacacttagatttattggaccagtcagcacagcatgcctggttgtattaaagcagggatatgctgtattttataaaattggcaaaattagagaaatatagttcacaatgaaattatattttctttgtaaagaaagtggcttgaaatcttttttgttcaaagattaatgccaactcttaagattattctttcaccaactatagaatgtattttatatatcgttcattgtaaaaagcccttaaaaatatgtgtatactactttggctcttgtgcataaaaacaagaacactgaaaattgggaatatgcacaaacttggcttctttaaccaagaatattattggaaaattctctaaaagttaatagggtaaattctctattttttgtaatgtgttcggtgatttcagaaagctagaaagtgtatgtgtggcatttgttttcactttttaaaacatccctaactgatcgaatatatcagtaatttcagaatcagatgcatcctttcataagaagtgagaggactctgacagccataacaggagtgccacttcatggtgcgaagtgaacactgtagtcttgttgttttcccaaagagaactccgtatgttctcttaggttgagtaacccactctgaattctggttacatgtgtttttctctccctccttaaataaagagaggggttaaacatgccctctaaaagtaggtggttttgaagagaataaattcatcagataacctcaagtcacatgagaatcttagtccatttacattgccttggctagtaaaagccatctatgtatatgtcttacctcatctcctaaaaggcagagtacaaagtaagccatgtatctcaggaaggtaacttcattttgtctatttgctgttgattgtaccaagggatggaagaagtaaatatagctcaggtagcactttatactcaggcagatctcagccctctactgagtcccttagccaagcagtttctttcaaagaagccagcaggcgaaaagcagggactgccactgcatttcatatcacactgttaaaagttgtgttttgaaattttatgtttagttgcacaaattgggccaaagaaacattgccttgaggaagatatgattggaaaatcaagagtgtagaagaataaatactgttttactgtccaaagacatgtttatagtgctctgtaaatgttcctttcctttgtagtctctggcaagatgctttaggaagataaaagtttgaggagaacaaacaggaattctgaattaagcacagagttgaagtttatacccgtttcacatgcttttcaagaatgtcgcaattactaagaagcagataatggtgttttttagaaacctaattgaagtatattcaaccaaatactttaatgtataaaataaatattatacaatatacttgtatagcagtttctgcttcacatttgattttttcaaatttaatatttatattagagatctatatatgtataaatatgtattttgtcaaatttgttacttaaatatatagagaccagttttctctggaagtttgtttaaatgacagaagcgtatatgaattcaagaaaatttaagctgcaaaaatgtatttgctataaaatgagaagtctcactgatagaggttctttattgctcattttttaaaaaatggactcttgaaatctgttaaaataaaattgtacatttggagatgtttca

SEQ ID NO: 115633 - DNA, 3371 bp, Homo sapiens
  Payload ID: 2565
  Gene Symbol: CD46
  Gene Name: CD46 molecule, complement regulatory protein
  Uniprot ID: P15529
  ENST ID: ENST00000358170
  CDS Start-End: 157-1335
gctcgggccacgcccacctgtcctgcagcactggatgctttgtgagttggggattgttgcgtcccatatctggacccagaagggacttccctgctcggctggctctcggtttctctgctttcctccggagaaataacagcgtcttccgcgccgcgcatggagcctcccggccgccgcgagtgtccctttccttcctggcgctttcctgggttgcttctggcggccatggtgttgctgctgtactccttctccgatgcctgtgaggagccaccaacatttgaagctatggagctcattggtaaaccaaaaccctactatgagattggtgaacgagtagattataagtgtaaaaaaggatacttctatatacctcctcttgccacccatactatttgtgatcggaatcatacatggctacctgtctcagatgacgcctgttatagagaaacatgtccatatatacgggatcctttaaatggccaagcagtccctgcaaatgggacttacgagtttggttatcagatgcactttatttgtaatgagggttattacttaattggtgaagaaattctatattgtgaacttaaaggatcagtagcaatttggagcggtaagcccccaatatgtgaaaaggttttgtgtacaccacctccaaaaataaaaaatggaaaacacacctttagtgaagtagaagtatttgagtatcttgatgcagtaacttatagttgtgatcctgcacctggaccagatccattttcacttattggagagagcacgatttattgtggtgacaattcagtgtggagtcgtgctgctccagagtgtaaagtggtcaaatgtcgatttccagtagtcgaaaatggaaaacagatatcaggatttggaaaaaaattttactacaaagcaacagttatgtttgaatgcgataagggtttttacctcgatggcagcgacacaattgtctgtgacagtaacagtacttgggatcccccagttccaaagtgtcttaaagtgctgcctccatctagtacaaaacctccagctttgagtcattcagtgtcgacttcttccactacaaaatctccagcgtccagtgcctcaggtcctaggcctacttacaagcctccagtctcaaattatccaggatatcctaaacctgaggaaggaatacttgacagtttggatgtttgggtcattgctgtgattgttattgccatagttgttggagttgcagtaatttgtgttgtcccgtacagatatcttcaaaggaggaagaagaaaggcacatacctaactgatgagacccacagagaagtaaaatttacttctctctgagaaggagagatgagagaaaggtttgcttttatcattaaaaggaaagcagatggtggagctgaatatgccacttaccagactaaatcaaccactccagcagagcagagaggctgaatagattccacaacctggtttgccagttcatcttttgactctattaaaatcttcaatagttgttattctgtagtttcactctcatgagtgcaactgtggcttagctaatattgcaatgtggcttgaatgtaggtagcatcctttgatgcttctttgaaacttgtatgaatttgggtatgaacagattgcctgctttcccttaaataacacttagatttattggaccagtcagcacagcatgcctggttgtattaaagcagggatatgctgtattttataaaattggcaaaattagagaaatatagttcacaatgaaattatattttctttgtaaagaaagtggcttgaaatcttttttgttcaaagattaatgccaactcttaagattattctttcaccaactatagaatgtattttatatatcgttcattgtaaaaagcccttaaaaatatgtgtatactactttggctcttgtgcataaaaacaagaacactgaaaattgggaatatgcacaaacttggcttctttaaccaagaatattattggaaaattctctaaaagttaatagggtaaattctctattttttgtaatgtgttcggtgatttcagaaagctagaaagtgtatgtgtggcatttgttttcactttttaaaacatccctaactgatcgaatatatcagtaatttcagaatcagatgcatcctttcataagaagtgagaggactctgacagccataacaggagtgccacttcatggtgcgaagtgaacactgtagtcttgttgttttcccaaagagaactccgtatgttctcttaggttgagtaacccactctgaattctggttacatgtgtttttctctccctccttaaataaagagaggggttaaacatgccctctaaaagtaggtggttttgaagagaataaattcatcagataacctcaagtcacatgagaatcttagtccatttacattgccttggctagtaaaagccatctatgtatatgtcttacctcatctcctaaaaggcagagtacaaagtaagccatgtatctcaggaaggtaacttcattttgtctatttgctgttgattgtaccaagggatggaagaagtaaatatagctcaggtagcactttatactcaggcagatctcagccctctactgagtcccttagccaagcagtttctttcaaagaagccagcaggcgaaaagcagggactgccactgcatttcatatcacactgttaaaagttgtgttttgaaattttatgtttagttgcacaaattgggccaaagaaacattgccttgaggaagatatgattggaaaatcaagagtgtagaagaataaatactgttttactgtccaaagacatgtttatagtgctctgtaaatgttcctttcctttgtagtctctggcaagatgctttaggaagataaaagtttgaggagaacaaacaggaattctgaattaagcacagagttgaagtttatacccgtttcacatgcttttcaagaatgtcgcaattactaagaagcagataatggtgttttttagaaacctaattgaagtatattcaaccaaatactttaatgtataaaataaatattatacaatatacttgtatagcagtttctgcttcacatttgattttttcaaatttaatatttatattagagatctatatatgtataaatatgtattttgtcaaatttgttacttaaatatatagagaccagttttctctggaagtttgtttaaatgacagaagcgtatatgaattcaagaaaatttaagctgcaaaaatgtatttgctataaaatgagaagtctcactgatagaggttctttattgctcattttttaaaaaatggactcttgaaatctgttaaaataaaattgtacatttggagatgtttca

SEQ ID NO: 115634 - DNA, 3081 bp, Homo sapiens
  Payload ID: 2565
  Gene Symbol: CD46
  Gene Name: CD46 molecule, complement regulatory protein
  Uniprot ID: P15529
  ENST ID: ENST00000360212
  CDS Start-End: 99-1166
gcgtcccatatctggacccagaagggacttccctgctcggctggctctcggtttctctgctttcctccggagaaataacagcgtcttccgcgccgcgcatggagcctcccggccgccgcgagtgtccctttccttcctggcgctttcctgggttgcttctggcggccatggtgttgctgctgtactccttctccgatgcctgtgaggagccaccaacatttgaagctatggagctcattggtaaaccaaaaccctactatgagattggtgaacgagtagattataagtgtaaaaaaggatacttctatatacctcctcttgccacccatactatttgtgatcggaatcatacatggctacctgtctcagatgacgcctgttatagagaaacatgtccatatatacgggatcctttaaatggccaagcagtccctgcaaatgggacttacgagtttggttatcagatgcactttatttgtaatgagggttattacttaattggtgaagaaattctatattgtgaacttaaaggatcagtagcaatttggagcggtaagcccccaatatgtgaaaaggttttgtgtacaccacctccaaaaataaaaaatggaaaacacacctttagtgaagtagaagtatttgagtatcttgatgcagtaacttatagttgtgatcctgcacctggaccagatccattttcacttattggagagagcacgatttattgtggtgacaattcagtgtggagtcgtgctgctccagagtgtaaagtggtcaaatgtcgatttccagtagtcgaaaatggaaaacagatatcaggatttggaaaaaaattttactacaaagcaacagttatgtttgaatgcgataagggtttttacctcgatggcagcgacacaattgtctgtgacagtaacagtacttgggatcccccagttccaaagtgtcttaaaggatatcctaaacctgaggaaggaatacttgacagtttggatgtttgggtcattgctgtgattgttattgccatagttgttggagttgcagtaatttgtgttgtcccgtacagatatcttcaaaggaggaagaagaaagggaaagcagatggtggagctgaatatgccacttaccagactaaatcaaccactccagcagagcagagaggctgaatagattccacaacctggtttgccagttcatcttttgactctattaaaatcttcaatagttgttattctgtagtttcactctcatgagtgcaactgtggcttagctaatattgcaatgtggcttgaatgtaggtagcatcctttgatgcttctttgaaacttgtatgaatttgggtatgaacagattgcctgctttcccttaaataacacttagatttattggaccagtcagcacagcatgcctggttgtattaaagcagggatatgctgtattttataaaattggcaaaattagagaaatatagttcacaatgaaattatattttctttgtaaagaaagtggcttgaaatcttttttgttcaaagattaatgccaactcttaagattattctttcaccaactatagaatgtattttatatatcgttcattgtaaaaagcccttaaaaatatgtgtatactactttggctcttgtgcataaaaacaagaacactgaaaattgggaatatgcacaaacttggcttctttaaccaagaatattattggaaaattctctaaaagttaatagggtaaattctctattttttgtaatgtgttcggtgatttcagaaagctagaaagtgtatgtgtggcatttgttttcactttttaaaacatccctaactgatcgaatatatcagtaatttcagaatcagatgcatcctttcataagaagtgagaggactctgacagccataacaggagtgccacttcatggtgcgaagtgaacactgtagtcttgttgttttcccaaagagaactccgtatgttctcttaggttgagtaacccactctgaattctggttacatgtgtttttctctccctccttaaataaagagaggggttaaacatgccctctaaaagtaggtggttttgaagagaataaattcatcagataacctcaagtcacatgagaatcttagtccatttacattgccttggctagtaaaagccatctatgtatatgtcttacctcatctcctaaaaggcagagtacaaagtaagccatgtatctcaggaaggtaacttcattttgtctatttgctgttgattgtaccaagggatggaagaagtaaatatagctcaggtagcactttatactcaggcagatctcagccctctactgagtcccttagccaagcagtttctttcaaagaagccagcaggcgaaaagcagggactgccactgcatttcatatcacactgttaaaagttgtgttttgaaattttatgtttagttgcacaaattgggccaaagaaacattgccttgaggaagatatgattggaaaatcaagagtgtagaagaataaatactgttttactgtccaaagacatgtttatagtgctctgtaaatgttcctttcctttgtagtctctggcaagatgctttaggaagataaaagtttgaggagaacaaacaggaattctgaattaagcacagagttgaagtttatacccgtttcacatgcttttcaagaatgtcgcaattactaagaagcagataatggtgttttttagaaacctaattgaagtatattcaaccaaatactttaatgtataaaataaatattatacaatatacttgtatagcagtttctgcttcacatttgattttttcaaatttaatatttatattagagatctatatatgtataaatatgtattttgtcaaatttgttacttaaatatatagagaccagttttctctggaagtttgtttaaatgacagaagcgtatatgaattcaagaaaatttaagctgcaaaaatgtatttgctataaaatgagaagtctcactgatagaggttctttattgctcattttttaaaaaatggactcttgaaatctgttaaaataaaattgtacatttggaga

SEQ ID NO: 115635 - DNA, 3281 bp, Homo sapiens
  Payload ID: 2565
  Gene Symbol: CD46
  Gene Name: CD46 molecule, complement regulatory protein
  Uniprot ID: P15529
  ENST ID: ENST00000367041
  CDS Start-End: 157-1245
gctcgggccacgcccacctgtcctgcagcactggatgctttgtgagttggggattgttgcgtcccatatctggacccagaagggacttccctgctcggctggctctcggtttctctgctttcctccggagaaataacagcgtcttccgcgccgcgcatggagcctcccggccgccgcgagtgtccctttccttcctggcgctttcctgggttgcttctggcggccatggtgttgctgctgtactccttctccgatgcctgtgaggagccaccaacatttgaagctatggagctcattggtaaaccaaaaccctactatgagattggtgaacgagtagattataagtgtaaaaaaggatacttctatatacctcctcttgccacccatactatttgtgatcggaatcatacatggctacctgtctcagatgacgcctgttatagagaaacatgtccatatatacgggatcctttaaatggccaagcagtccctgcaaatgggacttacgagtttggttatcagatgcactttatttgtaatgagggttattacttaattggtgaagaaattctatattgtgaacttaaaggatcagtagcaatttggagcggtaagcccccaatatgtgaaaaggttttgtgtacaccacctccaaaaataaaaaatggaaaacacacctttagtgaagtagaagtatttgagtatcttgatgcagtaacttatagttgtgatcctgcacctggaccagatccattttcacttattggagagagcacgatttattgtggtgacaattcagtgtggagtcgtgctgctccagagtgtaaagtggtcaaatgtcgatttccagtagtcgaaaatggaaaacagatatcaggatttggaaaaaaattttactacaaagcaacagttatgtttgaatgcgataagggtttttacctcgatggcagcgacacaattgtctgtgacagtaacagtacttgggatcccccagttccaaagtgtcttaaaggtcctaggcctacttacaagcctccagtctcaaattatccaggatatcctaaacctgaggaaggaatacttgacagtttggatgtttgggtcattgctgtgattgttattgccatagttgttggagttgcagtaatttgtgttgtcccgtacagatatcttcaaaggaggaagaagaaaggcacatacctaactgatgagacccacagagaagtaaaatttacttctctctgagaaggagagatgagagaaaggtttgcttttatcattaaaaggaaagcagatggtggagctgaatatgccacttaccagactaaatcaaccactccagcagagcagagaggctgaatagattccacaacctggtttgccagttcatcttttgactctattaaaatcttcaatagttgttattctgtagtttcactctcatgagtgcaactgtggcttagctaatattgcaatgtggcttgaatgtaggtagcatcctttgatgcttctttgaaacttgtatgaatttgggtatgaacagattgcctgctttcccttaaataacacttagatttattggaccagtcagcacagcatgcctggttgtattaaagcagggatatgctgtattttataaaattggcaaaattagagaaatatagttcacaatgaaattatattttctttgtaaagaaagtggcttgaaatcttttttgttcaaagattaatgccaactcttaagattattctttcaccaactatagaatgtattttatatatcgttcattgtaaaaagcccttaaaaatatgtgtatactactttggctcttgtgcataaaaacaagaacactgaaaattgggaatatgcacaaacttggcttctttaaccaagaatattattggaaaattctctaaaagttaatagggtaaattctctattttttgtaatgtgttcggtgatttcagaaagctagaaagtgtatgtgtggcatttgttttcactttttaaaacatccctaactgatcgaatatatcagtaatttcagaatcagatgcatcctttcataagaagtgagaggactctgacagccataacaggagtgccacttcatggtgcgaagtgaacactgtagtcttgttgttttcccaaagagaactccgtatgttctcttaggttgagtaacccactctgaattctggttacatgtgtttttctctccctccttaaataaagagaggggttaaacatgccctctaaaagtaggtggttttgaagagaataaattcatcagataacctcaagtcacatgagaatcttagtccatttacattgccttggctagtaaaagccatctatgtatatgtcttacctcatctcctaaaaggcagagtacaaagtaagccatgtatctcaggaaggtaacttcattttgtctatttgctgttgattgtaccaagggatggaagaagtaaatatagctcaggtagcactttatactcaggcagatctcagccctctactgagtcccttagccaagcagtttctttcaaagaagccagcaggcgaaaagcagggactgccactgcatttcatatcacactgttaaaagttgtgttttgaaattttatgtttagttgcacaaattgggccaaagaaacattgccttgaggaagatatgattggaaaatcaagagtgtagaagaataaatactgttttactgtccaaagacatgtttatagtgctctgtaaatgttcctttcctttgtagtctctggcaagatgctttaggaagataaaagtttgaggagaacaaacaggaattctgaattaagcacagagttgaagtttatacccgtttcacatgcttttcaagaatgtcgcaattactaagaagcagataatggtgttttttagaaacctaattgaagtatattcaaccaaatactttaatgtataaaataaatattatacaatatacttgtatagcagtttctgcttcacatttgattttttcaaatttaatatttatattagagatctatatatgtataaatatgtattttgtcaaatttgttacttaaatatatagagaccagttttctctggaagtttgtttaaatgacagaagcgtatatgaattcaagaaaatttaagctgcaaaaatgtatttgctataaaatgagaagtctcactgatagaggttctttattgctcattttttaaaaaatggactcttgaaatctgttaaaataaaattgtacatttggagatgtttca

SEQ ID NO: 115636 - DNA, 3326 bp, Homo sapiens
  Payload ID: 2565
  Gene Symbol: CD46
  Gene Name: CD46 molecule, complement regulatory protein
  Uniprot ID: P15529
  ENST ID: ENST00000367042
  CDS Start-End: 157-1290
gctcgggccacgcccacctgtcctgcagcactggatgctttgtgagttggggattgttgcgtcccatatctggacccagaagggacttccctgctcggctggctctcggtttctctgctttcctccggagaaataacagcgtcttccgcgccgcgcatggagcctcccggccgccgcgagtgtccctttccttcctggcgctttcctgggttgcttctggcggccatggtgttgctgctgtactccttctccgatgcctgtgaggagccaccaacatttgaagctatggagctcattggtaaaccaaaaccctactatgagattggtgaacgagtagattataagtgtaaaaaaggatacttctatatacctcctcttgccacccatactatttgtgatcggaatcatacatggctacctgtctcagatgacgcctgttatagagaaacatgtccatatatacgggatcctttaaatggccaagcagtccctgcaaatgggacttacgagtttggttatcagatgcactttatttgtaatgagggttattacttaattggtgaagaaattctatattgtgaacttaaaggatcagtagcaatttggagcggtaagcccccaatatgtgaaaaggttttgtgtacaccacctccaaaaataaaaaatggaaaacacacctttagtgaagtagaagtatttgagtatcttgatgcagtaacttatagttgtgatcctgcacctggaccagatccattttcacttattggagagagcacgatttattgtggtgacaattcagtgtggagtcgtgctgctccagagtgtaaagtggtcaaatgtcgatttccagtagtcgaaaatggaaaacagatatcaggatttggaaaaaaattttactacaaagcaacagttatgtttgaatgcgataagggtttttacctcgatggcagcgacacaattgtctgtgacagtaacagtacttgggatcccccagttccaaagtgtcttaaagtgtcgacttcttccactacaaaatctccagcgtccagtgcctcaggtcctaggcctacttacaagcctccagtctcaaattatccaggatatcctaaacctgaggaaggaatacttgacagtttggatgtttgggtcattgctgtgattgttattgccatagttgttggagttgcagtaatttgtgttgtcccgtacagatatcttcaaaggaggaagaagaaaggcacatacctaactgatgagacccacagagaagtaaaatttacttctctctgagaaggagagatgagagaaaggtttgcttttatcattaaaaggaaagcagatggtggagctgaatatgccacttaccagactaaatcaaccactccagcagagcagagaggctgaatagattccacaacctggtttgccagttcatcttttgactctattaaaatcttcaatagttgttattctgtagtttcactctcatgagtgcaactgtggcttagctaatattgcaatgtggcttgaatgtaggtagcatcctttgatgcttctttgaaacttgtatgaatttgggtatgaacagattgcctgctttcccttaaataacacttagatttattggaccagtcagcacagcatgcctggttgtattaaagcagggatatgctgtattttataaaattggcaaaattagagaaatatagttcacaatgaaattatattttctttgtaaagaaagtggcttgaaatcttttttgttcaaagattaatgccaactcttaagattattctttcaccaactatagaatgtattttatatatcgttcattgtaaaaagcccttaaaaatatgtgtatactactttggctcttgtgcataaaaacaagaacactgaaaattgggaatatgcacaaacttggcttctttaaccaagaatattattggaaaattctctaaaagttaatagggtaaattctctattttttgtaatgtgttcggtgatttcagaaagctagaaagtgtatgtgtggcatttgttttcactttttaaaacatccctaactgatcgaatatatcagtaatttcagaatcagatgcatcctttcataagaagtgagaggactctgacagccataacaggagtgccacttcatggtgcgaagtgaacactgtagtcttgttgttttcccaaagagaactccgtatgttctcttaggttgagtaacccactctgaattctggttacatgtgtttttctctccctccttaaataaagagaggggttaaacatgccctctaaaagtaggtggttttgaagagaataaattcatcagataacctcaagtcacatgagaatcttagtccatttacattgccttggctagtaaaagccatctatgtatatgtcttacctcatctcctaaaaggcagagtacaaagtaagccatgtatctcaggaaggtaacttcattttgtctatttgctgttgattgtaccaagggatggaagaagtaaatatagctcaggtagcactttatactcaggcagatctcagccctctactgagtcccttagccaagcagtttctttcaaagaagccagcaggcgaaaagcagggactgccactgcatttcatatcacactgttaaaagttgtgttttgaaattttatgtttagttgcacaaattgggccaaagaaacattgccttgaggaagatatgattggaaaatcaagagtgtagaagaataaatactgttttactgtccaaagacatgtttatagtgctctgtaaatgttcctttcctttgtagtctctggcaagatgctttaggaagataaaagtttgaggagaacaaacaggaattctgaattaagcacagagttgaagtttatacccgtttcacatgcttttcaagaatgtcgcaattactaagaagcagataatggtgttttttagaaacctaattgaagtatattcaaccaaatactttaatgtataaaataaatattatacaatatacttgtatagcagtttctgcttcacatttgattttttcaaatttaatatttatattagagatctatatatgtataaatatgtattttgtcaaatttgttacttaaatatatagagaccagttttctctggaagtttgtttaaatgacagaagcgtatatgaattcaagaaaatttaagctgcaaaaatgtatttgctataaaatgagaagtctcactgatagaggttctttattgctcattttttaaaaaatggactcttgaaatctgttaaaataaaattgtacatttggagatgtttca

SEQ ID NO: 115637 - DNA, 3089 bp, Homo sapiens
  Payload ID: 2565
  Gene Symbol: CD46
  Gene Name: CD46 molecule, complement regulatory protein
  Uniprot ID: P15529
  ENST ID: ENST00000367047
  CDS Start-End: 157-1167
gctcgggccacgcccacctgtcctgcagcactggatgctttgtgagttggggattgttgcgtcccatatctggacccagaagggacttccctgctcggctggctctcggtttctctgctttcctccggagaaataacagcgtcttccgcgccgcgcatggagcctcccggccgccgcgagtgtccctttccttcctggcgctttcctgggttgcttctggcggccatggtgttgctgctgtactccttctccggagaaacatgtccatatatacgggatcctttaaatggccaagcagtccctgcaaatgggacttacgagtttggttatcagatgcactttatttgtaatgagggttattacttaattggtgaagaaattctatattgtgaacttaaaggatcagtagcaatttggagcggtaagcccccaatatgtgaaaaggttttgtgtacaccacctccaaaaataaaaaatggaaaacacacctttagtgaagtagaagtatttgagtatcttgatgcagtaacttatagttgtgatcctgcacctggaccagatccattttcacttattggagagagcacgatttattgtggtgacaattcagtgtggagtcgtgctgctccagagtgtaaagtggtcaaatgtcgatttccagtagtcgaaaatggaaaacagatatcaggatttggaaaaaaattttactacaaagcaacagttatgtttgaatgcgataagggtttttacctcgatggcagcgacacaattgtctgtgacagtaacagtacttgggatcccccagttccaaagtgtcttaaagtgctgcctccatctagtacaaaacctccagctttgagtcattcagtgtcgacttcttccactacaaaatctccagcgtccagtgcctcaggtcctaggcctacttacaagcctccagtctcaaattatccaggatatcctaaacctgaggaaggaatacttgacagtttggatgtttgggtcattgctgtgattgttattgccatagttgttggagttgcagtaatttgtgttgtcccgtacagatatcttcaaaggaggaagaagaaagggaaagcagatggtggagctgaatatgccacttaccagactaaatcaaccactccagcagagcagagaggctgaatagattccacaacctggtttgccagttcatcttttgactctattaaaatcttcaatagttgttattctgtagtttcactctcatgagtgcaactgtggcttagctaatattgcaatgtggcttgaatgtaggtagcatcctttgatgcttctttgaaacttgtatgaatttgggtatgaacagattgcctgctttcccttaaataacacttagatttattggaccagtcagcacagcatgcctggttgtattaaagcagggatatgctgtattttataaaattggcaaaattagagaaatatagttcacaatgaaattatattttctttgtaaagaaagtggcttgaaatcttttttgttcaaagattaatgccaactcttaagattattctttcaccaactatagaatgtattttatatatcgttcattgtaaaaagcccttaaaaatatgtgtatactactttggctcttgtgcataaaaacaagaacactgaaaattgggaatatgcacaaacttggcttctttaaccaagaatattattggaaaattctctaaaagttaatagggtaaattctctattttttgtaatgtgttcggtgatttcagaaagctagaaagtgtatgtgtggcatttgttttcactttttaaaacatccctaactgatcgaatatatcagtaatttcagaatcagatgcatcctttcataagaagtgagaggactctgacagccataacaggagtgccacttcatggtgcgaagtgaacactgtagtcttgttgttttcccaaagagaactccgtatgttctcttaggttgagtaacccactctgaattctggttacatgtgtttttctctccctccttaaataaagagaggggttaaacatgccctctaaaagtaggtggttttgaagagaataaattcatcagataacctcaagtcacatgagaatcttagtccatttacattgccttggctagtaaaagccatctatgtatatgtcttacctcatctcctaaaaggcagagtacaaagtaagccatgtatctcaggaaggtaacttcattttgtctatttgctgttgattgtaccaagggatggaagaagtaaatatagctcaggtagcactttatactcaggcagatctcagccctctactgagtcccttagccaagcagtttctttcaaagaagccagcaggcgaaaagcagggactgccactgcatttcatatcacactgttaaaagttgtgttttgaaattttatgtttagttgcacaaattgggccaaagaaacattgccttgaggaagatatgattggaaaatcaagagtgtagaagaataaatactgttttactgtccaaagacatgtttatagtgctctgtaaatgttcctttcctttgtagtctctggcaagatgctttaggaagataaaagtttgaggagaacaaacaggaattctgaattaagcacagagttgaagtttatacccgtttcacatgcttttcaagaatgtcgcaattactaagaagcagataatggtgttttttagaaacctaattgaagtatattcaaccaaatactttaatgtataaaataaatattatacaatatacttgtatagcagtttctgcttcacatttgattttttcaaatttaatatttatattagagatctatatatgtataaatatgtattttgtcaaatttgttacttaaatatatagagaccagttttctctggaagtttgtttaaatgacagaagcgtatatgaattcaagaaaatttaagctgcaaaaatgtatttgctataaaatgagaagtctcactgatagaggttctttattgctcattttttaaaaaatggactcttgaaatctgttaaaataaaattgtacatttggagatgtttca

SEQ ID NO: 115638 - DNA, 1258 bp, Homo sapiens
  Payload ID: 2565
  Gene Symbol: CD46
  Gene Name: CD46 molecule, complement regulatory protein
  Uniprot ID: P15529
  ENST ID: ENST00000480003
  CDS Start-End: 91-1203
tatctggacccagaagggacttccctgctcggctggctctcggtttctctgctttcctccggagaaataacagcgtcttccgcgccgcgcatggagcctcccggccgccgcgagtgtccctttccttcctggcgctttcctgggttgcttctggcggccatggtgttgctgctgtactccttctccgatgcctgtgaggagccaccaacatttgaagctatggagctcattggtaaaccaaaaccctactatgagattggtgaacgagtagattataagtgtaaaaaaggatacttctatatacctcctcttgccacccatactatttgtgatcggaatcatacatggctacctgtctcagatgacgcctgttatagagaaacatgtccatatatacgggatcctttaaatggccaagcagtccctgcaaatgggacttacgagtttggttatcagatgcactttatttgtaatgagggttattacttaattggtgaagaaattctatattgtgaacttaaaggatcagtagcaatttggagcggtaagcccccaatatgtgaaaaggttttgtgtacaccacctccaaaaataaaaaatggaaaacacacctttagtgaagtagaagtatttgagtatcttgatgcagtaacttatagttgtgatcctgcacctggaccagatccattttcacttattggagagagcacgatttattgtggtgacaattcagtgtggagtcgtgctgctccagagtgtaaagtggtcaaatgtcgatttccagtagtcgaaaatggaaaacagatatcaggatttggaaaaaaattttactacaaagcaacagttatgtttgaatgcgataagggtttttacctcgatggcagcgacacaattgtctgtgacagtaacagtacttgggatcccccagttccaaagtgtcttaaagtgtcgacttcttccactacaaaatctccagcgtccagtgcctcaggatatcctaaacctgaggaaggaatacttgacagtttggatgtttgggtcattgctgtgattgttattgccatagttgttggagttgcagtaatttgtgttgtcccgtacagatatcttcaaaggaggaagaagaaagggaaagcagatggtggagctgaatatgccacttaccagactaaatcaaccactccagcagagcagagaggctgaatagattccacaacctggtttgccagttcatcttttgactctattaaaatcttca

SEQ ID NO: 115639 - DNA, 473 bp, Homo sapiens
  Payload ID: 2565
  Gene Symbol: CD46
  Gene Name: CD46 molecule, complement regulatory protein
  ENST ID: ENST00000462968
  CDS Start-End: 1-236
agcctccagtctcaaattatccaggatatcctaaacctgaggaaggaatacttgacagtttggatgtttgggtcattgctgtgattgttattgccatagttgttggagttgcagtaatttgtgttgtcccgtacagatatcttcaaaggaggaagaagaaagggaaagcagatggtggagctgaatatgccacttaccagactaaatcaaccactccagcagagcagagaggctgaatagattccacaacctgtctctggcaagatgctttaggaagataaaagtttgaggagaacaaacaggaattctgaattaagcacagagttgaagtttatacccgtttcacatgcttttcaagaatgtcgcaattactaagaagcagataatggtgttttttagaaacctaattgaagtatattcaaccaaatactttaatgtataaaataaatattatacaatatacttgtatagca

SEQ ID NO: 115640 - DNA, 5020 bp, Homo sapiens
  Payload ID: 2566
  Gene Symbol: CD47
  Gene Name: CD47 molecule
  Uniprot ID: Q08722
  ENST ID: ENST00000355354
  CDS Start-End: 118-1035
tgggcagtgggtcctgcctgtgacgcgcggcggcggtcggtcctgcctgtaacggcggcggcggctgctgctccggacacctgcggcggcggcggcgaccccgcggcgggcgcggagatgtggcccctggtagcggcgctgttgctgggctcggcgtgctgcggatcagctcagctactatttaataaaacaaaatctgtagaattcacgttttgtaatgacactgtcgtcattccatgctttgttactaatatggaggcacaaaacactactgaagtatacgtaaagtggaaatttaaaggaagagatatttacacctttgatggagctctaaacaagtccactgtccccactgactttagtagtgcaaaaattgaagtctcacaattactaaaaggagatgcctctttgaagatggataagagtgatgctgtctcacacacaggaaactacacttgtgaagtaacagaattaaccagagaaggtgaaacgatcatcgagctaaaatatcgtgttgtttcatggttttctccaaatgaaaatattcttattgttattttcccaatttttgctatactcctgttctggggacagtttggtattaaaacacttaaatatagatccggtggtatggatgagaaaacaattgctttacttgttgctggactagtgatcactgtcattgtcattgttggagccattcttttcgtcccaggtgaatattcattaaagaatgctactggccttggtttaattgtgacttctacagggatattaatattacttcactactatgtgtttagtacagcgattggattaacctccttcgtcattgccatattggttattcaggtgatagcctatatcctcgctgtggttggactgagtctctgtattgcggcgtgtataccaatgcatggccctcttctgatttcaggtttgagtatcttagctctagcacaattacttggactagtttatatgaaatttgtggcttccaatcagaagactatacaacctcctaggaataactgaagtgaagtgatggactccgatttggagagtagtaagacgtgaaaggaatacacttgtgtttaagcaccatggccttgatgattcactgttggggagaagaaacaagaaaagtaactggttgtcacctatgagacccttacgtgattgttagttaagtttttattcaaagcagctgtaatttagttaataaaataattatgatctatgttgtttgcccaattgagatccagttttttgttgttatttttaatcaattaggggcaatagtagaatggacaatttccaagaatgatgcctttcaggtcctagggcctctggcctctaggtaaccagtttaaattggttcagggtgataactacttagcactgccctggtgattacccagagatatctatgaaaaccagtggcttccatcaaacctttgccaactcaggttcacagcagctttgggcagttatggcagtatggcattagctgagaggtgtctgccacttctgggtcaatggaataataaattaagtacaggcaggaatttggttgggagcatcttgtatgatctccgtatgatgtgatattgatggagatagtggtcctcattcttgggggttgccattcccacattcccccttcaacaaacagtgtaacaggtccttcccagatttagggtacttttattgatggatatgttttccttttattcacataaccccttgaaaccctgtcttgtcctcctgttacttgcttctgctgtacaagatgtagcaccttttctcctctttgaacatggtctagtgacacggtagcaccagttgcaggaaggagccagacttgttctcagagcactgtgttcacacttttcagcaaaaatagctatggttgtaacatatgtattcccttcctctgatttgaaggcaaaaatctacagtgtttcttcacttcttttctgatctggggcatgaaaaaagcaagattgaaatttgaactatgagtctcctgcatggcaacaaaatgtgtgtcaccatcaggccaacaggccagcccttgaatggggatttattactgttgtatctatgttgcatgataaacattcatcaccttcctcctgtagtcctgcctcgtactccccttcccctatgattgaaaagtaaacaaaacccacatttcctatcctggttagaagaaaattaatgttctgacagttgtgatcgcctggagtacttttagacttttagcattcgttttttacctgtttgtggatgtgtgtttgtatgtgcatacgtatgagataggcacatgcatcttctgtatggacaaaggtggggtacctacaggagagcaaaggttaattttgtgcttttagtaaaaacatttaaatacaaagttctttattgggtggaattatatttgatgcaaatatttgatcacttaaaacttttaaaacttctaggtaatttgccacgctttttgactgctcaccaataccctgtaaaaatacgtaattcttcctgtttgtgtaataagatattcatatttgtagttgcattaataatagttatttcttagtccatcagatgttcccgtgtgcctcttttatgccaaattgattgtcatatttcatgttgggaccaagtagtttgcccatggcaaacctaaatttatgacctgctgaggcctctcagaaaactgagcatactagcaagacagctcttcttgaaaaaaaaaatatgtatacacaaatatatacgtatatctatatatacgtatgtatatacacacatgtatattcttccttgattgtgtagctgtccaaaataataacatatatagagggagctgtattcctttatacaaatctgatggctcctgcagcactttttccttctgaaaatatttacattttgctaacctagtttgttactttaaaaatcagttttgatgaaaggagggaaaagcagatggacttgaaaaagatccaagctcctattagaaaaggtatgaaaatctttatagtaaaattttttataaactaaagttgtaccttttaatatgtagtaaactctcatttatttggggttcgctcttggatctcatccatccattgtgttctctttaatgctgcctgccttttgaggcattcactgccctagacaatgccaccagagatagtgggggaaatgccagatgaaaccaactcttgctctcactagttgtcagcttctctggataagtgaccacagaagcaggagtcctcctgcttgggcatcattgggccagttccttctctttaaatcagatttgtaatggctcccaaattccatcacatcacatttaaattgcagacagtgttttgcacatcatgtatctgttttgtcccataatatgctttttactccctgatcccagtttctgctgttgactcttccattcagttttatttattgtgtgttctcacagtgacaccatttgtccttttctgcaacaacctttccagctacttttgccaaattctatttgtcttctccttcaaaacattctcctttgcagttcctcttcatctgtgtagctgctcttttgtctcttaacttaccattcctatagtactttatgcatctctgcttagttctattagttttttggccttgctcttctccttgattttaaaattccttctatagctagagcttttctttctttcattctctcttcctgcagtgttttgcatacatcagaagctaggtacataagttaaatgattgagagttggctgtatttagatttatcactttttaatagggtgagcttgagagttttctttctttctgttttttttttttgttttttttttttttttttttttttttttttttgactaatttcacatgctctaaaaaccttcaaaggtgattatttttctcctggaaactccaggtccattctgtttaaatccctaagaatgtcagaattaaaataacagggctatcccgtaattggaaatatttcttttttcaggatgctatagtcaatttagtaagtgaccaccaaattgttatttgcactaacaaagctcaaaacacgataagtttactcctccatctcagtaataaaaattaagctgtaatcaaccttctaggtttctcttgtcttaaaatgggtattcaaaaatggggatctgtggtgtatgtatggaaacacatactccttaatttacctgttgttggaaactggagaaatgattgtcgggcaaccgtttattttttattgtattttatttggttgagggatttttttataaacagttttacttgtgtcatattttaaaattactaactgccatcacctgctggggtcctttgttaggtcattttcagtgactaatagggataatccaggtaactttgaagagatgagcagtgagtgaccaggcagtttttctgcctttagctttgacagttcttaattaagatcattgaagaccagctttctcataaatttctctttttgaaaaaaagaaagcatttgtactaagctcctctgtaagacaacatcttaaatcttaaaagtgttgttatcatgactggtgagagaagaaaacattttgtttttattaaatggagcattatttacaaaaagccattgttgagaattagatcccacatcgtataaatatctattaaccattctaaataaagagaactccagtgttgctatgtgcaagatcctctcttggagcttttttgcatagcaattaaaggtgtgctatttgtcagtagccatttttttgcagtgatttgaagaccaaagttgttttacagctgtgttaccgttaaaggtttttttttttatatgtattaaatcaatttatcactgtttaaagctttgaatatctgcaatctttgccaaggtacttttttatttaaaaaaaaacataactttgtaaatattaccctgtaatattatatatacttaataaaacattttaagcta

SEQ ID NO: 115641 - DNA, 1285 bp, Homo sapiens
  Payload ID: 2566
  Gene Symbol: CD47
  Gene Name: CD47 molecule
  Uniprot ID: Q08722
  ENST ID: ENST00000361309
  CDS Start-End: 107-1078
tcctgcctgtgacgcgcggcggcggtcggtcctgcctgtaacggcggcggcggctgctgctccggacacctgcggcggcggcggcgaccccgcggcgggcgcggagatgtggcccctggtagcggcgctgttgctgggctcggcgtgctgcggatcagctcagctactatttaataaaacaaaatctgtagaattcacgttttgtaatgacactgtcgtcattccatgctttgttactaatatggaggcacaaaacactactgaagtatacgtaaagtggaaatttaaaggaagagatatttacacctttgatggagctctaaacaagtccactgtccccactgactttagtagtgcaaaaattgaagtctcacaattactaaaaggagatgcctctttgaagatggataagagtgatgctgtctcacacacaggaaactacacttgtgaagtaacagaattaaccagagaaggtgaaacgatcatcgagctaaaatatcgtgttgtttcatggttttctccaaatgaaaatattcttattgttattttcccaatttttgctatactcctgttctggggacagtttggtattaaaacacttaaatatagatccggtggtatggatgagaaaacaattgctttacttgttgctggactagtgatcactgtcattgtcattgttggagccattcttttcgtcccaggtgaatattcattaaagaatgctactggccttggtttaattgtgacttctacagggatattaatattacttcactactatgtgtttagtacagcgattggattaacctccttcgtcattgccatattggttattcaggtgatagcctatatcctcgctgtggttggactgagtctctgtattgcggcgtgtataccaatgcatggccctcttctgatttcaggtttgagtatcttagctctagcacaattacttggactagtttatatgaaatttgtggcttccaatcagaagactatacaacctcctaggaaagctgtagaggaaccccttaatgcattcaaagaatcaaaaggaatgatgaatgatgaataactgaagtgaagtgatggactccgatttggagagtagtaagacgtgaaaggaatacacttgtgtttaagcaccatggccttgatgattcactgttggggagaagaaacaagaaaagtaactggttgtcacctatgagacccttacgtgattgttagttaagtttttattcaaagcagctgtaatttagttaataaaataattatgatc

SEQ ID NO: 115642 - DNA, 469 bp, Homo sapiens
  Payload ID: 2566
  Gene Symbol: CD47
  Gene Name: CD47 molecule
  ENST ID: ENST00000398258
  CDS Start-End: 1-260
gttggactgagtctctgtattgcggcgtgtataccaatgcatggccctcttctgatttcaggtttgagtatcttagctctagcacaattacttggactagtttatatgaaatttgtggggttcagagggacacctacagtcagttgaaaggcaagaagagacaagcttccaatcagaagactatacaacctcctaggaaagctgtagaggaaccccttaatgcattcaaagaatcaaaaggaatgatgaatgatgaataactgaagtgaagtgatggactccgatttggagagtagtaagacgtgaaaggaatacacttgtgtttaagcaccatggccttgatgattcactgttggggagaagaaacaagaaaagtaactggttgtcacctatgagacccttacgtgattgttagttaagtttttattcaaagcagctgtaatttagttaataaaataattatgatcta

SEQ ID NO: 115643 - DNA, 538 bp, Homo sapiens
  Payload ID: 2566
  Gene Symbol: CD47
  Gene Name: CD47 molecule
  ENST ID: ENST00000517766
  CDS Start-End: 1-329
taaagaatgctactggccttggtttaattgtgacttctacagggatattaatattacttcactactatgtgtttagtacagcgattggattaacctccttcgtcattgccatattggttattcaggtgatagcctatatcctcgctgtggttggactgagtctctgtattgcggcgtgtataccaatgcatggccctcttctgatttcaggtttgagtatcttagctctagcacaattacttggactagtttatatgaaatttgtggcttccaatcagaagactatacaacctcctaggaaagctgtagaggaaccccttaatgaataactgaagtgaagtgatggactccgatttggagagtagtaagacgtgaaaggaatacacttgtgtttaagcaccatggccttgatgattcactgttggggagaagaaacaagaaaagtaactggttgtcacctatgagacccttacgtgattgttagttaagtttttattcaaagcagctgtaatttagttaataaaataattatgatcta

SEQ ID NO: 115644 - DNA, 1793 bp, Homo sapiens
  Payload ID: 2567
  Gene Symbol: CD48
  Gene Name: CD48 molecule
  Uniprot ID: P09326
  ENST ID: ENST00000368045
  CDS Start-End: 41-550
caactgtctcctgcgttgctgggaagttctggaaggaagcatgtgctccagaggttgggattcgtgtctggctctggaattgctactgctgcctctgtcactcctggtgaccagcattcaaggtcacttggtacatatgaccgtggtctccggcagcaacgtgactctgaacatctctgagagcctgcctgagaactacaaacaactaacctggttttatactttcgaccagaagattgtagaatgggattccagaaaatctaagtactttgaatccaaatttaaaggcagggtcagacttgatcctcagagtggcgcactgtacatctctaaggtccagaaagaggacaacagcacctacatcatgagggtgttgaaaaagactgggaatgagcaagaatggaagatcaagctgcaagtgcttggtgagtcaggggagccaaagagcaaatccccactccagtggccccagatggaccactgtagggcttcctgggaggcatggggcactctcggggaggaggagagaaaaacctcaggacaggtttgattcatttttccttgatccaattctatttgggagtgagcctaggtcaacagatatccaaattaacaatcttaggacatttaacacctcttctgaagttagtgagtctaagctttgaagagaaggaaaactagagatttttcctatttccttcattttgtcctgtgatcaacctaaatcagctcagctcatcttgattatatctccgaaattaggcttcattggacttaagaaaaaagagaatgtattaatataaagaatggggcaggagttatcaggagaatttttcaactttcataatgggcaggacaaaaaaacttccactcatagctccagtctaaccagtgtatatggaataaggactcaggcattatacctggagccagacagacttgggttcaaaactggtcagttgctcactagctgtgcagccttgaaaaaagatcttcacatctctgtgcccatattaggtaagattcttttgatagcaaataacagaaactaattcaatgtacctttaccaaaaaaggagaatttagtttaagaaactagggctatttaaagcaattcaaagagtttaaaagagctaggaagggcttaaggggagaagattgaaaaccaggttcgggccagaacccctagcttcaggaatctgtggactgtgcctatggatttggattcctgccattttacacatgttatctctcaaaacttagacttttgctcctctgagtttcaattctcagggcaatttaaagagagagaaactgatagtcccaatttagttcaggtgtgtgtacctgatctaaacatttttggtgaaaggatcagattatagggcagaaacatggatatggggaggggctccaggggttggggtatgcaattcttgtagaagagcggggctaaataatccaagagtggtgttcccttgagagccttgggttcttcatcatattatgagaataattctacttacctttcaggatgttattagagtcaaagtagataaggaaagtgaaaacattttttaaaatgtcaaaacatgcaaatgaagagtgttgtatacattcaagttccaccagccagacagtccctgatccaagcagtcagattccccttctaactcttcttccatgtcatatgggctgaaaattcagaaagtcctgggaacaaaaagattcaaggtctcttacagtggtgttctggttaacaagctctacaagatttaaaaaaaaaaaaaaaa

SEQ ID NO: 115645 - DNA, 1126 bp, Homo sapiens
  Payload ID: 2567
  Gene Symbol: CD48
  Gene Name: CD48 molecule
  Uniprot ID: P09326
  ENST ID: ENST00000368046
  CDS Start-End: 89-820
gtttggtaagttccgtttttagccccggcctttttctagccaggctctcaactgtctcctgcgttgctgggaagttctggaaggaagcatgtgctccagaggttgggattcgtgtctggctctggaattgctactgctgcctctgtcactcctggtgaccagcattcaaggtcacttggtacatatgaccgtggtctccggcagcaacgtgactctgaacatctctgagagcctgcctgagaactacaaacaactaacctggttttatactttcgaccagaagattgtagaatgggattccagaaaatctaagtactttgaatccaaatttaaaggcagggtcagacttgatcctcagagtggcgcactgtacatctctaaggtccagaaagaggacaacagcacctacatcatgagggtgttgaaaaagactgggaatgagcaagaatggaagatcaagctgcaagtgcttgaccctgtacccaagcctgtcatcaaaattgagaagatagaagacatggatgacaactgttatctgaaactgtcatgtgtgatacctggcgagtctgtaaactacacctggtatggggacaaaaggcccttcccaaaggagctccagaacagtgtgcttgaaaccacccttatgccacataattactccaggtgttatacttgccaagtcagcaattctgtgagcagcaagaatggcacggtctgcctcagtccaccctgtaccctggcccggtcctttggagtagaatggattgcaagttggctagtggtcacggtgcccaccattcttggcctgttacttacctgagatgagctcttttaactcaagcgaaacttcaaggccagaagatcttgcctgttggtgatcatgctcctcaccaggacagagactgtataggctgaccagaagcatgctgctgaattatcaacgaggattttcaagttaacttttaaatactggttattatttaattttatatccctttgttgttttctagtacacagagatatagagatacacatgcttttttcccacccaaaattgtgacaacattatgtgaatgttttattattttttaaaataaacatttgatataattgtcaattaactgaa

SEQ ID NO: 115646 - DNA, 1500 bp, Homo sapiens
  Payload ID: 2567
  Gene Symbol: CD48
  Gene Name: CD48 molecule
  ENST ID: ENST00000613788
  CDS Start-End: 69-827
agccccggcctttttctagccaggctctcaactgtctcctgcgttgctgggaagttctggaaggaagcatgtgctccagaggttgggattcgtgtctggctctggaattgctactgctgcctctgtcactcctggtgaccagcattcaaggtcacttggtacatatgaccgtggtctccggcagcaacgtgactctgaacatctctgagagcctgcctgagaactacaaacaactaacctggttttatactttcgaccagaagattgtagaatgggattccagaaaatctaagtactttgaatccaaatttaaaggcagggtcagacttgatcctcagagtggcgcactgtacatctctaaggtccagaaagaggacaacagcacctacatcatgagggtgttgaaaaagactgggaatgagcaagaatggaagatcaagctgcaagtgcttgaccctgtacccaagcctgtcatcaaaattgagaagatagaagacatggatgacaactgttatctgaaactgtcatgtgtgatacctggcgagtctgtaaactacacctggtatggggacaaaaggcccttcccaaaggagctccagaacagtgtgcttgaaaccacccttatgccacataattactccaggtgttatacttgccaagtcagcaattctgtgagcagcaagaatggcacggtctgcctcagtccaccctgtaccctgggtaagaaggatccctgggagctgaggggggcacagggtaactggagttgttttgaacaaagaaaggctgggggtcctattcagcctccttgcacagtgtggtggtgaatccctaaggtgtctgggagagctgggagacgtgggttctgccaccagctctaccaccacctcccagccagcttacctcaacttcgtgggggctcagtgttctcacctgcaaaggacgtttgggagagatctctgatactcctcttccctctcccgctctaacaaagcatagtcctaacatctgaggccagggtcatcatagagtagactgaaacatcagggtgagcagggagaaggaagggcaagtgggcgagcagctgtctagaggggcttcattagacagccgaagtcagccaaggaaagagggaccgaggtcattagaccgccaaagtcagccagggaaagagggactgaggagacgggcctgagagaggccgtcgaggaggcgtgagagcctgagcctcaggcgaagcttctcctccccagcctgatgttcctagatgaacttaggaagccagattcccctgtctcctgggaggatccactcatgagtgtcacacctggctctagatcaggcctacactggtgctagcatgggacagctaaggccatgggttttagagtcagtcatacctggggtcacttctaggactgtcacttactagctaaacaagttacttagcttccccaagtcatgttcttcctaaataaaggacaaaataacagttcctat

SEQ ID NO: 115647 - DNA, 3221 bp, Homo sapiens
  Payload ID: 2568
  Gene Symbol: CD5
  Gene Name: CD5 molecule
  Uniprot ID: P06127
  ENST ID: ENST00000347785
  CDS Start-End: 167-1654
aacttcaaacatgggtgacgcaggccccacactgcctgctccccgtcccacccctccctgagcacgccaccccgccctctccctctctgagagcgagatacccggccagacaccctcacctgcggtgcccagctgcccaggctgaggcaagagaaggccagaaaccatgcccatggggtctctgcaaccgctggccaccttgtacctgctggggatgctggtcgcttcctgcctcggacggctcagctggtatgacccagatttccaggcaaggctcacccgttccaactcgaagtgccagggccagctggaggtctacctcaaggacggatggcacatggtttgcagccagagctggggccggagctccaagcagtgggaggaccccagtcaagcgtcaaaagtctgccagcggctgaactgtggggtgcccttaagccttggccccttccttgtcacctacacacctcagagctcaatcatctgctacggacaactgggctccttctccaactgcagccacagcagaaatgacatgtgtcactctctgggcctgacctgcttagaaccccagaagacaacacctccaacgacaaggcccccgcccaccacaactccagagcccacagctcctcccaggctgcagctggtggcacagtctggcggccagcactgtgccggcgtggtggagttctacagcggcagcctggggggtaccatcagctatgaggcccaggacaagacccaggacctggagaacttcctctgcaacaacctccagtgtggctccttcttgaagcatctgccagagactgaggcaggcagagcccaagacccaggggagccacgggaacaccagcccttgccaatccaatggaagatccagaactcaagctgtacctccctggagcattgcttcaggaaaatcaagccccagaaaagtggccgagttcttgccctcctttgctcaggtttccagcccaaggtgcagagccgtctggtggggggcagcagcatctgtgaaggcaccgtggaggtgcgccagggggctcagtgggcagccctgtgtgacagctcttcagccaggagctcgctgcggtgggaggaggtgtgccgggagcagcagtgtggcagcgtcaactcctatcgagtgctggacgctggtgacccaacatcccgggggctcttctgtccccatcagaagctgtcccagtgccacgaactttgggagagaaattcctactgcaagaaggtgtttgtcacatgccaggatccaaaccccgcaggcctggccgcaggcacggtggcaagcatcatcctggccctggtgctcctggtggtgctgctggtcgtgtgcggcccccttgcctacaagaagctagtgaagaaattccgccagaagaagcagcgccagtggattggcccaacgggaatgaaccaaaacatgtctttccatcgcaaccacacggcaaccgtccgatcccatgctgagaaccccacagcctcccacgtggataacgaatacagccaacctcccaggaactcccacctgtcagcttatccagctctggaaggggctctgcatcgctcctccatgcagcctgacaactcctccgacagtgactatgatctgcatggggctcagaggctgtaaagaactgggatccatgagcaaaaagccgagagccagacctgtttgtcctgagaaaactgtccgctcttcacttgaaatcatgtccctatttctaccccggccagaacatggacagaggccagaagccttccggacaggcgctgctgccccgagtggcaggccagctcacactctgctgcacaacagctcggccgcccctccacttgtggaagctgtggtgggcagagccccaaaacaagcagccttccaactagagactcgggggtgtctgaagggggccccctttccctgcccgctggggagcggcgtctcagtgaaatcggctttctcctcagactctgtccctggtaaggagtgacaaggaagctcacagctgggcgagtgcattttgaatagttttttgtaagtagtgcttttcctccttcctgacaaatcgagcgctttggcctcttctgtgcagcatccacccctgcggatccctctggggaggacaggaaggggactcccggagacctctgcagccgtggtggtcagaggctgctcacctgagcacaaagacagctctgcacattcaccgcagctgccagccaggggtctgggtgggcaccaccctgacccacagcgtcaccccactccctctgtcttatgactcccctccccaaccccctcatctaaagacaccttcctttccactggctgtcaagcccacagggcaccagtgccacccagggcccggcacaaaggggcgcctagtaaaccttaaccaacttggttttttgcttcacccagcaattaaaagtcccaagctgaggtagtttcagtccatcacagttcatcttctaacccaagagtcagagatggggctggtcatgttcctttggtttgaataactcccttgacgaaaacagactcctctagtacttggagatcttggacgtacacctaatcccatggggcctcggcttccttaactgcaagtgagaagaggaggtctacccaggagcctcgggtctgatcaagggagaggccaggcgcagctcactgcggcggctccctaagaaggtgaagcaacatgggaacacatcctaagacaggtcctttctccacgccatttgatgctgtatctcctgggagcacaggcatcaatggtccaagccgcataataagtctggaagagcaaaagggagttactaggatatggggtgggctgctcccagaatctgctcagctttctgcccccaccaacaccctccaaccaggccttgccttctgagagcccccgtggccaagcccaggtcacagatcttcccccgaccatgctgggaatccagaaacagggaccccatttgtcttcccatatctggtggaggtgagggggctcctcaaaagggaactgagaggctgctcttagggagggcaaaggttcgggggcagccagtgtctcccatcagtgccttttttaataaaagctctttcatctatagtttggccaccatacagtggcctcaaagcaaccatggcctacttaaaaaccaaaccaaaaataaagagtttagttgaggagaaa

SEQ ID NO: 115648 - DNA, 547 bp, Homo sapiens
  Payload ID: 2568
  Gene Symbol: CD5
  Gene Name: CD5 molecule
  ENST ID: ENST00000544014
  CDS Start-End: 53-547
ctcacctgcggtgcccagctgcccaggctgaggcaagagaaggccagaaaccatgcccatggggtctctgcaaccgctggccaccttgtacctgctggggatgctggtcgcttcctgcctcggacggctcagctggtatgacccagatttccaggcaaggctcacccgttccaactcgaagtgccagggccagctggaggtctacctcaaggacggatggcacatggtttgcagccagagctggggccggagctccaagcagtgggaggaccccagtcaagcgtcaaaagtctgccagcggctgaactgtggggtgcccttaagccttggccccttccttgtcacctacacacctcagagctcaatcatctgctacggacaactgggctccttctccaactgcagccacagcagaaatgacatgtgtcactctctgggcctgacctgcttagaaccccagaagacaacacctccaacgacaaggcccccgcccaccacaactccagagcccacagctatgaggcccaggacaagacccaggacctgg

SEQ ID NO: 115649 - DNA, 2191 bp, Homo sapiens
  Payload ID: 2569
  Gene Symbol: CD5L
  Gene Name: CD5 molecule-like
  Uniprot ID: O43866
  ENST ID: ENST00000368174
  CDS Start-End: 98-1141
ctcctcttaacatacttgcagctaaaactaaatattgctgcttggggacctccttctagccttaaatttcagctcatcaccttcacctgccttggtcatggctctgctattctccttgatccttgccatttgcaccagacctggattcctagcgtctccatctggagtgcggctggtggggggcctccaccgctgtgaagggcgggtggaggtggaacagaaaggccagtggggcaccgtgtgtgatgacggctgggacattaaggacgtggctgtgttgtgccgggagctgggctgtggagctgccagcggaacccctagtggtattttgtatgagccaccagcagaaaaagagcaaaaggtcctcatccaatcagtcagttgcacaggaacagaagatacattggctcagtgtgagcaagaagaagtttatgattgttcacatgatgaagatgctggggcatcgtgtgagaacccagagagctctttctccccagtcccagagggtgtcaggctggctgacggccctgggcattgcaagggacgcgtggaagtgaagcaccagaaccagtggtataccgtgtgccagacaggctggagcctccgggccgcaaaggtggtgtgccggcagctgggatgtgggagggctgtactgactcaaaaacgctgcaacaagcatgcctatggccgaaaacccatctggctgagccagatgtcatgctcaggacgagaagcaacccttcaggattgcccttctgggccttgggggaagaacacctgcaaccatgatgaagacacgtgggtcgaatgtgaagatccctttgacttgagactagtaggaggagacaacctctgctctgggcgactggaggtgctgcacaagggcgtatggggctctgtctgtgatgacaactggggagaaaaggaggaccaggtggtatgcaagcaactgggctgtgggaagtccctctctccctccttcagagaccggaaatgctatggccctggggttggccgcatctggctggataatgttcgttgctcaggggaggagcagtccctggagcagtgccagcacagattttgggggtttcacgactgcacccaccaggaagatgtggctgtcatctgctcaggatagtatcctggtgttgcttgacctggcccccctggccccgcctgccctctgcttgttctcctgagccctgattatcctcatactcattctggggctcaggcttgagccactactccctcatcccctcaggagtctgaacactgggcttatgccttactctcagggacaagcagcccccattgctgcctgtagatgtgagctgttgagttccctcttgctggggaagatgagcttccatgtatcctgtgctcaaccctgaccctttgacactggttctggcctttcctgccttttctcaagctgcctggaatcctcaaacctgtcactttggtcagatgtgcagaccattactaaggtctatgtctgcaaacattactaatctaggtcctattactaatctatgtctgcaaacattaaaggaatgaaacaatgaaaggaacatttgaaagaaaatgtgggtagacaatttcttgcaacttgggggaaagtttagaattcttttgattggactactttttttttttttcctcaagcttcaggtgaccacaatagcaacacctccctattctgttatttcttagtgtaggtagacaattctttcaggagcagagcagcgtcctataatcctagaccttttcatgacgtgtaaaaaatgatgtttcatcctctgattgccccaataaaaatctttgttgtccatccctatacaacctgccaacatggttgacatttaatgagaggaatgtcaaaaatacattttactttattcaaagaaaaatatattggttactgggaaaaggtcaagaaagaggcagaaagagatcagggagggctaaagttgtgtcttatgccaagcgaaagtgaaaaatatcattttcactttatcaactgagactttggggcctgtaagcttgaggcaagacagaaataagagaatcaagacttgattgtaaaaattgacaactttagattctgaggctaggctgagtacttattatacggctacatttacacatttacacttatctaataaatcagatttcacagtctcaa

SEQ ID NO: 115650 - DNA, 468 bp, Homo sapiens
  Payload ID: 2570
  Gene Symbol: CD52
  Gene Name: CD52 molecule
  Uniprot ID: P31358
  ENST ID: ENST00000374213
  CDS Start-End: 62-247
cagacagccctgagatcacctaaaaagctgctaccaagacagccacgaagatcctaccaaaatgaagcgcttcctcttcctcctactcaccatcagcctcctggttatggtacagatacaaactggactctcaggacaaaacgacaccagccaaaccagcagcccctcagcatccagcaacataagcggaggcattttccttttcttcgtggccaatgccataatccacctcttctgcttcagttgaggtgacacgtctcagccttagccctgtgccccctgaaacagctgccaccatcactcgcaagagaatcccctccatctttgggaggggttgatgccagacatcaccaggttgtagaagttgacaggcagtgccatgggggcaacagccaaaataggggggtaatgatgtaggggccaagcagtgcccagctgggggtcaataaagttacccttgtacttgca

SEQ ID NO: 115651 - DNA, 1505 bp, Homo sapiens
  Payload ID: 2571
  Gene Symbol: CD53
  Gene Name: CD53 molecule
  Uniprot ID: P19397
  ENST ID: ENST00000271324
  CDS Start-End: 113-772
agccccggatatctgtgttaccagccttgtctcggccacctcaaggataatcactaaattctgccgaaaggactgaggaacggtgcctggaaaagggcaagaatatcacggcatgggcatgagtagcttgaaactgctgaagtatgtcctgtttttcttcaacttgctcttttggatctgtggctgctgcattttgggctttgggatctacctgctgatccacaacaacttcggagtgctcttccataacctcccctccctcacgctgggcaatgtgtttgtcatcgtgggctctattatcatggtagttgccttcctgggctgcatgggctctatcaaggaaaacaagtgtctgcttatgtcgttcttcatcctgctgctgattatcctccttgctgaggtgaccttggccatcctgctctttgtatatgaacagaagctgaatgagtatgtggctaagggtctgaccgacagcatccaccgttaccactcagacaatagcaccaaggcagcgtgggactccatccagtcatttctgcagtgttgtggtataaatggcacgagtgattggaccagtggcccaccagcatcttgcccctcagatcgaaaagtggagggttgctatgcgaaagcaagactgtggtttcattccaatttcctgtatatcggaatcatcaccatctgtgtatgtgtgattgaggtgttggggatgtcctttgcactgaccctgaactgccagattgacaaaaccagccagaccatagggctatgatctgcagtagtcctgtggtgaagagacttgtttcatctccggaaatgcaaaaccatttatagcatgaagccctacatgatcactgcaggatgatcctcctcccatcctttccctttttaggtccctgtcttatacaaccagagaagtgggtgttggccaggcacatcccatctcaggcagcaagacaatctttcactcactgacggcagcagccatgtctctcaaagtggtgaaactaatatctgagcatcttttagacaagagaggcaaagacaaactggatttaatggcccaacatcaaagggtgaacccaggatatgaatttttgcatcttcccattgtcgaattagtctccagcctctaaataatgcccagtcttctccccaaagtcaagcaagagactagttgaagggagttctggggccaggctcactggaccattgtcacaaccctctgtttctctttgactaagtgccctggctacaggaattacacagttctctttctccaaagggcaagatctcatttcaatttctttattagagggccttattgatgtgttctaagtctttccagaaaaaaactatccagtgatttatatcctgatttcaaccagtcacttagctgataatcacagtaagaagacttctggtattatctctctatcagataagattttgttaatgtactattttactcttcaataaataaaagtttattatctcaatcacaa

SEQ ID NO: 115652 - DNA, 2220 bp, Homo sapiens
  Payload ID: 2572
  Gene Symbol: CD55
  Gene Name: CD55 molecule, decay accelerating factor for complement (Cromer blood group)
  Uniprot ID: P08174
  ENST ID: ENST00000314754
  CDS Start-End: 66-1388
ccgctgggcgtagctgcgactcggcggagtcccggcggcgcgtccttgttctaacccggcgcgccatgaccgtcgcgcggccgagcgtgcccgcggcgctgcccctcctcggggagctgccccggctgctgctgctggtgctgttgtgcctgccggccgtgtggggtgactgtggccttcccccagatgtacctaatgcccagccagctttggaaggccgtacaagttttcccgaggatactgtaataacgtacaaatgtgaagaaagctttgtgaaaattcctggcgagaaggactcagtgatctgccttaagggcagtcaatggtcagatattgaagagttctgcaatcgtagctgcgaggtgccaacaaggctaaattctgcatccctcaaacagccttatatcactcagaattattttccagtcggtactgttgtggaatatgagtgccgtccaggttacagaagagaaccttctctatcaccaaaactaacttgccttcagaatttaaaatggtccacagcagtcgaattttgtaaaaagaaatcatgccctaatccgggagaaatacgaaatggtcagattgatgtaccaggtggcatattatttggtgcaaccatctccttctcatgtaacacagggtacaaattatttggctcgacttctagtttttgtcttatttcaggcagctctgtccagtggagtgacccgttgccagagtgcagagaaatttattgtccagcaccaccacaaattgacaatggaataattcaaggggaacgtgaccattatggatatagacagtctgtaacgtatgcatgtaataaaggattcaccatgattggagagcactctatttattgtactgtgaataatgatgaaggagagtggagtggcccaccacctgaatgcagaggaaaatctctaacttccaaggtcccaccaacagttcagaaacctaccacagtaaatgttccaactacagaagtctcaccaacttctcagaaaaccaccacaaaaaccaccacaccaaatgctcaagcaacacggagtacacctgtttccaggacaaccaagcattttcatgaaacaaccccaaataaaggaagtggaaccacttcaggtactacccgtcttctatctggttctcgtcctgtcacccaggctggtatgcggtggtgtgatcgtagctcactgcagtctcgaactcctgggttcaagcgatccttccacttcagcctcccaagtagctggtactacagggcacacgtgtttcacgttgacaggtttgcttgggacgctagtaaccatgggcttgctgacttagccaaagaagagttaagaagaaaatacacacaagtatacagactgttcctagtttcttagacttatctgcatattggataaaataaatgcaattgtgctcttcatttaggatgctttcattgtctttaagatgtgttaggaatgtcaacagagcaaggagaaaaaaggcagtcctggaatcacattcttagcacacctacacctcttgaaaatagaacaacttgcagaattgagagtgattcctttcctaaaagtgtaagaaagcatagagatttgttcgtatttagaatgggatcacgaggaaaagagaaggaaagtgatttttttccacaagatctgtaatgttatttccacttataaaggaaataaaaaatgaaaaacattatttggatatcaaaagcaaataaaaacccaattcagtctcttctaagcaaaattgctaaagagagatgaaccacattataaagtaatctttggctgtaaggcattttcatctttccttcgggttggcaaaatattttaaaggtaaaacatgctggtgaaccaggggtgttgatggtgataagggaggaatatagaatgaaagactgaatcttcctttgttgcacaaatagagtttggaaaaagcctgtgaaaggtgtcttctttgacttaatgtctttaaaagtatccagagatactacaatattaacataagaaaagattatatattatttctgaatcgagatgtccatagtcaaatttgtaaatcttattcttttgtaatatttatttatatttatttatgacagtgaacattctgattttacatgtaaaacaagaaaagttgaagaagatatgtgaagaaaaatgtatttttcctaaatagaaataaatgatcccattttttggt

SEQ ID NO: 115653 - DNA, 978 bp, Homo sapiens
  Payload ID: 2572
  Gene Symbol: CD55
  Gene Name: CD55 molecule, decay accelerating factor for complement (Cromer blood group)
  ENST ID: ENST00000343420
  CDS Start-End: 1-978
ccgcggcgctgcccctcctcggggagctgccccggctgctgctgctggtgctgttgtgcctgccggccgtgtgggagtccagccgtgtggagcacacgatgctgcaaacttgcatgtcatctctttcaggtgactgtggccttcccccagatgtacctaatgcccagccagctttggaaggccgtacaagttttcccgaggatactgtaataacgtacaaatgtgaagaaagctttgtgaaaattcctggcgagaaggactcagtgatctgccttaagggcagtcaatggtcagatattgaagagttctgcaatcgtagctgcgaggtgccaacaaggctaaattctgcatccctcaaacagccttatatcactcagaattattttccagtcggtactgttgtggaatatgagtgccgtccaggttacagaagagaaccttctctatcaccaaaactaacttgccttcagaatttaaaatggtccacagcagtcgaattttgtaaaaagaaatcatgccctaatccgggagaaatacgaaatggtcagattgatgtaccaggtggcatattatttggtgcaaccatctccttctcatgtaacacagggtacaaattatttggctcgacttctagtttttgtcttatttcaggcagctctgtccagtggagtgacccgttgccagagtgcagagaaatttattgtccagcaccaccacaaattgacaatggaataattcaaggggaacgtgaccattatggatatagacagtctgtaacgtatgcatgtaataaaggattcaccatgattggagagcactctatttattgtactgtgaataatgatgaaggagagtggagtggcccaccacctgaatgcagaggaaaatctctaacttccaaggtcccaccaacagttcagaaacctaccacagtaaatgttccaactacagaagtctcaccaacttctcagaaaacca

SEQ ID NO: 115654 - DNA, 1691 bp, Homo sapiens
  Payload ID: 2572
  Gene Symbol: CD55
  Gene Name: CD55 molecule, decay accelerating factor for complement (Cromer blood group)
  ENST ID: ENST00000367063
  CDS Start-End: 235-1569
gacgccggagccctctgaccgcacctctgaccacaacaaacccctactccacccgtcttgtttgtcccacccttggtgacgcagagccccagcccagaccccgcccaaagcactcatttaactggtattgcggagccacgaggcttctgcttactgcaactcgctccggccgctgggcgtagctgcgactcggcggagtcccggcggcgcgtccttgttctaacccggcgcgccatgaccgtcgcgcggccgagcgtgcccgcggcgctgcccctcctcggggagctgccccggctgctgctgctggtgctgttgtgcctgccggccgtgtggggtgactgtggccttcccccagatgtacctaatgcccagccagctttggaaggccgtacaagttttcccgaggatactgtaataacgtacaaatgtgaagaaagctttgtgaaaattcctggcgagaaggactcagtgatctgccttaagggcagtcaatggtcagatattgaagagttctgcaatcgtagctgcgaggtgccaacaaggctaaattctgcatccctcaaacagccttatatcactcagaattattttccagtcggtactgttgtggaatatgagtgccgtccaggttacagaagagaaccttctctatcaccaaaactaacttgccttcagaatttaaaatggtccacagcagtcgaattttgtaaaaagaaatcatgccctaatccgggagaaatacgaaatggtcagattgatgtaccaggtggcatattatttggtgcaaccatctccttctcatgtaacacagggtacaaattatttggctcgacttctagtttttgtcttatttcaggcagctctgtccagtggagtgacccgttgccagagtgcagagaaatttattgtccagcaccaccacaaattgacaatggaataattcaaggggaacgtgaccattatggatatagacagtctgtaacgtatgcatgtaataaaggattcaccatgattggagagcactctatttattgtactgtgaataatgatgaaggagagtggagtggcccaccacctgaatgcagaggaaaatctctaacttccaaggtcccaccaacagttcagaaacctaccacagtaaatgttccaactacagaagtctcaccaacttctcagaaaaccaccacaaaaaccaccacaccaaatgctcaagcaacacggagtacacctgtttccaggacaaccaagcattttcatgaaacaaccccaaataaaggaagtggaaccacttcaggtactacccgtcttctatctggttctcgtcctgtcacccaggctggtatgcggtggtgtgatcgtagctcactgcagtctcgaactcctgggttcaagcgatccttccacttcagcctcccaagtagctggtactacaggtgtgtgccacgacacccggctaagtttttgaaatttattttttgtagagacaggattttcctatgttgcccaggctggtttcaaactcctggccgtaagcgatttttccggcctcccaaaacgttgcgattataagtgtgagccactgcacctggccccacattttctttatccatttgtacattgatggacacttaagatgattccatatctttgctattgtgaatagtgcttcaataaatatgtgaatgcacata

SEQ ID NO: 115655 - DNA, 2760 bp, Homo sapiens
  Payload ID: 2572
  Gene Symbol: CD55
  Gene Name: CD55 molecule, decay accelerating factor for complement (Cromer blood group)
  Uniprot ID: P08174
  ENST ID: ENST00000367064
  CDS Start-End: 259-1404
gagtctagggcccccggggcgtatgacgccggagccctctgaccgcacctctgaccacaacaaacccctactccacccgtcttgtttgtcccacccttggtgacgcagagccccagcccagaccccgcccaaagcactcatttaactggtattgcggagccacgaggcttctgcttactgcaactcgctccggccgctgggcgtagctgcgactcggcggagtcccggcggcgcgtccttgttctaacccggcgcgccatgaccgtcgcgcggccgagcgtgcccgcggcgctgcccctcctcggggagctgccccggctgctgctgctggtgctgttgtgcctgccggccgtgtggggtgactgtggccttcccccagatgtacctaatgcccagccagctttggaaggccgtacaagttttcccgaggatactgtaataacgtacaaatgtgaagaaagctttgtgaaaattcctggcgagaaggactcagtgatctgccttaagggcagtcaatggtcagatattgaagagttctgcaatcgtagctgcgaggtgccaacaaggctaaattctgcatccctcaaacagccttatatcactcagaattattttccagtcggtactgttgtggaatatgagtgccgtccaggttacagaagagaaccttctctatcaccaaaactaacttgccttcagaatttaaaatggtccacagcagtcgaattttgtaaaaagaaatcatgccctaatccgggagaaatacgaaatggtcagattgatgtaccaggtggcatattatttggtgcaaccatctccttctcatgtaacacagggtacaaattatttggctcgacttctagtttttgtcttatttcaggcagctctgtccagtggagtgacccgttgccagagtgcagagaaatttattgtccagcaccaccacaaattgacaatggaataattcaaggggaacgtgaccattatggatatagacagtctgtaacgtatgcatgtaataaaggattcaccatgattggagagcactctatttattgtactgtgaataatgatgaaggagagtggagtggcccaccacctgaatgcagaggaaaatctctaacttccaaggtcccaccaacagttcagaaacctaccacagtaaatgttccaactacagaagtctcaccaacttctcagaaaaccaccacaaaaaccaccacaccaaatgctcaagcaacacggagtacacctgtttccaggacaaccaagcattttcatgaaacaaccccaaataaaggaagtggaaccacttcaggtactacccgtcttctatctgggcacacgtgtttcacgttgacaggtttgcttgggacgctagtaaccatgggcttgctgacttagccaaagaagagttaagaagaaaatacacacaagtatacagactgttcctagtttcttagacttatctgcatattggataaaataaatgcaattgtgctcttcatttaggatgctttcattgtctttaagatgtgttaggaatgtcaacagagcaaggagaaaaaaggcagtcctggaatcacattcttagcacacctacacctcttgaaaatagaacaacttgcagaattgagagtgattcctttcctaaaagtgtaagaaagcatagagatttgttcgtatttagaatgggatcacgaggaaaagagaaggaaagtgatttttttccacaagatctgtaatgttatttccacttataaaggaaataaaaaatgaaaaacattatttggatatcaaaagcaaataaaaacccaattcagtctcttctaagcaaaattgctaaagagagatgaaccacattataaagtaatctttggctgtaaggcattttcatctttccttcgggttggcaaaatattttaaaggtaaaacatgctggtgaaccaggggtgttgatggtgataagggaggaatatagaatgaaagactgaatcttcctttgttgcacaaatagagtttggaaaaagcctgtgaaaggtgtcttctttgacttaatgtctttaaaagtatccagagatactacaatattaacataagaaaagattatatattatttctgaatcgagatgtccatagtcaaatttgtaaatcttattcttttgtaatatttatttatatttatttatgacagtgaacattctgattttacatgtaaaacaagaaaagttgaagaagatatgtgaagaaaaatgtatttttcctaaatagaaataaatgatcccattttttggtatcatgtagtatgtgaaatttattcttaaacgtgactactttatttctaaataagaaattccctacctgcttcctacaagcagttcagaatgccatgccttggttgtcctagtgtgaataattttcagctactttaaaattatattgtactttctcaagcatgtcatatcctttcctattagagtatctatattacttgttactgatttacctgaaggcaatctgattaatttctaggtttttaccatattcttgtcatcttgccaattacattttaagtgttagactagactaagatgtactagttgtatagaatataactagatttattatggcaatgtttattttgtcattttgcttcatctgttttgttgttgaagtactttaaatttcatacgttcatggcatttcactgtaaagactttaatgtgtatttcttaaaataaaactttttttcctccttaa

SEQ ID NO: 115656 - DNA, 1843 bp, Homo sapiens
  Payload ID: 2572
  Gene Symbol: CD55
  Gene Name: CD55 molecule, decay accelerating factor for complement (Cromer blood group)
  ENST ID: ENST00000367067
  CDS Start-End: 34-1686
cggcggcgcgtccttgttctaacccggcgcgccatgaccgtcgcgcggccgagcgtgcccgcggcgctgcccctcctcggggagctgccccggctgctgctgctggtgctgttgtgcctgccggccgtgtggggtgactgtggccttcccccagatgtacctaatgcccagccagctttggaaggccgtacaagttttcccgaggatactgtaataacgtacaaatgtgaagaaagctttgtgaaaattcctggcgagaaggactcagtgatctgccttaagggcagtcaatggtcagatattgaagagttctgcaatcgtagctgcgaggtgccaacaaggctaaattctgcatccctcaaacagccttatatcactcagaattattttccagtcggtactgttgtggaatatgagtgccgtccaggttacagaagagaaccttctctatcaccaaaactaacttgccttcagaatttaaaatggtccacagcagtcgaattttgtaaaaagaaatcatgccctaatccgggagaaatacgaaatggtcagattgatgtaccaggtggcatattatttggtgcaaccatctccttctcatgtaacacagggtacaaattatttggctcgacttctagtttttgtcttatttcaggcagctctgtccagtggagtgacccgttgccagagtgcagagaaatttattgtccagcaccaccacaaattgacaatggaataattcaaggggaacgtgaccattatggatatagacagtctgtaacgtatgcatgtaataaaggattcaccatgattggagagcactctatttattgtactgtgaataatgatgaaggagagtggagtggcccaccacctgaatgcagaggaaaatctctaacttccaaggtcccaccaacagttcagaaacctaccacagtaaatgttccaactacagaagtctcaccaacttctcagaaaaccaccacaaaaaccaccacaccaaatgctcaaggtacagagactccatcagttcttcaaaaacacaccacagaaaatgtttcagctacaagaaccccaccaactcctcagaaacccaccacagtaaatgtcccagctacaatagtcacaccaacacctaaacccaccacaataaatgttccagctacaggagtctcatcaacacctcaaagacacaccatagtaaatgtttcagctacaggaaccctaccaactcttcagaaacccaccagagcaaatgattcagccaccaaatccccagcagcagctcagacatctttcatatcaaaaaccctatctacaaagaccccttctgcagctcagaatcccatgatgacaaatgcttctgctacacaggccacactaacagcccaaaaattcaccacagcaaaagttgcatttacgcagagtccttcagcagcacgtaagtccactaatgtacattccccagtgactaatggtctcaagagtacacaaagattcccttctgctcatattacagcaacacggagtacacctgtttccaggacaaccaagcattttcatgaaacaaccccaaataaaggaagtggaaccacttcaggtactacccgtcttctatctgggcacacgtgtttcacgttgacaggtttgcttgggacgctagtaaccatgggcttgctgacttagccaaagaagagttaagaagaaaatacacacaagtatacagactgttcctagtttcttagacttatctgcatattggataaaataaatgcaattgtgctcttcatttaggatgctttcattgtctttaagatgtgttaggaatgtcaacagagcaagg

SEQ ID NO: 115657 - DNA, 2433 bp, Homo sapiens
  Payload ID: 2572
  Gene Symbol: CD55
  Gene Name: CD55 molecule, decay accelerating factor for complement (Cromer blood group)
  ENST ID: ENST00000391921
  CDS Start-End: 124-1077
actcatttaactggtattgcggagccacgaggcttctgcttactgcaactcgctccggccgctgggcgtagctgcgactcggcggagtcccggcggcgcgtccttgttctaacccggcgcgccatgaccgtcgcgcggccgagcgtgcccgcggcgctgcccctcctcggggagctgccccggctgctgctgctggtgctgttgtgcctgccggccgtgtggggtgactgtggccttcccccagatgtacctaatgcccagccagctttggaaggccgtacaagttttcccgaggatactgtaataacgtacaaatgtgaagaaagctttgtgaaaattcctggcgagaaggactcagtgatctgccttaagggcagtcaatggtcagatattgaagagttctgcaatcagaaatcatgccctaatccgggagaaatacgaaatggtcagattgatgtaccaggtggcatattatttggtgcaaccatctccttctcatgtaacacagggtacaaattatttggctcgacttctagtttttgtcttatttcaggcagctctgtccagtggagtgacccgttgccagagtgcagagaaatttattgtccagcaccaccacaaattgacaatggaataattcaaggggaacgtgaccattatggatatagacagtctgtaacgtatgcatgtaataaaggattcaccatgattggagagcactctatttattgtactgtgaataatgatgaaggagagtggagtggcccaccacctgaatgcagaggaaaatctctaacttccaaggtcccaccaacagttcagaaacctaccacagtaaatgttccaactacagaagtctcaccaacttctcagaaaaccaccacaaaaaccaccacaccaaatgctcaagcaacacggagtacacctgtttccaggacaaccaagcattttcatgaaacaaccccaaataaaggaagtggaaccacttcaggtactacccgtcttctatctgggcacacgtgtttcacgttgacaggtttgcttgggacgctagtaaccatgggcttgctgacttagccaaagaagagttaagaagaaaatacacacaagtatacagactgttcctagtttcttagacttatctgcatattggataaaataaatgcaattgtgctcttcatttaggatgctttcattgtctttaagatgtgttaggaatgtcaacagagcaaggagaaaaaaggcagtcctggaatcacattcttagcacacctacacctcttgaaaatagaacaacttgcagaattgagagtgattcctttcctaaaagtgtaagaaagcatagagatttgttcgtatttagaatgggatcacgaggaaaagagaaggaaagtgatttttttccacaagatctgtaatgttatttccacttataaaggaaataaaaaatgaaaaacattatttggatatcaaaagcaaataaaaacccaattcagtctcttctaagcaaaattgctaaagagagatgaaccacattataaagtaatctttggctgtaaggcattttcatctttccttcgggttggcaaaatattttaaaggtaaaacatgctggtgaaccaggggtgttgatggtgataagggaggaatatagaatgaaagactgaatcttcctttgttgcacaaatagagtttggaaaaagcctgtgaaaggtgtcttctttgacttaatgtctttaaaagtatccagagatactacaatattaacataagaaaagattatatattatttctgaatcgagatgtccatagtcaaatttgtaaatcttattcttttgtaatatttatttatatttatttatgacagtgaacattctgattttacatgtaaaacaagaaaagttgaagaagatatgtgaagaaaaatgtatttttcctaaatagaaataaatgatcccattttttggtatcatgtagtatgtgaaatttattcttaaacgtgactactttatttctaaataagaaattccctacctgcttcctacaagcagttcagaatgccatgccttggttgtcctagtgtgaataattttcagctactttaaaattatattgtactttctcaagcatgtcatatcctttcctattagagtatctatattacttgttactgatttacctgaaggcaatctgattaatttctaggtttttaccatattcttgtcatcttgccaattacattttaagtgttagactagactaagatgtactagttgtatagaatataactagatttattatggcaatgtttattttgtcattttgcttcatctgttttgttgttgaagtactttaaatttcatacgttcatggcatttcactgtaaagactttaatgtgtatttcttaaaataaaactttttttcctccttaa

SEQ ID NO: 115658 - DNA, 892 bp, Homo sapiens
  Payload ID: 2573
  Gene Symbol: CD58
  Gene Name: CD58 molecule
  ENST ID: ENST00000369487
  CDS Start-End: 68-790
gtaggcggtgcttgaacttagggctgcttgtggctgggcactcgcgcagaggccggcccgacgagccatggttgctgggagcgacgcggggcgggccctgggggtcctcagcgtggtctgcctgctgcactgctttggtttcatcagctgtttttcccaacaaatatatggtgttgtgtatgggaatgtaactttccatgtaccaagcaatgtgcctttaaaagaggtcctatggaaaaaacaaaaggataaagttgcagaactggaaaattctgaattcagagctttctcatcttttaaaaatagggtttatttagacactgtgtcaggtagcctcactatctacaacttaacatcatcagatgaagatgagtatgaaatggaatcgccaaatattactgataccatgaagttctttctttatgtgcttgagtctcttccatctcccacactaacttgtgcattgactaatggaagcattgaagtccaatgcatgataccagagcattacaacagccatcgaggacttataatgtactcatgggattgtcctatggagcaatgtaaacgtaactcaaccagtatatattttaagatggaaaatgatcttccacaaaaaatacagtgtactcttagcaatccattatttaatacaacatcatcaatcattttgacaacctgtatcccaagcagcggtcattcaagacacagatatgcacttatacccataccattagcagtaattacaacatgtattgtgctgtatatgaatggtatgtatgctttttaaaacaaaatagtttgaaaacttgcattgttttccaaaggtcagaaaatagtttaaggatgaaaataaagtttgaaattttagacatttgaaaagaaacaaaaa

SEQ ID NO: 115659 - DNA, 1098 bp, Homo sapiens
  Payload ID: 2573
  Gene Symbol: CD58
  Gene Name: CD58 molecule
  Uniprot ID: P19256
  ENST ID: ENST00000369489
  CDS Start-End: 68-820
gtaggcggtgcttgaacttagggctgcttgtggctgggcactcgcgcagaggccggcccgacgagccatggttgctgggagcgacgcggggcgggccctgggggtcctcagcgtggtctgcctgctgcactgctttggtttcatcagctgtttttcccaacaaatatatggtgttgtgtatgggaatgtaactttccatgtaccaagcaatgtgcctttaaaagaggtcctatggaaaaaacaaaaggataaagttgcagaactggaaaattctgaattcagagctttctcatcttttaaaaatagggtttatttagacactgtgtcaggtagcctcactatctacaacttaacatcatcagatgaagatgagtatgaaatggaatcgccaaatattactgataccatgaagttctttctttatgtgcttgagtctcttccatctcccacactaacttgtgcattgactaatggaagcattgaagtccaatgcatgataccagagcattacaacagccatcgaggacttataatgtactcatgggattgtcctatggagcaatgtaaacgtaactcaaccagtatatattttaagatggaaaatgatcttccacaaaaaatacagtgtactcttagcaatccattatttaatacaacatcatcaatcattttgacaacctgtatcccaagcagcggtcattcaagacacagatatgcacttatacccataccattagcagtaattacaacatgtattgtgctgtatatgaatggtattctgaaatgtgacagaaaaccagacagaaccaactccaattgattggtaacagaagatgaagacaacagcataactaaattattttaaaaactaaaaagccatctgatttctcatttgagtattacaatttttgaacaactgttggaaatgtaacttgaagcagctgctttaagaagaaatacccactaacaaagaacaagcattagttttggctgtcatcaacttattatatgactaggtgcttgctttttttgtcagtaaattgtttttactgatgatgtagatacttttgtaaataaatgtaaatatgtacacaagtg

SEQ ID NO: 115660 - DNA, 1328 bp, Homo sapiens
  Payload ID: 2573
  Gene Symbol: CD58
  Gene Name: CD58 molecule
  Uniprot ID: P19256
  ENST ID: ENST00000457047
  CDS Start-End: 55-801
gaacttagggctgcttgtggctgggcactcgcgcagaggccggcccgacgagccatggttgctgggagcgacgcggggcgggccctgggggtcctcagcgtggtctgcctgctgcactgctttggtttcatcagctgtttttcccaacaaatatatggtgttgtgtatgggaatgtaactttccatgtaccaagcaatgtgcctttaaaagaggtcctatggaaaaaacaaaaggataaagttgcagaactggaaaattctgaattcagagctttctcatcttttaaaaatagggtttatttagacactgtgtcaggtagcctcactatctacaacttaacatcatcagatgaagatgagtatgaaatggaatcgccaaatattactgataccatgaagttctttctttatgtgcttgagtctcttccatctcccacactaacttgtgcattgactaatggaagcattgaagtccaatgcatgataccagagcattacaacagccatcgaggacttataatgtactcatgggattgtcctatggagcaatgtaaacgtaactcaaccagtatatattttaagatggaaaatgatcttccacaaaaaatacagtgtactcttagcaatccattatttaatacaacatcatcaatcattttgacaacctgtatcccaagcagcggtcattcaagacacagatatgcacttatacccataccattagcagtaattacaacatgtattgtgctgtatatgaatggtattctgaaatgtgacagaaaaccagacagaaccaagtaagtacactgcaggctgtgcactctgtgccagaacaacagcagccctgctgtagatgcccattacttgggaagccagattgtactcatctgttggttgccttgtacagtaataagaagtaacatcagcagatatactaaccatagtgtattaagtaccaactgtgtgccatgcactgcactagccactctctgcatatcgtttcctggaaccctctcaatgagccttgcaggaggagtatcataccccttgcttagagacagcgcatatgagattcatagaagtcaagtgagatatcaaagtcacgttgctagtaagtgatgggctgggatttaaatctaggtctttggactccaagagttatactgttaaccactacaatacactccctccacctcccatcccagaaaaagttggatcagggatagggttcacttcaggagccagggtcagagctgggcctgtagtcacatataaaagataggacacaaacacaattagcagcagtgttggtttaataaaccgccgta

SEQ ID NO: 115661 - DNA, 874 bp, Homo sapiens
  Payload ID: 2573
  Gene Symbol: CD58
  Gene Name: CD58 molecule
  Uniprot ID: P19256
  ENST ID: ENST00000464088
  CDS Start-End: 13-726
gcccgacgagccatggttgctgggagcgacgcggggcgggccctgggggtcctcagcgtggtctgcctgctgcactgctttggtttcatcagctgtttttcccaacaaatatatggtgttgtgtatgggaatgtaactttccatgtaccaagcaatgtgcctttaaaagaggtcctatggaaaaaacaaaaggataaagttgcagaactggaaaattctgaattcagagctttctcatcttttaaaaatagggtttatttagacactgtgtcaggtagcctcactatctacaacttaacatcatcagatgaagatgagtatgaaatggaatcgccaaatattactgataccatgaagttctttctttatgtgcttgagtctcttccatctcccacactaacttgtgcattgactaatggaagcattgaagtccaatgcatgataccagagcattacaacagccatcgaggacttataatgtactcatgggattgtcctatggagcaatgtaaacgtaactcaaccagtatatattttaagatggaaaatgatcttccacaaaaaatacagtgtactcttagcaatccattatttaatacaacatcatcaatcattttgacaacctgtatcccaagcagcggtcattcaagacacagatatgcacttatacccataccattagcagtaattacaacatgtattgtgctgtatatgaatgttctttaattgagaagacaatttcttcatttttaggtattctgaaatgtgacagaaaaccagacagaaccaactccaattgattggtaacagaagatgaagacaacagcataactaaattattttaaaaactaaaaagccatctgatttctcattt

SEQ ID NO: 115662 - DNA, 395 bp, Homo sapiens
  Payload ID: 2573
  Gene Symbol: CD58
  Gene Name: CD58 molecule
  ENST ID: ENST00000526981
  CDS Start-End: 1-395
ttttcccaacaaatatatggtgttgtgtatgggaatgtaactttccatgtaccaagcaatgtgcctttaaaagaggtcctatggaaaaaacaaaaggataaagttgcagaactggaaaattctgaattcagagctttctcatcttttaaaaatagggtttatttagacactgtgtcaggtagcctcactatctacaacttaacatcatcagatgaagatgagtatgaaatggaatcgccaaatattactgataccatgaagttctttctttatgtgcttggtcattcaagacacagatatgcacttatacccataccattagcagtaattacaacatgtattgtgctgtatatgaatggtattctgaaatgtgacagaaaaccagacagaaccaa

SEQ ID NO: 115663 - DNA, 1775 bp, Homo sapiens
  Payload ID: 2574
  Gene Symbol: CD59
  Gene Name: CD59 molecule, complement regulatory protein
  Uniprot ID: P13987
  ENST ID: ENST00000351554
  CDS Start-End: 128-514
aaagaatgcgggggctgagcgcagaagcggctcgaggctggaagaggatcttgggcgccgccagtctttagcaccagttggtgtaggagttgagacctacttcacagtagttctgtggacaatcacaatgggaatccaaggagggtctgtcctgttcgggctgctgctcgtcctggctgtcttctgccattcaggtcatagcctgcagtgctacaactgtcctaacccaactgctgactgcaaaacagccgtcaattgttcatctgattttgatgcgtgtctcattaccaaagctgggttacaagtgtataacaagtgttggaagtttgagcattgcaatttcaacgacgtcacaacccgcttgagggaaaatgagctaacgtactactgctgcaagaaggacctgtgtaactttaacgaacagcttgaaaatggtgggacatccttatcagagaaaacagttcttctgctggtgactccatttctggcagcagcctggagccttcatccctaagtcaacaccaggagagcttctcccaaactccccgttcctgcgtagtccgctttctcttgctgccacattctaaaggcttgatattttccaaatggatcctgttgggaaagaataaaattagcttgagcaacctggctaagatagaggggctctgggagactttgaagaccagtcctgtttgcagggaagccccacttgaaggaagaagtctaagagtgaagtaggtgtgacttgaactagattgcatgcttcctcctttgctcttgggaagaccagctttgcagtgacagcttgagtgggttctctgcagccctcagattatttttcctctggctccttggatgtagtcagttagcatcattagtacatctttggagggtggggcaggagtatatgagcatcctctctcacatggaacgctttcataaacttcagggatcccgtgttgccatggaggcatgccaaatgttccatatgtgggtgtcagtcagggacaacaagatccttaatgcagagctagaggacttctggcagggaagtggggaagtgttccagatagcagggcatgaaaacttagagaggtacaagtggctgaaaatcgagtttttcctctgtctttaaattttatatgggctttgttatcttccactggaaaagtgtaatagcatacatcaatggtgtgttaaagctatttccttgccttttttttattggaatggtaggatatcttggctttgccacacacagttacagagtgaacactctactacatgtgactggcagtattaagtgtgcttattttaaatgttactggtagaaaggcagttcaggtatgtgtgtatatagtatgaatgcagtggggacaccctttgtggttacagtttgagacttccaaaggtcatccttaataacaacagatctgcaggggtatgttttaccatctgcatccagcctcctgctaactcctagctgactcagcatagattgtataaaatacctttgtaacggctcttagcacactcacagatgtttgaggctttcagaagctcttctaaaaaatgatacacacctttcacaagggcaaactttttccttttccctgtgtattctagtgaatgaatctcaagattcagtagacctaatgacatttgtattttatgatcttggctgtatttaatggcataggctgacttttgcagatggaggaatttcttgattaatgttgaaaaaaaacccttgattatactctgttggacaaacc

SEQ ID NO: 115664 - DNA, 1889 bp, Homo sapiens
  Payload ID: 2574
  Gene Symbol: CD59
  Gene Name: CD59 molecule, complement regulatory protein
  Uniprot ID: P13987
  ENST ID: ENST00000395850
  CDS Start-End: 77-463
tgcgggggctgagcgcagaagcggctcgaggctggaagaggatcttgggcgccgccaggttctgtggacaatcacaatgggaatccaaggagggtctgtcctgttcgggctgctgctcgtcctggctgtcttctgccattcaggtcatagcctgcagtgctacaactgtcctaacccaactgctgactgcaaaacagccgtcaattgttcatctgattttgatgcgtgtctcattaccaaagctgggttacaagtgtataacaagtgttggaagtttgagcattgcaatttcaacgacgtcacaacccgcttgagggaaaatgagctaacgtactactgctgcaagaaggacctgtgtaactttaacgaacagcttgaaaatggtgggacatccttatcagagaaaacagttcttctgctggtgactccatttctggcagcagcctggagccttcatccctaagtcaacaccaggagagcttctcccaaactccccgttcctgcgtagtccgctttctcttgctgccacattctaaaggcttgatattttccaaatggatcctgttgggaaagaataaaattagcttgagcaacctggctaagatagaggggctctgggagactttgaagaccagtcctgtttgcagggaagccccacttgaaggaagaagtctaagagtgaagtaggtgtgacttgaactagattgcatgcttcctcctttgctcttgggaagaccagctttgcagtgacagcttgagtgggttctctgcagccctcagattatttttcctctggctccttggatgtagtcagttagcatcattagtacatctttggagggtggggcaggagtatatgagcatcctctctcacatggaacgctttcataaacttcagggatcccgtgttgccatggaggcatgccaaatgttccatatgtgggtgtcagtcagggacaacaagatccttaatgcagagctagaggacttctggcagggaagtggggaagtgttccagatagcagggcatgaaaacttagagaggtacaagtggctgaaaatcgagtttttcctctgtctttaaattttatatgggctttgttatcttccactggaaaagtgtaatagcatacatcaatggtgtgttaaagctatttccttgccttttttttattggaatggtaggatatcttggctttgccacacacagttacagagtgaacactctactacatgtgactggcagtattaagtgtgcttattttaaatgttactggtagaaaggcagttcaggtatgtgtgtatatagtatgaatgcagtggggacaccctttgtggttacagtttgagacttccaaaggtcatccttaataacaacagatctgcaggggtatgttttaccatctgcatccagcctcctgctaactcctagctgactcagcatagattgtataaaatacctttgtaacggctcttagcacactcacagatgtttgaggctttcagaagctcttctaaaaaatgatacacacctttcacaagggcaaactttttccttttccctgtgtattctagtgaatgaatctcaagattcagtagacctaatgacatttgtattttatgatcttggctgtatttaatggcataggctgacttttgcagatggaggaatttcttgattaatgttgaaaaaaaacccttgattatactctgttggacaaaccgagtgcaatgaatgatgcttttctgaaaatgaaatataacaagtgggtgaatgtggttatggccgaaaaggatatgcagtatgcttaatggtagcaactgaaagaagacatcctgagcagtgccagctttcttctgttgatgccgttccctgaacataggaaaat

SEQ ID NO: 115665 - DNA, 741 bp, Homo sapiens
  Payload ID: 2574
  Gene Symbol: CD59
  Gene Name: CD59 molecule, complement regulatory protein
  Uniprot ID: P13987
  ENST ID: ENST00000426650
  CDS Start-End: 55-441
attatacttcttacagtgaggagccagagcttccaggttctgtggacaatcacaatgggaatccaaggagggtctgtcctgttcgggctgctgctcgtcctggctgtcttctgccattcaggtcatagcctgcagtgctacaactgtcctaacccaactgctgactgcaaaacagccgtcaattgttcatctgattttgatgcgtgtctcattaccaaagctgggttacaagtgtataacaagtgttggaagtttgagcattgcaatttcaacgacgtcacaacccgcttgagggaaaatgagctaacgtactactgctgcaagaaggacctgtgtaactttaacgaacagcttgaaaatggtgggacatccttatcagagaaaacagttcttctgctggtgactccatttctggcagcagcctggagccttcatccctaagtcaacaccaggagagcttctcccaaactccccgttcctgcgtagtccgctttctcttgctgccacattctaaaggcttgatattttccaaatggatcctgttgggaaagaataaaattagcttgagcaacctggctaagatagaggggctctgggagactttgaagaccagtcctgtttgcagggaagccccacttgaaggaagaagtctaagagtgaagtaggtgtgacttgaactagattgcatgcttcctcctttgctcttgggaagaccagctttgcagtgacagcttgagtggg

SEQ ID NO: 115666 - DNA, 825 bp, Homo sapiens
  Payload ID: 2574
  Gene Symbol: CD59
  Gene Name: CD59 molecule, complement regulatory protein
  Uniprot ID: P13987
  ENST ID: ENST00000445143
  CDS Start-End: 111-497
atttgactcactgaccctgatggggaagatagtgttattcccacagtgtggtagtacacactggggcttatagggactgagcctactcaagggttctgtggacaatcacaatgggaatccaaggagggtctgtcctgttcgggctgctgctcgtcctggctgtcttctgccattcaggtcatagcctgcagtgctacaactgtcctaacccaactgctgactgcaaaacagccgtcaattgttcatctgattttgatgcgtgtctcattaccaaagctgggttacaagtgtataacaagtgttggaagtttgagcattgcaatttcaacgacgtcacaacccgcttgagggaaaatgagctaacgtactactgctgcaagaaggacctgtgtaactttaacgaacagcttgaaaatggtgggacatccttatcagagaaaacagttcttctgctggtgactccatttctggcagcagcctggagccttcatccctaagtcaacaccaggagagcttctcccaaactccccgttcctgcgtagtccgctttctcttgctgccacattctaaaggcttgatattttccaaatggatcctgttgggaaagaataaaattagcttgagcaacctggctaagatagaggggctctgggagactttgaagaccagtcctgtttgcagggaagccccacttgaaggaagaagtctaagagtgaagtaggtgtgacttgaactagattgcatgcttcctcctttgctcttgggaagaccagctttgcagtgacagcttgagtgggttctctgcagccctcagattatttttcc

SEQ ID NO: 115667 - DNA, 1878 bp, Homo sapiens
  Payload ID: 2574
  Gene Symbol: CD59
  Gene Name: CD59 molecule, complement regulatory protein
  Uniprot ID: P13987
  ENST ID: ENST00000415002
  CDS Start-End: 266-652
tgatggggaagatagtgttattcccacagtgtggtagtacacactggggcttatagggactgagcctactcaagggtatatggtgctgtgggtcagagctggggcatggcccagggattcagtgtgccttgactccccctgtaaatgttcctctcagaagccttcttggccttccagcccttggtttttgagacaaccagcagtcatttgttcgttcctgacattccttcctgtcccttccttccaggttctgtggacaatcacaatgggaatccaaggagggtctgtcctgttcgggctgctgctcgtcctggctgtcttctgccattcaggtcatagcctgcagtgctacaactgtcctaacccaactgctgactgcaaaacagccgtcaattgttcatctgattttgatgcgtgtctcattaccaaagctgggttacaagtgtataacaagtgttggaagtttgagcattgcaatttcaacgacgtcacaacccgcttgagggaaaatgagctaacgtactactgctgcaagaaggacctgtgtaactttaacgaacagcttgaaaatggtgggacatccttatcagagaaaacagttcttctgctggtgactccatttctggcagcagcctggagccttcatccctaagtcaacaccaggagagcttctcccaaactccccgttcctgcgtagtccgctttctcttgctgccacattctaaaggcttgatattttccaaatggatcctgttgggaaagaataaaattagcttgagcaacctggctaagatagaggggctctgggagactttgaagaccagtcctgtttgcagggaagccccacttgaaggaagaagtctaagagtgaagtaggtgtgacttgaactagattgcatgcttcctcctttgctcttgggaagaccagctttgcagtgacagcttgagtgggttctctgcagccctcagattatttttcctctggctccttggatgtagtcagttagcatcattagtacatctttggagggtggggcaggagtatatgagcatcctctctcacatggaacgctttcataaacttcagggatcccgtgttgccatggaggcatgccaaatgttccatatgtgggtgtcagtcagggacaacaagatccttaatgcagagctagaggacttctggcagggaagtggggaagtgttccagatagcagggcatgaaaacttagagaggtacaagtggctgaaaatcgagtttttcctctgtctttaaattttatatgggctttgttatcttccactggaaaagtgtaatagcatacatcaatggtgtgttaaagctatttccttgccttttttttattggaatggtaggatatcttggctttgccacacacagttacagagtgaacactctactacatgtgactggcagtattaagtgtgcttattttaaatgttactggtagaaaggcagttcaggtatgtgtgtatatagtatgaatgcagtggggacaccctttgtggttacagtttgagacttccaaaggtcatccttaataacaacagatctgcaggggtatgttttaccatctgcatccagcctcctgctaactcctagctgactcagcatagattgtataaaatacctttgtaacggctcttagcacactcacagatgtttgaggctttcagaagctcttctaaaaaatgatacacacctttcacaagggcaaactttttccttttccctgtgtattctagtgaatgaatctcaagattcagtagacctaatgacatttgtattttatgatcttggctgtatttaatggcataggctgacttttgcagatggaggaatttcttgattaatgttga

SEQ ID NO: 115668 - DNA, 758 bp, Homo sapiens
  Payload ID: 2574
  Gene Symbol: CD59
  Gene Name: CD59 molecule, complement regulatory protein
  Uniprot ID: P13987
  ENST ID: ENST00000437761
  CDS Start-End: 175-561
tttgactcactgaccctgatggggaagatagtgttattcccacagtgtggtagtacacactggggcttatagggactgagcctactcaagggtatatggtgctgtgggtcagagctggggcatggcccagggattcagtgtgccttgactccccctgttctgtggacaatcacaatgggaatccaaggagggtctgtcctgttcgggctgctgctcgtcctggctgtcttctgccattcaggtcatagcctgcagtgctacaactgtcctaacccaactgctgactgcaaaacagccgtcaattgttcatctgattttgatgcgtgtctcattaccaaagctgggttacaagtgtataacaagtgttggaagtttgagcattgcaatttcaacgacgtcacaacccgcttgagggaaaatgagctaacgtactactgctgcaagaaggacctgtgtaactttaacgaacagcttgaaaatggtgggacatccttatcagagaaaacagttcttctgctggtgactccatttctggcagcagcctggagccttcatccctaagtcaacaccaggagagcttctcccaaactccccgttcctgcgtagtccgctttctcttgctgccacattctaaaggcttgatattttccaaatggatcctgttgggaaagaataaaattagcttgagcaacctggctaagatagaggggctctgggagactttgaagaccagtcctgtttgcagggaagccccactt

SEQ ID NO: 115669 - DNA, 572 bp, Homo sapiens
  Payload ID: 2574
  Gene Symbol: CD59
  Gene Name: CD59 molecule, complement regulatory protein
  ENST ID: ENST00000534312
  CDS Start-End: 12-404
ggacaatcacaatgggaatccaaggagggtctgtcctgttcgggctgctgctcgtcctggctgtcttctgccattcaggtcatagcctgcagtgctacaactgtcctaacccaactgctgactgcaaaacagccgtcaattgttcatctgattttgatgcgtgtctcattaccaaagctgggttacaagtgtataacaagtgttggaagtttgagcattgcaatttcaacgacgtcacaacccgcttgagggaaaatgagctaacgtactactgctgcaagaaggacctgtgtaactttaacgaacagcttgaaaatgacacattcctgaaggcgctaaaagacgaaaagttacaaggactgaagaccaagcaacctggaaagaagtcggcctctctctcctgaggagctgcctaccagagcttgggcagccacctccttaggtgttagtgcttagataatgtgtcccatttgttgtcatttcaaagatggttattttctgttctgtatttaccgctgttcttgttgctaccagcatgtacttcacatacagtgcccactttgtgtggtaaa

SEQ ID NO: 115670 - DNA, 686 bp, Homo sapiens
  Payload ID: 2574
  Gene Symbol: CD59
  Gene Name: CD59 molecule, complement regulatory protein
  Uniprot ID: P13987
  ENST ID: ENST00000527577
  CDS Start-End: 179-565
gcagaagcggctcgaggctggaagaggatcttgggcgccgccagtctctctctgttgcccaagctggagtgcagtggcacagtcttggctcactgcaacctccacctcctgggtgcaagcgattctcgtgtctcagcctctcaagtagctgggattacaggttctgtggacaatcacaatgggaatccaaggagggtctgtcctgttcgggctgctgctcgtcctggctgtcttctgccattcaggtcatagcctgcagtgctacaactgtcctaacccaactgctgactgcaaaacagccgtcaattgttcatctgattttgatgcgtgtctcattaccaaagctgggttacaagtgtataacaagtgttggaagtttgagcattgcaatttcaacgacgtcacaacccgcttgagggaaaatgagctaacgtactactgctgcaagaaggacctgtgtaactttaacgaacagcttgaaaatggtgggacatccttatcagagaaaacagttcttctgctggtgactccatttctggcagcagcctggagccttcatccctaagtcaacaccaggagagcttctcccaaactccccgttcctgcgtagtccgctttctcttgctgccacattctaaaggcttgatattttccaaatggatcctgttgggaaagaataaaattag

SEQ ID NO: 115671 - DNA, 652 bp, Homo sapiens
  Payload ID: 2574
  Gene Symbol: CD59
  Gene Name: CD59 molecule, complement regulatory protein
  Uniprot ID: P13987
  ENST ID: ENST00000528700
  CDS Start-End: 221-607
gaagcggctcgaggctggaagaggatcttgggcgccgccagtctctctctgttgcccaagctggagtgcagtggcacagtcttggctcactgcaacctccacctcctgggtgcaagcgattctcgtgtctcagcctctcaagtagctgggattacagtctttagcaccagttggtgtaggagttgagacctacttcacagtagttctgtggacaatcacaatgggaatccaaggagggtctgtcctgttcgggctgctgctcgtcctggctgtcttctgccattcaggtcatagcctgcagtgctacaactgtcctaacccaactgctgactgcaaaacagccgtcaattgttcatctgattttgatgcgtgtctcattaccaaagctgggttacaagtgtataacaagtgttggaagtttgagcattgcaatttcaacgacgtcacaacccgcttgagggaaaatgagctaacgtactactgctgcaagaaggacctgtgtaactttaacgaacagcttgaaaatggtgggacatccttatcagagaaaacagttcttctgctggtgactccatttctggcagcagcctggagccttcatccctaagtcaacaccaggagagcttctcccaaactccccgttcctgcgtag

SEQ ID NO: 115672 - DNA, 789 bp, Homo sapiens
  Payload ID: 2574
  Gene Symbol: CD59
  Gene Name: CD59 molecule, complement regulatory protein
  Uniprot ID: P13987
  ENST ID: ENST00000525763
  CDS Start-End: 23-409
ccaggttctgtggacaatcacaatgggaatccaaggagggtctgtcctgttcgggctgctgctcgtcctggctgtcttctgccattcaggtcatagcctgcagtgctacaactgtcctaacccaactgctgactgcaaaacagccgtcaattgttcatctgattttgatgcgtgtctcattaccaaagctgggttacaagtgtataacaagtgttggaagtttgagcattgcaatttcaacgacgtcacaacccgcttgagggaaaatgagctaacgtactactgctgcaagaaggacctgtgtaactttaacgaacagcttgaaaatggtgggacatccttatcagagaaaacagttcttctgctggtgactccatttctggcagcagcctggagccttcatccctaagtcaacaccaggagagcttctcccaaactccccgttcctgcgtagtccgctttctcttgctgccacattctaaaggcttgatattttccaaatggatcctgttgggaaagaataaaattagcttgagcaacctggctaagatagaggggctctgggagactttgaagaccagtcctgtttgcagggaagccccacttgaaggaagaagtctaagagtgaaacacattcctgaaggcgctaaaagacgaaaagttacaaggactgaagaccaagcaacctggaaagaagtcggcctctctctcctgaggagctgcctaccagagcttgggcagccacctccttaggtgttagtgcttagataatgtgtcccatttgttgtc

SEQ ID NO: 115673 - DNA, 424 bp, Homo sapiens
  Payload ID: 2574
  Gene Symbol: CD59
  Gene Name: CD59 molecule, complement regulatory protein
  ENST ID: ENST00000533181
  CDS Start-End: 1-158
cccgcttgagggaaaatgagctaacgtactactgctgcaagaaggacctgtgtaactttaacgaacagcttgaaaatggtgggacatccttatcagagaaaacagttcttctgctggtgactccatttctggcagcagcctggagccttcatccctaagtcaacaccaggagagcttctcccaaactccccgttcctgcgtagtccgctttctcttgctgccacattctaaaggcttgatattttccaaatggatcctgttgggaaagaataaaattagcttgagcaacctggctaagatagaggggctctgggagactttgaagaccagtcctgtttgcagggaagccccacttgaaggaagaagtctaagagtgaagttcagagcctggggcctgagaattaaactgacaaagacagattaa

SEQ ID NO: 115674 - DNA, 1847 bp, Homo sapiens
  Payload ID: 2574
  Gene Symbol: CD59
  Gene Name: CD59 molecule, complement regulatory protein
  ENST ID: ENST00000533403
  CDS Start-End: 46-405
ctggaagaggatcttgggcgccgccaggttctgtggacaatcacaatgggaatccaaggagggtctgtcctgttcgggctgctgctcgtcctggctgtcttctgccattcaggtcatagcctgcagtgctacaactgtcctaacccaactgctgactgcaaaacagccgtcaattgttcatctgattttgatgcgtgtctcattaccaaagctgagttgggatatcactatgttgcccaggctggccgcaggcaatcctctcacttcagcctcctaaagtgctgggattacaggtgtgagccatcacactggcctcattgtccatattttaattggggttacaagtgtataacaagtgttggaagtttgagcattgcaatttcaacgacgtcacaacccgcttgagggaaaatgagctaacgtactactgctgcaagaaggacctgtgtaactttaacgaacagcttgaaaatggtgggacatccttatcagagaaaacagttcttctgctggtgactccatttctggcagcagcctggagccttcatccctaagtcaacaccaggagagcttctcccaaactccccgttcctgcgtagtccgctttctcttgctgccacattctaaaggcttgatattttccaaatggatcctgttgggaaagaataaaattagcttgagcaacctggctaagatagaggggctctgggagactttgaagaccagtcctgtttgcagggaagccccacttgaaggaagaagtctaagagtgaagtaggtgtgacttgaactagattgcatgcttcctcctttgctcttgggaagaccagctttgcagtgacagcttgagtgggttctctgcagccctcagattatttttcctctggctccttggatgtagtcagttagcatcattagtacatctttggagggtggggcaggagtatatgagcatcctctctcacatggaacgctttcataaacttcagggatcccgtgttgccatggaggcatgccaaatgttccatatgtgggtgtcagtcagggacaacaagatccttaatgcagagctagaggacttctggcagggaagtggggaagtgttccagatagcagggcatgaaaacttagagaggtacaagtggctgaaaatcgagtttttcctctgtctttaaattttatatgggctttgttatcttccactggaaaagtgtaatagcatacatcaatggtgtgttaaagctatttccttgccttttttttattggaatggtaggatatcttggctttgccacacacagttacagagtgaacactctactacatgtgactggcagtattaagtgtgcttattttaaatgttactggtagaaaggcagttcaggtatgtgtgtatatagtatgaatgcagtggggacaccctttgtggttacagtttgagacttccaaaggtcatccttaataacaacagatctgcaggggtatgttttaccatctgcatccagcctcctgctaactcctagctgactcagcatagattgtataaaatacctttgtaacggctcttagcacactcacagatgtttgaggctttcagaagctcttctaaaaaatgatacacacctttcacaagggcaaactttttccttttccctgtgtattctagtgaatgaatctcaagattcagtagacctaatgacatttgtattttatgatcttggctgtatttaatggcataggctgacttttgcagatggaggaatttcttgattaatgttgaaaaaaaacccttgattatactctgttggacaaaccgagtgcaatgaatgatgcttttctgaaaatga

SEQ ID NO: 115675 - DNA, 633 bp, Homo sapiens
  Payload ID: 2574
  Gene Symbol: CD59
  Gene Name: CD59 molecule, complement regulatory protein
  ENST ID: ENST00000527926
  CDS Start-End: 4-330
acaatgggaatccaaggagggtctgtcctgttcgggctgctgctcgtcctggctgtcttctgccattcaggtcatagcctgcagtgctacaactgtcctaacccaactgctgactgcaaaacagccgtcaattgttcatctgattttgatgcgtgtctcattaccaaagctgggttacaagtgtataacaagtgttggaagtttgagcattgcaatttcaacgacgtcacaacccgcttgagggaaaatgagctaacgtactactgctgcaagaaggacctgtgtaactttaacgaacagcttgaaaatggttcagagcctggggcctgagaattaaactgacaaagacagattaacagaagacaaagtttattacgcagacacattcctgaaggcgctaaaagacgaaaagttacaaggactgaagaccaagcaacctggaaagaagtcggcctctctctcctgaggagctgcctaccagagcttgggcagccacctccttaggtgttagtgcttagataatgtgtcccatttgttgtcatttcaaagatggttattttctgttctgtatttaccgctgttcttgttgctaccagcatgtacttcacatacagtgcccactttgtgtggtaa

SEQ ID NO: 115676 - DNA, 3252 bp, Homo sapiens
  Payload ID: 2575
  Gene Symbol: CD6
  Gene Name: CD6 molecule
  Uniprot ID: P30203
  ENST ID: ENST00000313421
  CDS Start-End: 187-2193
actcacaggttgggtttgatcgcatgcgtgtcggagaggagagagcagagagagacacaggaacaagaacagcaaagggtagagcagacctgcgccaggggcgcacaacggccgtgtccacctcccggccccaagatggtgcttcccacaggcagccacgcgtagcagccagagacagctccagacatgtggctcttcttcgggatcactggattgctgacggcagccctctcaggtcatccatctccagccccacctgaccagctcaacaccagcagtgcagagagtgagctctgggagccaggggagcggcttccggtccgtctgacaaacgggagcagcagctgcagcgggacggtggaggtgcggctcgaggcgtcctgggagcccgcgtgcggggcgctctgggacagccgcgccgccgaggccgtgtgccgagcactgggctgcggcggggcggaggccgcctctcagctcgccccgccgacccctgagctgccgcccccgcctgcagccgggaacaccagcgtagcagctaatgccactctggccggggcgcccgccctcctgtgcagcggcgccgagtggcggctctgcgaggtggtggagcacgcgtgccgcagcgacgggaggcgggcccgtgtcacctgtgcagagaaccgcgcgctgcgcctggtggacggtggcggcgcctgcgccggccgcgtggagatgctggagcatggcgagtggggatcagtgtgcgatgacacttgggacctggaggacgcccacgtggtgtgcaggcaactgggctgcggctgggcagtccaggccctgcccggcttgcacttcacgcccggccgcgggcctatccaccgggaccaggtgaactgctcgggggccgaagcttacctgtgggactgcccggggctgccaggacagcactactgcggccacaaagaggacgcgggcgcggtgtgctcagagcaccagtcctggcgcctgacagggggcgctgaccgctgcgaggggcaggtggaggtacacttccgaggggtctggaacacagtgtgtgacagtgagtggtacccatcggaggccaaggtgctctgccagtccttgggctgtggaactgcggttgagaggcccaaggggctgccccactccttgtccggcaggatgtactactcatgcaatggggaggagctcaccctctccaactgctcctggcggttcaacaactccaacctctgcagccagtcgctggcagccagggtcctctgctcagcttcccggagtttgcacaatctgtccactcccgaagtccctgcaagtgttcagacagtcactatagaatcttctgtgacagtgaaaatagagaacaaggaatctcgggagctaatgctcctcatcccctccatcgttctgggaattctcctccttggctccctcatcttcatagccttcatcctcttgagaattaaaggaaaatatgccctccccgtaatggtgaaccaccagcacctacccaccaccatcccggcagggagcaatagctatcaaccggtccccatcaccatccccaaagaagttttcatgctgcccatccaggtccaggccccgccccctgaggactcagactctggctcggactcagactatgagcactatgacttcagcgcccagcctcctgtggccctgaccaccttctacaattcccagcggcatcgggtcacagatgaggaggtccagcaaagcaggttccagatgccacccttggaggaaggacttgaagagttgcatgcctcccacatcccaactgccaaccctggacactgcattacagacccgccatccctgggccctcagtatcacccgaggagcaacagtgagtcgagcacctcttcaggggaggattactgcaatagtcccaaaagcaagctgcctccatggaacccccaggtgttttcttcagagaggagttccttcctggagcagcccccaaacttggagctggccggcacccagccagccttttcagcagggcccccggctgatgacagctccagcacctcatccggggagtggtaccagaacttccagccaccaccccagcccccttcggaggagcagtttggctgtccagggtcccccagccctcagcctgactccaccgacaacgatgactacgatgacatcagcgcagcctaggccggggccagccgaggctcctggggtggctctgaccctctggcctcctgctctacctactccctttcccctttcccaccctcccagctcacctccccatggagctgagaggcctcccttggagagatggaaggaaacgttataccttgtacccctcggtctccatccatcaagccaaacctgctgccacagccctcccccggccccagatagcagccccagggaggatgctgcctccaagaggtgtgagccctctgtctcggggatgaacaagcagagtctgggctacctcttgacagctggtggaggggagttggggagctggactggatgactctggaggccccttccaaacctcaagtgtccggcgctttgattgcctgagtttctgacacttcagggcccagaggtcctgcgaggggcagaactggacccccatgccagtgctgctgcaggagggcccatatactagggtctgctgagctgttgtcactgatcggtgggcgctgggggggtagggtagcacaccagctgtcccaggctttgctccgggcggtaactgcacttgggcagggaatatagccttcctgggcacaactagctgacaatgacaggttgactgtgtacccccaaccaaggagctggggcccaaggccagtcctgccccagagacactccaagtccgccaggggcacagaccagttctgcagtgactgtccctggacaatgggtctttattctgagtttcctatggtttacaaagagggccccagcccagccccaccacagatcccagagataggggcccagtctccatgggggcaaggagcatagagatgttttccaggaaggggctcagaagctgcactaggccccgagtccccatgtgtctccttgaattgatgaggatgctcctgggagggatgcgtgactatgtggtgttgcacccggggctgcaaacgtctccgtgcagcccccagagagaggcccatgggctcagaccaggctttgttgtcctgctctgagtatcctgagattaaactgaattgctgaatgaaa

SEQ ID NO: 115677 - DNA, 3022 bp, Homo sapiens
  Payload ID: 2575
  Gene Symbol: CD6
  Gene Name: CD6 molecule
  ENST ID: ENST00000344931
  CDS Start-End: 121-1527
gaacagcaaagggtagagcagacctgcgccaggggcgcacaacggccgtgtccacctcccggccccaagatggtgcttcccacaggcagccacgcgtagcagccagagacagctccagacatgtggctcttcttcgggatcactggattgctgacggcagccctctcaggtcatccatctccagccccacctgaccagctcaacaccagcagtgcagagagtgagctctgggagccaggggagcggcttccggtccgtctgacaaacgggagcagcagctgcagcgggacggtggaggtgcggctcgaggcgtcctgggagcccgcgtgcggggcgctctgggacagccgcgccgccgaggccgtgtgccgagcactgggctgcggcggggcggaggccgcctctcagctcgccccgccgacccctgagctgccgcccccgcctgcagccgggaacaccagcgtagcagctaatgccactctggccggggcgcccgccctcctgtgcagcggcgccgagtggcggctctgcgaggtggtggagcacgcgtgccgcagcgacgggaggcgggcccgtgtcacctgtgcagagaaccgcgcgctgcgcctggtggacggtggcggcgcctgcgccggccgcgtggagatgctggagcatggcgagtggggatcagtgtgcgatgacacttgggacctggaggacgcccacgtggtgtgcaggcaactgggctgcggctgggcagtccaggccctgcccggcttgcacttcacgcccggccgcgggcctatccaccgggaccaggtgaactgctcgggggccgaagcttacctgtgggactgcccggggctgccaggacagcactactgcggccacaaagaggacgcgggcgcggtgtgctcagagcaccagtcctggcgcctgacagggggcgctgaccgctgcgaggggcaggtggaggtacacttccgaggggtctggaacacagtgtgtgacagtgagtggtacccatcggaggccaaggtgctctgccagtccttgggctgtggaactgcggttgagaggcccaaggggctgccccactccttgtccggcaggatgtactactcatgcaatggggaggagctcaccctctccaactgctcctggcggttcaacaactccaacctctgcagccagtcgctggcagccagggtcctctgctcagcttcccggagtttgcacaatctgtccactcccgaagtccctgcaagtgttcagacagtcactatagaatcttctgtgacagtgaaaatagagaacaaggaatctcgggagctaatgctcctcatcccctccatcgttctgggaattctcctccttggctccctcatcttcatagccttcatcctcttgagaattaaaggaaaatatgccctccccgtaatggtgaaccaccagcacctacccaccaccatcccggcagggagcaatagctatcaaccggtccccatcaccatccccaaagaaggtccaggccccgccccctgaggactcagactctggctcggactcagactatgagcactatgacttcagcgcccagcctcctgtggccctgaccaccttctacaattcccagcggcatcgggtcacagatgaggaggtccagcaaagcaggttccagatgccacccttggaggaaggacttgaagagttgcatgcctcccacatcccaactgccaaccctggacactgcattacagacccgccatccctgggccctcagtatcacccgaggagcaacagtgagtcgagcacctcttcaggggaggattactgcaatagtcccaaaagcaagctgcctccatggaacccccaggtgttttcttcagagaggagttccttcctggagcagcccccaaacttggagctggccggcacccagccagccttttcagggtcccccagccctcagcctgactccaccgacaacgatgactacgatgacatcagcgcagcctaggccggggccagccgaggctcctggggtggctctgaccctctggcctcctgctctacctactccctttcccctttcccaccctcccagctcacctccccatggagctgagaggcctcccttggagagatggaaggaaacgttataccttgtacccctcggtctccatccatcaagccaaacctgctgccacagccctcccccggccccagatagcagccccagggaggatgctgcctccaagaggtgtgagccctctgtctcggggatgaacaagcagagtctgggctacctcttgacagctggtggaggggagttggggagctggactggatgactctggaggccccttccaaacctcaagtgtccggcgctttgattgcctgagtttctgacacttcagggcccagaggtcctgcgaggggcagaactggacccccatgccagtgctgctgcaggagggcccatatactagggtctgctgagctgttgtcactgatcggtgggcgctgggggggtagggtagcacaccagctgtcccaggctttgctccgggcggtaactgcacttgggcagggaatatagccttcctgggcacaactagctgacaatgacaggttgactgtgtacccccaaccaaggagctggggcccaaggccagtcctgccccagagacactccaagtccgccaggggcacagaccagttctgcagtgactgtccctggacaatgggtctttattctgagtttcctatggtttacaaagagggccccagcccagccccaccacagatcccagagataggggcccagtctccatgggggcaaggagcatagagatgttttccaggaaggggctcagaagctgcactaggccccgagtccccatgtgtctccttgaattgatgaggatgctcctgggagggatgcgtgactatgtggtgttgcacccggggctgcaaacgtctccgtgcagcccccagagagaggcccatgggctcagaccaggctttgttgtcctgc

SEQ ID NO: 115678 - DNA, 1809 bp, Homo sapiens
  Payload ID: 2575
  Gene Symbol: CD6
  Gene Name: CD6 molecule
  Uniprot ID: P30203
  ENST ID: ENST00000352009
  CDS Start-End: 1-1806
atgtggctcttcttcgggatcactggattgctgacggcagccctctcaggtcatccatctccagccccacctgaccagctcaacaccagcagtgcagagagtgagctctgggagccaggggagcggcttccggtccgtctgacaaacgggagcagcagctgcagcgggacggtggaggtgcggctcgaggcgtcctgggagcccgcgtgcggggcgctctgggacagccgcgccgccgaggccgtgtgccgagcactgggctgcggcggggcggaggccgcctctcagctcgccccgccgacccctgagctgccgcccccgcctgcagccgggaacaccagcgtagcagctaatgccactctggccggggcgcccgccctcctgtgcagcggcgccgagtggcggctctgcgaggtggtggagcacgcgtgccgcagcgacgggaggcgggcccgtgtcacctgtgcagagaaccgcgcgctgcgcctggtggacggtggcggcgcctgcgccggccgcgtggagatgctggagcatggcgagtggggatcagtgtgcgatgacacttgggacctggaggacgcccacgtggtgtgcaggcaactgggctgcggctgggcagtccaggccctgcccggcttgcacttcacgcccggccgcgggcctatccaccgggaccaggtgaactgctcgggggccgaagcttacctgtgggactgcccggggctgccaggacagcactactgcggccacaaagaggacgcgggcgcggtgtgctcagagcaccagtcctggcgcctgacagggggcgctgaccgctgcgaggggcaggtggaggtacacttccgaggggtctggaacacagtgtgtgacagtgagtggtacccatcggaggccaaggtgctctgccagtccttgggctgtggaactgcggttgagaggcccaaggggctgccccactccttgtccggcaggatgtactactcatgcaatggggaggagctcaccctctccaactgctcctggcggttcaacaactccaacctctgcagccagtcgctggcagccagggtcctctgctcagcttcccggagtttgcacaatctgtccactcccgaagtccctgcaagtgttcagacagtcactatagaatcttctgtgacagtgaaaatagagaacaaggaatctcgggagctaatgctcctcatcccctccatcgttctgggaattctcctccttggctccctcatcttcatagccttcatcctcttgagaattaaaggaaaatatgttttcatgctgcccatccaggtccaggccccgccccctgaggactcagactctggctcggactcagactatgagcactatgacttcagcgcccagcctcctgtggccctgaccaccttctacaattcccagcggcatcgggtcacagatgaggaggtccagcaaagcaggttccagatgccacccttggaggaaggacttgaagagttgcatgcctcccacatcccaactgccaaccctggacactgcattacagacccgccatccctgggccctcagtatcacccgaggagcaacagtgagtcgagcacctcttcaggggaggattactgcaatagtcccaaaagcaagctgcctccatggaacccccaggtgttttcttcagagaggagttccttcctggagcagcccccaaacttggagctggccggcacccagccagccttttcagggtcccccagccctcagcctgactccaccgacaacgatgactacgatgacatcagcgcagcctaggcc

SEQ ID NO: 115679 - DNA, 1782 bp, Homo sapiens
  Payload ID: 2575
  Gene Symbol: CD6
  Gene Name: CD6 molecule
  Uniprot ID: P30203
  ENST ID: ENST00000452451
  CDS Start-End: 1-1779
atgtggctcttcttcgggatcactggattgctgacggcagccctctcaggtcatccatctccagccccacctgaccagctcaacaccagcagtgcagagagtgagctctgggagccaggggagcggcttccggtccgtctgacaaacgggagcagcagctgcagcgggacggtggaggtgcggctcgaggcgtcctgggagcccgcgtgcggggcgctctgggacagccgcgccgccgaggccgtgtgccgagcactgggctgcggcggggcggaggccgcctctcagctcgccccgccgacccctgagctgccgcccccgcctgcagccgggaacaccagcgtagcagctaatgccactctggccggggcgcccgccctcctgtgcagcggcgccgagtggcggctctgcgaggtggtggagcacgcgtgccgcagcgacgggaggcgggcccgtgtcacctgtgcagagaaccgcgcgctgcgcctggtggacggtggcggcgcctgcgccggccgcgtggagatgctggagcatggcgagtggggatcagtgtgcgatgacacttgggacctggaggacgcccacgtggtgtgcaggcaactgggctgcggctgggcagtccaggccctgcccggcttgcacttcacgcccggccgcgggcctatccaccgggaccaggtgaactgctcgggggccgaagcttacctgtgggactgcccggggctgccaggacagcactactgcggccacaaagaggacgcgggcgcggtgtgctcagagcaccagtcctggcgcctgacagggggcgctgaccgctgcgaggggcaggtggaggtacacttccgaggggtctggaacacagtgtgtgacagtgagtggtacccatcggaggccaaggtgctctgccagtccttgggctgtggaactgcggttgagaggcccaaggggctgccccactccttgtccggcaggatgtactactcatgcaatggggaggagctcaccctctccaactgctcctggcggttcaacaactccaacctctgcagccagtcgctggcagccagggtcctctgctcagcttcccggagtttgcacaatctgtccactcccgaagtccctgcaagtgttcagacagtcactatagaatcttctgtgacagtgaaaatagagaacaaggaatctcgggagctaatgctcctcatcccctccatcgttctgggaattctcctccttggctccctcatcttcatagccttcatcctcttgagaattaaaggaaaatatgccctccccgtaatggtgaaccaccagcacctacccaccaccatcccggcagggagcaatagctatcaaccggtccccatcaccatccccaaagaagattcccagcggcatcgggtcacagatgaggaggtccagcaaagcaggttccagatgccacccttggaggaaggacttgaagagttgcatgcctcccacatcccaactgccaaccctggacactgcattacagacccgccatccctgggccctcagtatcacccgaggagcaacagtgagtcgagcacctcttcaggggaggattactgcaatagtcccaaaagcaagctgcctccatggaacccccaggtgttttcttcagagaggagttccttcctggagcagcccccaaacttggagctggccggcacccagccagccttttcagggtcccccagccctcagcctgactccaccgacaacgatgactacgatgacatcagcgcagcctaggcc

SEQ ID NO: 115680 - DNA, 1268 bp, Homo sapiens
  Payload ID: 2575
  Gene Symbol: CD6
  Gene Name: CD6 molecule
  ENST ID: ENST00000433107
  CDS Start-End: 1-1268
atgtggctcttcttcgggatcactggattgctgacggcagccctctcaggtcatccatctccagccccacctgaccagctcaacaccagcagtgcagagagtgagctctgggagccaggggagcggcttccggtccgtctgacaaacgggagcagcagctgcagcgggacggtggaggtgcggctcgaggcgtcctgggagcccgcgtgcggggcgctctgggacagccgcgccgccgaggccgtgtgccgagcactgggctgcggcggggcggaggccgcctctcagctcgccccgccgacccctgagctgccgcccccgcctgcagccgggaacaccagcgtagcagctaatgccactctggccggggcgcccgccctcctgtgcagcggcgccgagtggcggctctgcgaggtggtggagcacgcgtgccgcagcgacgggaggcgggcccgtgtcacctgtgcagagaaccgcgcgctgcgcctggtggacggtggcggcgcctgcgccggccgcgtggagatgctggagcatggcgagtggggatcagtgtgcgatgacacttgggacctggaggacgcccacgtggtgtgcaggcaactgggctgcggctgggcagtccaggccctgcccggcttgcacttcacgcccggccgcgggcctatccaccgggaccaggtgaactgctcgggggccgaagcttacctgtgggactgcccggggctgccaggacagcactactgcggccacaaagaggacgcgggcgcggtgtgctcagcttcccggagtttgcacaatctgtccactcccgaagtccctgcaagtgttcagacagtcactatagaatcttctgtgacagtgaaaatagagaacaaggaatctcgggagctaatgctcctcatcccctccatcgttctgggaattctcctccttggctccctcatcttcatagccttcatcctcttgagaattaaaggaaaatatgttttcatgctgcccatccaggtccaggccccgccccctgaggactcagactctggctcggactcagactatgagcactatgacttcagcgcccagcctcctgtggccctgaccaccttctacaattcccagcggcatcgggtcacagatgaggaggtccagcaaagcaggttccagatgccacccttggaggaaggacttgaagagttgcatgcctcccacatcccaactgccaaccctggacactgcattacagacccgccatccctgggccctcagta

SEQ ID NO: 115681 - DNA, 835 bp, Homo sapiens
  Payload ID: 2575
  Gene Symbol: CD6
  Gene Name: CD6 molecule
  ENST ID: ENST00000542157
  CDS Start-End: 1-835
atgtggctcttcttcgggatcactggattgctgacggcagccctctcaggtcatccatctccagccccacctgaccagctcaacaccagcagtgcagagagtgagctctgggagccaggggagcggcttccggtccgtctgacaaacgggagcagcagctgcagcgggacggtggaggtgcggctcgaggcgtcctgggagcccgcgtgcggggcgctctgggacagccgcgccgccgaggccgtgtgccgagcactgggctgcggcggggcggaggccgcctctcagctcgccccgccgacccctgagctgccgcccccgcctgcagccgggaacaccagcgtagcagctaatgccactctggccggggcgcccgccctcctgtgcagcggcgccgagtggcggctctgcgaggtggtggagcacgcgtgccgcagcgacgggaggcgggcccgtgtcacctgtgcagagaaccgcgcgctgcgcctggtggacggtggcggcgcctgcgccggccgcgtggagatgctggagcatggcgagtggggatcagtgtgcgatgacacttgggacctggaggacgcccacgtggtgtgcaggcaactgggctgcggctgggcagtccaggccctgcccggcttgcacttcacgcccggccgcgggcctatccaccgggaccaggtgaactgctcgggggccgaagcttacctgtgggactgcccggggctgccaggacagcactactgcggccacaaagaggacgcgggcgcggtgtgctcagaatcttctgtgacagtgaaaatagagaacaaggaatctcgggagctaatgctcc

SEQ ID NO: 115682 - DNA, 556 bp, Homo sapiens
  Payload ID: 2575
  Gene Symbol: CD6
  Gene Name: CD6 molecule
  ENST ID: ENST00000538611
  CDS Start-End: 1-556
agaaccgcgcgctgcgcctggtggacggtggcggcgcctgcgccggccgcgtggagatgctggagcatggcgagtggggatcagtgtgcgatgacacttgggacctggaggacgcccacgtggtgtgcaggcaactgggctgcggctgggcagtccaggccctgcccggcttgcacttcacgcccggccgcgggcctatccaccgggaccaggtgaactgctcgggggccgaagcttacctgtgggactgcccggggctgccaggacagcactactgcggccacaaagaggacgcgggcgcggtgtgctcagcttcccggagtttgcacaatctgtccactcccgaagtccctgcaagtgttcagacagtcactatagaatcttctgtgacagtgaaaatagagaacaaggaatctcgggagctaatgctcctcatcccctccatcgttctgggaattctcctccttggctccctcatcttcatagccttcatcctcttgagaattaaaggaaaatatgccctccccgtaatggtgaaccaccagcacctacccac

SEQ ID NO: 115683 - DNA, 547 bp, Homo sapiens
  Payload ID: 2575
  Gene Symbol: CD6
  Gene Name: CD6 molecule
  ENST ID: ENST00000542254
  CDS Start-End: 131-247
acaggaacaagaacagcaaagggtagagcagacctgcgccaggggcgcacaacggccgtgtccacctcccggccccaagatggtgcttcccacaggcagccacgcgtagcagccagagacagctccagacatgtggctcttcttcgggatcactggattgctgacggcagccctctcaggatgcacagttgccaaatggattcagctccttggagaaatatgttgctttgccgggatgggattctagaagtatgacaatgtctgagctggaagaaaccccagcgagctgccagccatctcctgtttgtcagaggaggaaagcgaggtcatccatctccagccccacctgaccagctcaacaccagcagtgcagagagtgagctctgggagccaggggagcggcttccggtccgtctgacaaacgggagcagcagctgcagcgggacggtggaggtgcggctcgaggcgtcctgggagcccgcgtgcggggcgctctgggacagccgcgccgccgaggccgtgtgccgagcactgggctgcggcgggg

SEQ ID NO: 115684 - DNA, 1070 bp, Homo sapiens
  Payload ID: 2576
  Gene Symbol: CD63
  Gene Name: CD63 molecule
  Uniprot ID: P08962
  ENST ID: ENST00000257857
  CDS Start-End: 280-996
cgggggtgggcgccttcttccgggtaggggccacgtggccctggccgggcggggggctcggcccaccccgcgccgggcccagtgactcaggccgcagctgttaccgcgtcacatgagggaggccggcggccactcggcgggggaggggaccgtggctggagcccggggcggggccgcgcggcaggcggggcgggagccggggggcgcagctagagagccccggagccgcggcgggagaggaacgcgcagccagccttgggaagcccaggcccggcagccatggcggtggaaggaggaatgaaatgtgtgaagttcttgctctacgtcctcctgctggccttttgcgcctgtgcagtgggactgattgccgtgggtgtcggggcacagcttgtcctgagtcagaccataatccagggggctacccctggctctctgttgccagtggtcatcatcgcagtgggtgtcttcctcttcctggtggcttttgtgggctgctgcggggcctgcaaggagaactattgtcttatgatcacgtttgccatctttctgtctcttatcatgttggtggaggtggccgcagccattgctggctatgtgtttagagataaggtgatgtcagagtttaataacaacttccggcagcagatggagaattacccgaaaaacaaccacactgcttcgatcctggacaggatgcaggcagattttaagtgctgtggggctgctaactacacagattgggagaaaatcccttccatgtcgaagaaccgagtccccgactcctgctgcattaatgttactgtgggctgtgggattaatttcaacgagaaggcgatccataaggagggctgtgtggagaagattgggggctggctgaggaaaaatgtgctggtggtagctgcagcagcccttggaattgcttttgtcgaggttttgggaattgtctttgcctgctgcctcgtgaagagtatcagaagtggctacgaggtgatgtaggggtctggtctcctcagcctcctcatctgggggagtggaatagtatcctccaggtttttcaattaaacggatta

SEQ ID NO: 115685 - DNA, 981 bp, Homo sapiens
  Payload ID: 2576
  Gene Symbol: CD63
  Gene Name: CD63 molecule
  Uniprot ID: P08962
  ENST ID: ENST00000420846
  CDS Start-End: 147-863
cgcccggagactggcgggccgagggtcggcgtcaggctcaagcccctgccggcgcccttggatctgtcctgggccccagaggcggcggggcggggtccgggcttcgcggccgtcgcccccacccctctcctgcgggcccggcagccatggcggtggaaggaggaatgaaatgtgtgaagttcttgctctacgtcctcctgctggccttttgcgcctgtgcagtgggactgattgccgtgggtgtcggggcacagcttgtcctgagtcagaccataatccagggggctacccctggctctctgttgccagtggtcatcatcgcagtgggtgtcttcctcttcctggtggcttttgtgggctgctgcggggcctgcaaggagaactattgtcttatgatcacgtttgccatctttctgtctcttatcatgttggtggaggtggccgcagccattgctggctatgtgtttagagataaggtgatgtcagagtttaataacaacttccggcagcagatggagaattacccgaaaaacaaccacactgcttcgatcctggacaggatgcaggcagattttaagtgctgtggggctgctaactacacagattgggagaaaatcccttccatgtcgaagaaccgagtccccgactcctgctgcattaatgttactgtgggctgtgggattaatttcaacgagaaggcgatccataaggagggctgtgtggagaagattgggggctggctgaggaaaaatgtgctggtggtagctgcagcagcccttggaattgcttttgtcgaggttttgggaattgtctttgcctgctgcctcgtgaagagtatcagaagtggctacgaggtgatgtaggggtctggtctcctcagcctcctcatctgggggagtggaatagtatcctccaggtttttcaattaaacggattattttttcagaccgaaaagagatggtctgagtttgtcttagagtg

SEQ ID NO: 115686 - DNA, 788 bp, Homo sapiens
  Payload ID: 2576
  Gene Symbol: CD63
  Gene Name: CD63 molecule
  ENST ID: ENST00000551173
  CDS Start-End: 144-788
ccggagactggcgggccgagggtcggcgtcaggctcaagcccctgccggcgcccttggatctgtcctgggccccagaggcggcggggcggggtccgggcttcgcggccgtcgcccccacccctctcctgcgggcccggcagccatggcggtggaaggaggaatgaaatgtgtgaagttcttgctctacgtcctcctgctggccttttgcgcctgtgcagtgggactgattgccgtgggtgtcggggcacagcttgtcctgagtcagaccataatccagggggctacccctggctctctgttgccagtggtcatcatcgcagtgggtgtcttcctcttcctggtggcttttgtgggctgctgcggggcctgcaaggagaactattgtcttatgatcacgtttgccatctttctgtctcttatcatgttggtggaggtggccgcagccattgctggctatgtgtttagagataaggtgatgtcagagtttaataacaacttccggcagcagatggagaattacccgaaaaacaaccacactgcttcgatcctggacaggatgcaggcagattttaagtgctgtggggctgctaactacacagattgggagaaaatcccttccatgtcgaagaaccgagtccccgactcctgctgcattaatgttactgtgggctgtgggattaatttcaacgagaaggcgatccataaggagggctgtgtggagaagattgggggctggctgaggaaaaatgtgctggtggtagctgcagcagcccttggaattgctttt

SEQ ID NO: 115687 - DNA, 682 bp, Homo sapiens
  Payload ID: 2576
  Gene Symbol: CD63
  Gene Name: CD63 molecule
  Uniprot ID: P08962
  ENST ID: ENST00000552754
  CDS Start-End: 9-656
cggcagccatggcggtggaaggaggaatgaaatgtgtgaagttcttgctctacgtcctcctgctggccttttgcggggctacccctggctctctgttgccagtggtcatcatcgcagtgggtgtcttcctcttcctggtggcttttgtgggctgctgcggggcctgcaaggagaactattgtcttatgatcacgtttgccatctttctgtctcttatcatgttggtggaggtggccgcagccattgctggctatgtgtttagagataaggtgatgtcagagtttaataacaacttccggcagcagatggagaattacccgaaaaacaaccacactgcttcgatcctggacaggatgcaggcagattttaagtgctgtggggctgctaactacacagattgggagaaaatcccttccatgtcgaagaaccgagtccccgactcctgctgcattaatgttactgtgggctgtgggattaatttcaacgagaaggcgatccataaggagggctgtgtggagaagattgggggctggctgaggaaaaatgtgctggtggtagctgcagcagcccttggaattgcttttgtcgaggttttgggaattgtctttgcctgctgcctcgtgaagagtatcagaagtggctacgaggtgatgtaggggtctggtctcctcagcctcctcat

SEQ ID NO: 115688 - DNA, 779 bp, Homo sapiens
  Payload ID: 2576
  Gene Symbol: CD63
  Gene Name: CD63 molecule
  Uniprot ID: P08962
  ENST ID: ENST00000546939
  CDS Start-End: 218-688
gcccctctccccctttccctcctcccagcgcttgggggcctgtgcagtgggactgattgccgtgggtgtcggggcacagcttgtcctgagtcagaccataatccagggggctacccctggctctctgttgccagtggtcatcatcgcagtgggtgtcttcctcttcctggtggcttttgtgggctgctgcggggcctgcaaggagaactattgtcttatgatcacgtttgccatctttctgtctcttatcatgttggtggaggtggccgcagccattgctggctatgtgtttagagataaggtgatgtcagagtttaataacaacttccggcagcagatggagaattacccgaaaaacaaccacactgcttcgatcctggacaggatgcaggcagattttaagtgctgtggggctgctaactacacagattgggagaaaatcccttccatgtcgaagaaccgagtccccgactcctgctgcattaatgttactgtgggctgtgggattaatttcaacgagaaggcgatccataaggagggctgtgtggagaagattgggggctggctgaggaaaaatgtgctggtggtagctgcagcagcccttggaattgcttttgtcgaggttttgggaattgtctttgcctgctgcctcgtgaagagtatcagaagtggctacgaggtgatgtaggggtctggtctcctcagcctcctcatctgggggagtggaatagtatcctccaggtttttcaattaaacggattattttttcagaccgaaaa

SEQ ID NO: 115689 - DNA, 1233 bp, Homo sapiens
  Payload ID: 2576
  Gene Symbol: CD63
  Gene Name: CD63 molecule
  Uniprot ID: P08962
  ENST ID: ENST00000549117
  CDS Start-End: 438-1154
gtggcttcggggaagggcttcctccccttttctcagactaggatccctggaaaatggagaagctgtgctaatagaggggggccagaaatccccactctagaatgctgtagaatgttgggagacacccaggatgtgagccagggactttctggaagtgtttgttctggccccacccgaccccaggcagtccccagctgtctgcacagtcggatggggagggggcttgcacagagttggagccagaggagagagctggctcatcccctacggtaggatggggaaacctcacagaccacattgtcacccggcctcagctctccgccccggcgctcagagggtaactctcacccacctcgtccgcttctctgaaccagagtgacccaggctgcgctccgccccgctctcctaccccgagttggcacggaggcccggcagccatggcggtggaaggaggaatgaaatgtgtgaagttcttgctctacgtcctcctgctggccttttgcgcctgtgcagtgggactgattgccgtgggtgtcggggcacagcttgtcctgagtcagaccataatccagggggctacccctggctctctgttgccagtggtcatcatcgcagtgggtgtcttcctcttcctggtggcttttgtgggctgctgcggggcctgcaaggagaactattgtcttatgatcacgtttgccatctttctgtctcttatcatgttggtggaggtggccgcagccattgctggctatgtgtttagagataaggtgatgtcagagtttaataacaacttccggcagcagatggagaattacccgaaaaacaaccacactgcttcgatcctggacaggatgcaggcagattttaagtgctgtggggctgctaactacacagattgggagaaaatcccttccatgtcgaagaaccgagtccccgactcctgctgcattaatgttactgtgggctgtgggattaatttcaacgagaaggcgatccataaggagggctgtgtggagaagattgggggctggctgaggaaaaatgtgctggtggtagctgcagcagcccttggaattgcttttgtcgaggttttgggaattgtctttgcctgctgcctcgtgaagagtatcagaagtggctacgaggtgatgtaggggtctggtctcctcagcctcctcatctgggggagtggaatagtatcctccaggtttttcaattaaacggattattttt

SEQ ID NO: 115690 - DNA, 727 bp, Homo sapiens
  Payload ID: 2576
  Gene Symbol: CD63
  Gene Name: CD63 molecule
  ENST ID: ENST00000548898
  CDS Start-End: 52-489
agagcagcttggttcgggctcaggaagtttgccatctttctgtctcttatcatgttggtggaggtggccgcagccattgctggctatgtgtttagagataaggtgatgtcagagtttaataacaacttccggcagcagatggagaattacccgaaaaacaaccacactgcttcgatcctggacaggatgcaggcagattttaagtgctgtggggctgctaactacacagattgggagaaaatcccttccatgtcgaagaaccgagtccccgactcctgctgcattaatgttactgtgggctgtgggattaatttcaacgagaaggcgatccataaggagggctgtgtggagaagattgggggctggctgaggaaaaatgtgctggtggtagctgcagcagcccttggaattgcttttgtcgaggttttgggaattgtctttgcctgctgcctcgtgaagagtatcagaagtggctacgaggtgatgtaggggtctggtctcctcagcctcctcatctgggggagtggaatagtatcctccaggtttttcaattaaacggattattttttcagaccgaaaagagatggtctgagtttgtcttagagtgatgcttgattccttcctttccttactgatgttccctgtcctctgggaccttaatgcatgtgtacttcgaggtctattttggggggtgtttgggaaaggaggactttgcgaaggtgttggt

SEQ ID NO: 115691 - DNA, 870 bp, Homo sapiens
  Payload ID: 2576
  Gene Symbol: CD63
  Gene Name: CD63 molecule
  Uniprot ID: P08962
  ENST ID: ENST00000550776
  CDS Start-End: 385-855
ggcttgagaggctactgtttgtctagggagggacacatcactcttgctcccttttcctcttcccttctcctggcctaactggccagaggaaccttagtcacagctgatgcgcgcgtgggatgtgcactggaggatagtgagggggcagttctgggagagaattgagctgggagccctggaggcctgtagaaagcattattctaggcctgtgcagtgggactgattgccgtgggtgtcggggcacagcttgtcctgagtcagaccataatccagggggctacccctggctctctgttgccagtggtcatcatcgcagtgggtgtcttcctcttcctggtggcttttgtgggctgctgcggggcctgcaaggagaactattgtcttatgatcacgtttgccatctttctgtctcttatcatgttggtggaggtggccgcagccattgctggctatgtgtttagagataaggtgatgtcagagtttaataacaacttccggcagcagatggagaattacccgaaaaacaaccacactgcttcgatcctggacaggatgcaggcagattttaagtgctgtggggctgctaactacacagattgggagaaaatcccttccatgtcgaagaaccgagtccccgactcctgctgcattaatgttactgtgggctgtgggattaatttcaacgagaaggcgatccataaggagggctgtgtggagaagattgggggctggctgaggaaaaatgtgctggtggtagctgcagcagcccttggaattgcttttgtcgaggttttgggaattgtctttgcctgctgcctcgtgaagagtatcagaagtggctacgaggtgatgtaggggtctggtctcctc

SEQ ID NO: 115692 - DNA, 845 bp, Homo sapiens
  Payload ID: 2576
  Gene Symbol: CD63
  Gene Name: CD63 molecule
  ENST ID: ENST00000552164
  CDS Start-End: 194-845
gcgcagccagccttgggaagcccaggtgaggccgcggggacccggcggacttcggcgcgggctgggagagaccacccgcagtcccttcctccagggctcgccccaggcccgcggagactcgtccggcgctctccagccgccctggagcaactttgcttcgaagttccctgggcccgggcagggcccggcagccatggcggtggaaggaggaatgaaatgtgtgaagttcttgctctacgtcctcctgctggccttttgcgcctgtgcagtgggactgattgccgtgggtgtcggggcacagcttgtcctgagtcagaccataatccagggggctacccctggctctctgttgccagtggtcatcatcgcagtgggtgtcttcctcttcctggtggcttttgtgggctgctgcggggcctgcaaggagaactattgtcttatgatcacgtttgccatctttctgtctcttatcatgttggtggaggtggccgcagccattgctggctatgtgtttagagataaggtgatgtcagagtttaataacaacttccggcagcagatggagaattacccgaaaaacaaccacactgcttcgatcctggacaggatgcaggcagattttaagtgctgtggggctgctaactacacagattgggagaaaatcccttccatgtcgaagaaccgagtccccgactcctgctgcattaatgttactgtgggctgtgggattaatttcaacgagaaggcgatccataaggagggctgtgtggagaagattgggggctggctgaggaaaaatgtgctggtggtagctgcagcagcccttggaattgcttttgtcgagg

SEQ ID NO: 115693 - DNA, 949 bp, Homo sapiens
  Payload ID: 2576
  Gene Symbol: CD63
  Gene Name: CD63 molecule
  Uniprot ID: P08962
  ENST ID: ENST00000552692
  CDS Start-End: 142-858
gcgggtttccgggtgggaggggccgggaatcggggccgtgaagggaagccctcgagggccggccgggagcccggaaaccgaggtcccccttcggccagttttaatccccccgccctcccctctgccccaggcccggcagccatggcggtggaaggaggaatgaaatgtgtgaagttcttgctctacgtcctcctgctggccttttgcgcctgtgcagtgggactgattgccgtgggtgtcggggcacagcttgtcctgagtcagaccataatccagggggctacccctggctctctgttgccagtggtcatcatcgcagtgggtgtcttcctcttcctggtggcttttgtgggctgctgcggggcctgcaaggagaactattgtcttatgatcacgtttgccatctttctgtctcttatcatgttggtggaggtggccgcagccattgctggctatgtgtttagagataaggtgatgtcagagtttaataacaacttccggcagcagatggagaattacccgaaaaacaaccacactgcttcgatcctggacaggatgcaggcagattttaagtgctgtggggctgctaactacacagattgggagaaaatcccttccatgtcgaagaaccgagtccccgactcctgctgcattaatgttactgtgggctgtgggattaatttcaacgagaaggcgatccataaggagggctgtgtggagaagattgggggctggctgaggaaaaatgtgctggtggtagctgcagcagcccttggaattgcttttgtcgaggttttgggaattgtctttgcctgctgcctcgtgaagagtatcagaagtggctacgaggtgatgtaggggtctggtctcctcagcctcctcatctgggggagtggaatagtatcctccaggtttttcaattaaacggattattttttcagaccgaaaa

SEQ ID NO: 115694 - DNA, 829 bp, Homo sapiens
  Payload ID: 2576
  Gene Symbol: CD63
  Gene Name: CD63 molecule
  ENST ID: ENST00000550050
  CDS Start-End: 60-392
cggagccgcggcgggagaggaacgcgcagccagccttgggaagcccaggcccggcagccatggcggtggaaggaggaatgaaatgtgtgaagttcttgctctacgtcctcctgctggccttttgcgcctgtgcagtgggactgattgccgtgggtgtcggggcacagcttgtcctgagtcagaccataatccagggggctacccctggctctctgttgccagtggtcatcatcgcagtgggtgtcttcctcttcctggtggcttttgtgggctgctgcggggcctgcaaggagaactattgtcttatgatcacgttgccatctttctgtctcttatcatgttggtggaggtggccgcagccattgctggctatgtgtttagagataaggtgatgtcagagtttaataacaacttccggcagcagatggagaattacccgaaaaacaaccacactgcttcgatcctggacaggatgcaggcagattttaagtgctgtggggctgctaactacacagattgggagaaaatcccttccatgtcgaagaaccgagtccccgactcctgctgcattaatgttactgtgggctgtgggattaatttcaacgagaaggcgatccataaggagggctgtgtggagaagattgggggctggctgaggaaaaatgtgctggtggtagctgcagcagcccttggaattgcttttgtcgaggttttgggaattgtctttgcctgctgcctcgtgaagagtatcagaagtggctacgaggtgatgtaggggtctggtctcctcagcctcctcatctgggggagtggaatagtatcctccagg

SEQ ID NO: 115695 - DNA, 648 bp, Homo sapiens
  Payload ID: 2576
  Gene Symbol: CD63
  Gene Name: CD63 molecule
  ENST ID: ENST00000548160
  CDS Start-End: 120-557
gaagacctttgtgagtgtccagggaccggctgtgccaaaacgggcccctgtaatgcatagactccaaacttgacttctgtcctttgctcctgcagtttgccatctttctgtctcttatcatgttggtggaggtggccgcagccattgctggctatgtgtttagagataaggtgatgtcagagtttaataacaacttccggcagcagatggagaattacccgaaaaacaaccacactgcttcgatcctggacaggatgcaggcagattttaagtgctgtggggctgctaactacacagattgggagaaaatcccttccatgtcgaagaaccgagtccccgactcctgctgcattaatgttactgtgggctgtgggattaatttcaacgagaaggcgatccataaggagggctgtgtggagaagattgggggctggctgaggaaaaatgtgctggtggtagctgcagcagcccttggaattgcttttgtcgaggttttgggaattgtctttgcctgctgcctcgtgaagagtatcagaagtggctacgaggtgatgtaggggtctggtctcctcagcctcctcatctgggggagtggaatagtatcctccaggtttttcaattaaacggattattttttcagaccgaaaa

SEQ ID NO: 115696 - DNA, 621 bp, Homo sapiens
  Payload ID: 2576
  Gene Symbol: CD63
  Gene Name: CD63 molecule
  ENST ID: ENST00000552067
  CDS Start-End: 71-508
atgggcggtctgggactgccagagcagcttggttcgggctcaggaagttgccatctttctgtctcttatcatgttggtggaggtggccgcagccattgctggctatgtgtttagagataaggtgatgtcagagtttaataacaacttccggcagcagatggagaattacccgaaaaacaaccacactgcttcgatcctggacaggatgcaggcagattttaagtgctgtggggctgctaactacacagattgggagaaaatcccttccatgtcgaagaaccgagtccccgactcctgctgcattaatgttactgtgggctgtgggattaatttcaacgagaaggcgatccataaggagggctgtgtggagaagattgggggctggctgaggaaaaatgtgctggtggtagctgcagcagcccttggaattgcttttgtcgaggttttgggaattgtctttgcctgctgcctcgtgaagagtatcagaagtggctacgaggtgatgtaggggtctggtctcctcagcctcctcatctgggggagtggaatagtatcctccaggtttttcaattaaacggattattttttcagaccgaaaagagatggtctgagtttgtctta

SEQ ID NO: 115697 - DNA, 607 bp, Homo sapiens
  Payload ID: 2576
  Gene Symbol: CD63
  Gene Name: CD63 molecule
  ENST ID: ENST00000546457
  CDS Start-End: 209-607
tggaaaatggagaagctgtgctaatagaggggggccagaaatccccactctagaatgctgtagaatgttgggagacacccaggatctctccgccccggcgctcagagggtaactctcacccacctcgtccgcttctctgaaccagagtgacccaggctgcgctccgccccgctctcctaccccgagttggcacggaggcccggcagccatggcggtggaaggaggaatgaaatgtgtgaagttcttgctctacgtcctcctgctggccttttgcgcctgtgcagtgggactgattgccgtgggtgtcggggcacagcttgtcctgagtcagaccataatccagggggctacccctggctctctgttgccagtggtcatcatcgcagtgggtgtcttcctcttcctggtggcttttgtgggctgctgcggggcctgcaaggagaactattgtcttatgatcacgtttgccatctttctgtctcttatcatgttggtggaggtggccgcagccattgctggctatgtgtttagagataaggtgatgtcagagtttaataacaacttccggcagcagatggagaattacccgaaaaacaaccacactgct

SEQ ID NO: 115698 - DNA, 1878 bp, Homo sapiens
  Payload ID: 2577
  Gene Symbol: CD68
  Gene Name: CD68 molecule
  Uniprot ID: P34810
  ENST ID: ENST00000250092
  CDS Start-End: 212-1276
agggccaacagtcccctaacttaattacaaaaactaatgactaagagagaggtggctagagctgaggcccctgagtcaggctgtgggtgggatcatctccagtacaggaagtgagactttcatttcctcctttccaagagagggctgagggagcagggttgagcaactggtgcagacagcctagctggactttgggtgaggcggttcagccatgaggctggctgtgcttttctcgggggccctgctggggctactggcagcccaggggacagggaatgactgtcctcacaaaaaatcagctactttgctgccatccttcacggtgacacccacggttacagagagcactggaacaaccagccacaggactaccaagagccacaaaaccaccactcacaggacaaccaccacaggcaccaccagccacggacccacgactgccactcacaaccccaccaccaccagccatggaaacgtcacagttcatccaacaagcaatagcactgccaccagccagggaccctcaactgccactcacagtcctgccaccactagtcatggaaatgccacggttcatccaacaagcaacagcactgccaccagcccaggattcaccagttctgcccacccagaaccacctccaccctctccgagtcctagcccaacctccaaggagaccattggagactacacgtggaccaatggttcccagccctgtgtccacctccaagcccagattcagattcgagtcatgtacacaacccagggtggaggagaggcctggggcatctctgtactgaaccccaacaaaaccaaggtccagggaagctgtgagggtgcccatccccacctgcttctctcattcccctatggacacctcagctttggattcatgcaggacctccagcagaaggttgtctacctgagctacatggcggtggagtacaatgtgtccttcccccacgcagcacagtggacattctcggctcagaatgcatcccttcgagatctccaagcacccctggggcagagcttcagttgcagcaactcgagcatcattctttcaccagctgtccacctcgacctgctctccctgaggctccaggctgctcagctgccccacacaggggtctttgggcaaagtttctcctgccccagtgaccggtccatcttgctgcctctcatcatcggcctgatccttcttggcctcctcgccctggtgcttattgctttctgcatcatccggagacgcccatccgcctaccaggccctctgagcatttgcttcaaaccccagggcactgagggggttggggtgtggtgggggggtacccttatttcctcgacacgcaactggctcaaagacaatgttattttccttccctttcttgaagaacaaaaagaaagccgggcatgacggctcatgcctgtaatcccagcactttgggaggctgaggcaggtggatcactggaggtcaggagtttgagaccagcctggccaacatggtgaaaccctgtctctactaaaaatacaattagccaggtgtggcggcgtaatcccagctggcctgtaatcccagctacttgggaggctgaggcagaactgcttgaacccaggaggtggaggttgcagtgagccgtcatcgcgccactaagccaagatcgcgccactgcactccagcctgggcgacagagccagactgtctcaaataaataaatatgagataatgcagtcgggagaagggagggagagaattttattaaatgtgacgaactgccccccccccccccccagcaggagagcagcaaaatttatgcaaatctttgacggggttttccttgtcctgccaggattaaaagccatgagtttcttgtcaca

SEQ ID NO: 115699 - DNA, 1771 bp, Homo sapiens
  Payload ID: 2577
  Gene Symbol: CD68
  Gene Name: CD68 molecule
  Uniprot ID: P34810
  ENST ID: ENST00000380498
  CDS Start-End: 188-1171
ttacaaaaactaatgactaagagagaggtggctagagctgaggcccctgagtcaggctgtgggtgggatcatctccagtacaggaagtgagactttcatttcctcctttccaagagagggctgagggagcagggttgagcaactggtgcagacagcctagctggactttgggtgaggcggttcagccatgaggctggctgtgcttttctcgggggccctgctggggctactggcagagagcactggaacaaccagccacaggactaccaagagccacaaaaccaccactcacaggacaaccaccacaggcaccaccagccacggacccacgactgccactcacaaccccaccaccaccagccatggaaacgtcacagttcatccaacaagcaatagcactgccaccagccagggaccctcaactgccactcacagtcctgccaccactagtcatggaaatgccacggttcatccaacaagcaacagcactgccaccagcccaggattcaccagttctgcccacccagaaccacctccaccctctccgagtcctagcccaacctccaaggagaccattggagactacacgtggaccaatggttcccagccctgtgtccacctccaagcccagattcagattcgagtcatgtacacaacccagggtggaggagaggcctggggcatctctgtactgaaccccaacaaaaccaaggtccagggaagctgtgagggtgcccatccccacctgcttctctcattcccctatggacacctcagctttggattcatgcaggacctccagcagaaggttgtctacctgagctacatggcggtggagtacaatgtgtccttcccccacgcagcacagtggacattctcggctcagaatgcatcccttcgagatctccaagcacccctggggcagagcttcagttgcagcaactcgagcatcattctttcaccagctgtccacctcgacctgctctccctgaggctccaggctgctcagctgccccacacaggggtctttgggcaaagtttctcctgccccagtgaccggtccatcttgctgcctctcatcatcggcctgatccttcttggcctcctcgccctggtgcttattgctttctgcatcatccggagacgcccatccgcctaccaggccctctgagcatttgcttcaaaccccagggcactgagggggttggggtgtggtgggggggtacccttatttcctcgacacgcaactggctcaaagacaatgttattttccttccctttcttgaagaacaaaaagaaagccgggcatgacggctcatgcctgtaatcccagcactttgggaggctgaggcaggtggatcactggaggtcaggagtttgagaccagcctggccaacatggtgaaaccctgtctctactaaaaatacaattagccaggtgtggcggcgtaatcccagctggcctgtaatcccagctacttgggaggctgaggcagaactgcttgaacccaggaggtggaggttgcagtgagccgtcatcgcgccactaagccaagatcgcgccactgcactccagcctgggcgacagagccagactgtctcaaataaataaatatgagataatgcagtcgggagaagggagggagagaattttattaaatgtgacgaactgccccccccccccccccagcaggagagcagcaaaatttatgcaaatctttgacggggttttccttgtcctgccaggattaaaagccatgagtttcttgtca

SEQ ID NO: 115700 - DNA, 891 bp, Homo sapiens
  Payload ID: 2577
  Gene Symbol: CD68
  Gene Name: CD68 molecule
  ENST ID: ENST00000584180
  CDS Start-End: 1-364
caaaaccaaggtccagggaagctgtgagggtgcccatccccacctgcttctctcattcccctatggacacctcagctttggattcatgcaggacctccagcagaaggttgtctacctgagctacatggcggtggagtacaatgtgtccttcccccacgcagcacagtggacattctcggctcagaatgcatcccttcgagatctccaagcacccctggggcagagcttcagttgcagcaactcgagcatcattctttcaccagctgtccacctcgacctgctctccctgaggctccaggctgctcagctgccccacacaggggtctttgggcaaagtaagacctacctactccttccctcctagaatcctcccactgcactgaaaaccccttccccaggcccataagccactcatctctcttcttaaccccccaaatctcgctctcccagcttgtcatggctacagggcagctttctttccatcctctacaagactctgccagtttcccccttttatcactgctgagtcactgcggtgagctcctcaccaatctcctactccccagcatccccccattccctcctcccacctttatcccaaccagcacgtcactgcaaatacctacctgccctatccttccgccaggtttctcctgccccagtgaccggtccatcttgctgcctctcatcatcggcctgatccttcttggcctcctcgccctggtgcttattgctttctgcatcatccggagacgcccatccgcctaccaggccctctgagcatttgcttcaaaccccagggcactgagggggttggggtgtggtgggggggtacccttatttcctcgacacgcaactggctcaaagacaatgttattttccttccctttc

SEQ ID NO: 115701 - DNA, 582 bp, Homo sapiens
  Payload ID: 2577
  Gene Symbol: CD68
  Gene Name: CD68 molecule
  ENST ID: ENST00000584502
  CDS Start-End: 41-582
gcagacagcctagctggactttgggtgaggcggttcagccatgaggctggctgtgcttttctcgggggccctgctggggctactggcagctactttgctgccatccttcacggtgacacccacggttacagagagcactggaacaaccagccacaggactaccaagagccacaaaaccaccactcacaggacaaccaccacaggcaccaccagccacggacccacgactgccactcacaaccccaccaccaccagccatggaaacgtcacagttcatccaacaagcaatagcactgccaccagccagggaccctcaactgccactcacagtcctgccaccactagtcatggaaatgccacggttcatccaacaagcaacagcactgccaccagcccaggattcaccagttctgcccacccagaaccacctccaccctctccgagtcctagcccaacctccaaggagaccattggagactacacgtggaccaatggttcccagccctgtgtccacctccaagcccagattcagattcgagtcatgtacacaacccagggtggaggagaggcctggggcatctc

SEQ ID NO: 115702 - DNA, 1676 bp, Homo sapiens
  Payload ID: 2578
  Gene Symbol: CD69
  Gene Name: CD69 molecule
  Uniprot ID: Q07108
  ENST ID: ENST00000228434
  CDS Start-End: 82-681
agactcaacaagagctccagcaaagactttcactgtagcttgacttgacctgagattaactagggaatcttgagaataaagatgagctctgaaaattgtttcgtagcagagaacagctctttgcatccggagagtggacaagaaaatgatgccaccagtccccatttctcaacacgtcatgaagggtccttccaagttcctgtcctgtgtgctgtaatgaatgtggtcttcatcaccattttaatcatagctctcattgccttatcagtgggccaatacaattgtccaggccaatacacattctcaatgccatcagacagccatgtttcttcatgctctgaggactgggttggctaccagaggaaatgctactttatttctactgtgaagaggagctggacttcagcccaaaatgcttgttctgaacatggtgctactcttgctgtcattgattctgaaaaggacatgaactttctaaaacgatacgcaggtagagaggaacactgggttggactgaaaaaggaacctggtcacccatggaagtggtcaaatggcaaagaatttaacaactggttcaacgttacagggtctgacaagtgtgtttttctgaaaaacacagaggtcagcagcatggaatgtgagaagaatttatactggatatgtaacaaaccttacaaataataaggaaacatgttcacttattgactattatagaatggaactcaaggaaatctgtgtcagtggatgctgctctgtggtccgaagtcttccatagagactttgtgaaaaaaaattttatagtgtcttgggaattttcttccaaacagaactatggaaaaaaaggaagaaattccaggaaaatctgcactgtgggcttttattgccatgagctagaagcatcacaggttgaccaataaccatgcccaagaatgagaagaatgactatgcaacctttggatgcactttatattattttgaatccagaaataatgaaataactaggcgtggacttactatttattgctgaatgactaccaacagtgagagcccttcatgcatttgcactattggaaggagttagatgttggtactagatactgaatgtaaacaaaggaattatggctggtaacataggtttttagtctaattgaatcccttaaactcagggagcatttataaatggacaaatgcttatgaaactaagatttgtaatatttctctctttttagagaaatttgccaatttactttgttatttttccccaaaaagaatgggatgatcatgtatttatttttttacttcctcagctgtagacaggtccttttcgatggtacatatttctttgcctttataatcttttatacagtgtcttacagagaaaagacataagcaaagactatgaggaatatttgcaagacatagaatagtgttggaaaatgtgcaatatgtgatgtggcaaatctctattaggaaatattctgtaatcttcagacctagaataatactagtcttataataggtttgtgactttcctaaatcaattctattacgtgcaatacttcaatacttcatttaaaatatttttatgtgcaataaaatgtatttgtttgtattttgtgttcagtacaattataagctgtttttatatatgtgaaataaaagtagaataaacacaa

SEQ ID NO: 115703 - DNA, 1020 bp, Homo sapiens
  Payload ID: 2578
  Gene Symbol: CD69
  Gene Name: CD69 molecule
  ENST ID: ENST00000536709
  CDS Start-End: 82-576
agactcaacaagagctccagcaaagactttcactgtagcttgacttgacctgagattaactagggaatcttgagaataaagatgagctctgaaaattgtttcgtagcagagaacagctctttgcatccggagagtggacaagaaaatgatgccaccagtccccatttctcaacacgtcatgaagggtccttccaagttcctgtcctgtgtgctgtaatgaatgtggtcttcatcaccattttaatcatagctctcattgccttatcagtgggccaatacaattgtccaggccaatacacattctcaatgccatcagacagccatgtttcttcatgctctgaggactgggttggctaccagaggaaatgctactttatttctactgtgaagaggagctggacttcagcccaaaatgcttgttctgaacatggtgctactcttgctgtcattgattctgaaaaggacatgaactttctaaaacgatacgcaggtagagaggaacactgggttggactgaaaaaggaacctggtcacccatggaagtggtcaaatggcaaagaatttaacaactggtaagtctccagaagtctctttatattccccagggtggcatctcaggaaaatcactttccttttctcctttcaaagcactttaaatataaaggctgagctcttcaagagctctaacaatctcttctgaatgcgtatactctggaattctttaataacaggctttattattattctttttctttatccacacttataatacataaaataaatgcttatagtaatttttctcagcaaactctaatgtgagtagtagatctggttaatttggaaatatttcaataataattatgatgatgcaacaaaaacccattttcaatgtcacatttagtctttactaataagacagttgctggaaaataaatccttcttactatttctcagttttcatctccacagaataaagaatagtttcaatgcctaattatgagtttctatacacctgaaaga

SEQ ID NO: 115704 - DNA, 1281 bp, Homo sapiens
  Payload ID: 2579
  Gene Symbol: CD7
  Gene Name: CD7 molecule
  Uniprot ID: P09564
  ENST ID: ENST00000312648
  CDS Start-End: 108-830
gagctctgagcgcctgcggtctcctgtgtgctgctctctgtggggtcctgtagacccagagaggctcagctgcactcgcccggctgggagagctgggtgtggggaacatggccgggcctccgaggctcctgctgctgcccctgcttctggcgctggctcgcggcctgcctggggccctggctgcccaagaggtgcagcagtctccccactgcacgactgtccccgtgggagcctccgtcaacatcacctgctccaccagcgggggcctgcgtgggatctacctgaggcagctcgggccacagccccaagacatcatttactacgaggacggggtggtgcccactacggacagacggttccggggccgcatcgacttctcagggtcccaggacaacctgactatcaccatgcaccgcctgcagctgtcggacactggcacctacacctgccaggccatcacggaggtcaatgtctacggctccggcaccctggtcctggtgacagaggaacagtcccaaggatggcacagatgctcggacgccccaccaagggcctctgccctccctgccccaccgacaggctccgccctccctgacccgcagacagcctctgccctccctgacccgccagcagcctctgccctccctgcggccctggcggtgatctccttcctcctcgggctgggcctgggggtggcgtgtgtgctggcgaggacacagataaagaaactgtgctcgtggcgggataagaattcggcggcatgtgtggtgtacgaggacatgtcgcacagccgctgcaacacgctgtcctcccccaaccagtaccagtgacccagtgggcccctgcacgtcccgcctgtggtccccccagcaccttccctgccccaccatgccccccaccctgccacacccctcaccctgctgtcctcccacggctgcagcagagtttgaagggcccagccgtgcccagctccaagcagacacacaggcagtggccaggccccacggtgcttctcagtggacaatgatgcctcctccgggaagccttccctgcccagcccacgccgccaccgggaggaagcctgactgtcctttggctgcatctcccgaccatggccaaggagggcttttctgtgggatgggcctgggcacgcggccctctcctgtcagtgccggcccacccaccagcaggcccccaacccccaggcagcccggcagaggacgggaggagaccagtcccccacccagccgtaccagaaataaaggcttctgtgcttccttt

SEQ ID NO: 115705 - DNA, 1659 bp, Homo sapiens
  Payload ID: 2579
  Gene Symbol: CD7
  Gene Name: CD7 molecule
  ENST ID: ENST00000583376
  CDS Start-End: 790-1212
tagacccagagaggctcagctgcactcgcccggctgggagagctgggtgtggggaacatggccgggcctccgaggctcctgctgctgcccctgcttctggcgctggctcgcggcctgcctggggccctggctgcccaaggtaagagcttcccaggctctccatggccacagctccagagctctccctgccccatgagctcagagcccccagtctgagccacagcacagcccccaggaagcgggtggggtgctgagcggcctccagtgtctgaggactcatttaagagaaggaaaaagggtggaccccggtggggagtggccggggctgtccaggcagggccgctgctttgggaggaagaagcccacagtctcggaacacgaggacagcacctcccccaacaccacagccggtgcccagatctgctccatgccccgtaaggcaccgtgtctttggcgacatgtcagccctgggctgtctcagggccccaccatccccaccactgtcccctgcagggaggacattctctgtccttctggccagactgatggtgacagcccaggtcctccccagaggtgcagcagtctccccactgcacgactgtccccgtgggagcctccgtcaacatcacctgctccaccagcgggggcctgcgtgggatctacctgaggcagctcgggccacagccccaagacatcatttactacgaggacggggtggtgcccactacggacagacggttccggggccgcatcgacttctcagggtcccaggacaacctgactatcaccatgcaccgcctgcagctgtcggacactggcacctacacctgccaggccatcacggaggtcaatgtctacggctccggcaccctggtcctggtgacagaggaacagtcccaaggatggcacagatgctcggacgccccaccaagggcctctgccctccctgccccaccgacaggctccgccctccctgacccgcagacagcctctgccctccctgacccgccagcagcctctgccctccctgcggccctggcggtgatctccttcctcctcgggctgggcctgggggtggcgtgtgtgctggcgaggacacagataaagaaactgtgctcgtggcgggataagaattcggcggcatgtgtggtgtacgaggacatgtcgcacagccgctgcaacacgctgtcctcccccaaccagtaccagtgacccagtgggcccctgcacgtcccgcctgtggtccccccagcaccttccctgccccaccatgccccccaccctgccacacccctcaccctgctgtcctcccacggctgcagcagagtttgaagggcccagccgtgcccagctccaagcagacacacaggcagtggccaggccccacggtgcttctcagtggacaatgatgcctcctccgggaagccttccctgcccagcccacgccgccaccgggaggaagcctgactgtcctttggctgcatctcccgaccatggccaaggagggcttttctgtgggatgggcctgggcacgcggccctctcctgtcagtgccggcccacccaccagcaggcccccaacccccaggcagcccggcagaggacgggaggagaccagtcccccacccagccgtaccagaaataaaggcttctgtgcttc

SEQ ID NO: 115706 - DNA, 2021 bp, Homo sapiens
  Payload ID: 2579
  Gene Symbol: CD7
  Gene Name: CD7 molecule
  ENST ID: ENST00000584284
  CDS Start-End: 83-748
gtgtgctgctctctgtggggtcctgtagacccagagaggctcagctgcactcgcccggctgggagagctgggtgtggggaacatggccgggcctccgaggctcctgctgctgcccctgcttctggcgctggctcgcggcctgcctggggccctggctgcccaagaggtgcagcagtctccccactgcacgactgtccccgtgggagcctccgtcaacatcacctgctccaccagcgggggcctgcgtgggatctacctgaggcagctcgggccacagccccaagacatcatttactacgaggacggggtggtgcccactacggacagacggttccggggccgcatcgacttctcagggtcccaggacaacctgactatcaccatgcaccgcctgcagctgtcggacactggcacctacacctgccaggccatcacggaggtcaatgtctacggctccggcaccctggtcctggtgacagaggaacagtcccaaggatggcacagatgctcggacgccccaccaagggcctctgccctccctgccccaccgacaggctccgccctccctgacccgcagacagcctctgccctccctgacccgccagcagcctctgccctccctgcggccctggcggtgatctccttcctcctcgggctgggcctgggggtggcgtgtgtgctggcgaggacacaggtcagtgtgagccccagctgccacctgcaccccaaagattgttccctctcctgagagcagcgtggggggcgccaaagccccagaggaaaaccctggtacccgccgcctcctctgcaggctctggaactctcagggtggaagtggcctcggcggggagggagggggaccagcaccaaagcgacctgagggggagggagcagcccaggcgctgggcccgcgtgtgcgcgtgtgcgcgtgtgcaggtgtgagtgtctgaggggggatctctgaggtctgtgcgtgcaggttggagtgtgcgggcagaggagggagcgcccaggcgctgggcccgcgtgtgcacgtgtgcaggtgtgagcctgtgtgtggggatctctgaggactgtgcgtgcatgttggagtgtgccggcgtgctgtgtggccgtgggaaggggagggggcctcagacagacacagagtctaggcgtggccactcccctcggtccctgctgtttgtctggggctggagtgggggtcccgcttggcttgggcttggtgggggggtccaagccacttccactctccttcttcagaggcaccccagggtccgacccagccctgcctggggaaggctctgctgggaagccctggggctcaggagacctgggggccagcccagaggagccccgtgggggtctcgtgttaaaattagaaagctgaccggagtggggtggggtccaggacaccacgctggccactggttggagacggcggttctgtctttcagataaagaaactgtgctcgtggcgggataagaattcggcggcatgtgtggtgtacgaggacatgtcgcacagccgctgcaacacgctgtcctcccccaaccagtaccagtgacccagtgggcccctgcacgtcccgcctgtggtccccccagcaccttccctgccccaccatgccccccaccctgccacacccctcaccctgctgtcctcccacggctgcagcagagtttgaagggcccagccgtgcccagctccaagcagacacacaggcagtggccaggccccacggtgcttctcagtggacaatgatgcctcctccgggaagccttccctgcccagcccacgccgccaccgggaggaagcctgactgtcctttggctgcatctcccgaccatggccaaggagggcttttctgtgggatgggcctgggcacgcggccctctcctgtcagtgccggcccacccaccagcaggcccccaacccccaggcagcccggcagaggacgggaggagaccagtcccccacccagccgtaccagaaataaaggcttctgtgcttccttttc

SEQ ID NO: 115707 - DNA, 564 bp, Homo sapiens
  Payload ID: 2579
  Gene Symbol: CD7
  Gene Name: CD7 molecule
  ENST ID: ENST00000582480
  CDS Start-End: 85-564
ctgtgtgctgctctctgtggggtcctgtagacccagagaggctcagctgcactcgcccggctgggagagctgggtgtggggaacatggccgggcctccgaggctcctgctgctgcccctgcttctggcgctggctcgcggcctgcctggggccctggctgcccaagggaggacattctctgtccttctggccagactgatggtgacagcccaggtcctccccagaggtgcagcagtctccccactgcacgactgtccccgtgggagcctccgtcaacatcacctgctccaccagcgggggcctgcgtgggatctacctgaggcagctcgggccacagccccaagacatcatttactacgaggacggggtggtgcccactacggacagacggttccggggccgcatcgacttctcagggtcccaggacaacctgactatcaccatgcaccgcctgcagctgtcggacactggcacctacacctgccaggccatcacggaggtcaatgtctacggctccggcaccctggtcctggtgacagaggaacagtcccaaggatggcacag

SEQ ID NO: 115708 - DNA, 572 bp, Homo sapiens
  Payload ID: 2579
  Gene Symbol: CD7
  Gene Name: CD7 molecule
  ENST ID: ENST00000581434
  CDS Start-End: 56-163
gacccagagaggctcagctgcactcgcccggctgggagagctgggtgtggggaacatggccgggcctccgaggctcctgctgctgcccctgcttctggcgctggctcgcggcctgcctggggccctggctgcccaagcgggggcctgcgtgggatctacctgaggcagctcgggccacagccccaagacatcatttactacgaggacggggtggtgcccactacggacagacggttccggggccgcatcgacttctcagggtcccaggacaacctgactatcaccatgcaccgcctgcagctgtcggacactggcacctacacctgccaggccatcacggaggtcaatgtctacggctccggcaccctggtcctggtgacagaggaacagtcccaaggatggcacagatgctcggacgccccaccaagggcctctgccctccctgccccaccgacaggctccgccctccctgacccgcagacagcctctgccctccctgacccgccagcagcctctgccctccctgcggccctggcggtgatctccttcctcctcgggctgggcctgggggt

SEQ ID NO: 115709 - DNA, 925 bp, Homo sapiens
  Payload ID: 2579
  Gene Symbol: CD7
  Gene Name: CD7 molecule
  ENST ID: ENST00000578509
  CDS Start-End: 394-759
gtcctgtagacccagagaggctcagctgcactcgcccggctgggagagctgggtgtggggaacatggccgggcctccgaggctcctgctgctgcccctgcttctggcgctggctcgcggcctgcctggggccctggctgcccaagactgatggtgacagcccaggtcctccccagaggtgcagcagtctccccactgcacgactgtccccgtgggagcctccgtcaacatcacctgctccaccagcgggggcctgcgtgggatctacctgaggcagctcgggccacagccccaagacatcatttactacgaggacggggtggtgcccactacggacagacggttccggggccgcatcgacttctcagggtcccaggacaacctgactatcaccatgcaccgcctgcagctgtcggacactggcacctacacctgccaggccatcacggaggtcaatgtctacggctccggcaccctggtcctggtgacagaggaacagtcccaaggatggcacagatgctcggacgccccaccaagggcctctgccctccctgccccaccgacaggctccgccctccctgacccgcagacagcctctgccctccctgacccgccagcagcctctgccctccctgcggccctggcggtgatctccttcctcctcgggctgggcctgggggtggcgtgtgtgctggcgaggacacaggtcagtgtgagccccagctgccacctgcaccccaaagattgttccctctcctgagagcagcgtggggggcgccaaagccccagaggaaaaccctggtacccgccgcctcctctgcaggctctggaactctcagggtggaagtggcctcggcggggagggagggggaccagcaccaaagcgacctgagggggagggagcagcccaggcgctgggcccgcgt

SEQ ID NO: 115710 - DNA, 913 bp, Homo sapiens
  Payload ID: 2580
  Gene Symbol: CD70
  Gene Name: CD70 molecule
  Uniprot ID: P32970
  ENST ID: ENST00000245903
  CDS Start-End: 151-732
ccagagaggggcaggctggtcccctgacaggttgaagcaagtagacgcccaggagccccgggagggggctgcagtttccttccttccttctcggcagcgctccgcgcccccatcgcccctcctgcgctagcggaggtgatcgccgcggcgatgccggaggagggttcgggctgctcggtgcggcgcaggccctatgggtgcgtcctgcgggctgctttggtcccattggtcgcgggcttggtgatctgcctcgtggtgtgcatccagcgcttcgcacaggctcagcagcagctgccgctcgagtcacttgggtgggacgtagctgagctgcagctgaatcacacaggacctcagcaggaccccaggctatactggcaggggggcccagcactgggccgctccttcctgcatggaccagagctggacaaggggcagctacgtatccatcgtgatggcatctacatggtacacatccaggtgacgctggccatctgctcctccacgacggcctccaggcaccaccccaccaccctggccgtgggaatctgctctcccgcctcccgtagcatcagcctgctgcgtctcagcttccaccaaggttgtaccattgcctcccagcgcctgacgcccctggcccgaggggacacactctgcaccaacctcactgggacacttttgccttcccgaaacactgatgagaccttctttggagtgcagtgggtgcgcccctgaccactgctgctgattagggttttttaaattttattttattttatttaagttcaagagaaaaagtgtacacacaggggccacccggggttggggtgggagtgtggtggggggtagtggtggcaggacaagagaaggcattgagctttttctttcattttcctattaaaaaatacaaaaatca

SEQ ID NO: 115711 - DNA, 881 bp, Homo sapiens
  Payload ID: 2580
  Gene Symbol: CD70
  Gene Name: CD70 molecule
  Uniprot ID: P32970
  ENST ID: ENST00000423145
  CDS Start-End: 138-764
ggctggtcccctgacaggttgaagcaagtagacgcccaggagccccgggagggggctgcagtttccttccttccttctcggcagcgctccgcgcccccatcgcccctcctgcgctagcggaggtgatcgccgcggcgatgccggaggagggttcgggctgctcggtgcggcgcaggccctatgggtgcgtcctgcgggctgctttggtcccattggtcgcgggcttggtgatctgcctcgtggtgtgcatccagcgcttcgcacaggctcagcagcagctgccgctcgagtcacttgggtgggacgtagctgagctgcagctgaatcacacaggacctcagcaggaccccaggctatactggcaggggggcccagcactgggccgctccttcctgcatggaccagagctggacaaggggcagctacgtatccatcgtgatggcatctacatggtacacatccaggtgacgctggccatctgctcctccacgacggcctccaggcaccaccccaccaccctggccgtgggaatctgctctcccgcctcccgtagcatcagcctgctgcgtctcagcttccaccaagggctttttggattttggaactggggactcaaagtcaagtgcttcttacggcatttaatatggactgcacactgttttatcccattaactcagctcgtgttcatgcaagccctacaaagctggaggaatcatcattgttcccatttcacagatgaggaaaacagaggcgtaaaccgttgagtcatctgtccaaagttactggttttgtaacagctggaacctcagtatttaacagttgaggaaaatagtggcagaaaacctgagtcacaagcccgaggcaattcatctacatagtag

SEQ ID NO: 115712 - DNA, 572 bp, Homo sapiens
  Payload ID: 2580
  Gene Symbol: CD70
  Gene Name: CD70 molecule
  ENST ID: ENST00000597430
  CDS Start-End: 377-572
tttttgaccttcctgtttcctggaactcagccatggtggtgtgtcactttgtactttgcagacaagggcatcacctttgatgtgtcggaggcacttcagtgaaagaattttggctcctaaagattttgcagaacagagatgacatgccagcccagactttcatttccaggaggccatgaattctgggaggacaccgttaacccactacagccatcgagaacagcagcaggaggctggatgcggtggctcacacctgtcatcccggcactttgggggacctacgcagcaggatcgcttgagcccagatgtttgagaccagcctgcgctccgcgcccccatcgcccctcctgcgctagcggaggtgatcgccgcggcgatgccggaggagggttcgggctgctcggtgcggcgcaggccctatgggtgcgtcctgcgggctgctttggtcccattggtcgcgggcttggtgatctgcctcgtggtgtgcatccagcgcttcgcacaggctcagcagcagctgccgctcgagtcacttgggtgggacgtagctgagctgcagctgaatcacacag

SEQ ID NO: 115713 - DNA, 1548 bp, Homo sapiens
  Payload ID: 2581
  Gene Symbol: CD72
  Gene Name: CD72 molecule
  Uniprot ID: P21854
  ENST ID: ENST00000259633
  CDS Start-End: 125-1204
aattgctaagccgtgcagtcacagagggaacacagagcctagttgtaaacggacagagacgagaggggcaagggaggacagtggatgacagggaagacgagtgggggcagagctgctcaggaccatggctgaggccatcacctatgcagatctgaggtttgtgaaggctcccctgaagaagagcatctccagccggttaggacaggacccaggggctgatgatgatggggaaatcacctacgagaatgttcaagtgcccgcagtcctaggggtgccctcaagcttggcttcttctgtactaggggacaaagcagcggtcaagtcggagcagccaactgcgtcctggagagccgtgacgtcaccagctgtcgggcggattctcccctgccgcacaacctgcctgcgatacctcctgctcggcctgctcctcacctgcctgctgttaggagtgaccgccatctgcctgggagtgcgctatctgcaggtgtctcagcagctccagcagacgaacagggttctggaagtcactaacagcagcctgaggcagcagctccgcctcaagataacgcagctgggacagagtgcagaggatctgcaggggtccaggagagagctggcgcagagtcaggaagcactacaggtggaacagagggctcatcaggcggccgaagggcagctacaggcctgccaggcagacagacagaagacgaaggagaccttgcaaagtgaggagcaacagaggagggccttggagcagaagctgagcaacatggagaacagactgaagcccttcttcacatgcggctcagcagacacctgctgtccgtcgggatggataatgcatcagaaaagctgcttttacatctcacttacttcaaaaaattggcaggagagccaaaaacaatgtgaaactctgtcttccaagctggccacattcagtgaaatttatccacaatcacactcttactacttcttaaattcactgttgccaaatggtggttcagggaattcatattggactggcctcagctctaacaaggattggaagttgactgatgatacacaacgcactaggacttatgctcaaagctcaaaatgtaacaaggtacataaaacttggtcatggtggacactggagtcagagtcatgtagaagttctcttccctacatctgtgagatgacagctttcaggtttccagattaggacagtcctttgcactgagttgacactcatgccaacaagaacctgtgcccctccttcctaacctgaggcctggggttcctcagaccatctccttcattctgggcagtgcccagccaccggctgacccacacctgacacttccagccagtctgctgcctgctccctcttcctgaaactggactgttcctgggaaaagggtgaagccacctctagaagggactttggcctccccccaagaacttcccatggtagaatggggtgggggaggagggcgcacgggctgagcggataggggcggcccggagccagccaggcagttttattgaaatctttttaaataattg

SEQ ID NO: 115714 - DNA, 585 bp, Homo sapiens
  Payload ID: 2581
  Gene Symbol: CD72
  Gene Name: CD72 molecule
  ENST ID: ENST00000378430
  CDS Start-End: 87-449
ctagttgtaaacggacagagacgagaggggcaagggaggacagtggatgacagggaagacgagtgggggcagagctgctcaggaccatggctgaggccatcacctatgcagatctgaggtttgtgaaggctcccctgaagaagagcatctccagccggttaggacaggacccaggggctgatgatgatggggaaatcacctacgagaatgttcaagtgcccgcagtcctaggggtgccctcaagcttggcttcttctgtactaggggacaaagcagcggtcaagtcggagcagccaactgcgtcctggagagccgtgacgtcaccagctgtcgggcggattctcccctgtgagtgtgcctgtgcggggcagccgcggggccaagtgctcgcgcctgtcccggctgcggatggcgctgggccccgcggggtgcagctccttccgggataaacccgggcgcagtccttccgacgcccgggctgccgtgccacattcaccttcatccggtgcgcctgaatccgacgtgcaccgcccccctgcggatggtcccaattcacctacctgccccccttcccctctctccgtc

SEQ ID NO: 115715 - DNA, 849 bp, Homo sapiens
  Payload ID: 2581
  Gene Symbol: CD72
  Gene Name: CD72 molecule
  ENST ID: ENST00000378431
  CDS Start-End: 68-427
gacgagaggggcaagggaggacagtggatgacagggaagacgagtgggggcagagctgctcaggaccatggctgaggccatcacctatgcagatctgaggtttgtgaaggctcccctgaagaagagcatctccagccggttaggacaggacccaggggctgatgatgatggggaaatcacctacgagaatgttcaagtgcccgcagtcctaggggtgccctcaagcttggcttcttctgtactaggggacaaagcagcggtcaagtcggagcagccaactgcgtcctggagagccgtgacgtcaccagctgtcgggcggattctcccctgccgcacaacctgcctgcgatacctcctgctcggcctgctcctcacctgcctgctgttaggagtgaccgccatctgcctgggagtgcgctgtgagtaaggctgtccctacttcccacttacaccgaacgactttcgtcccgactctcgccccaaagctgatcttcctcagcagggatcatagtcactaccaccacctccttagctttgggtttggtttccagccagggctgttgtcttcctgaattgtcctcacctaatccagtacctccttacgctttagtcagtcaaatcttgtatttcagcctgtgatgcaaaaagttgcaagaagcagaaaaagggctgatgctgcagtctcagggcactagggcagggctggagaagacatccaccaaatctctgtggccaaacagatctgcaggtgtctcagcagctccagcagacgaacagggttctggaagtcactaacagcagcctgaggcagcagctccgcctcaagataacgcagctgggacagagtgc

SEQ ID NO: 115716 - DNA, 2035 bp, Homo sapiens
  Payload ID: 2581
  Gene Symbol: CD72
  Gene Name: CD72 molecule
  Uniprot ID: P21854
  ENST ID: ENST00000396757
  CDS Start-End: 166-1245
caccaccaatcatccgagctgttggcatgtgtcacagggccaattgctaagccgtgcagtcacagagggaacacagagcctagttgtaaacggacagagacgagaggggcaagggaggacagtggatgacagggaagacgagtgggggcagagctgctcaggaccatggctgaggccatcacctatgcagatctgaggtttgtgaaggctcccctgaagaagagcatctccagccggttaggacaggacccaggggctgatgatgatggggaaatcacctacgagaatgttcaagtgcccgcagtcctaggggtgccctcaagcttggcttcttctgtactaggggacaaagcagcggtcaagtcggagcagccaactgcgtcctggagagccgtgacgtcaccagctgtcgggcggattctcccctgccgcacaacctgcctgcgatacctcctgctcggcctgctcctcacctgcctgctgttaggagtgaccgccatctgcctgggagtgcgctatctgcaggtgtctcagcagctccagcagacgaacagggttctggaagtcactaacagcagcctgaggcagcagctccgcctcaagataacgcagctgggacagagtgcagaggatctgcaggggtccaggagagagctggcgcagagtcaggaagcactacaggtggaacagagggctcatcaggcggccgaagggcagctacaggcctgccaggcagacagacagaagacgaaggagaccttgcaaagtgaggagcaacagaggagggccttggagcagaagctgagcaacatggagaacagactgaagcccttcttcacatgcggctcagcagacacctgctgtccgtcgggatggataatgcatcagaaaagctgcttttacatctcacttacttcaaaaaattggcaggagagccaaaaacaatgtgaaactctgtcttccaagctggccacattcagtgaaatttatccacaatcacactcttactacttcttaaattcactgttgccaaatggtggttcagggaattcatattggactggcctcagctctaacaaggattggaagttgactgatgatacacaacgcactaggacttatgctcaaagctcaaaatgtaacaaggtacataaaacttggtcatggtggacactggagtcagagtcatgtagaagttctcttccctacatctgtgagatgacagctttcaggtttccagattaggacagtcctttgcactgagttgacactcatgccaacaagaacctgtgcccctccttcctaacctgaggcctggggttcctcagaccatctccttcattctgggcagtgcccagccaccggctgacccacacctgacacttccagccagtctgctgcctgctccctcttcctgaaactggactgttcctgggaaaagggtgaagccacctctagaagggactttggcctccccccaagaacttcccatggtagaatggggtgggggaggagggcgcacgggctgagcggataggggcggcccggagccagccaggcagttttattgaaatctttttaaataattgcacgtgttagtctcatgtgtcagcaatgctgtgtctggttcagtgatccccacgggaacgcgagccggggggtcgactggaagtgctctgtcccttgagtccatgctggggctcccctacacggggagaagagccggtcagcccatctggaactggcactgtccagcaagtgtgctctgttcttacagggtgtcctgaaggccaaagttggaggcctgagaccacgggctccactgctaagagcgtgccccaggcagctgcaggctgggtgtgggtggcttggcgtggtgccctcggtggcagaggagactgcccgcctcacagttcaggttgcggtagcgggcaacagctggtgtggggcgggggcacatggacaggaagccaaagctgaaggggccgaggcagcagccaggacagggcagcccctcatcgggctcccggggagc

SEQ ID NO: 115717 - DNA, 1424 bp, Homo sapiens
  Payload ID: 2581
  Gene Symbol: CD72
  Gene Name: CD72 molecule
  ENST ID: ENST00000612238
  CDS Start-End: 1-1080
atgcaaaccaggaacccccagtctcatggggagaacggagcctcaccctggagctggggagatcgtctgggccctggcccagacccaggggctgatgatgatggggaaatcacctacgagaatgttcaagtgcccgcagtcctaggggtgccctcaagcttggcttcttctgtactaggggacaaagcagcggtcaagtcggagcagccaactgcgtcctggagagccgtgacgtcaccagctgtcgggcggattctcccctgccgcacaacctgcctgcgatacctcctgctcggcctgctcctcacctgcctgctgttaggagtgaccgccatctgcctgggagtgcgctatctgcaggtgtctcagcagctccagcagacgaacagggttctggaagtcactaacagcagcctgaggcagcagctccgcctcaagataacgcagctgggacagagtgcagaggatctgcaggggtccaggagagagctggcgcagagtcaggaagcactacaggtggaacagagggctcatcaggcggccgaagggcagctacaggcctgccaggcagacagacagaagacgaaggagaccttgcaaagtgaggagcaacagaggagggccttggagcagaagctgagcaacatggagaacagactgaagcccttcttcacatgcggctcagcagacacctgctgtccgtcgggatggataatgcatcagaaaagctgcttttacatctcacttacttcaaaaaattggcaggagagccaaaaacaatgtgaaactctgtcttccaagctggccacattcagtgaaatttatccacaatcacactcttactacttcttaaattcactgttgccaaatggtggttcagggaattcatattggactggcctcagctctaacaaggattggaagttgactgatgatacacaacgcactaggacttatgctcaaagctcaaaatgtaacaaggtacataaaacttggtcatggtggacactggagtcagagtcatgtagaagttctcttccctacatctgtgagatgacagctttcaggtttccagattaggacagtcctttgcactgagttgacactcatgccaacaagaacctgtgcccctccttcctaacctgaggcctggggttcctcagaccatctccttcattctgggcagtgcccagccaccggctgacccacacctgacacttccagccagtctgctgcctgctccctcttcctgaaactggactgttcctgggaaaagggtgaagccacctctagaagggactttggcctccccccaagaacttcccatggtagaatggggtgggggaggagggcgcacgggctgagcggataggggcggcccggagccagccaggcagttttattgaaatctttttaaataattg

SEQ ID NO: 115718 - DNA, 981 bp, Homo sapiens
  Payload ID: 2582
  Gene Symbol: CD74
  Gene Name: CD74 molecule, major histocompatibility complex, class II invariant chain
  Uniprot ID: P04233
  ENST ID: ENST00000009530
  CDS Start-End: 3-893
agatgcacaggaggagaagcaggagctgtcgggaagatcagaagccagtcatggatgaccagcgcgaccttatctccaacaatgagcaactgcccatgctgggccggcgccctggggccccggagagcaagtgcagccgcggagccctgtacacaggcttttccatcctggtgactctgctcctcgctggccaggccaccaccgcctacttcctgtaccagcagcagggccggctggacaaactgacagtcacctcccagaacctgcagctggagaacctgcgcatgaagcttcccaagcctcccaagcctgtgagcaagatgcgcatggccaccccgctgctgatgcaggcgctgcccatgggagccctgccccaggggcccatgcagaatgccaccaagtatggcaacatgacagaggaccatgtgatgcacctgctccagaatgctgaccccctgaaggtgtacccgccactgaaggggagcttcccggagaacctgagacaccttaagaacaccatggagaccatagactggaaggtctttgagagctggatgcaccattggctcctgtttgaaatgagcaggcactccttggagcaaaagcccactgacgctccaccgaaagtactgaccaagtgccaggaagaggtcagccacatccctgctgtccacccgggttcattcaggcccaagtgcgacgagaacggcaactatctgccactccagtgctatgggagcatcggctactgctggtgtgtcttccccaacggcacggaggtccccaacaccagaagccgcgggcaccataactgcagtgagtcactggaactggaggacccgtcttctgggctgggtgtgaccaagcaggatctgggcccagtccccatgtgagagcagcagaggcggtcttcaacatcctgccagccccacacagctacagctttcttgctcccttcagcccccagcccctcccccatct

SEQ ID NO: 115719 - DNA, 1449 bp, Homo sapiens
  Payload ID: 2582
  Gene Symbol: CD74
  Gene Name: CD74 molecule, major histocompatibility complex, class II invariant chain
  Uniprot ID: P04233
  ENST ID: ENST00000353334
  CDS Start-End: 181-879
gggagcccccccgccccacatcctgccccgcaaaaggcagcttcaccaaagtggggtatttccagcctttgtagctttcacttccacatctaccaagtgggcggagtggccttctgtggacgaatcagattcctctccagcaccgactttaagaggcgagccggggggtcagggtcccagatgcacaggaggagaagcaggagctgtcgggaagatcagaagccagtcatggatgaccagcgcgaccttatctccaacaatgagcaactgcccatgctgggccggcgccctggggccccggagagcaagtgcagccgcggagccctgtacacaggcttttccatcctggtgactctgctcctcgctggccaggccaccaccgcctacttcctgtaccagcagcagggccggctggacaaactgacagtcacctcccagaacctgcagctggagaacctgcgcatgaagcttcccaagcctcccaagcctgtgagcaagatgcgcatggccaccccgctgctgatgcaggcgctgcccatgggagccctgccccaggggcccatgcagaatgccaccaagtatggcaacatgacagaggaccatgtgatgcacctgctccagaatgctgaccccctgaaggtgtacccgccactgaaggggagcttcccggagaacctgagacaccttaagaacaccatggagaccatagactggaaggtctttgagagctggatgcaccattggctcctgtttgaaatgagcaggcactccttggagcaaaagcccactgacgctccaccgaaagagtcactggaactggaggacccgtcttctgggctgggtgtgaccaagcaggatctgggcccagtccccatgtgagagcagcagaggcggtcttcaacatcctgccagccccacacagctacagctttcttgctcccttcagcccccagcccctcccccatctcccaccctgtacctcatcccatgagaccctggtgcctggctctttcgtcacccttggacaagacaaaccaagtcggaacagcagataacaatgcagcaaggccctgctgcccaatctccatctgtcaacaggggcgtgaggtcccaggaagtggccaaaagctagacagatccccgttcctgacatcacagcagcctccaacacaaggctccaagacctaggctcatggacgagatgggaaggcacagggagaagggataaccctacacccagaccccaggctggacatgctgactgtcctctcccctccagcctttggccttggcttttctagcctatttacctgcaggctgagccactctcttccctttccccagcatcactccccaaggaagagccaatgttttccacccataatcctttctgccgacccctagttccctctgctcagccaagcttgttatcagctttcagggccatgg

SEQ ID NO: 115720 - DNA, 1138 bp, Homo sapiens
  Payload ID: 2582
  Gene Symbol: CD74
  Gene Name: CD74 molecule, major histocompatibility complex, class II invariant chain
  Uniprot ID: P04233
  ENST ID: ENST00000377795
  CDS Start-End: 21-503
ccggggggtcagggtcccagatgcacaggaggagaagcaggagctgtcgggaagatcagaagccagtcatggatgaccagcgcgaccttatctccaacaatgagcaactgcccatgctgggccggcgccctggggccccggagagcaagtgcagccgcggagccctgtacacaggcttttccatcctggtgactctgctcctcgctggccaggccaccaccgcctacttcctgtaccagcagcagggccggctggacaaactgacagtcacctcccagaacctgcagctggagaacctgcgcatgaagcttcccaagcctcccaagcctgtgagcaagatgcgcatggccaccccgctgctgatgcaggcgctgcccatgggagccctgccccaggggcccatgcagaatgccaccaagtatggcaacatgacagaggaccatgtgatgcacctgctccagagtcactggaactggaggacccgtcttctgggctgggtgtgaccaagcaggatctgggcccagtccccatgtgagagcagcagaggcggtcttcaacatcctgccagccccacacagctacagctttcttgctcccttcagcccccagcccctcccccatctcccaccctgtacctcatcccatgagaccctggtgcctggctctttcgtcacccttggacaagacaaaccaagtcggaacagcagataacaatgcagcaaggccctgctgcccaatctccatctgtcaacaggggcgtgaggtcccaggaagtggccaaaagctagacagatccccgttcctgacatcacagcagcctccaacacaaggctccaagacctaggctcatggacgagatgggaaggcacagggagaagggataaccctacacccagaccccaggctggacatgctgactgtcctctcccctccagcctttggccttggcttttctagcctatttacctgcaggctgagccactctcttccctttccccagcatcactccccaaggaagagccaatgttttccacccataatcctttctgccgacccctagttccctctgctcagccaagcttgttatcagctttcagggccatggttcacattagaataaaaggtagtaattagaaca

SEQ ID NO: 115721 - DNA, 584 bp, Homo sapiens
  Payload ID: 2582
  Gene Symbol: CD74
  Gene Name: CD74 molecule, major histocompatibility complex, class II invariant chain
  ENST ID: ENST00000524315
  CDS Start-End: 3-461
agatgcacaggaggagaagcaggagctgtcgggaagatcagaagccagtcatggatgaccagcgcgaccttatctccaacaatgagcaactgcccatgctgggccggcgccctggggccccggagagcaagtgcagccgcggagccctgtacacaggcttttccatcctggtgactctgctcctcgctggccaggccaccaccgcctacttcctgtaccagcagcagggccggctggacaaactgacagtcacctcccagaacctgcagctggagaacctgcgcatgaagcttcccaagcctcccaagcctgtgagcaagatgcgcatggccaccccgctgctgatgcaggcgctgcccatgggagccctgccccaggggcccatgcagaatgccaccaagtatggcaacatgacagaggaccatgtgatgcacctgctccaggaagtggccaaaagctagacagatccccgttcctgacatcacagcagcctccaacacaaggctccaagacctaggctcatggacgagatgggaaggcacagggagaagggataaccctacacccagaccccaggctggaca

SEQ ID NO: 115722 - DNA, 546 bp, Homo sapiens
  Payload ID: 2582
  Gene Symbol: CD74
  Gene Name: CD74 molecule, major histocompatibility complex, class II invariant chain
  ENST ID: ENST00000523813
  CDS Start-End: 3-161
agatgcacaggaggagaagcaggagctgtcgggaagatcagaagccagtcatggatgaccagcgcgaccttatctccaacaatgagcaactgcccatgctgggccggcgccctggggccccggagagcccatgcagaatgccaccaagtatggcaacatgacagaggaccatgtgatgcacctgctccagcactgtgcaaggctctgggcccacaatggggagcaattggacccagctcctgaagccatggggatcccaggctagtgtgggagacagacaagtgaccaggtgatgacagaagtgcagggggctttgtgaagaaagaggcagaggactcaacctagctgggggcagtcaaggttgggtcctcacctgctggagcaggtaagacctgaaagctgagcagccatccacagggaggacactggggcttgttggtagagctggcctggaatctggaactcgactcgcaacgctgcagtctcgtagctgaacagctggactacccttacccgtaccctcccctcccctcccatcatggctga

SEQ ID NO: 115723 - DNA, 563 bp, Homo sapiens
  Payload ID: 2582
  Gene Symbol: CD74
  Gene Name: CD74 molecule, major histocompatibility complex, class II invariant chain
  ENST ID: ENST00000522246
  CDS Start-End: 3-371
agatgcacaggaggagaagcaggagctgtcgggaagatcagaagccagtcatggatgaccagcgcgaccttatctccaacaatgagcaactgcccatgctgggccggcgccctggggccccggagagcaagtgcagccgcggagccctgtacacaggcttttccatcctggtgactctgctcctcgctggccaggccaccaccgcctacttcctgtaccagcagcagggccggctggacaaactgacagtcacctcccagaacctgcagctggagaacctgcgcatgaagcttcccaagccccatgcagaatgccaccaagtatggcaacatgacagaggaccatgtgatgcacctgctccagaatgctgaccccctgaaggtgtacccgccactgaaggggagcttcccggagaacctgagacaccttaagaacaccatggagaccatagactggaaggtctttgagagctggatgcaccattggctcctgtttgaaatgagcaggcactccttggagcaaaagcccactgacgctccaccgaaaggtacagggagtgggag

SEQ ID NO: 115724 - DNA, 1727 bp, Homo sapiens
  Payload ID: 2582
  Gene Symbol: CD74
  Gene Name: CD74 molecule, major histocompatibility complex, class II invariant chain
  ENST ID: ENST00000518797
  CDS Start-End: 1-949
caggagctgtcgggaagatcagaagccagtcatggatgaccagcgcgaccttatctccaacaatgagcaactgcccatgctgggccggcgccctggggccccggagagcaagtgcagccgcggagccctgtacacaggcttttccatcctggtgactctgctcctcgctggccaggccaccaccgcctacttcctgtaccagcagcagggccggctggacaaactgacagtcacctcccagaacctgcagctggagaacctgcgcatgaagcttcccaagcctcccaagcctgtgagcaagatgcgcatggccaccccgctgctgatgcaggcgctgcccatgggagccctgccccaggggcccatgcagaatgccaccaagtatggcaacatgacagaggaccatgtgatgcacctgctccagaatgctgaccccctgaaggtgtacccgccactgaaggggagcttcccggagaacctgagacaccttaagaacaccatggagaccatagactggaaggtctttgagagctggatgcaccattggctcctgtttgaaatgagcaggcactccttggagcaaaagcccactgacgctccaccgaaagtactgaccaagtgccaggaagaggtcagccacatccctgctgtccacccgggttcattcaggcccaagtgcgacgagaacggcaactatctgccactccagtgctatgggagcatcggctactgctggtgtgtcttccccaacggcacggaggtccccaacaccagaagccgcgggcaccataactgcagtgagtcactggaactggaggacccgtcttctgggctgggtgtgaccaagcaggatctgggcccaggtaagggccttgcagaggggcatctggtcaccagcagctcatccccagcagggccagctcctttgtgggcaggtgaaggagtgtgacgctgggccactctccaacattcctgggatgtccatttcacagacgaaggaacagggttggggggctgtggggagttacacaaatccatgatggtcattattggacctgagcagggggcaggggagggtggacagtccttaactgctctgcaggtccaggatgttagaaaggggcagggacaacaaatgggtgaccccaacctcaacctgctgcttctctctccagtccccatgtgagagcagcagaggcggtcttcaacatcctgccagccccacacagctacagctttcttgctcccttcagcccccagcccctcccccatctcccaccctgtacctcatcccatgagaccctggtgcctggctctttcgtcacccttggacaagacaaaccaagtcggaacagcagataacaatgcagcaaggccctgctgcccaatctccatctgtcaacaggggcgtgaggtcccaggaagtggccaaaagctagacagatccccgttcctgacatcacagcagcctccaacacaaggctccaagacctaggctcatggacgagatgggaaggcacagggagaagggataaccctacacccagaccccaggctggacatgctgactgtcctctcccctccagcctttggccttggcttttctagcctatttacctgcaggctgagccactctcttccctttccccagcatcactccccaaggaagagccaatgttttccacccataatcctttctgccgacccctagttccctctgctcagcc

SEQ ID NO: 115725 - DNA, 767 bp, Homo sapiens
  Payload ID: 2582
  Gene Symbol: CD74
  Gene Name: CD74 molecule, major histocompatibility complex, class II invariant chain
  ENST ID: ENST00000523208
  CDS Start-End: 1-437
ggagaagcaggagctgtcgggaagatcagaagccagtcatggatgaccagcgcgaccttatctccaacaatgagcaactgcccatgctgggccggcgccctggggccccggagagcaagtgcagccgcggagccctgtacacaggcttttccatcctggtgactctgctcctcgctggccaggccaccaccgcctacttcctgtaccagcagcagggccggctggacaaactgacagtcacctcccagaacctgcagctggagaacctgcgcatgaagcttcccaagcctcccaagcctgtgagcaagatgcgcatggccaccccgctgctgatgcaggcgctgcccatgggagccctgccccaggggcccatgcagaatgccaccaagtatggcaacatgacagaggaccatgtgatgcacctgctccagtactgaccaagtgccaggaagaggtcagccacatccctgctgtccacccgggttcattcaggcccaagtgcgacgagaacggcaactatctgccactccagtgctatgggagcatcggctactgctggtgtgtcttccccaacggcacggaggtccccaacaccagaagccgcgggcaccataactgcagtgagtcactggaactggaggacccgtcttctgggctgggtgtgaccaagcaggatctgggcccagtccccatgtgagagcagcagaggcggtcttcaacatcctgccagccccacacagctacagctttcttgctcccttcagccc

SEQ ID NO: 115726 - DNA, 1258 bp, Homo sapiens
  Payload ID: 2583
  Gene Symbol: CD79A
  Gene Name: CD79a molecule, immunoglobulin-associated alpha
  Uniprot ID: P11912
  ENST ID: ENST00000221972
  CDS Start-End: 186-866
tccactcacagcctgaagcatacccggcaggggctgtccccaggcccaacaagcaaagggcccagtagcgagggccactggagcccatctccggggggctgggcaggaagtagggtggggtttggggtagggatctggtaccctgggactgctgcaactcaaactaaccaacccactgggagaagatgcctgggggtccaggagtcctccaagctctgcctgccaccatcttcctcctcttcctgctgtctgctgtctacctgggccctgggtgccaggccctgtggatgcacaaggtcccagcatcattgatggtgagcctgggggaagacgcccacttccaatgcccgcacaatagcagcaacaacgccaacgtcacctggtggcgcgtcctccatggcaactacacgtggccccctgagttcttgggcccgggcgaggaccccaatggtacgctgatcatccagaatgtgaacaagagccatgggggcatatacgtgtgccgggtccaggagggcaacgagtcataccagcagtcctgcggcacctacctccgcgtgcgccagccgccccccaggcccttcctggacatgggggagggcaccaagaaccgaatcatcacagccgaggggatcatcctcctgttctgcgcggtggtgcctgggacgctgctgctgttcaggaaacgatggcagaacgagaagctcgggttggatgccggggatgaatatgaagatgaaaacctttatgaaggcctgaacctggacgactgctccatgtatgaggacatctcccggggcctccagggcacctaccaggatgtgggcagcctcaacataggagatgtccagctggagaagccgtgacacccctactcctgccaggctgcccccgcctgctgtgcacccagctccagtgtctcagctcacttccctgggacattctcctttcagcccttctgggggcttccttagtcatattcccccagtggggggtgggagggtaacctcactcttctccaggccaggcctccttggactcccctgggggtgtcccactcttcttccctctaaactgccccacctcctaacctaatccccccgccccgctgcctttcccaggctcccctcaccccagcgggtaatgagcccttaatcgctgcctctaggggagctgattgtagcagcctcgttagtgtcaccccctcctccctgatctgtcagggccacttagtgataataaattcttcccaactgca

SEQ ID NO: 115727 - DNA, 567 bp, Homo sapiens
  Payload ID: 2583
  Gene Symbol: CD79A
  Gene Name: CD79a molecule, immunoglobulin-associated alpha
  Uniprot ID: P11912
  ENST ID: ENST00000444740
  CDS Start-End: 1-567
atgcctgggggtccaggagtcctccaagctctgcctgccaccatcttcctcctcttcctgctgtctgctgtctacctgggccctgggtgccaggccctgtggatgcacaaggtcccagcatcattgatggtgagcctgggggaagacgcccacttccaatgcccgcacaatagcagcaacaacgccaacgtcacctggtggcgcgtcctccatggcaactacacgtggccccctgagttcttgggcccgggcgaggaccccaatgagccgccccccaggcccttcctggacatgggggagggcaccaagaaccgaatcatcacagccgaggggatcatcctcctgttctgcgcggtggtgcctgggacgctgctgctgttcaggaaacgatggcagaacgagaagctcgggttggatgccggggatgaatatgaagatgaaaacctttatgaaggcctgaacctggacgactgctccatgtatgaggacatctcccggggcctccagggcacctaccaggatgtgggcagcctcaacataggagatgtccagctggagaagccgtga

SEQ ID NO: 115728 - DNA, 801 bp, Homo sapiens
  Payload ID: 2583
  Gene Symbol: CD79A
  Gene Name: CD79a molecule, immunoglobulin-associated alpha
  ENST ID: ENST00000597454
  CDS Start-End: 26-801
aaactaaccaacccactgggagaagatgcctgggggtccaggagtcctccaagctctgcctgccaccatcttcctcctcttcctgctgtctgctgtctacctgggccctgggtgccaggccctgtggatgcacaaggtcccagcatcattgatggtgagcctgggggaagacgcccacttccaatgcccgcacaatagcagcaacaacgccaacgtcacctggtggcgcgtcctccatggcaactacacgtggccccctgagttcttgggcccgggcgaggaccccaatggtacgctgatcatccagaatgtgaacaagagccatgggggcatatacgtgtgccgggtccaggagggcaacgagtcataccagcagtcctgcggcacctacctccgcgtgcgccgtgagtggcccagccctggcccctactcccactgtcccgctggggacactcggtttatctttgaagtggggatagagccagtaccttcaatgtgggtttcaaaccggcttggacagagggacggacattctcctctgcagagtggggtctctggggggtctggggccttgcaggaggtgggcggggccaggaggctagggagggcaagaggggccagggctctgagccatactacctccttgcagagccgccccccaggcccttcctggacatgggggagggcaccaagaaccgaatcatcacagccgaggggatcatcctcctgttctgcgcggtggtgcctgggacgctgctgctgttcaggaaacgatggcagaacgagaagctcgggttggat

SEQ ID NO: 115729 - DNA, 1269 bp, Homo sapiens
  Payload ID: 2584
  Gene Symbol: CD79B
  Gene Name: CD79b molecule, immunoglobulin-associated beta
  Uniprot ID: P40259
  ENST ID: ENST00000006750
  CDS Start-End: 94-783
aggggacaggctgcagccggtgcagttacacgttttcctccaaggagcctcggacgttgtcacgggtttggggtcggggacagagcggtgaccatggccaggctggcgttgtctcctgtgcccagccactggatggtggcgttgctgctgctgctctcagctgagccagtaccagcagccagatcggaggaccggtaccggaatcccaaaggtagtgcttgttcgcggatctggcagagcccacgtttcatagccaggaaacggggcttcacggtgaaaatgcactgctacatgaacagcgcctccggcaatgtgagctggctctggaagcaggagatggacgagaatccccagcagctgaagctggaaaagggccgcatggaagagtcccagaacgaatctctcgccaccctcaccatccaaggcatccggtttgaggacaatggcatctacttctgtcagcagaagtgcaacaacacctcggaggtctaccagggctgcggcacagagctgcgagtcatgggattcagcaccttggcacagctgaagcagaggaacacgctgaaggatggtatcatcatgatccagacgctgctgatcatcctcttcatcatcgtgcctatcttcctgctgctggacaaggatgacagcaaggctggcatggaggaagatcacacctacgagggcctggacattgaccagacagccacctatgaggacatagtgacgctgcggacaggggaagtgaagtggtctgtaggtgagcacccaggccaggagtgagagccaggtcgccccatgacctgggtgcaggctccctggcctcagtgactgcttcggagctgcctggctcatggcccaacccctttcctggaccccccagctggcctctgaagctggcccaccagagctgccatttgtctccagcccctggtccccagctcttgccaaagggcctggagtagaaggacaacagggcagcaacttggagggagttctctggggatggacgggacccagccttctgggggtgctatgaggtgatccgtccccacacatgggatgggggaggcagagactggtccagagcccgcaaatggactcggagccgagggcctcccagcagagcttgggaagggccatggacccaactgggccccagaagagccacaggaacatcattcctctcccgcaaccactcccaccccagggaggccctggcctccagtgccttcccccgtggaataaacggtgtgtcctgagaaacca

SEQ ID NO: 115730 - DNA, 378 bp, Homo sapiens
  Payload ID: 2584
  Gene Symbol: CD79B
  Gene Name: CD79b molecule, immunoglobulin-associated beta
  Uniprot ID: P40259
  ENST ID: ENST00000349817
  CDS Start-End: 1-378
atggccaggctggcgttgtctcctgtgcccagccactggatggtggcgttgctgctgctgctctcagctgagccagtaccagcagccagatcggaggaccggtaccggaatcccaaaggattcagcaccttggcacagctgaagcagaggaacacgctgaaggatggtatcatcatgatccagacgctgctgatcatcctcttcatcatcgtgcctatcttcctgctgctggacaaggatgacagcaaggctggcatggaggaagatcacacctacgagggcctggacattgaccagacagccacctatgaggacatagtgacgctgcggacaggggaagtgaagtggtctgtaggtgagcacccaggccaggagtga

SEQ ID NO: 115731 - DNA, 1254 bp, Homo sapiens
  Payload ID: 2584
  Gene Symbol: CD79B
  Gene Name: CD79b molecule, immunoglobulin-associated beta
  Uniprot ID: P40259
  ENST ID: ENST00000392795
  CDS Start-End: 76-768
ggtgcagttacacgttttcctccaaggagcctcggacgttgtcacgggtttggggtcggggacagagcggtgaccatggccaggctggcgttgtctcctgtgcccagccactggatggtggcgttgctgctgctgctctcagcagctgagccagtaccagcagccagatcggaggaccggtaccggaatcccaaaggtagtgcttgttcgcggatctggcagagcccacgtttcatagccaggaaacggggcttcacggtgaaaatgcactgctacatgaacagcgcctccggcaatgtgagctggctctggaagcaggagatggacgagaatccccagcagctgaagctggaaaagggccgcatggaagagtcccagaacgaatctctcgccaccctcaccatccaaggcatccggtttgaggacaatggcatctacttctgtcagcagaagtgcaacaacacctcggaggtctaccagggctgcggcacagagctgcgagtcatgggattcagcaccttggcacagctgaagcagaggaacacgctgaaggatggtatcatcatgatccagacgctgctgatcatcctcttcatcatcgtgcctatcttcctgctgctggacaaggatgacagcaaggctggcatggaggaagatcacacctacgagggcctggacattgaccagacagccacctatgaggacatagtgacgctgcggacaggggaagtgaagtggtctgtaggtgagcacccaggccaggagtgagagccaggtcgccccatgacctgggtgcaggctccctggcctcagtgactgcttcggagctgcctggctcatggcccaacccctttcctggaccccccagctggcctctgaagctggcccaccagagctgccatttgtctccagcccctggtccccagctcttgccaaagggcctggagtagaaggacaacagggcagcaacttggagggagttctctggggatggacgggacccagccttctgggggtgctatgaggtgatccgtccccacacatgggatgggggaggcagagactggtccagagcccgcaaatggactcggagccgagggcctcccagcagagcttgggaagggccatggacccaactgggccccagaagagccacaggaacatcattcctctcccgcaaccactcccaccccagggaggccctggcctccagtgccttcccccgtggaataaacggtgtgtcctgagaaacca

SEQ ID NO: 115732 - DNA, 2725 bp, Homo sapiens
  Payload ID: 2585
  Gene Symbol: CD80
  Gene Name: CD80 molecule
  Uniprot ID: P33681
  ENST ID: ENST00000264246
  CDS Start-End: 364-1230
aagtaacagaagttagaaggggaaatgtcgcctctctgaagattacccaaagaaaaagtgatttgtcattgctttatagactgtaagaagagaacatctcagaagtggagtcttaccctgaaatcaaaggatttaaagaaaaagtggaatttttcttcagcaagctgtgaaactaaatccacaacctttggagacccaggaacaccctccaatctctgtgtgttttgtaaacatcactggagggtcttctacgtgagcaattggattgtcatcagccctgcctgttttgcacctgggaagtgccctggtcttacttgggtccaaattgttggctttcacttttgaccctaagcatctgaagccatgggccacacacggaggcagggaacatcaccatccaagtgtccatacctcaatttctttcagctcttggtgctggctggtctttctcacttctgttcaggtgttatccacgtgaccaaggaagtgaaagaagtggcaacgctgtcctgtggtcacaatgtttctgttgaagagctggcacaaactcgcatctactggcaaaaggagaagaaaatggtgctgactatgatgtctggggacatgaatatatggcccgagtacaagaaccggaccatctttgatatcactaataacctctccattgtgatcctggctctgcgcccatctgacgagggcacatacgagtgtgttgttctgaagtatgaaaaagacgctttcaagcgggaacacctggctgaagtgacgttatcagtcaaagctgacttccctacacctagtatatctgactttgaaattccaacttctaatattagaaggataatttgctcaacctctggaggttttccagagcctcacctctcctggttggaaaatggagaagaattaaatgccatcaacacaacagtttcccaagatcctgaaactgagctctatgctgttagcagcaaactggatttcaatatgacaaccaaccacagcttcatgtgtctcatcaagtatggacatttaagagtgaatcagaccttcaactggaatacaaccaagcaagagcattttcctgataacctgctcccatcctgggccattaccttaatctcagtaaatggaatttttgtgatatgctgcctgacctactgctttgccccaagatgcagagagagaaggaggaatgagagattgagaagggaaagtgtacgccctgtataacagtgtccgcagaagcaaggggctgaaaagatctgaaggtcccacctccatttgcaattgacctcttctgggaacttcctcagatggacaagattaccccaccttgccctttacgtatctgctcttaggtgcttcttcacttcagttgctttgcaggaagtgtctagaggaatatggtgggcacagaagtagctctggtgaccttgatcaaggtgttttgaaatgcagaattcttgagttctggaagggactttagagaataccagtgttattaatgacaaaggcactgaggcccagggaggtgacccgaattataaaggccagcgccagaacccagatttcctaactctggtgctctttccctttatcagtttgactgtggcctgttaactggtatatacatatatatgtcaggcaaagtgctgctggaagtagaatttgtccaataacaggtcaacttcagagactatctgatttcctaatgtcagagtagaagattttatgctgctgtttacaaaagcccaatgtaatgcataggaagtatggcatgaacatctttaggagactaatggaaatattattggtgtttacccagtattccatttttttcattgtgttctctattgctgctctctcactcccccatgaggtacagcagaaaggagaactatccaaaactaatttcctctgacatgtaagacgaatgatttaggtacgtcaaagcagtagtcaaggaggaaagggatagtccaaagacttaactggttcatattggactgataatctctttaaatggctttatgctagtttgacctcatttgtaaaatatttatgagaaagttctcatttaaaatgagatcgttgtttacagtgtatgtactaagcagtaagctatcttcaaatgtctaaggtagtaactttccatagggcctccttagatccctaagatggctttttctccttggtatttctgggtctttctgacatcagcagagaactggaaagacatagccaactgctgttcatgttactcatgactcctttctctaaaactgccttccacaattcactagaccagaagtggacgcaacttaagctgggataatcacattatcatctgaaaatctggagttgaacagcaaaagaagacaacatttctcaaatgcacatctcatggcagctaagccacatggctgggatttaaagcctttagagccagcccatggctttagctacctcactatgctgcttcacaaaccttgctcctgtgtaaaactatattctcagtgtagggcagagaggtctaacaccaacataaggtactagcagtgtttcccgtattgacaggaatacttaactcaataattcttttcttttccatttagtaacagttgtgatgactatgtttctattctaagtaattcctgtattctacagcagatactttgtcagcaatactaagggaagaaacaaagttgaaccgtttctttaataa

SEQ ID NO: 115733 - DNA, 771 bp, Homo sapiens
  Payload ID: 2585
  Gene Symbol: CD80
  Gene Name: CD80 molecule
  Uniprot ID: P33681
  ENST ID: ENST00000383669
  CDS Start-End: 1-771
atgggccacacacggaggcagggaacatcaccatccaagtgtccatacctcaatttctttcagctcttggtgctggctggtctttctcacttctgttcaggtgttatccacgtgaccaaggaagtgaaagaagtggcaacgctgtcctgtggtcacaatgtttctgttgaagagctggcacaaactcgcatctactggcaaaaggagaagaaaatggtgctgactatgatgtctggggacatgaatatatggcccgagtacaagaaccggaccatctttgatatcactaataacctctccattgtgatcctggctctgcgcccatctgacgagggcacatacgagtgtgttgttctgaagtatgaaaaagacgctttcaagcgggaacacctggctgaagtgacgttatcagtcaaagctgacttccctacacctagtatatctgactttgaaattccaacttctaatattagaaggataatttgctcaacctctggaggttttccagagcctcacctctcctggttggaaaatggagaagaattaaatgccatcaacacaacagtttcccaagatcctgaaactgagctctatgctgttagcagcaaactggatttcaatatgacaaccaaccacagcttcatgtgtctcatcaagtatggacatttaagagtgaatcagaccttcaactggaatacaagctttgccccaagatgcagagagagaaggaggaatgagagattgagaagggaaagtgtacgccctgtataa

SEQ ID NO: 115734 - DNA, 1491 bp, Homo sapiens
  Payload ID: 2585
  Gene Symbol: CD80
  Gene Name: CD80 molecule
  Uniprot ID: P33681
  ENST ID: ENST00000478182
  CDS Start-End: 318-1184
ccaaagaaaaagtgatttgtcattgctttatagactgtaagaagagaacatctcagaagtggagtcttaccctgaaatcaaaggatttaaagaaaaagtggaatttttcttcagcaagctgtgaaactaaatccacaacctttggagacccaggaacaccctccaatctctgtgtgttttgtaaacatcactggagggtcttctacgtgagcaattggattgtcatcagccctgcctgttttgcacctgggaagtgccctggtcttacttgggtccaaattgttggctttcacttttgaccctaagcatctgaagccatgggccacacacggaggcagggaacatcaccatccaagtgtccatacctcaatttctttcagctcttggtgctggctggtctttctcacttctgttcaggtgttatccacgtgaccaaggaagtgaaagaagtggcaacgctgtcctgtggtcacaatgtttctgttgaagagctggcacaaactcgcatctactggcaaaaggagaagaaaatggtgctgactatgatgtctggggacatgaatatatggcccgagtacaagaaccggaccatctttgatatcactaataacctctccattgtgatcctggctctgcgcccatctgacgagggcacatacgagtgtgttgttctgaagtatgaaaaagacgctttcaagcgggaacacctggctgaagtgacgttatcagtcaaagctgacttccctacacctagtatatctgactttgaaattccaacttctaatattagaaggataatttgctcaacctctggaggttttccagagcctcacctctcctggttggaaaatggagaagaattaaatgccatcaacacaacagtttcccaagatcctgaaactgagctctatgctgttagcagcaaactggatttcaatatgacaaccaaccacagcttcatgtgtctcatcaagtatggacatttaagagtgaatcagaccttcaactggaatacaaccaagcaagagcattttcctgataacctgctcccatcctgggccattaccttaatctcagtaaatggaatttttgtgatatgctgcctgacctactgctttgccccaagatgcagagagagaaggaggaatgagagattgagaagggaaagtgtacgccctgtataacagtgtccgcagaagcaaggggctgaaaagatctgaaggtagcctccgtcatctcttctgggatacatggatcgtggggatcatgaggcattcttcccttaacaaatttaagctgttttacccactacctcaccttcttaaaaacctctttcagattaagctgaacagttacaagatggctggcatccctctcctttctccccatatgcaatttgcttaatgtaacctcttcttttgccatgtttccattctgccatcttgaattgtcttgtcagccaattcattatctattaaacactaatttgag

SEQ ID NO: 115735 - DNA, 1520 bp, Homo sapiens
  Payload ID: 2586
  Gene Symbol: CD81
  Gene Name: CD81 molecule
  Uniprot ID: P60033
  ENST ID: ENST00000263645
  CDS Start-End: 257-967
agcgaggcgcgcgcccggccagagagcgagcgcgcaacggcggcgacggcggcgaccccaccgcgcatcctgccaggcctccggcgcccagcgccccacgcgcccccgcgcccccgcgcccccgcgcccctttcttcgcgcccccgcccctcggcccgccaggcccccttgccggccacccgccaggccccgcgccggcccgcccgccgcccaggaccggcccgcgccccgcaggccgcccgccgcccgcgccgccatgggagtggagggctgcaccaagtgcatcaagtacctgctcttcgtcttcaatttcgtcttctggctggctggaggcgtgatcctgggtgtggccctgtggctccgccatgacccgcagaccaccaacctcctgtatctggagctgggagacaagcccgcgcccaacaccttctatgtaggcatctacatcctcatcgctgtgggcgctgtcatgatgttcgttggcttcctgggctgctacggggccatccaggaatcccagtgcctgctggggacgttcttcacctgcctggtcatcctgtttgcctgtgaggtggccgccggcatctggggctttgtcaacaaggaccagatcgccaaggatgtgaagcagttctatgaccaggccctacagcaggccgtggtggatgatgacgccaacaacgccaaggctgtggtgaagaccttccacgagacgcttgactgctgtggctccagcacactgactgctttgaccacctcagtgctcaagaacaatttgtgtccctcgggcagcaacatcatcagcaacctcttcaaggaggactgccaccagaagatcgatgacctcttctccgggaagctgtacctcatcggcattgctgccatcgtggtcgctgtgatcatgatcttcgagatgatcctgagcatggtgctgtgctgtggcatccggaacagctccgtgtactgaggccccgcagctctggccacagggacctctgcagtgccccctaagtgacccggacacttccgagggggccatcaccgcctgtgtatataacgtttccggtattactctgctacacgtagcctttttacttttggggttttgtttttgttctgaactttcctgttaccttttcagggctgacgtcacatgtaggtggcgtgtatgagtggagacgggcctgggtcttggggactggagggcaggggtccttctgccctggggtcccagggtgctctgcctgctcagccaggcctctcctgggagccactcgcccagagactcagcttggccaacttggggggctgtgtccacccagcccgcccgtcctgtgggctgcacagctcaccttgttccctcctgccccggttcgagagccgagtctgtgggcactctctgccttcatgcacctgtcctttctaacacgtcgccttcaactgtaatcacaacatcctgactccgtcatttaataaagaaggaacatcaggcatgctaccaggcctgtgcagtccctcag

SEQ ID NO: 115736 - DNA, 880 bp, Homo sapiens
  Payload ID: 2586
  Gene Symbol: CD81
  Gene Name: CD81 molecule
  ENST ID: ENST00000381036
  CDS Start-End: 6-830
gcagcatgtggtgtggttggtctttttcgtggcagccagtccactgggtgcgctcggcatgtggctgcagcttgacctgggtttcctggtccctggcaagctccagctcaaggtccctgctgaaggtcggagagcttggcatggccccgtttgtccatgctagggctgggaagaccaaggctcagctggctggaggcgtgatcctgggtgtggccctgtggctccgccatgacccgcagaccaccaacctcctgtatctggagctgggagacaagcccgcgcccaacaccttctatgtaggcatctacatcctcatcgctgtgggcgctgtcatgatgttcgttggcttcctgggctgctacggggccatccaggaatcccagtgcctgctggggacgttcttcacctgcctggtcatcctgtttgcctgtgaggtggccgccggcatctggggctttgtcaacaaggaccagatcgccaaggatgtgaagcagttctatgaccaggccctacagcaggccgtggtggatgatgacgccaacaacgccaaggctgtggtgaagaccttccacgagacgcttgactgctgtggctccagcacactgactgctttgaccacctcagtgctcaagaacaatttgtgtccctcgggcagcaacatcatcagcaacctcttcaaggaggactgccaccagaagatcgatgacctcttctccgggaagctgtacctcatcggcattgctgccatcgtggtcgctgtgatcatgatcttcgagatgatcctgagcatggtgctgtgctgtggcatccggaacagctccgtgtactgaggccccgcagctctggccacagggacctctgcagtgccccctaagtgacc

SEQ ID NO: 115737 - DNA, 1172 bp, Homo sapiens
  Payload ID: 2586
  Gene Symbol: CD81
  Gene Name: CD81 molecule
  ENST ID: ENST00000526072
  CDS Start-End: 237-734
aaagaagtattctgttttcatctgagaggcagatttaaccggcgtcccgtgtcttcctggcagtcctgccctggagtcacactccacagctggctggaggcgtgatcctgggtgtggccctgtggctccgccatgacccgcagaccaccaacctcctgtatctggagctgggagacaagcccgcgcccaacaccttctatgtaggcatctacatcctcatcgctgtgggcgctgtcatgatgttcgttggcttcctgggctgctacggggccatccaggaatcccagtgcctgctggggacgttcttcacctgcctggtcatcctgtttgcctgtgaggtggccgccggcatctggggctttgtcaacaaggaccagatcgccaaggatgtgaagcagttctatgaccaggccctacagcaggccgtggtggatgatgacgccaacaacgccaaggctgtggtgaagaccttccacgagacgcttgactgctgtggctccagcacactgactgctttgaccacctcagtgctcaagaacaatttgtgtccctcgggcagcaacatcatcagcaacctcttcaaggaggactgccaccagaagatcgatgacctcttctccgggaagctgtacctcatcggcattgctgccatcgtggtcgctgtgatcatgatcttcgagatgatcctgagcatggtgctgtgctgtggcatccggaacagctccgtgtactgaggccccgcagctctggccacagggacctctgcagtgccccctaagtgacccggacacttccgagggggccatcaccgcctgtgtatataacgtttccggtattactctgctacacgtagcctttttacttttggggttttgtttttgttctgaactttcctgttaccttttcagggctgacgtcacatgtaggtggcgtgtatgagtggagacgggcctgggtcttggggactggagggcaggggtccttctgccctggggtcccagggtgctctgcctgctcagccaggcctctcctgggagccactcgcccagagactcagcttggccaacttggggggctgtgtccacccagcccgcccgtcctgtgggctgcacagctcaccttgttccctcctgccccggttcgagagccgagtctgtgggcactctctgcct

SEQ ID NO: 115738 - DNA, 890 bp, Homo sapiens
  Payload ID: 2586
  Gene Symbol: CD81
  Gene Name: CD81 molecule
  ENST ID: ENST00000481687
  CDS Start-End: 49-777
atgaggtgcccagtccccatgtggcctccttagtctccgtcctgtgtcatggaagaggtaactgaggcacagaaaactcaccaggccaggctgggatgtgaggtcccttgctgctcatccctggcagtcagcaaccctacatcttcccagctgggcggcccgtggtgggttcggcacccaggaccctccggggtcttgggctgtggcgagtgtgtaggcacccacctggtgtctctctccccgcaaggcatctacatcctcatcgctgtgggcgctgtcatgatgttcgttggcttcctgggctgctacggggccatccaggaatcccagtgcctgctggggacgttcttcacctgcctggtcatcctgtttgcctgtgaggtggccgccggcatctggggctttgtcaacaaggaccagatcgccaaggatgtgaagcagttctatgaccaggccctacagcaggccgtggtggatgatgacgccaacaacgccaaggctgtggtgaagaccttccacgagacgcttgactgctgtggctccagcacactgactgctttgaccacctcagtgctcaagaacaatttgtgtccctcgggcagcaacatcatcagcaacctcttcaaggaggactgccaccagaagatcgatgacctcttctccgggaagctgtacctcatcggcattgctgccatcgtggtcgctgtgatcatgatcttcgagatgatcctgagcatggtgctgtgctgtggcatccggaacagctccgtgtactgaggccccgcagctctggccacagggacctctgcagtgccccctaagtgacccggacacttccgagggggccatcaccgcctgtgtatataacgtttccggtattactctgctac

SEQ ID NO: 115739 - DNA, 1136 bp, Homo sapiens
  Payload ID: 2586
  Gene Symbol: CD81
  Gene Name: CD81 molecule
  ENST ID: ENST00000492252
  CDS Start-End: 510-1136
tggcagccagtccactgggtgcgctcggcatgtggctgcagcttgacctgggtttcctggtccctggcaaggtggagcatctcttcatgtgcttttttgctgtgtgtggatcttgcggggaagggtctgttcctgttttttgcccatctttcaaagattgggttgccagttttcttgctgttgagtttggaaagctctgcatacgttcagggcacaggtcctttaccaggctctgccccaggtctttcggagagcaggtgtctttcgcattcctgactctggggaacctctagccctgccacatggggtttgttatggggcaggggcacctgtgcctttcccaccacggggcttggggatttggtgctgccattgccctccctcgtaggtggccctaggggggtccctccgcctccgtttcctcatccagaaaccggcagtgaccatcaccaccattgttgtcacctagctccagctcaaggtccctgctgaaggtcggagagcttggcatggccccgtttgtccatgctagggctgggaagaccaaggctcagctggctggaggcgtgatcctgggtgtggccctgtggctccgccatgacccgcagaccaccaacctcctgtatctggagctgggagacaagcccgcgcccaacaccttctatgtaggcatctacatcctcatcgctgtgggcgctgtcatgatgttcgttggcttcctgggctgctacggggccatccaggaatcccagtgcctgctggggacgttcttcacctgcctggtcatcctgtttgcctgtgaggtggccgccggcatctggggctttgtcaacaaggaccagatcgccaaggatgtgaagcagttctatgaccaggccctacagcaggccgtggtggatgatgacgccaacaacgccaaggctgtggtgaagaccttccacgagacgcttgactgctgtggctccagcacactgactgctttgaccacctcagtgctcaagaacaatttgtgtccctcgggcagcaacatcatcagcaacctcttcaaggaggactgccaccagaagatcgatgacctcttctccgggaagctgtacctcatcggcattgctgccatcgtggtcgctgtgatcatg

SEQ ID NO: 115740 - DNA, 396 bp, Homo sapiens
  Payload ID: 2586
  Gene Symbol: CD81
  Gene Name: CD81 molecule
  ENST ID: ENST00000493525
  CDS Start-End: 100-396
gtctgtgcacccgtgccgtggcgtgcccgtcgtctgtgcacccgtgctgtggtgtgcccttcgtctgttccttttattgccgggcagggttgcacccacatgtgcaagccagcgacggaccccaggttcacccgttcaccgctggctggaggcgtgatcctgggtgtggccctgtggctccgccatgacccgcagaccaccaacctcctgtatctggagctgggagacaagcccgcgcccaacaccttctatgtaggcatctacatcctcatcgctgtgggcgctgtcatgatgttcgttggcttcctgggctgctacggggccatccaggaatcccagtgcctgctggggacgttcttcacctgcctggtcatcctgtttgcctgtgaggtggcc

SEQ ID NO: 115741 - DNA, 558 bp, Homo sapiens
  Payload ID: 2586
  Gene Symbol: CD81
  Gene Name: CD81 molecule
  ENST ID: ENST00000530648
  CDS Start-End: 404-558
agtacccagtagtcatctgtgccagggggttatccaggtacagaacattcccatcgttgcagaaggttctatcagctagcactgggttggacgacacttgccaagacgagctggctagaggatggttctccggacctggtcccacgtggttcccaggttccagccccggagagcaatgtgagcaaagcttgctgtctttgcaaagccaaccactgtggcatcaactccttcaggaagccctcccggattgtccaagctggctggaggcgtgatcctgggtgtggccctgtggctccgccatgacccgcagaccaccaacctcctgtatctggagctgggagacaagcccgcgcccaacaccttctatgtaggcatctacatcctcatcgctgtgggcgctgtcatgatgttcgttggcttcctgggctgctacggggccatccaggaatcccagtgcctgctggggacgttcttcacctgcctggtcatcctgtttgcctgtgaggtggccgccggcatctggggctttgtcaacaaggaccagatcgccaaggatgt

SEQ ID NO: 115742 - DNA, 606 bp, Homo sapiens
  Payload ID: 2586
  Gene Symbol: CD81
  Gene Name: CD81 molecule
  ENST ID: ENST00000475945
  CDS Start-End: 329-606
tttggttccttgtggccacatttccagtacccagtagtcatctgtgccagggggttatccaggtacagaacattcccatcgttgcagaaggttctatcagctagcactgggttggacgacacttgccaagacgagctggctagaggatggttctccggacctggtcccacgtggttcccagctggctggaggcgtgatcctgggtgtggccctgtggctccgccatgacccgcagaccaccaacctcctgtatctggagctgggagacaagcccgcgcccaacaccttctatgtaggcatctacatcctcatcgctgtgggcgctgtcatgatgttcgttggcttcctgggctgctacggggccatccaggaatcccagtgcctgctggggacgttcttcacctgcctggtcatcctgtttgcctgtgaggtggccgccggcatctggggctttgtcaacaaggaccagatcgccaaggatgtgaagcagttctatgaccaggccctacagcaggccgtggtggatgatgacgccaacaacgccaaggctgtggtgaagaccttccacgagacgcttgactgctgtggctccagcacactgactgc

SEQ ID NO: 115743 - DNA, 720 bp, Homo sapiens
  Payload ID: 2586
  Gene Symbol: CD81
  Gene Name: CD81 molecule
  ENST ID: ENST00000527343
  CDS Start-End: 1-678
ggtgggagcaggtggcagagaggcttcccacagctggctggaggcgtgatcctgggtgtggccctgtggctccgccatgacccgcagaccaccaacctcctgtatctggagctgggagacaagcccgcgcccaacaccttctatgtaggcatctacatcctcatcgctgtgggcgctgtcatgatgttcgttggcttcctgggctgctacggggccatccaggaatcccagtgcctgctggggacgttcttcacctgcctggtcatcctgtttgcctgtgaggtggccgccggcatctggggctttgtcaacaaggaccagatcgccaaggatgtgaagcagttctatgaccaggccctacagcaggccgtggtggatgatgacgccaacaacgccaaggctgtggtgaagaccttccacgagacgcttgactgctgtggctccagcacactgactgctttgaccacctcagtgctcaagaacaatttgtgtccctcgggcagcaacatcatcagcaacctcttcaaggaggactgccaccagaagatcgatgacctcttctccgggaagctgtacctcatcggcattgctgccatcgtggtcgctgtgatcatgatcttcgagatgatcctgagcatggtgctgtgctgtggcatccggaacagctccgtgtactgaggccccgcagctctggccacagggacctctgcagtgccccct

SEQ ID NO: 115744 - DNA, 794 bp, Homo sapiens
  Payload ID: 2586
  Gene Symbol: CD81
  Gene Name: CD81 molecule
  ENST ID: ENST00000464784
  CDS Start-End: 1-665
ggcagagaggcttcccacagctggctggaggcgtgatcctgggtgtggccctgtggctccgccatgacccgcagaccaccaacctcctgtatctggagctgggagacaagcccgcgcccaacaccttctatgtaggcatctacatcctcatcgctgtgggcgctgtcatgatgttcgttggcttcctgggctgctacggggccatccaggaatcccagtgcctgctggggacgttcttcacctgcctggtcatcctgtttgcctgtgaggtggccgccggcatctggggctttgtcaacaaggaccagatcgccaaggatgtgaagcagttctatgaccaggccctacagcaggccgtggtggatgatgacgccaacaacgccaaggctgtggtgaagaccttccacgagacgcttgactgctgtggctccagcacactgactgctttgaccacctcagtgctcaagaacaatttgtgtccctcgggcagcaacatcatcagcaacctcttcaaggaggactgccaccagaagatcgatgacctcttctccgggaagctgtacctcatcggcattgctgccatcgtggtcgctgtgatcatggtgagcgggcgggggcggagggcctgctctctgggctgccccttccgcggggccttgtgctgactgcgccccccaccaccctcctgcagatcttcgagatgatcctgagcatggtgctgtgctgtggcatccggaacagctccgtgtactgaggccccgcagctctggccacagggacctctgcagtgcccc

SEQ ID NO: 115745 - DNA, 444 bp, Homo sapiens
  Payload ID: 2586
  Gene Symbol: CD81
  Gene Name: CD81 molecule
  ENST ID: ENST00000533417
  CDS Start-End: 1-444
cagacacaggatgtccctctgccagcccctgaagccccgtcccctgacgagctggctggaggcgtgatcctgggtgtggccctgtggctccgccatgacccgcagaccaccaacctcctgtatctggagctgggagacaagcccgcgcccaacaccttctatgtaggcatctacatcctcatcgctgtgggcgctgtcatgatgttcgttggcttcctgggctgctacggggccatccaggaatcccagtgcctgctggggacgttcttcacctgcctggtcatcctgtttgcctgtgaggtggccgccggcatctggggctttgtcaacaaggaccagatcgccaaggatgtgaagcagttctatgaccaggccctacagcaggccgtggtggatgatgacgccaacaacgccaaggctgtggtgaagaccttccacgagacg

SEQ ID NO: 115746 - DNA, 886 bp, Homo sapiens
  Payload ID: 2586
  Gene Symbol: CD81
  Gene Name: CD81 molecule
  ENST ID: ENST00000492627
  CDS Start-End: 239-736
tgtgctctcccaccacgtttggaaagttactgcttccctcttcctcagcccctcgggctcccagttatggaagtggcgtgattcagagaagctggctggaggcgtgatcctgggtgtggccctgtggctccgccatgacccgcagaccaccaacctcctgtatctggagctgggagacaagcccgcgcccaacaccttctatgtaggcatctacatcctcatcgctgtgggcgctgtcatgatgttcgttggcttcctgggctgctacggggccatccaggaatcccagtgcctgctggggacgttcttcacctgcctggtcatcctgtttgcctgtgaggtggccgccggcatctggggctttgtcaacaaggaccagatcgccaaggatgtgaagcagttctatgaccaggccctacagcaggccgtggtggatgatgacgccaacaacgccaaggctgtggtgaagaccttccacgagacgcttgactgctgtggctccagcacactgactgctttgaccacctcagtgctcaagaacaatttgtgtccctcgggcagcaacatcatcagcaacctcttcaaggaggactgccaccagaagatcgatgacctcttctccgggaagctgtacctcatcggcattgctgccatcgtggtcgctgtgatcatgatcttcgagatgatcctgagcatggtgctgtgctgtggcatccggaacagctccgtgtactgaggccccgcagctctggccacagggacctctgcagtgccccctaagtgacccggacacttccgagggggccatcaccgcctgtgtatataacgtttccggtattactctgctacacgtagcctttttacttttggggttttgtttttgttc

SEQ ID NO: 115747 - DNA, 2289 bp, Homo sapiens
  Payload ID: 2587
  Gene Symbol: CD82
  Gene Name: CD82 molecule
  Uniprot ID: P27701
  ENST ID: ENST00000227155
  CDS Start-End: 249-1052
ggcctgccgagtccgcggcgttccccggctgcagccgggagggggccgaggagtgactgagccccgggctgtgcagtccgacgccgactgaggcacgagcgggtgacgctgggcctgcagcgcggagcagaaagcagaacccgcagagtcctccctgctgctgtgtggacgacacgtgggcacaggcagaagtgggccctgtgaccagctgcactggtttcgtggaaggaagctccaggactggcgggatgggctcagcctgtatcaaagtcaccaaatactttctcttcctcttcaacttgatcttctttatcctgggcgcagtgatcctgggcttcggggtgtggatcctggccgacaagagcagtttcatctctgtcctgcaaacctcctccagctcgcttaggatgggggcctatgtcttcatcggcgtgggggcagtcactatgctcatgggcttcctgggctgcatcggcgccgtcaacgaggtccgctgcctgctggggctgtactttgctttcctgctcctgatcctcattgcccaggtgacggccggggccctcttctacttcaacatgggcaagctgaagcaggagatgggcggcatcgtgactgagctcattcgagactacaacagcagtcgcgaggacagcctgcaggatgcctgggactacgtgcaggctcaggtgaagtgctgcggctgggtcagcttctacaactggacagacaacgctgagctcatgaatcgccctgaggtcacctacccctgttcctgcgaagtcaagggggaagaggacaacagcctttctgtgaggaagggcttctgcgaggcccccggcaacaggacccagagtggcaaccaccctgaggactggcctgtgtaccaggagggctgcatggagaaggtgcaggcgtggctgcaggagaacctgggcatcatcctcggcgtgggcgtgggtgtggccatcatcgagctcctggggatggtcctgtccatctgcttgtgccggcacgtccattccgaagactacagcaaggtccccaagtactgaggcagctgctatccccatctccctgcctggcccccaacctcagggctcccaggggtctccctggctccctcctccaggcctgcctcccacttcactgcgaagaccctcttgcccatcctgactgaaagtagggggctttctggggcctagcgatctctcctggcctatccgctgccagccttgagccctggctgttctgtggttcctctgctcaccgcccatcagggttctcttagcaactcagagaaaaatgctccccacagcgtccctggcgcaggtgggctggacttctacctgccctcaagggtgtgtatattgtataggggcaactgtatgaaaaattggggaggagggggccgggcgcggtggctcacgcctgtaatcccagcactttgggaggccgaggcgggtggatcacgaggtcaggagatcgagaccatcctggctaacatggtgaaaccccgtctctactaaaaatacaaaaaaaatttagccgggcgcggtggcgggcacctgtagtcccagctacttgggaggctgaggcaggagaatggtgtgaacccgggagcggaggttgcagtgagctgagatcgtgctactgcactccagcctgggggacagaaagagactccgtctcaaaaaaaaaaaaaaaaaaaaaaaaaattggggagggaagggcgttagataaggcactctgggctgtcaggagactgcctactgggtgggtcaacttatttcccactatgacatttatatctttatttttcacaattatattgaaggcagtgggagaggggagagggtgggttttacctgatattaaggggtggcaccccttccccaggcctgatgcaggtccatctagacagctcagattagcctaggccatgccctagggacacggcctaggggagctgggctggagggggtctgcctgggtaaggggatctggcttggccctgagctgcttagggacaggtgagtccttgggggcatggcacagagctggtcctgtattctccagggtccggagctggccaggggcggggaggaggaggatggcttctcctgggagaaggtgggctggcctttcttggcaagcggtcctctggcccctggggagtggggtgggtgaggctgtgccttgtagggggagaggggagggggctttgtgtgcaccattctgtaaaacacactcaagattctaagactattaaagaggatttataacagtcta

SEQ ID NO: 115748 - DNA, 967 bp, Homo sapiens
  Payload ID: 2587
  Gene Symbol: CD82
  Gene Name: CD82 molecule
  Uniprot ID: P27701
  ENST ID: ENST00000342935
  CDS Start-End: 239-967
gtccgcggcgttccccggctgcagccgggagggggccgaggagtgactgagccccgggctgtgcagtccgacgccgactgaggcacgagcgggtgacgctgggcctgcagcgcggagcagaaagcagaacccgcagagtcctccctgctgctgtgtggacgacacgtgggcacaggcagaagtgggccctgtgaccagctgcactggtttcgtggaaggaagctccaggactggcgggatgggctcagcctgtatcaaagtcaccaaatactttctcttcctcttcaacttgatcttctttatcctgggcgcagtgatcctgggcttcggggtgtggatcctggccgacaagagcagtttcatctctgtcctgcaaacctcctccagctcgcttaggatgggggcctatgtcttcatcggcgtgggggcagtcactatgctcatgggcttcctgggctgcatcggcgccgtcaacgaggtccgctgcctgctggggctgctgaagcaggagatgggcggcatcgtgactgagctcattcgagactacaacagcagtcgcgaggacagcctgcaggatgcctgggactacgtgcaggctcaggtgaagtgctgcggctgggtcagcttctacaactggacagacaacgctgagctcatgaatcgccctgaggtcacctacccctgttcctgcgaagtcaagggggaagaggacaacagcctttctgtgaggaagggcttctgcgaggcccccggcaacaggacccagagtggcaaccaccctgaggactggcctgtgtaccaggagggctgcatggagaaggtgcaggcgtggctgcaggagaacctgggcatcatcctcggcgtgggcgtgggtgtggccatcatcgagctcctggggatggtcctgtccatctgcttgtgccggcacgtccattccgaagactacagcaaggtccccaagtactga

SEQ ID NO: 115749 - DNA, 580 bp, Homo sapiens
  Payload ID: 2587
  Gene Symbol: CD82
  Gene Name: CD82 molecule
  ENST ID: ENST00000532544
  CDS Start-End: 257-580
gagtgactgagccccgggctgtgcagtccgacgccgactgaggcacgagcgggtgacgctgggcctgcagcgcggagcagaaagcagaacccgcagttcaactgagccggaccccctaagacttcaagttggaaactcagtggggcttttccagagtcctccctgctgctgtgtggacgacacgtgggcacaggcagaagtgggccctgtgaccagctgcactggtttcgtggaaggaagctccaggactggcgggatgggctcagcctgtatcaaagtcaccaaatactttctcttcctcttcaacttgatcttctttatcctgggcgcagtgatcctgggcttcggggtgtggatcctggccgacaagagcagtttcatctctgtcctgcaaacctcctccagctcgcttaggatgggggcctatgtcttcatcggcgtgggggcagtcactatgctcatgggcttcctgggctgcatcggcgccgtcaacgaggtccgctgcctgctggggctgtactttgctttcctgctcctgatcctcattgcccaggtgacggccggggccctcttctacttc

SEQ ID NO: 115750 - DNA, 757 bp, Homo sapiens
  Payload ID: 2587
  Gene Symbol: CD82
  Gene Name: CD82 molecule
  ENST ID: ENST00000524750
  CDS Start-End: 1-174
gacaacagcctttctgtgaggaagggcttctgcgaggcccccggcaacaggacccagagtggcaaccaccctgaggactggcctgtgtaccaggagctcctggggatggtcctgtccatctgcttgtgccggcacgtccattccgaagactacagcaaggtccccaagtactgaggcagctgctatccccatctccctgcctggcccccaacctcagggctcccaggggtctccctggctccctcctccaggcctgcctcccacttcactgcgaagaccctcttgcccatcctgactgaaagtagggggctttctggggcctagcgatctctcctggcctatccgctgccagccttgagccctggctgttctgtggttcctctgctcaccgcccatcagggttctcttagcaactcagagaaaaatgctccccacagcgtccctggcgcaggtgggctggacttctacctgccctcaagggtgtgtatattgtataggggcaactgtatgaaaaattggggaggagggggccgggcgcggtggctcacgcctgtaatcccagcactttgggaggccgaggcgggtggatcacgaggtcaggagatcgagaccatcctggctaacatggtgaaaccccgtctctactaaaaatacaaaaaaaatttagccgggcgcggtggcgggcacctgtagtcccagctacttgggaggctgaggcaggagaatggtgtgaacccgggagcggaggttgcagtga

SEQ ID NO: 115751 - DNA, 654 bp, Homo sapiens
  Payload ID: 2587
  Gene Symbol: CD82
  Gene Name: CD82 molecule
  ENST ID: ENST00000527737
  CDS Start-End: 118-654
gaggcacgagcgggtgacgctgggcctgcagcgcggagcagaaagcagaacccgcagccccttacccaggagcagcagtggtcatcttctggcacggagcctctccaggatgggcacatggctagagactggatcaggcctcagagggcttcagactgttggtcaggaaagcaacaacttttccagatcatcatcatcatcatcataagtcctccctgctgctgtgtggacgacacgtgggcacaggcagaagtgggccctgtgaccagctgcactggtttcgtggaaggaagctccaggactggcgggatgggctcagcctgtatcaaagtcaccaaatactttctcttcctcttcaacttgatcttctttatcctgggcgcagtgatcctgggcttcggggtgtggatcctggccgacaagagcagtttcatctctgtcctgcaaacctcctccagctcgcttaggatgggggcctatgtcttcatcggcgtgggggcagtcactatgctcatgggcttcctgggctgcatcggcgccgtcaacgaggtccgctgcctgctggggctgtactttgctttcctgctcctgatcctcattgcccaggtgacggccggggccctcttctacttcaacatgggcaaggtaagcccc

SEQ ID NO: 115752 - DNA, 581 bp, Homo sapiens
  Payload ID: 2587
  Gene Symbol: CD82
  Gene Name: CD82 molecule
  ENST ID: ENST00000530601
  CDS Start-End: 109-581
agtgggcttccatcaaataactactcaaatgcatgaaaaattgcagttgttgggggtactaggaacagataggctcttcggaaagcagatgaggctcttggcctggtcatggagatcctgggcgcagtgatcctgggcttcggggtgtggatcctggccgacaagagcagtttcatctctgtcctgcaaacctcctccagctcgcttaggatgggggcctatgtcttcatcggcgtgggggcagtcactatgctcatgggcttcctgggctgcatcggcgccgtcaacgaggtccgctgcctgctggggctgtactttgctttcctgctcctgatcctcattgcccaggtgacggccggggccctcttctacttcaacatgggcaagctgaagcaggagatgggcggcatcgtgactgagctcattcgagactacaacagcagtcgcgaggacagcctgcaggatgcctgggactacgtgcaggctcaggtgaagtgctgcggctgggtcagcttctacaactggacagacaacgctgagctcatgaatcgccctgaggtcacctacccctgttcctgcga

SEQ ID NO: 115753 - DNA, 573 bp, Homo sapiens
  Payload ID: 2587
  Gene Symbol: CD82
  Gene Name: CD82 molecule
  ENST ID: ENST00000525813
  CDS Start-End: 260-573
aagcctcccagggcgtggcgtgaagcggggatttggtaggggagcgcagagcgaggcctgaggtgtttccctggcagaggtccctccactgggaaacaaacggagaggggagtatgtgttcccacgtgtacacataaaccgttttgaatgatacctgagtcctccctgctgctgtgtggacgacacgtgggcacaggcagaagtgggccctgtgaccagctgcactggtttcgtggaaggaagctccaggactggcgggatgggctcagcctgtatcaaagtcaccaaatactttctcttcctcttcaacttgatcttctttatcctgggcgcagtgatcctgggcttcggggtgtggatcctggccgacaagagcagtttcatctctgtcctgcaaacctcctccagctcgcttaggatgggggcctatgtcttcatcggcgtgggggcagtcactatgctcatgggcttcctgggctgcatcggcgccgtcaacgaggtccgctgcctgctggggctgtactttgctttcctgctcctgatcctcattgcccaggtgacggccggggccct

SEQ ID NO: 115754 - DNA, 468 bp, Homo sapiens
  Payload ID: 2587
  Gene Symbol: CD82
  Gene Name: CD82 molecule
  ENST ID: ENST00000525210
  CDS Start-End: 354-468
gcagtccgacgccgactgaggcacgagcgggtgacgctgggcctgcagcgcggagcagaaagcagaacccgcagagtcctccctgctgctgtgtggacgacacgtgggcacaggcagaagtgggccctgtgaccagctgcactggtttcgtggaagcatttagagtcctggagtgctggtccctggggaggctcggcagcaggtcctggcattcagagctggcccagggttgagcacctgacacacccccaacctgccctgcgggcaaggacagaagaggcctgagaaccgtctcttcggactcaggggcagtggaactcagactgccttcaggaagctccaggactggcgggatgggctcagcctgtatcaaagtcaccaaatactttctcttcctcttcaacttgatcttctttatcctgggcgcagtgatcctgggcttcggggtgtggatcctggccgacaaga

SEQ ID NO: 115755 - DNA, 538 bp, Homo sapiens
  Payload ID: 2587
  Gene Symbol: CD82
  Gene Name: CD82 molecule
  ENST ID: ENST00000526958
  CDS Start-End: 56-538
gtgagaggacattgtgataatggaagtgaaagagctttgtcagctgcacaggtgaatgcccctggtcattaaccagagtcctccctgctgctgtgtggacgacacgtgggcacaggcagaagtgggccctgtgaccagctgcactggtttcgtggaaggaagctccaggactggcgggatgggctcagcctgtatcaaagtcaccaaatactttctcttcctcttcaacttgatcttctttatcctgggcgcagtgatcctgggcttcggggtgtggatcctggccgacaagagcagtttcatctctgtcctgcaaacctcctccagctcgcttaggatgggggcctatgtcttcatcggcgtgggggcagtcactatgctcatgggcttcctgggctgcatcggcgccgtcaacgaggtccgctgcctgctggggctgtactttgctttcctgctcctgatcctcattgcccaggtgacggccggggccctcttctacttcaacatgggcaagctgaagcaggagatgggcggcatc

SEQ ID NO: 115756 - DNA, 584 bp, Homo sapiens
  Payload ID: 2587
  Gene Symbol: CD82
  Gene Name: CD82 molecule
  ENST ID: ENST00000524704
  CDS Start-End: 381-584
agcagaacccgcaggtgagcaagggggcagcgggccggggtagcctgccggacaaccataggcaaagttagttttagcccccgcttctgcggtccggctcggacaactttcctcggaactagtgacaggtcggggcagctggtgggtgaaaaggagctttagccaccagtcctgaacccccagttctcacactcggccgtgcacagctgcgtgatcctgggtccgtccctctacctggctctggacctcccgggttccagcaggaggaagtgaaccagagtcctccctgctgctgtgtggacgacacgtgggcacaggcagaagtgggccctgtgaccagctgcactggtttcgtggaaggaagctccaggactggcgggatgggctcagcctgtatcaaagtcaccaaatactttctcttcctcttcaacttgatcttctttatcctgggcgcagtgatcctgggcttcggggtgtggatcctggccgacaagagcagtttcatctctgtcctgcaaacctcctccagctcgcttaggatgggggcctatgtcttcatcggcgtgggggcagtcactatgctc

SEQ ID NO: 115757 - DNA, 2471 bp, Homo sapiens
  Payload ID: 2588
  Gene Symbol: CD83
  Gene Name: CD83 molecule
  Uniprot ID: Q01151
  ENST ID: ENST00000379153
  CDS Start-End: 172-789
gcgccccggcctaagcgggactaggagggcgcgccacccgcttccgctgcccgccggggaatcccccgggctggcgcgcagggaagttcccgaacgcgcgggcataaaagggcagccggcgcccgcgcgccacagctctgcagctcgtggcagcggcgcagcgctccagccatgtcgcgcggcctccagcttctgctcctgagctgcgcctacagcctggctcccgcgacgccggaggtgaaggtggcttgctccgaagatgtggacttgccctgcaccgccccctgggatccgcaggttccctacacggtctcctgggtcaagttattggagggtggtgaagagaggatggagacaccccaggaagaccacctcaggggacagcactatcatcagaaggggcaaaatggttctttcgacgcccccaatgaaaggccctattccctgaagatccgaaacactaccagctgcaactcggggacatacaggtgcactctgcaggacccggatgggcagagaaacctaagtggcaaggtgatcttgagagtgacaggatgccctgcacagcgtaaagaagagacttttaagaaatacagagcggagattgtcctgctgctggctctggttattttctacttaacactcatcattttcacttgtaagtttgcacggctacagagtatcttcccagatttttctaaagctggcatggaacgagcttttctcccagttacctccccaaataagcatttagggctagtgactcctcacaagacagaactggtatgagcaggatttctgcaggttcttcttcctgaagctgaggctcaggggtgtgcctgtctgttacactggaggagagaagaatgagcctacgctgaagatggcatcctgtgaagtccttcacctcactgaaaacatctggaaggggatcccaccccattttctgtgggcaggcctcgaaaaccatcacatgaccacatagcatgaggccactgctgcttctccatggccaccttttcagcgatgtatgcagctatctggtcaacctcctggacattttttcagtcatataaaagctatggtgagatgcagctggaaaagggtcttgggaaatatgaatgcccccagctggcccgtgacagactcctgaggacagctgtcctcttctgcatcttggggacatctctttgaattttctgtgttttgctgtaccagcccagatgttttacgtctgggagaaattgacagatcaagctgtgagacagtgggaaatatttagcaaataatttcctggtgtgaaggtcctgctattactaaggagtaatctgtgtacaaagaaataacaagtcgatgaactattccccagcagggtcttttcatctgggaaagacatccataaagaagcaataaagaagagtgccacatttatttttatatctatatgtacttgtcaaagaaggtttgtgtttttctgcttttgaaatctgtatctgtagtgagatagcattgtgaactgacaggcagcctggacatagagagggagaagaagtcagagagggtgacaagatagagagctatttaatggccggctggaaatgctgggctgacggtgcagtctgggtgctcgcccacttgtcccactatctgggtgcatgatcttgagcaagttccttctggtgtctgctttctccattgtaaaccacaaggctgttgcatgggctaatgaagatcatatacgtgaaaattatttgaaaacatataaagcactatacagattcgaaactccattgagtcattatccttgctatgatgatggtgttttggggatgagagggtgctatccatttctcatgttttccattgtttgaaacaaagaaggttaccaagaagcctttcctgtagccttctgtaggaattcttttggggaagtgaggaagccaggtccacggtctgttcttgaagcagtagcctaacacactccaagatatggacacacgggagccgctggcagaagggacttcacgaagtgttgcatggatgttttagccattgttggctttcccttatcaaacttgggcccttcccttcttggtttccaaaggcattttattgcttgagttatatgttcactgtccccctaatattagggagtaaaacggataccaagttgatttagtgtttttacctctgtcttggctttcatgttattaaacgtatgcatgtgaagaaagggtgtttttctgttttatattcaactcataagactttgggataggaaaaatgagtaatggttactaggcttaatacctgggtgattacataatctgtacaatgaacccccatgatgtaagtttacctatgtaacaaacctgcacttatacccatgaacttaaaatgaaagttaaaaataaaaaacatatacaaataaaaaaatcccgactttgggatgagtgctaggatgttgtaaa

SEQ ID NO: 115758 - DNA, 2307 bp, Homo sapiens
  Payload ID: 2588
  Gene Symbol: CD83
  Gene Name: CD83 molecule
  ENST ID: ENST00000612003
  CDS Start-End: 185-625
gattatcacagattctggagaagagtgaggacttgggttcaccacctacagcctggctcccgcgacgccggaggtgaaggtggcttgctccgaagatgtggacttgccctgcaccgccccctgggatccgcaggttccctacacggtctcctgggtcaagttattggagggtggtgaagagaggatggagacaccccaggaagaccacctcaggggacagcactatcatcagaaggggcaaaatggttctttcgacgcccccaatgaaaggccctattccctgaagatccgaaacactaccagctgcaactcggggacatacaggtgcactctgcaggacccggatgggcagagaaacctaagtggcaaggtgatcttgagagtgacaggatgccctgcacagcgtaaagaagagacttttaagaaatacagagcggagattgtcctgctgctggctctggttattttctacttaacactcatcattttcacttgtaagtttgcacggctacagagtatcttcccagatttttctaaagctggcatggaacgagcttttctcccagttacctccccaaataagcatttagggctagtgactcctcacaagacagaactggtatgagcaggatttctgcaggttcttcttcctgaagctgaggctcaggggtgtgcctgtctgttacactggaggagagaagaatgagcctacgctgaagatggcatcctgtgaagtccttcacctcactgaaaacatctggaaggggatcccaccccattttctgtgggcaggcctcgaaaaccatcacatgaccacatagcatgaggccactgctgcttctccatggccaccttttcagcgatgtatgcagctatctggtcaacctcctggacattttttcagtcatataaaagctatggtgagatgcagctggaaaagggtcttgggaaatatgaatgcccccagctggcccgtgacagactcctgaggacagctgtcctcttctgcatcttggggacatctctttgaattttctgtgttttgctgtaccagcccagatgttttacgtctgggagaaattgacagatcaagctgtgagacagtgggaaatatttagcaaataatttcctggtgtgaaggtcctgctattactaaggagtaatctgtgtacaaagaaataacaagtcgatgaactattccccagcagggtcttttcatctgggaaagacatccataaagaagcaataaagaagagtgccacatttatttttatatctatatgtacttgtcaaagaaggtttgtgtttttctgcttttgaaatctgtatctgtagtgagatagcattgtgaactgacaggcagcctggacatagagagggagaagaagtcagagagggtgacaagatagagagctatttaatggccggctggaaatgctgggctgacggtgcagtctgggtgctcgcccacttgtcccactatctgggtgcatgatcttgagcaagttccttctggtgtctgctttctccattgtaaaccacaaggctgttgcatgggctaatgaagatcatatacgtgaaaattatttgaaaacatataaagcactatacagattcgaaactccattgagtcattatccttgctatgatgatggtgttttggggatgagagggtgctatccatttctcatgttttccattgtttgaaacaaagaaggttaccaagaagcctttcctgtagccttctgtaggaattcttttggggaagtgaggaagccaggtccacggtctgttcttgaagcagtagcctaacacactccaagatatggacacacgggagccgctggcagaagggacttcacgaagtgttgcatggatgttttagccattgttggctttcccttatcaaacttgggcccttcccttcttggtttccaaaggcattttattgcttgagttatatgttcactgtccccctaatattagggagtaaaacggataccaagttgatttagtgtttttacctctgtcttggctttcatgttattaaacgtatgcatgtgaagaaagggtgtttttctgttttatattcaactcataagactttgggataggaaaaatgagtaatggttactaggcttaatacctgggtgattacataatctgtacaatgaacccccatgatgtaagtttacctatgtaacaaacctgcacttatacccatgaacttaaaatgaaagttaaaaataaaaaacatatacaaataaaaaaatcccgactttgggatgagtgctaggatgttgtaaa

SEQ ID NO: 115759 - DNA, 1116 bp, Homo sapiens
  Payload ID: 2589
  Gene Symbol: CD84
  Gene Name: CD84 molecule
  Uniprot ID: Q9UIB8
  ENST ID: ENST00000311224
  CDS Start-End: 68-1105
ctcaagtgaaactgactctgctagaacagtgccgtgcttttccacagaaggttagaccctgaaagagatggctcagcaccacctatggatcttgctcctttgcctgcaaacctggccggaagcagctggaaaagactcagaaatcttcacagtgaatgggattctgggagagtcagtcactttccctgtaaatatccaagaaccacggcaagttaaaatcattgcttggacttctaaaacatctgttgcttatgtaacaccaggagactcagaaacagcacccgtagttactgtgacccacagaaattattatgaacggatacatgccttaggtccgaactacaatctggtcattagcgatctgaggatggaagacgcaggagactacaaagcagacataaatacacaggctgatccctacaccaccaccaagcgctacaacctgcaaatctatcgtcggcttgggaaaccaaaaattacacagagtttaatggcatctgtgaacagcacctgtaatgtcacactgacatgctctgtagagaaagaagaaaagaatgtgacatacaattggagtcccctgggagaagagggtaatgtccttcaaatcttccagactcctgaggaccaagagctgacttacacgtgtacagcccagaaccctgtcagcaacaattctgactccatctctgcccggcagctctgtgcagacatcgcaatgggcttccgtactcaccacaccgggttgctgagcgtgctggctatgttctttctgcttgttctcattctgtcttcagtgtttttgttccgtttgttcaagagaagacaaggtaggattttcccagaaggttcctgcttgaacaccttcactaagaacccttatgctgcctcaaagaaaaccatatacacatatatcatggcttcaaggaacacccagccagcagagtccagaatctatgatgaaatcctgcagtccaaggtgcttccctccaaggaagagccagtgaacacagtttattccgaagtgcagtttgctgataagatggggaaagccagcacacaggacagtaaacctcctgggacttcaagctatgaaattgtgatctaggctgctgggct

SEQ ID NO: 115760 - DNA, 1098 bp, Homo sapiens
  Payload ID: 2589
  Gene Symbol: CD84
  Gene Name: CD84 molecule
  Uniprot ID: Q9UIB8
  ENST ID: ENST00000368048
  CDS Start-End: 68-1087
ctcaagtgaaactgactctgctagaacagtgccgtgcttttccacagaaggttagaccctgaaagagatggctcagcaccacctatggatcttgctcctttgcctgcaaacctggccggaagcagctggaaaagactcagaaatcttcacagtgaatgggattctgggagagtcagtcactttccctgtaaatatccaagaaccacggcaagttaaaatcattgcttggacttctaaaacatctgttgcttatgtaacaccaggagactcagaaacagcacccgtagttactgtgacccacagaaattattatgaacggatacatgccttaggtccgaactacaatctggtcattagcgatctgaggatggaagacgcaggagactacaaagcagacataaatacacaggctgatccctacaccaccaccaagcgctacaacctgcaaatctatcgtcggcttgggaaaccaaaaattacacagagtttaatggcatctgtgaacagcacctgtaatgtcacactgacatgctctgtagagaaagaagaaaagaatgtgacatacaattggagtcccctgggagaagagggtaatgtccttcaaatcttccagactcctgaggaccaagagctgacttacacgtgtacagcccagaaccctgtcagcaacaattctgactccatctctgcccggcagctctgtgcagacatcgcaatgggcttccgtactcaccacaccgggttgctgagcgtgctggctatgttctttctgcttgttctcattctgtcttcagtgtttttgttccgtttgttcaagagaagacaaggttcctgcttgaacaccttcactaagaacccttatgctgcctcaaagaaaaccatatacacatatatcatggcttcaaggaacacccagccagcagagtccagaatctatgatgaaatcctgcagtccaaggtgcttccctccaaggaagagccagtgaacacagtttattccgaagtgcagtttgctgataagatggggaaagccagcacacaggacagtaaacctcctgggacttcaagctatgaaattgtgatctaggctgctgggct

SEQ ID NO: 115761 - DNA, 965 bp, Homo sapiens
  Payload ID: 2589
  Gene Symbol: CD84
  Gene Name: CD84 molecule
  Uniprot ID: Q9UIB8
  ENST ID: ENST00000368051
  CDS Start-End: 68-886
ctcaagtgaaactgactctgctagaacagtgccgtgcttttccacagaaggttagaccctgaaagagatggctcagcaccacctatggatcttgctcctttgcctgcaaacctggccggaagcagctggaaaagactcagaaatcttcacagtgaatgggattctgggagagtcagtcactttccctgtaaatatccaagaaccacggcaagttaaaatcattgcttggacttctaaaacatctgttgcttatgtaacaccaggagactcagaaacagcacccgtagttactgtgacccacagaaattattatgaacggatacatgccttaggtccgaactacaatctggtcattagcgatctgaggatggaagacgcaggagactacaaagcagacataaatacacaggctgatccctacaccaccaccaagcgctacaacctgcaaatctatcgtcggcttgggaaaccaaaaattacacagagtttaatggcatctgtgaacagcacctgtaatgtcacactgacatgctctgtagagaaagaagaaaagaatgtgacatacaattggagtcccctgggagaagagggtaatgtccttcaaatcttccagactcctgaggaccaagagctgacttacacgtgtacagcccagaaccctgtcagcaacaattctgactccatctctgcccggcagctctgtgcagacatcgcaatgggcttccgtactcaccacaccgggttgctgagcgtgctggctatgttctttctgcttgttctcattctgtcttcagtgtttttgttccgtttgttcaagagaagacaaggtgcttccctccaaggaagagccagtgaacacagtttattccgaagtgcagtttgctgataagatggggaaagccagcacacaggacagtaaacctcctgggacttcaagctatgaaattgtgatctaggctgctggg

SEQ ID NO: 115762 - DNA, 8181 bp, Homo sapiens
  Payload ID: 2589
  Gene Symbol: CD84
  Gene Name: CD84 molecule
  Uniprot ID: Q9UIB8
  ENST ID: ENST00000368054
  CDS Start-End: 37-1023
ccgtgcttttccacagaaggttagaccctgaaagagatggctcagcaccacctatggatcttgctcctttgcctgcaaacctggccggaagcagctggaaaagactcagaaatcttcacagtgaatgggattctgggagagtcagtcactttccctgtaaatatccaagaaccacggcaagttaaaatcattgcttggacttctaaaacatctgttgcttatgtaacaccaggagactcagaaacagcacccgtagttactgtgacccacagaaattattatgaacggatacatgccttaggtccgaactacaatctggtcattagcgatctgaggatggaagacgcaggagactacaaagcagacataaatacacaggctgatccctacaccaccaccaagcgctacaacctgcaaatctatcgtcggcttgggaaaccaaaaattacacagagtttaatggcatctgtgaacagcacctgtaatgtcacactgacatgctctgtagagaaagaagaaaagaatgtgacatacaattggagtcccctgggagaagagggtaatgtccttcaaatcttccagactcctgaggaccaagagctgacttacacgtgtacagcccagaaccctgtcagcaacaattctgactccatctctgcccggcagctctgtgcagacatcgcaatgggcttccgtactcaccacaccgggttgctgagcgtgctggctatgttctttctgcttgttctcattctgtcttcagtgtttttgttccgtttgttcaagagaagacaagatgctgcctcaaagaaaaccatatacacatatatcatggcttcaaggaacacccagccagcagagtccagaatctatgatgaaatcctgcagtccaaggtgcttccctccaaggaagagccagtgaacacagtttattccgaagtgcagtttgctgataagatggggaaagccagcacacaggacagtaaacctcctgggacttcaagctatgaaattgtgatctaggctgctgggctgaattctccctctggaaactgagttacaaccaccaatactggcaggttccctggatccagatcttctctgcccaactcttactgggagattgcaaactgccacatctcagcctgtaagcaaagcaggaaaccttctgctgggcatagcttgtgcctaaatggacaaatggatgcatacccttcctgaaatgactcccttctgaatgaatgacaaagcaggttacctagtatagttttcccaaacttcttcccatcatagcacatgtagaaaataatatttttatggcacactgggataaacaagcaagattgctcacttctggaagctgcatatgactagaggcctcttgtgactggaggtaacaaccctgcccagtaactgtgggagaaggggatcaatattttgcacacctgtaataggccatggcacaccagccaagatgctctgctcacagtcagtatgtgtgaagatccctggtgcgtggccttcaccacgcatcttgagcaaattaggaaaatgtacccttcgcttgaggcagatgcagcccttcccccgagtgcatggcttggagagcagaatgtgggctgcatataagcacactcatccctttgtctgggaatctttgtgcagggcataacaggcttagtaagtccaaacacagatgacagtgctgtgtgggtctctgtcagagttgtggctctcagccatgtagacacactctccaaatggagtgttggaaaatgttctttctgcagggtctagagactgctgggacacttttcttggagtgctacttcagaagccttataggattttctttctggccaagatttccttctgtatcactccaagcagcctcagcagaagaagcagccatgcccagtattcccactctccaaaaggaactgaccagcttatatttctcacacttctggggaactgggtataatccaaccatcaaaatagaagaccttgcaagaagcagagtcattctccagaaggaacttgggagatgatggtgcagatgatgaaactgggttcatcccagttccaaagactcagagaactagagtttaagctgaggcagagtgccgccaccctggcatgccccacaaacagatcaccagccagcttacacaggcattaactctcctcaatgaggaagaatcattcacaactgagcaagacattcatatgatcatttaaggaagtgtttcccttatgtgttagcaagtataatcggctaactcctaaatcccaatgaatagtcctaggctggacagcaatgggctgcaattaggcagataaagacatcagtcccagtaaatgaatccatagactcatctagcaccaactaccattagcactatgttaggagctgcaaggccccaaagtagaagatgtgcataatgtctgctcttgtgtagctcaggagacaattccagcacagacactacagttaacgctgaactgcagctgcaagtaatagcatgaacagtcagaaaaataccttatgagggggcagggctgaagctgggccttgaaggatggatgaaatttggatagagaatgaggaagacagagggcctccaagtgagagaagcatgaaaaatgagcaggggcctggatcagtggggtgtattcagagcacctctccagatgcaccatgcatgctcacagtcccttgcctatgtgtggcagagtgtcccagccagatgtgtgccctcaccccatgtccatttacatgtccttcaatgcccacctcaaaaggtacctcttctgtaaagctttccctggtatcaggaatcaaaattaatcagggatcttttcacactgctgttttttcctctttggtccttctatcactaaaactcatctcattcagccttacagcataactaattatttgttttcctcactacattgtacatgtgggaattacagataaacggaagccggctggggtggtggctcacgcctgtaatcccaacactttgggaggccaaggcaggcggatcacctgaggtcaggagttcgagattagtctggccaacatggtgaaaccccatctctactaaaaatacgaaattagccaggtgtggtggcacacatctgtagtcccagctactctggaggctgagacaggagaatcgcttgaacccaggaagtggaggttgcagtgagctgagatcacaccactgcactccagcctgggagagacagagtgagactccatctcgaaaaaaaaaaaaagatagaagccaataagcatggtgcaatcaaattctggcaagcattaaatatcaggatgcagctgggcacggtggctcacgcctgtaatcccagcactttgggaggccaaggtgggcggatcacttgaggtcaggaatttgagaggatcctggccagcatggcaaaaccccatctgtacttaaaatacaaaaaaattagctgggcgtggtggtgcacacctgtaatcccagctacttgggaggctgaggtgggagaattgcttgaacctgggaggtggaggttgcagtgagctgagatcctgccactgcactccaggctgggcaacagagtgagaccatgtctcaaaaaataaaaataaaataaaataatatcaggatgcatacatcagaggctgttcctagtgtaaaggcactttggagggagaagactttcagagttaggcagaccaactaagaggtcagctgaagcacctaaccagttgtaaggaggtgaaagacagcaccccaagaagagacgtgcaggaaggaggaaagaggcttggtcataaaggatggaggaattccaaagtgacactgaacaggctgcgtttatcctaaaataaaaccactcctcactctgtggatgcgttgaagactcattcccaaacatctttattctctaacttgccctcttcctcttcctaatatgctcactcaagtaaaattactagtgtcctaatgcccctatgcatattgtcaaaaataaaaatcagaagcaggttagatctgttaggtcttccagaagagcaaacctgggatgaagccagagcccaggaattctgaaggtagcctttggactcaggacaccctactcttgtctctcctctcagtttctctgctatgaatctcctgattcatgaacacgttatctgttcacccttctctctaggtcttagttcttagattttccttctgtaaaatgcatgtgatcttattttcccctccacaactttccagatgaactagactgtgaccaagaggtctataaaatcaaagcatcatggaacaggatcttgtatcagaccaaagtgtgccagtttttaaaaatgtgcatcaaaatggaagtctcagagacagagccctctggtggaaagttctagtaggttaggacagtcctgcctgcagacaccttgggctttactgagggactcaactgagaaaatgaggaatgttgcagctcatgattcttagaagaagaaagtgaagcttgtttaaaatatgatttaaaaaatctgtagaacactgtaaactacacaggctatgagggaatagcctggttgggccagcttggaaatcgggcacaggcaggaaggggcctgtctggtttgggccgtgtccacagagagcacttcttaggtcctgcctggagagaaggaatggctgggctatattttcttccagactcattatttttcttctgtttgacttttctctgaatttcccttgatttgtataaattttctcaataattagtgacagtgtctactgattgtaaaatgaagcttgaaggccaggcgcagtggctcatgcctgtaatcctagaattttgggaggccaaggtgggtggatcacaaggagttcgagaccagcctggccaaggttgtgaaaccgcgtctctactaaaaatacaaaaaaattagccgggcatggtggcacgtgcctgtagtcccagctactcaggaagctgaggcaacagaatcacttgaacctgggaggtggaggttgcagtgagccgagatcacgccactgcactccagcctgggcgagagagtgagactccgtctcaaaaaaaaaaaaaaaaaaaaaagtttgaagaacaaagacaataagaggaaatataatgagtggtcataaatgtgggctctgacagtagagtgcctgggtctgcatcctggtttcttagtcatgtgaccttaggcaagttactttaacctcgctgtacctcaggttgtccatctgtaaaatggggataataatagtgcctaccttttaaggttgatgtggggattaaatgaggtgttgctcatacaggaatgtgcctgtgcatggcaaagttcgggaaattttttataagctgttctaggcctgaaatcttcagaagatgctaatctaaattcatgaaataagcttcttacaacagaaatgctgctagtattatgcaaaattaatgttgtatatcaaacttttaactctcatccctccttattcagatatattttgttataagcaatgtttgttcccctcgttattataccacagtctacttacctgatgctatatctgcctccccagttagactgagagaacaggggatatacctaaataataataataataataataataataaataataatggagagctccttgaagatagggagcctgtaagaatcattgagggcttattttgtataccaactgctaaactagatgcttcatacattgttgtcaatactcatgacagccttgtaaagtagaaattaattcttccagttaacactaaggctgacatatgaataccttggcaaatctggaaagctgggaagacagtatttgaattcaagacttcttgtcaccaagggccatgcacttgtactctgccatgtggcccttttttacctcctgtggattctccctacctggtacttggccttaggtgtacacacacctggcactttgcttgacacataataggtggaccacaaatatctactaaatgaatatttgcatatagtaatattttaaggtactaaaagcagctcaaagtaaatatattaatatattaattccattgctatctggataaccactcaactttcctgctgaaaatgcccatttaattaaagaaggttggatagagctctctatatgcattttggacaggcaggggtttcaggtcataaacattctgatgagttaatataaaataagagaaactgtaaatttccactactaaaaatcacaaaaataacagaaacaaaagaagagataagaatttggggaattgtgctgaacaatttagtggttaaaaaaaacaactgtgcatgtttagacttaaataagcccccatccaagtgtgaggggtccagtaatttttcaaaacatatgaaagtgttaatacatttcgacaaaggaccattaaaaaagtcctgaattctgacttgagggaggaaagtaatgactaatacattctctagagacttgcagactttgggaattcataaaggaatggatgataattattaactgttgctggctgattgcccagacagttctcaacagccctgtacaagtctctgggtttgggatggatcaattctgagactggaaaatggccaaatctttgcaaatgagaaatatttttcttataagttcttattgtaggcaaataattacatagattattcatcagagaatttttaaatgctcataatctcaactctttcatttacaacttgtatttccaatagtttatgggtcatctctgcatagatgtcagaagtcacctcaagtttagcgtgtccaaaatctaactcacaggtctgtttctgacctcccaacttgctttccttgtgtttttcctatgctaatgatccaccataatcaaaataattaacatttatccagtgcctactatgtactattccctgtcctgttttacatttactcatttaaagtccataagaaacattaaatctcatctgccttctgaagaagatacaaccatgctctcttttacaaagtaggaaactgggtcacagaaaggtgaagtctttaaggctgaatcacagtagctcatcctagtaaatagaaaagccaggattcaactccaggggctgggtgcagaactgctattcttcactgcttcaccaatcagcagctacccaaggcagaaaactttttcatccttggctccttcattctccctgtcaccccagatcccctctacatctagtcagagaataggtcctgtcaattccaacttctctatatggctcctctcaggcatgtgcccttaattggcctaattctctaatacaccttccctctacatgctcactccctcagatcattgctttatcacgtgttacctgggttgctattacataaagagcaatctttctaaaatgaggatcttatcacttcacttccacactaaaatgtttttcctggggaaccacactccttagcaatctgacccatcagaccttccaggctgtctcctgcctgctccctaaggctccagccacacagaattatcatgggcccacacacccaccaaatcctcccatgcctttgcccatgttgtctgggatgcccttctctcccttctgtctacatcaagcatcagactgaatatccctcttgtgcggccttctaaaacctcccgtccaaagcgaaatatattgccctctatttatacttttacagcatttggcacacaagtacagagtagtagctttttatcacattctctgataattatatagatatggtatttcttagctctctctccaactggctaataagttgctttttgtctgagtgcctaattttgtgttttgtgtctgagtgcctcagttcctcaaaaaaaggttttttgattagttcattattcatttgaacatggaaattatgctcactagtggcaaatgccactaaccgtattccagaagctaggtgtcatgtttgcaataagatatattatcccttctacaagtcaccttttatttcaggcatttgtaaatgcccattaataaagtatggttcataaattttaccttgtaagtgcctaagaaatgagactacaagctccatttcagcaggacacaataaatattattttataatgca

SEQ ID NO: 115763 - DNA, 7885 bp, Homo sapiens
  Payload ID: 2589
  Gene Symbol: CD84
  Gene Name: CD84 molecule
  Uniprot ID: Q9UIB8
  ENST ID: ENST00000534968
  CDS Start-End: 80-724
ggaggaagaaaactcaagtgaaactgactctgctagaacagtgccgtgcttttccacagaaggttagaccctgaaagagatggctcagcaccacctatggatcttgctcctttgcctgcaaacctgtcggcttgggaaaccaaaaattacacagagtttaatggcatctgtgaacagcacctgtaatgtcacactgacatgctctgtagagaaagaagaaaagaatgtgacatacaattggagtcccctgggagaagagggtaatgtccttcaaatcttccagactcctgaggaccaagagctgacttacacgtgtacagcccagaaccctgtcagcaacaattctgactccatctctgcccggcagctctgtgcagacatcgcaatgggcttccgtactcaccacaccgggttgctgagcgtgctggctatgttctttctgcttgttctcattctgtcttcagtgtttttgttccgtttgttcaagagaagacaagatgctgcctcaaagaaaaccatatacacatatatcatggcttcaaggaacacccagccagcagagtccagaatctatgatgaaatcctgcagtccaaggtgcttccctccaaggaagagccagtgaacacagtttattccgaagtgcagtttgctgataagatggggaaagccagcacacaggacagtaaacctcctgggacttcaagctatgaaattgtgatctaggctgctgggctgaattctccctctggaaactgagttacaaccaccaatactggcaggttccctggatccagatcttctctgcccaactcttactgggagattgcaaactgccacatctcagcctgtaagcaaagcaggaaaccttctgctgggcatagcttgtgcctaaatggacaaatggatgcatacccttcctgaaatgactcccttctgaatgaatgacaaagcaggttacctagtatagttttcccaaacttcttcccatcatagcacatgtagaaaataatatttttatggcacactgggataaacaagcaagattgctcacttctggaagctgcatatgactagaggcctcttgtgactggaggtaacaaccctgcccagtaactgtgggagaaggggatcaatattttgcacacctgtaataggccatggcacaccagccaagatgctctgctcacagtcagtatgtgtgaagatccctggtgcgtggccttcaccacgcatcttgagcaaattaggaaaatgtacccttcgcttgaggcagatgcagcccttcccccgagtgcatggcttggagagcagaatgtgggctgcatataagcacactcatccctttgtctgggaatctttgtgcagggcataacaggcttagtaagtccaaacacagatgacagtgctgtgtgggtctctgtcagagttgtggctctcagccatgtagacacactctccaaatggagtgttggaaaatgttctttctgcagggtctagagactgctgggacacttttcttggagtgctacttcagaagccttataggattttctttctggccaagatttccttctgtatcactccaagcagcctcagcagaagaagcagccatgcccagtattcccactctccaaaaggaactgaccagcttatatttctcacacttctggggaactgggtataatccaaccatcaaaatagaagaccttgcaagaagcagagtcattctccagaaggaacttgggagatgatggtgcagatgatgaaactgggttcatcccagttccaaagactcagagaactagagtttaagctgaggcagagtgccgccaccctggcatgccccacaaacagatcaccagccagcttacacaggcattaactctcctcaatgaggaagaatcattcacaactgagcaagacattcatatgatcatttaaggaagtgtttcccttatgtgttagcaagtataatcggctaactcctaaatcccaatgaatagtcctaggctggacagcaatgggctgcaattaggcagataaagacatcagtcccagtaaatgaatccatagactcatctagcaccaactaccattagcactatgttaggagctgcaaggccccaaagtagaagatgtgcataatgtctgctcttgtgtagctcaggagacaattccagcacagacactacagttaacgctgaactgcagctgcaagtaatagcatgaacagtcagaaaaataccttatgagggggcagggctgaagctgggccttgaaggatggatgaaatttggatagagaatgaggaagacagagggcctccaagtgagagaagcatgaaaaatgagcaggggcctggatcagtggggtgtattcagagcacctctccagatgcaccatgcatgctcacagtcccttgcctatgtgtggcagagtgtcccagccagatgtgtgccctcaccccatgtccatttacatgtccttcaatgcccacctcaaaaggtacctcttctgtaaagctttccctggtatcaggaatcaaaattaatcagggatcttttcacactgctgttttttcctctttggtccttctatcactaaaactcatctcattcagccttacagcataactaattatttgttttcctcactacattgtacatgtgggaattacagataaacggaagccggctggggtggtggctcacgcctgtaatcccaacactttgggaggccaaggcaggcggatcacctgaggtcaggagttcgagattagtctggccaacatggtgaaaccccatctctactaaaaatacgaaattagccaggtgtggtggcacacatctgtagtcccagctactctggaggctgagacaggagaatcgcttgaacccaggaagtggaggttgcagtgagctgagatcacaccactgcactccagcctgggagagacagagtgagactccatctcgaaaaaaaaaaaaagatagaagccaataagcatggtgcaatcaaattctggcaagcattaaatatcaggatgcagctgggcacggtggctcacgcctgtaatcccagcactttgggaggccaaggtgggcggatcacttgaggtcaggaatttgagaggatcctggccagcatggcaaaaccccatctgtacttaaaatacaaaaaaattagctgggcgtggtggtgcacacctgtaatcccagctacttgggaggctgaggtgggagaattgcttgaacctgggaggtggaggttgcagtgagctgagatcctgccactgcactccaggctgggcaacagagtgagaccatgtctcaaaaaataaaaataaaataaaataatatcaggatgcatacatcagaggctgttcctagtgtaaaggcactttggagggagaagactttcagagttaggcagaccaactaagaggtcagctgaagcacctaaccagttgtaaggaggtgaaagacagcaccccaagaagagacgtgcaggaaggaggaaagaggcttggtcataaaggatggaggaattccaaagtgacactgaacaggctgcgtttatcctaaaataaaaccactcctcactctgtggatgcgttgaagactcattcccaaacatctttattctctaacttgccctcttcctcttcctaatatgctcactcaagtaaaattactagtgtcctaatgcccctatgcatattgtcaaaaataaaaatcagaagcaggttagatctgttaggtcttccagaagagcaaacctgggatgaagccagagcccaggaattctgaaggtagcctttggactcaggacaccctactcttgtctctcctctcagtttctctgctatgaatctcctgattcatgaacacgttatctgttcacccttctctctaggtcttagttcttagattttccttctgtaaaatgcatgtgatcttattttcccctccacaactttccagatgaactagactgtgaccaagaggtctataaaatcaaagcatcatggaacaggatcttgtatcagaccaaagtgtgccagtttttaaaaatgtgcatcaaaatggaagtctcagagacagagccctctggtggaaagttctagtaggttaggacagtcctgcctgcagacaccttgggctttactgagggactcaactgagaaaatgaggaatgttgcagctcatgattcttagaagaagaaagtgaagcttgtttaaaatatgatttaaaaaatctgtagaacactgtaaactacacaggctatgagggaatagcctggttgggccagcttggaaatcgggcacaggcaggaaggggcctgtctggtttgggccgtgtccacagagagcacttcttaggtcctgcctggagagaaggaatggctgggctatattttcttccagactcattatttttcttctgtttgacttttctctgaatttcccttgatttgtataaattttctcaataattagtgacagtgtctactgattgtaaaatgaagcttgaaggccaggcgcagtggctcatgcctgtaatcctagaattttgggaggccaaggtgggtggatcacaaggagttcgagaccagcctggccaaggttgtgaaaccgcgtctctactaaaaatacaaaaaaattagccgggcatggtggcacgtgcctgtagtcccagctactcaggaagctgaggcaacagaatcacttgaacctgggaggtggaggttgcagtgagccgagatcacgccactgcactccagcctgggcgagagagtgagactccgtctcaaaaaaaaaaaaaaaaaaaaaagtttgaagaacaaagacaataagaggaaatataatgagtggtcataaatgtgggctctgacagtagagtgcctgggtctgcatcctggtttcttagtcatgtgaccttaggcaagttactttaacctcgctgtacctcaggttgtccatctgtaaaatggggataataatagtgcctaccttttaaggttgatgtggggattaaatgaggtgttgctcatacaggaatgtgcctgtgcatggcaaagttcgggaaattttttataagctgttctaggcctgaaatcttcagaagatgctaatctaaattcatgaaataagcttcttacaacagaaatgctgctagtattatgcaaaattaatgttgtatatcaaacttttaactctcatccctccttattcagatatattttgttataagcaatgtttgttcccctcgttattataccacagtctacttacctgatgctatatctgcctccccagttagactgagagaacaggggatatacctaaataataataataataataataataataaataataatggagagctccttgaagatagggagcctgtaagaatcattgagggcttattttgtataccaactgctaaactagatgcttcatacattgttgtcaatactcatgacagccttgtaaagtagaaattaattcttccagttaacactaaggctgacatatgaataccttggcaaatctggaaagctgggaagacagtatttgaattcaagacttcttgtcaccaagggccatgcacttgtactctgccatgtggcccttttttacctcctgtggattctccctacctggtacttggccttaggtgtacacacacctggcactttgcttgacacataataggtggaccacaaatatctactaaatgaatatttgcatatagtaatattttaaggtactaaaagcagctcaaagtaaatatattaatatattaattccattgctatctggataaccactcaactttcctgctgaaaatgcccatttaattaaagaaggttggatagagctctctatatgcattttggacaggcaggggtttcaggtcataaacattctgatgagttaatataaaataagagaaactgtaaatttccactactaaaaatcacaaaaataacagaaacaaaagaagagataagaatttggggaattgtgctgaacaatttagtggttaaaaaaaacaactgtgcatgtttagacttaaataagcccccatccaagtgtgaggggtccagtaatttttcaaaacatatgaaagtgttaatacatttcgacaaaggaccattaaaaaagtcctgaattctgacttgagggaggaaagtaatgactaatacattctctagagacttgcagactttgggaattcataaaggaatggatgataattattaactgttgctggctgattgcccagacagttctcaacagccctgtacaagtctctgggtttgggatggatcaattctgagactggaaaatggccaaatctttgcaaatgagaaatatttttcttataagttcttattgtaggcaaataattacatagattattcatcagagaatttttaaatgctcataatctcaactctttcatttacaacttgtatttccaatagtttatgggtcatctctgcatagatgtcagaagtcacctcaagtttagcgtgtccaaaatctaactcacaggtctgtttctgacctcccaacttgctttccttgtgtttttcctatgctaatgatccaccataatcaaaataattaacatttatccagtgcctactatgtactattccctgtcctgttttacatttactcatttaaagtccataagaaacattaaatctcatctgccttctgaagaagatacaaccatgctctcttttacaaagtaggaaactgggtcacagaaaggtgaagtctttaaggctgaatcacagtagctcatcctagtaaatagaaaagccaggattcaactccaggggctgggtgcagaactgctattcttcactgcttcaccaatcagcagctacccaaggcagaaaactttttcatccttggctccttcattctccctgtcaccccagatcccctctacatctagtcagagaataggtcctgtcaattccaacttctctatatggctcctctcaggcatgtgcccttaattggcctaattctctaatacaccttccctctacatgctcactccctcagatcattgctttatcacgtgttacctgggttgctattacataaagagcaatctttctaaaatgaggatcttatcacttcacttccacactaaaatgtttttcctggggaaccacactccttagcaatctgacccatcagaccttccaggctgtctcctgcctgctccctaaggctccagccacacagaattatcatgggcccacacacccaccaaatcctcccatgcctttgcccatgttgtctgggatgcccttctctcccttctgtctacatcaagcatcagactgaatatccctcttgtgcggccttctaaaacctcccgtccaaagcgaaatatattgccctctatttatacttttacagcatttggcacacaagtacagagtagtagctttttatcacattctctgataattatatagatatggtatttcttagctctctctccaactggctaataagttgctttttgtctgagtgcctaattttgtgttttgtgtctgagtgcctcagttcctcaaaaaaaggttttttgattagttcattattcatttgaacatggaaattatgctcactagtggcaaatgccactaaccgtattccagaagctaggtgtcatgtttgcaataagatatattatcccttctacaagtcaccttttatttcaggcatttgtaaatgcccattaataaagtatggttcataaattttaccttgtaagtgcctaagaaatgagactacaagctccatttcagcaggacacaataaatattattttataatgcatct

SEQ ID NO: 115764 - DNA, 2634 bp, Homo sapiens
  Payload ID: 2590
  Gene Symbol: CD86
  Gene Name: CD86 molecule
  Uniprot ID: P42081
  ENST ID: ENST00000264468
  CDS Start-End: 202-1029
ccctttctgtatttgagttctaccgtcagtcctggcattatttctctctctacaaggagccttaggaggtacggggagctcgcaaatactccttttggtttattcttaccaccttgcttctgtgttccttgggaatgctgctgtgcttatgcatctggtctctttttggagctacagtggacaggcatttgtgacagcactatgggactgagtaacattctctttgtgatggccttcctgctctctggtgctgctcctctgaagattcaagcttatttcaatgagactgcagacctgccatgccaatttgcaaactctcaaaaccaaagcctgagtgagctagtagtattttggcaggaccaggaaaacttggttctgaatgaggtatacttaggcaaagagaaatttgacagtgttcattccaagtatatgggccgcacaagttttgattcggacagttggaccctgagacttcacaatcttcagatcaaggacaagggcttgtatcaatgtatcatccatcacaaaaagcccacaggaatgattcgcatccaccagatgaattctgaactgtcagtgcttgctaacttcagtcaacctgaaatagtaccaatttctaatataacagaaaatgtgtacataaatttgacctgctcatctatacacggttacccagaacctaagaagatgagtgttttgctaagaaccaagaattcaactatcgagtatgatggtgttatgcagaaatctcaagataatgtcacagaactgtacgacgtttccatcagcttgtctgtttcattccctgatgttacgagcaatatgaccatcttctgtattctggaaactgacaagacgcggcttttatcttcacctttctctataggaaccaacacaatggagagggaagagagtgaacagaccaagaaaagagaaaaaatccatatacctgaaagatctgatgaagcccagcgtgtttttaaaagttcgaagacatcttcatgcgacaaaagtgatacatgtttttaattaaagagtaaagcccatacaagtattcattttttctaccctttcctttgtaagttcctgggcaacctttttgatttcttccagaaggcaaaaagacattaccatgagtaataagggggctccaggactccctctaagtggaatagcctccctgtaactccagctctgctccgtatgccaagaggagactttaattctcttactgcttcttttcacttcagagcacacttatgggccaagcccagcttaatggctcatgacctggaaataaaatttaggaccaatacctcctccagatcagattcttctcttaatttcatagattgtgttttttttttaaatagacctctcaatttctggaaaactgccttttatctgcccagaattctaagctggtgccccactgaattttgtgtgtacctgtgactaaacaactacctcctcagtctgggtgggacttatgtatttatgaccttatagtgttaatatcttgaaacatagagatctatgtactgtaatagtgtgattactatgctctagagaaaagtctacccctgctaaggagttctcatccctctgtcagggtcagtaaggaaaacggtggcctagggtacaggcaacaatgagcagaccaacctaaatttggggaaattaggagaggcagagatagaacctggagccacttctatctgggctgttgctaatattgaggaggcttgccccacccaacaagccatagtggagagaactgaataaacaggaaaatgccagagcttgtgaaccctgtttctcttgaagaactgactagtgagatggcctggggaagctgtgaaagaaccaaaagagatcacaatactcaaaagagagagagagagaaaaaagagagatcttgatccacagaaatacatgaaatgtctggtctgtccaccccatcaacaagtcttgaaacaagcaacagatggatagtctgtccaaatggacataagacagacagcagtttccctggtggtcagggaggggttttggtgatacccaagttattgggatgtcatcttcctggaagcagagctggggagggagagccatcaccttgataatgggatgaatggaaggaggcttaggactttccactcctggctgagagaggaagagctgcaacggaattaggaagaccaagacacagatcacccggggcttacttagcctacagatgtcctacgggaacgtgggctggcccagcatagggctagcaaatttgagttggatgattgtttttgctcaaggcaaccagaggaaacttgcatacagagacagatatactgggagaaatgactttgaaaacctggctctaaggtgggatcactaagggatggggcagtctctgcccaaacataaagagaactctggggagcctgagccacaaaaatgttcctttattttatgtaaaccctcaagggttatagactgccatgctagacaagcttgtccatgtaatattcccatgtttttaccctgcccctgccttgattagactcctagcacctggctagtttctaacatgttttgtgcagcacagtttttaataaatgcttgttacattcattt

SEQ ID NO: 115765 - DNA, 2708 bp, Homo sapiens
  Payload ID: 2590
  Gene Symbol: CD86
  Gene Name: CD86 molecule
  Uniprot ID: P42081
  ENST ID: ENST00000330540
  CDS Start-End: 117-1106
ggaaggcttgcacagggtgaaagctttgcttctctgctgctgtaacagggactagcacagacacacggatgagtggggtcatttccagatattaggtcacagcagaagcagccaaaatggatccccagtgcactatgggactgagtaacattctctttgtgatggccttcctgctctctggtgctgctcctctgaagattcaagcttatttcaatgagactgcagacctgccatgccaatttgcaaactctcaaaaccaaagcctgagtgagctagtagtattttggcaggaccaggaaaacttggttctgaatgaggtatacttaggcaaagagaaatttgacagtgttcattccaagtatatgggccgcacaagttttgattcggacagttggaccctgagacttcacaatcttcagatcaaggacaagggcttgtatcaatgtatcatccatcacaaaaagcccacaggaatgattcgcatccaccagatgaattctgaactgtcagtgcttgctaacttcagtcaacctgaaatagtaccaatttctaatataacagaaaatgtgtacataaatttgacctgctcatctatacacggttacccagaacctaagaagatgagtgttttgctaagaaccaagaattcaactatcgagtatgatggtgttatgcagaaatctcaagataatgtcacagaactgtacgacgtttccatcagcttgtctgtttcattccctgatgttacgagcaatatgaccatcttctgtattctggaaactgacaagacgcggcttttatcttcacctttctctatagagcttgaggaccctcagcctcccccagaccacattccttggattacagctgtacttccaacagttattatatgtgtgatggttttctgtctaattctatggaaatggaagaagaagaagcggcctcgcaactcttataaatgtggaaccaacacaatggagagggaagagagtgaacagaccaagaaaagagaaaaaatccatatacctgaaagatctgatgaagcccagcgtgtttttaaaagttcgaagacatcttcatgcgacaaaagtgatacatgtttttaattaaagagtaaagcccatacaagtattcattttttctaccctttcctttgtaagttcctgggcaacctttttgatttcttccagaaggcaaaaagacattaccatgagtaataagggggctccaggactccctctaagtggaatagcctccctgtaactccagctctgctccgtatgccaagaggagactttaattctcttactgcttcttttcacttcagagcacacttatgggccaagcccagcttaatggctcatgacctggaaataaaatttaggaccaatacctcctccagatcagattcttctcttaatttcatagattgtgttttttttttaaatagacctctcaatttctggaaaactgccttttatctgcccagaattctaagctggtgccccactgaattttgtgtgtacctgtgactaaacaactacctcctcagtctgggtgggacttatgtatttatgaccttatagtgttaatatcttgaaacatagagatctatgtactgtaatagtgtgattactatgctctagagaaaagtctacccctgctaaggagttctcatccctctgtcagggtcagtaaggaaaacggtggcctagggtacaggcaacaatgagcagaccaacctaaatttggggaaattaggagaggcagagatagaacctggagccacttctatctgggctgttgctaatattgaggaggcttgccccacccaacaagccatagtggagagaactgaataaacaggaaaatgccagagcttgtgaaccctgtttctcttgaagaactgactagtgagatggcctggggaagctgtgaaagaaccaaaagagatcacaatactcaaaagagagagagagagaaaaaagagagatcttgatccacagaaatacatgaaatgtctggtctgtccaccccatcaacaagtcttgaaacaagcaacagatggatagtctgtccaaatggacataagacagacagcagtttccctggtggtcagggaggggttttggtgatacccaagttattgggatgtcatcttcctggaagcagagctggggagggagagccatcaccttgataatgggatgaatggaaggaggcttaggactttccactcctggctgagagaggaagagctgcaacggaattaggaagaccaagacacagatcacccggggcttacttagcctacagatgtcctacgggaacgtgggctggcccagcatagggctagcaaatttgagttggatgattgtttttgctcaaggcaaccagaggaaacttgcatacagagacagatatactgggagaaatgactttgaaaacctggctctaaggtgggatcactaagggatggggcagtctctgcccaaacataaagagaactctggggagcctgagccacaaaaatgttcctttattttatgtaaaccctcaagggttatagactgccatgctagacaagcttgtccatgtaatattcccatgtttttaccctgcccctgccttgattagactcctagcacctggctagtttctaacatgttttgtgcagcacagtttttaataaatgcttgttacattca

SEQ ID NO: 115766 - DNA, 1405 bp, Homo sapiens
  Payload ID: 2590
  Gene Symbol: CD86
  Gene Name: CD86 molecule
  Uniprot ID: P42081
  ENST ID: ENST00000393627
  CDS Start-End: 148-1119
aggagccttaggaggtacggggagctcgcaaatactccttttggtttattcttaccaccttgcttctgtgttccttgggaatgctgctgtgcttatgcatctggtctctttttggagctacagtggacaggcatttgtgacagcactatgggactgagtaacattctctttgtgatggccttcctgctctctggtgctgctcctctgaagattcaagcttatttcaatgagactgcagacctgccatgccaatttgcaaactctcaaaaccaaagcctgagtgagctagtagtattttggcaggaccaggaaaacttggttctgaatgaggtatacttaggcaaagagaaatttgacagtgttcattccaagtatatgggccgcacaagttttgattcggacagttggaccctgagacttcacaatcttcagatcaaggacaagggcttgtatcaatgtatcatccatcacaaaaagcccacaggaatgattcgcatccaccagatgaattctgaactgtcagtgcttgctaacttcagtcaacctgaaatagtaccaatttctaatataacagaaaatgtgtacataaatttgacctgctcatctatacacggttacccagaacctaagaagatgagtgttttgctaagaaccaagaattcaactatcgagtatgatggtgttatgcagaaatctcaagataatgtcacagaactgtacgacgtttccatcagcttgtctgtttcattccctgatgttacgagcaatatgaccatcttctgtattctggaaactgacaagacgcggcttttatcttcacctttctctatagagcttgaggaccctcagcctcccccagaccacattccttggattacagctgtacttccaacagttattatatgtgtgatggttttctgtctaattctatggaaatggaagaagaagaagcggcctcgcaactcttataaatgtggaaccaacacaatggagagggaagagagtgaacagaccaagaaaagagaaaaaatccatatacctgaaagatctgatgaagcccagcgtgtttttaaaagttcgaagacatcttcatgcgacaaaagtgatacatgtttttaattaaagagtaaagcccatacaagtattcattttttctaccctttcctttgtaagttcctgggcaacctttttgatttcttccagaaggcaaaaagacattaccatgagtaataagggggctccaggactccctctaagtggaatagcctccctgtaactccagctctgctccgtatgccaagaggagactttaattctcttactgcttcttttcacttcagagcacacttatgggccaagcccagcttaatggctcatgacctggaaataaaatttaggaccaata

SEQ ID NO: 115767 - DNA, 891 bp, Homo sapiens
  Payload ID: 2590
  Gene Symbol: CD86
  Gene Name: CD86 molecule
  ENST ID: ENST00000478741
  CDS Start-End: 1-832
cactatgggactgagtaacattctctttgtgatggccttcctgctctctggtgctgctcctctgaagattcaagcttatttcaatgagactgcagacctgccatgccaatttgcaaactctcaaaaccaaagcctgagtgagctagtagtattttggcaggaccaggaaaacttggttctgaatgaggtatacttaggcaaagagaaatttgacagtgttcattccaagtatatgggccgcacaagttttgattcggacagttggaccctgagacttcacaatcttcagatcaaggacaagggcttgtatcaatgtatcatccatcacaaaaagcccacaggaatgattcgcatccaccagatgaattctgaactgtcagtgcttgctaacttcagtcaacctgaaatagtaccaatttctaatataacagaaaatgtgtacataaatttgacctgctcatctatacacggttacccagaacctaagaagatgagtgttttgctaagaaccaagaattcaactatcgagtatgatggtgttatgcagaaatctcaagataatgtcacagaactgtacgacgtttccatcagcttgtctgtttcattccctgatgttacgagcaatatgaccatcttctgtattctggaaactgacaagacgcggcttttatcttcacctttctctataggaaccaacacaatggagagggaagagagtgaacagaccaagaaaagagaaaaaatccatatacctgaaagatctgatgaagcccagcgtgtttttaaaagttcgaagacatcttcatgcgacaaaagtgatacatgtttttaattaaagagtaaagcccatacaagtattcattttttctaccctttcctttgtaagttcct

SEQ ID NO: 115768 - DNA, 1604 bp, Homo sapiens
  Payload ID: 2590
  Gene Symbol: CD86
  Gene Name: CD86 molecule
  Uniprot ID: P42081
  ENST ID: ENST00000469710
  CDS Start-End: 321-1064
attgccgaggaaggcttgcacagggtgaaagctttgcttctctgctgctgtaacagggactagcacagacacacggatgagtggggtcatttccagatattaggtcacagcagaagcagccaaaatggatccccagtggtgctgctcctctgaagattcaagcttatttcaatgagactgcagacctgccatgccaatttgcaaactctcaaaaccaaagcctgagtgagctagtagtattttggcaggaccaggaaaacttggttctgaatgaggtatacttaggcaaagagaaatttgacagtgttcattccaagtatatgggccgcacaagttttgattcggacagttggaccctgagacttcacaatcttcagatcaaggacaagggcttgtatcaatgtatcatccatcacaaaaagcccacaggaatgattcgcatccaccagatgaattctgaactgtcagtgcttgctaacttcagtcaacctgaaatagtaccaatttctaatataacagaaaatgtgtacataaatttgacctgctcatctatacacggttacccagaacctaagaagatgagtgttttgctaagaaccaagaattcaactatcgagtatgatggtgttatgcagaaatctcaagataatgtcacagaactgtacgacgtttccatcagcttgtctgtttcattccctgatgttacgagcaatatgaccatcttctgtattctggaaactgacaagacgcggcttttatcttcacctttctctatagagcttgaggaccctcagcctcccccagaccacattccttggattacagctgtacttccaacagttattatatgtgtgatggttttctgtctaattctatggaaatggaagaagaagaagcggcctcgcaactcttataaatgtggaaccaacacaatggagagggaagagagtgaacagaccaagaaaagagaaaaaatccatatacctgaaagatctgatgaagcccagcgtgtttttaaaagttcgaagacatcttcatgcgacaaaagtgatacatgtttttaattaaagagtaaagcccatacaagtattcattttttctaccctttcctttgtaagttcctgggcaacctttttgatttcttccagaaggcaaaaagacattaccatgagtaataagggggctccaggactccctctaagtggaatagcctccctgtaactccagctctgctccgtatgccaagaggagactttaattctcttactgcttcttttcacttcagagcacacttatgggccaagcccagcttaatggctcatgacctggaaataaaatttaggaccaatacctcctccagatcagattcttctcttaatttcatagattgtgttttttttttaaatagacctctcaatttctggaaaactgccttttatctgcccagaattctaagctggtgccccactgaattttgtgtgtacctgtgactaaacaactacctcctcagtctgggtgggacttatgtatttatgaccttatagtgttaatatcttgaaacatagagatctatgtactgtaatagtgtgattactatgctctag

SEQ ID NO: 115769 - DNA, 567 bp, Homo sapiens
  Payload ID: 2590
  Gene Symbol: CD86
  Gene Name: CD86 molecule
  ENST ID: ENST00000482356
  CDS Start-End: 65-567
gtatttgagttctaccgtcagtcctggcattatttctctctctacaaggagccttaggagcactatgggactgagtaacattctctttgtgatggccttcctgctctctggtgctgctcctctgaagattcaagcttatttcaatgagactgcagacctgccatgccaatttgcaaactctcaaaaccaaagcctgagtgagctagtagtattttggcaggaccaggaaaacttggttctgaatgaggtatacttaggcaaagagaaatttgacagtgttcattccaagtatatgggccgcacaagttttgattcggacagttggaccctgagacttcacaatcttcagatcaaggacaagggcttgtatcaatgtatcatccatcacaaaaagcccacaggaatgattcgcatccaccagatgaattctgaactgtcagtgcttgctaacttcagtcaacctgaaatagtaccaatttctaatataacagaaaatgtgtacataaatttgacctgctcatctatacacggttacccagaacctaagaagatgagtgttttgctaag

SEQ ID NO: 115770 - DNA, 1572 bp, Homo sapiens
  Payload ID: 2590
  Gene Symbol: CD86
  Gene Name: CD86 molecule
  Uniprot ID: P42081
  ENST ID: ENST00000493101
  CDS Start-End: 125-778
attgccgaggaaggcttgcacagggtgaaagctttgcttctctgctgctgtaacagggactagcacagacacacggatgagtggggtcatttccagatattaggtcacagcagaagcagccaaaatggatccccagtgcactatgggactgagtaacattctctttgtgatggccttcctgctctctgctaacttcagtcaacctgaaatagtaccaatttctaatataacagaaaatgtgtacataaatttgacctgctcatctatacacggttacccagaacctaagaagatgagtgttttgctaagaaccaagaattcaactatcgagtatgatggtgttatgcagaaatctcaagataatgtcacagaactgtacgacgtttccatcagcttgtctgtttcattccctgatgttacgagcaatatgaccatcttctgtattctggaaactgacaagacgcggcttttatcttcacctttctctatagagcttgaggaccctcagcctcccccagaccacattccttggattacagctgtacttccaacagttattatatgtgtgatggttttctgtctaattctatggaaatggaagaagaagaagcggcctcgcaactcttataaatgtggaaccaacacaatggagagggaagagagtgaacagaccaagaaaagagaaaaaatccatatacctgaaagatctgatgaagcccagcgtgtttttaaaagttcgaagacatcttcatgcgacaaaagtgatacatgtttttaattaaagagtaaagcccatacaagtattcattttttctaccctttcctttgtaagttcctgggcaacctttttgatttcttccagaaggcaaaaagacattaccatgagtaataagggggctccaggactccctctaagtggaatagcctccctgtaactccagctctgctccgtatgccaagaggagactttaattctcttactgcttcttttcacttcagagcacacttatgggccaagcccagcttaatggctcatgacctggaaataaaatttaggaccaatacctcctccagatcagattcttctcttaatttcatagattgtgttttttttttaaatagacctctcaatttctggaaaactgccttttatctgcccagaattctaagctggtgccccactgaattttgtgtgtacctgtgactaaacaactacctcctcagtctgggtgggacttatgtatttatgaccttatagtgttaatatcttgaaacatagagatctatgtactgtaatagtgtgattactatgctctagagaaaagtctacccctgctaaggagttctcatccctctgtcagggtcagtaaggaaaacggtggcctagggtacaggcaacaatgagcagaccaacctaaatttggggaaattaggagaggcagagatagaacctggagccacttctatctgggctgttgctaatattgaggaggcttgccccacccaacaagccatagtggagagaactgaataaacaggaaaatgccagagcttgtgaaccctgtttctctt

SEQ ID NO: 115771 - DNA, 2873 bp, Homo sapiens
  Payload ID: 2591
  Gene Symbol: CD8A
  Gene Name: CD8a molecule
  Uniprot ID: P01732
  ENST ID: ENST00000283635
  CDS Start-End: 856-1563
gaatttccatccagcaatgcaggccatgggaggctgcagcagtgacgctgtcagatcccctttgtgagaataataatttttataacaacgtggctggaggactgatcaggagagagactggtgtgaattgaaggctgttgcaatggctccaagaagagatgaggctgtgtggtgagtttagccgctggatgaaaggccggaagaatgaggtcagcagcgcactgacaccgacacccaaagcttcggctgctgccgctctcatggaaatctcctgggggaagggagagggtccttcctcggtgaaaactggggctgctctagcgagttcctcagaagcgggcaggtcgctagttcctcttccttttcagccctcagtgcccattttgccaataaaaagtcccaaggtgacagtacaagagacgcctttagtgaaggcaaaggaagggacactcccctcctttgctgcctactctcgccctcacttcttgaaatctttggtctcccttcacccactctgtcactctcacaagacaaccatttccaaggactatttccaagcccttttcctcatccccaaacccgcagttttcagctgcccccagttgcctggccaggctgcctcgacggccctattcacgggccccagcctcctcgccgggctggaaggcgacaaccgcgaaaaggagggtgactctcctcggcgggggcttcgggtgacatcacatcctccaaatgcgaaatcaggctccgggccggccgaagggcgcaactttcccccctcggcgccccaccggctcccgcgcgcctcccctcgcgcccgagcttcgagccaagcagcgtcctggggagcgcgtcatggccttaccagtgaccgccttgctcctgccgctggccttgctgctccacgccgccaggccgagccagttccgggtgtcgccgctggatcggacctggaacctgggcgagacagtggagctgaagtgccaggtgctgctgtccaacccgacgtcgggctgctcgtggctcttccagccgcgcggcgccgccgccagtcccaccttcctcctatacctctcccaaaacaagcccaaggcggccgaggggctggacacccagcggttctcgggcaagaggttgggggacaccttcgtcctcaccctgagcgacttccgccgagagaacgagggctactatttctgctcggccctgagcaactccatcatgtacttcagccacttcgtgccggtcttcctgccagcgaagcccaccacgacgccagcgccgcgaccaccaacaccggcgcccaccatcgcgtcgcagcccctgtccctgcgcccagaggcgtgccggccagcggcggggggcgcagtgcacacgagggggctggacttcgcctgtgatatctacatctgggcgcccttggccgggacttgtggggtccttctcctgtcactggttatcaccctttactgcaaccacaggaaccgaagacgtgtttgcaaatgtccccggcctgtggtcaaatcgggagacaagcccagcctttcggcgagatacgtctaaccctgtgcaacagccactacattacttcaaactgagatccttccttttgagggagcaagtccttccctttcattttttccagtcttcctccctgtgtattcattctcatgattattattttagtgggggcggggtgggaaagattactttttctttatgtgtttgacgggaaacaaaactaggtaaaatctacagtacaccacaagggtcacaatactgttgtgcgcacatcgcggtagggcgtggaaaggggcaggccagagctacccgcagagttctcagaatcatgctgagagagctggaggcacccatgccatctcaacctcttccccgcccgttttacaaagggggaggctaaagcccagagacagcttgatcaaaggcacacagcaagtcagggttggagcagtagctggagggaccttgtctcccagctcagggctctttcctccacaccattcaggtctttctttccgaggcccctgtctcagggtgaggtgcttgagtctccaacggcaagggaacaagtacttcttgatacctgggatactgtgcccagagcctcgaggaggtaatgaattaaagaagagaactgcctttggcagagttctataatgtaaacaatatcagactttttttttttataatcaagcctaaaattgtatagacctaaaataaaatgaagtggtgagcttaaccctggaaaatgaatccctctatctctaaagaaaatctctgtgaaacccctatgtggaggcggaattgctctcccagcccttgcattgcagaggggcccatgaaagaggacaggctacccctttacaaatagaatttgagcatcagtgaggttaaactaaggccctcttgaatctctgaatttgagatacaaacatgttcctgggatcactgatgactttttatactttgtaaagacaattgttggagagcccctcacacagccctggcctctgctcaactagcagatacagggatgaggcagacctgactctcttaaggaggctgagagcccaaactgctgtcccaaacatgcacttccttgcttaaggtatggtacaagcaatgcctgcccattggagagaaaaaacttaagtagataaggaaataagaaccactcataattcttcaccttaggaataatctcctgttaatatggtgtacattcttcctgattattttctacacatacatgtaaaatatgtctttcttttttaaatagggttgtactatgctgttatgagtggctttaatgaataaacatttgtagcatcctctttaatgggtaaacagca

SEQ ID NO: 115772 - DNA, 1977 bp, Homo sapiens
  Payload ID: 2591
  Gene Symbol: CD8A
  Gene Name: CD8a molecule
  Uniprot ID: P01732
  ENST ID: ENST00000352580
  CDS Start-End: 71-667
ccccaccggctcccgcgcgcctcccctcgcgcccgagcttcgagccaagcagcgtcctggggagcgcgtcatggccttaccagtgaccgccttgctcctgccgctggccttgctgctccacgccgccaggccgagccagttccgggtgtcgccgctggatcggacctggaacctgggcgagacagtggagctgaagtgccaggtgctgctgtccaacccgacgtcgggctgctcgtggctcttccagccgcgcggcgccgccgccagtcccaccttcctcctatacctctcccaaaacaagcccaaggcggccgaggggctggacacccagcggttctcgggcaagaggttgggggacaccttcgtcctcaccctgagcgacttccgccgagagaacgagggctactatttctgctcggccctgagcaactccatcatgtacttcagccacttcgtgccggtcttcctgccagcgaagcccaccacgacgccagcgccgcgaccaccaacaccggcgcccaccatcgcgtcgcagcccctgtccctgcgcccagaggcgtgccggccagcggcggggggcgcagggaaccgaagacgtgtttgcaaatgtccccggcctgtggtcaaatcgggagacaagcccagcctttcggcgagatacgtctaaccctgtgcaacagccactacattacttcaaactgagatccttccttttgagggagcaagtccttccctttcattttttccagtcttcctccctgtgtattcattctcatgattattattttagtgggggcggggtgggaaagattactttttctttatgtgtttgacgggaaacaaaactaggtaaaatctacagtacaccacaagggtcacaatactgttgtgcgcacatcgcggtagggcgtggaaaggggcaggccagagctacccgcagagttctcagaatcatgctgagagagctggaggcacccatgccatctcaacctcttccccgcccgttttacaaagggggaggctaaagcccagagacagcttgatcaaaggcacacagcaagtcagggttggagcagtagctggagggaccttgtctcccagctcagggctctttcctccacaccattcaggtctttctttccgaggcccctgtctcagggtgaggtgcttgagtctccaacggcaagggaacaagtacttcttgatacctgggatactgtgcccagagcctcgaggaggtaatgaattaaagaagagaactgcctttggcagagttctataatgtaaacaatatcagactttttttttttataatcaagcctaaaattgtatagacctaaaataaaatgaagtggtgagcttaaccctggaaaatgaatccctctatctctaaagaaaatctctgtgaaacccctatgtggaggcggaattgctctcccagcccttgcattgcagaggggcccatgaaagaggacaggctacccctttacaaatagaatttgagcatcagtgaggttaaactaaggccctcttgaatctctgaatttgagatacaaacatgttcctgggatcactgatgactttttatactttgtaaagacaattgttggagagcccctcacacagccctggcctctgctcaactagcagatacagggatgaggcagacctgactctcttaaggaggctgagagcccaaactgctgtcccaaacatgcacttccttgcttaaggtatggtacaagcaatgcctgcccattggagagaaaaaacttaagtagataaggaaataagaaccactcataattcttcaccttaggaataatctcctgttaatatggtgtacattcttcctgattattttctacacatacatgtaaaatatgtctttcttttttaaatagggttgtactatgctgttatgagtggctttaatgaataaacatttgtagcatcctctttaatgggtaaacagca

SEQ ID NO: 115773 - DNA, 3048 bp, Homo sapiens
  Payload ID: 2591
  Gene Symbol: CD8A
  Gene Name: CD8a molecule
  Uniprot ID: P01732
  ENST ID: ENST00000409511
  CDS Start-End: 1032-1739
ctctgtaaaataaatgcgctgggccggatcttttctgagttctcttctcccctacgaattctagatccctcctctgtcctccctgcgccagggaccttcgggcgacccttccctgtacccccaccccaccctctctggaccccgtttctgcctcagtacggcgcgctgagctctgccccctgcccaggccctgaccccctcaggagccgcggtttcctggggtaacagtgggaaacgtgtcggccgtctccgctcaggcgcttgctgtgtacagaaaggctgattcaggcacaccggctctcgtcgccttggtggccctccccagccctcctccgcgcctgctccgggtggcgctccgctgggctcctcgtgcgcctgtccgcgaccgcacccacctcatcctggcacccccatcgtggcatcacgtgttccctcatctgtcctcatggctggcgtgcccctctgcggtgagacctgcagaacaggaattggtgccgggtcagcagccggcgatgaagccggacgaagcctgcaaaccccacccatacgccagcttcacatagctcctatccattgcacagcagcgtggggaagcaccgttctctaccctccaaacaaaagcatgaaccaggtgcagtggctcacgtctgtaatcccagcattttggaggccaaggtggatggatggattccttgagtccaggagttcaagaccagcctgggcaacatggtgaacccccatctctacaaaaatttagccagttttcagctgcccccagttgcctggccaggctgcctcgacggccctattcacgggccccagcctcctcgccgggctggaaggcgacaaccgcgaaaaggagggtgactctcctcggcgggggcttcgggtgacatcacatcctccaaatgcgaaatcaggctccgggccggccgaagggcgcaactttcccccctcggcgccccaccggctcccgcgcgcctcccctcgcgcccgagcttcgagccaagcagcgtcctggggagcgcgtcatggccttaccagtgaccgccttgctcctgccgctggccttgctgctccacgccgccaggccgagccagttccgggtgtcgccgctggatcggacctggaacctgggcgagacagtggagctgaagtgccaggtgctgctgtccaacccgacgtcgggctgctcgtggctcttccagccgcgcggcgccgccgccagtcccaccttcctcctatacctctcccaaaacaagcccaaggcggccgaggggctggacacccagcggttctcgggcaagaggttgggggacaccttcgtcctcaccctgagcgacttccgccgagagaacgagggctactatttctgctcggccctgagcaactccatcatgtacttcagccacttcgtgccggtcttcctgccagcgaagcccaccacgacgccagcgccgcgaccaccaacaccggcgcccaccatcgcgtcgcagcccctgtccctgcgcccagaggcgtgccggccagcggcggggggcgcagtgcacacgagggggctggacttcgcctgtgatatctacatctgggcgcccttggccgggacttgtggggtccttctcctgtcactggttatcaccctttactgcaaccacaggaaccgaagacgtgtttgcaaatgtccccggcctgtggtcaaatcgggagacaagcccagcctttcggcgagatacgtctaaccctgtgcaacagccactacattacttcaaactgagatccttccttttgagggagcaagtccttccctttcattttttccagtcttcctccctgtgtattcattctcatgattattattttagtgggggcggggtgggaaagattactttttctttatgtgtttgacgggaaacaaaactaggtaaaatctacagtacaccacaagggtcacaatactgttgtgcgcacatcgcggtagggcgtggaaaggggcaggccagagctacccgcagagttctcagaatcatgctgagagagctggaggcacccatgccatctcaacctcttccccgcccgttttacaaagggggaggctaaagcccagagacagcttgatcaaaggcacacagcaagtcagggttggagcagtagctggagggaccttgtctcccagctcagggctctttcctccacaccattcaggtctttctttccgaggcccctgtctcagggtgaggtgcttgagtctccaacggcaagggaacaagtacttcttgatacctgggatactgtgcccagagcctcgaggaggtaatgaattaaagaagagaactgcctttggcagagttctataatgtaaacaatatcagactttttttttttataatcaagcctaaaattgtatagacctaaaataaaatgaagtggtgagcttaaccctggaaaatgaatccctctatctctaaagaaaatctctgtgaaacccctatgtggaggcggaattgctctcccagcccttgcattgcagaggggcccatgaaagaggacaggctacccctttacaaatagaatttgagcatcagtgaggttaaactaaggccctcttgaatctctgaatttgagatacaaacatgttcctgggatcactgatgactttttatactttgtaaagacaattgttggagagcccctcacacagccctggcctctgctcaactagcagatacagggatgaggcagacctgactctcttaaggaggctgagagcccaaactgctgtcccaaacatgcacttccttgcttaaggtatggtacaagcaatgcctgcccattggagagaaaaaacttaagtagataaggaaataagaaccactcataattcttcaccttaggaataatctcctgttaatatggtgtacattcttcctgattattttctacacatacatgtaaaatatgtctttcttttttaaatagggttgtactatgctgttatgagtggctttaatgaataaacatttgtagcatcctctttaatgggtaaacagc

SEQ ID NO: 115774 - DNA, 597 bp, Homo sapiens
  Payload ID: 2591
  Gene Symbol: CD8A
  Gene Name: CD8a molecule
  ENST ID: ENST00000409781
  CDS Start-End: 1-597
atggccttaccagtgaccgccttgctcctgccgctggccttgctgctccacgccgccaggccgagccagttccgggtgtcgccgctggatcggacctggaacctgggcgagacagtggagctgaagtgccaggtgctgctgtccaacccgacgtcgggctgctcgtggctcttccagccgcgcggcgccgccgccagtcccaccttcctcctatacctctcccaaaacaagcccaaggcggccgaggggctggacacccagcggttctcgggcaagaggttgggggacaccttcgtcctcaccctgagcgacttccgccgagagaacgagggctactatttctgctcggccctgagcaactccatcatgtacttcagccacttcgtgccggtcttcctgccagtgcacacgagggggctggacttcgcctgtgatatctacatctgggcgcccttggccgggacttgtggggtccttctcctgtcactggttatcaccctttactgcaaccacaggaaccgaagacgtgtttgcaaatgtccccggcctgtggtcaaatcgggagacaagcccagcctttcggcgagatacgtctaa

SEQ ID NO: 115775 - DNA, 832 bp, Homo sapiens
  Payload ID: 2592
  Gene Symbol: CD8B
  Gene Name: CD8b molecule
  Uniprot ID: P10966
  ENST ID: ENST00000331469
  CDS Start-End: 51-782
gcgactgtctccgccgagcccccggggccaggtgtcccgggcgcgccacgatgcggccgcggctgtggctcctcttggccgcgcagctgacagttctccatggcaactcagtcctccagcagacccctgcatacataaaggtgcaaaccaacaagatggtgatgctgtcctgcgaggctaaaatctccctcagtaacatgcgcatctactggctgagacagcgccaggcaccgagcagtgacagtcaccacgagttcctggccctctgggattccgcaaaagggactatccacggtgaagaggtggaacaggagaagatagctgtgtttcgggatgcaagccggttcattctcaatctcacaagcgtgaagccggaagacagtggcatctacttctgcatgatcgtcgggagccccgagctgaccttcgggaagggaactcagctgagtgtggttgatttccttcccaccactgcccagcccaccaagaagtccaccctcaagaagagagtgtgccggttacccaggccagagacccagaagggcccactttgtagccccatcacccttggcctgctggtggctggcgtcctggttctgctggtttccctgggagtggccatccacctgtgctgccggcggaggagagcccggcttcgtttcatgaaacagcctcaaggggaaggtatatcaggaacctttgtcccccaatgcctgcatggatactacagcaatactacaacctcacagaagctgcttaacccatggatcctgaaaacataggcaagaagcacaggtcctgatgagtggatctttactacttttaccagatt

SEQ ID NO: 115776 - DNA, 849 bp, Homo sapiens
  Payload ID: 2592
  Gene Symbol: CD8B
  Gene Name: CD8b molecule
  Uniprot ID: P10966
  ENST ID: ENST00000349455
  CDS Start-End: 51-692
gcgactgtctccgccgagcccccggggccaggtgtcccgggcgcgccacgatgcggccgcggctgtggctcctcttggccgcgcagctgacagttctccatggcaactcagtcctccagcagacccctgcatacataaaggtgcaaaccaacaagatggtgatgctgtcctgcgaggctaaaatctccctcagtaacatgcgcatctactggctgagacagcgccaggcaccgagcagtgacagtcaccacgagttcctggccctctgggattccgcaaaagggactatccacggtgaagaggtggaacaggagaagatagctgtgtttcgggatgcaagccggttcattctcaatctcacaagcgtgaagccggaagacagtggcatctacttctgcatgatcgtcgggagccccgagctgaccttcgggaagggaactcagctgagtgtggttgatttccttcccaccactgcccagcccaccaagaagtccaccctcaagaagagagtgtgccggttacccaggccagagacccagaagggccggcggaggagagcccggcttcgtttcatgaaacagcctcaaggggaaggtatatcaggaacctttgtcccccaatgcctgcatggatactacagcaatactacaacctcacagaagctgcttaacccatggatcctgaaaacataggcaagaagcacaggtcctgatgagtggatctttactacttttaccagattcctccctcgctcagagggatcctcccacacacccagcagagacttctctgccaccatcaaccccccaagtcatagggggctcaagttctgccctggtgagctgtggc

SEQ ID NO: 115777 - DNA, 1417 bp, Homo sapiens
  Payload ID: 2592
  Gene Symbol: CD8B
  Gene Name: CD8b molecule
  Uniprot ID: P10966
  ENST ID: ENST00000390655
  CDS Start-End: 60-692
accccagccgcgactgtctccgccgagcccccggggccaggtgtcccgggcgcgccacgatgcggccgcggctgtggctcctcttggccgcgcagctgacagttctccatggcaactcagtcctccagcagacccctgcatacataaaggtgcaaaccaacaagatggtgatgctgtcctgcgaggctaaaatctccctcagtaacatgcgcatctactggctgagacagcgccaggcaccgagcagtgacagtcaccacgagttcctggccctctgggattccgcaaaagggactatccacggtgaagaggtggaacaggagaagatagctgtgtttcgggatgcaagccggttcattctcaatctcacaagcgtgaagccggaagacagtggcatctacttctgcatgatcgtcgggagccccgagctgaccttcgggaagggaactcagctgagtgtggttgatttccttcccaccactgcccagcccaccaagaagtccaccctcaagaagagagtgtgccggttacccaggccagagacccagaagggcccactttgtagccccatcacccttggcctgctggtggctggcgtcctggttctgctggtttccctgggagtggccatccacctgtgctgccggcggaggagagcccggcttcgtttcatgaaacaattttacaaatgagcagagaatacggttttggtgtcctgctacaaaaagacatcggtcagtaacgagcacgatgtggaaaaatgagagaagggacacattcaaccctggagagttcaatggctgctgaagctgcctgcttttcactgctgcaaggcctttctgtgtgtgatgtgcatgggagcaacttgttcgtgggtcatcgggaatactagggagaaggtttcattgcccccagggcacttcacagagtgtgctggaggactgagtaagaaatgctgcccatgccaccgcttccggctcctgtgctttccctgaactgggacctttagtggtggccatttagccaccatctttgcaggttgctttgccctggtagggcagtaacattgggtcctgggtctttcatggggtgatgctgggctggctccctcttggtcttcccaggctggggctgaccttcctcgcagagaggccaggtgcaggttgggaatgaggcttgctgagaggggctgtccagttcccagaaggcatatcagtctctgagggcttcctttggggccgggaacttgcgggtttgaggataggagttcacttcatcttctcagctcccatttctactcttaagtttctcagctcccatttctactctcccatggcttaatgcttctttcattttctgtttgttttatacaaatgtcttagttgtacaaataaagtcccaggttaaagataacaaa

SEQ ID NO: 115778 - DNA, 1096 bp, Homo sapiens
  Payload ID: 2592
  Gene Symbol: CD8B
  Gene Name: CD8b molecule
  Uniprot ID: P10966
  ENST ID: ENST00000393759
  CDS Start-End: 51-716
gcgactgtctccgccgagcccccggggccaggtgtcccgggcgcgccacgatgcggccgcggctgtggctcctcttggccgcgcagctgacagttctccatggcaactcagtcctccagcagacccctgcatacataaaggtgcaaaccaacaagatggtgatgctgtcctgcgaggctaaaatctccctcagtaacatgcgcatctactggctgagacagcgccaggcaccgagcagtgacagtcaccacgagttcctggccctctgggattccgcaaaagggactatccacggtgaagaggtggaacaggagaagatagctgtgtttcgggatgcaagccggttcattctcaatctcacaagcgtgaagccggaagacagtggcatctacttctgcatgatcgtcgggagccccgagctgaccttcgggaagggaactcagctgagtgtggttgatttccttcccaccactgcccagcccaccaagaagtccaccctcaagaagagagtgtgccggttacccaggccagagacccagaagggcccactttgtagccccatcacccttggcctgctggtggctggcgtcctggttctgctggtttccctgggagtggccatccacctgtgctgccggcggaggagagcccggcttcgtttcatgaaacaactaagattacatccactggagaaatgttccagaatggactactgaatatacaggcctcaaggggaaggtatatcaggaacctttgtcccccaatgcctgcatggatactacagcaatactacaacctcacagaagctgcttaacccatggatcctgaaaacataggcaagaagcacaggtcctgatgagtggatctttactacttttaccagattcctccctcgctcagagggatcctcccacacacccagcagagacttctctgccaccatcaaccccccaagtcatagggggctcaagttctgccctggtgagctgtggcccccatccttgtgaaccccaaagtgtcccccttgtggaaccaaatgtatccatcttgaataaatttgcccaaaatcctaaagaccgggaaaagggaaccattg

SEQ ID NO: 115779 - DNA, 932 bp, Homo sapiens
  Payload ID: 2592
  Gene Symbol: CD8B
  Gene Name: CD8b molecule
  Uniprot ID: P10966
  ENST ID: ENST00000393761
  CDS Start-End: 60-656
accccagccgcgactgtctccgccgagcccccggggccaggtgtcccgggcgcgccacgatgcggccgcggctgtggctcctcttggccgcgcagctgacagttctccatggcaactcagtcctccagcagacccctgcatacataaaggtgcaaaccaacaagatggtgatgctgtcctgcgaggctaaaatctccctcagtaacatgcgcatctactggctgagacagcgccaggcaccgagcagtgacagtcaccacgagttcctggccctctgggattccgcaaaagggactatccacggtgaagaggtggaacaggagaagatagctgtgtttcgggatgcaagccggttcattctcaatctcacaagcgtgaagccggaagacagtggcatctacttctgcatgatcgtcgggagccccgagctgaccttcgggaagggaactcagctgagtgtggttgatttccttcccaccactgcccagcccaccaagaagtccaccctcaagaagagagtgtgccggttacccaggccagagacccagaagggcctcaaggggaaggtatatcaggaacctttgtcccccaatgcctgcatggatactacagcaatactacaacctcacagaagctgcttaacccatggatcctgaaaacataggcaagaagcacaggtcctgatgagtggatctttactacttttaccagattcctccctcgctcagagggatcctcccacacacccagcagagacttctctgccaccatcaaccccccaagtcatagggggctcaagttctgccctggtgagctgtggcccccatccttgtgaaccccaaagtgtcccccttgtggaaccaaatgtatccatcttgaataaatttgcccaaaatcctaaagaccgggaaaagggaaccattgagcttggc

SEQ ID NO: 115780 - DNA, 692 bp, Homo sapiens
  Payload ID: 2592
  Gene Symbol: CD8B
  Gene Name: CD8b molecule
  ENST ID: ENST00000431506
  CDS Start-End: 60-692
accccagccgcgactgtctccgccgagcccccggggccaggtgtcccgggcgcgccacgatgcggccgcggctgtggctcctcttggccgcgcagctgacagttctccatggcaactcagtcctccagcagacccctgcatacataaaggtgcaaaccaacaagatggtgatgctgtcctgcgaggctaaaatctccctcagtaacatgcgcatctactggctgagacagcgccaggcaccgagcagtgacagtcaccacgagttcctggccctctgggattccgcaaaagggactatccacggtgaagaggtggaacaggagaagatagctgtgtttcgggatgcaagccggttcattctcaatctcacaagcgtgaagccggaagacagtggcatctacttctgcatgatcgtcgggagccccgagctgaccttcgggaagggaactcagctgagtgtggttgatttccttcccaccactgcccagcccaccaagaagtccaccctcaagaagagagtgtgccggttacccaggccagagacccagaagggcccactttgtagccccatcacccttggcctgctggtggctggcgtcctggttctgctggtttccctgggagtggccatccacctgtgctgccggcggaggagagcccggcttcgtttcatgaaacaactgtataaatag

SEQ ID NO: 115781 - DNA, 1169 bp, Homo sapiens
  Payload ID: 2593
  Gene Symbol: CD9
  Gene Name: CD9 molecule
  Uniprot ID: P21926
  ENST ID: ENST00000009180
  CDS Start-End: 52-738
cgcgccccccagtcccgcacccgttcggcccaggctaagttagccctcaccatgccggtcaaaggaggcaccaagtgcatcaaatacctgctgttcggatttaacttcatcttctggcttgccgggattgctgtccttgccattggactatggctccgattcgactctcagaccaagagcatcttcgagcaagaaactaataataataattccagcttctacacaggagtctatattctgatcggagccggcgccctcatgatgctggtgggcttcctgggctgctgcggggctgtgcaggagtcccagtgcatgctgggactgttcttcggcttcctcttggtgatattcgccattgaaatagctgcggccatctggggatattcccacaaggatgaggtgattaaggaagtccaggagttttacaaggacacctacaacaagctgaaaaccaaggatgagccccagcgggaaacgctgaaagccatccactatgcgttgaactgctgtggtttggctgggggcgtggaacagtttatctcagacatctgccccaagaaggacgtactcgaaaccttcaccgtgaagtcctgtcctgatgccatcaaagaggtcttcgacaataaattccacatcatcggcgcagtgggcatcggcattgccgtggtcatgatatttggcatgatcttcagtatgatcttgtgctgtgctatccgcaggaaccgcgagatggtctagagtcagcttacatccctgagcaggaaagtttacccatgaagattggtgggattttttgtttgtttgttttgttttgtttgttgtttgttgtttgtttttttgccactaattttagtattcattctgcattgctagataaaagctgaagttactttatgtttgtcttttaatgcttcattcaatattgacatttgtagttgagcggggggtttggtttgctttggtttatattttttcagttgtttgtttttgcttgttatattaagcagaaatcctgcaatgaaaggtactatatttgctagactctagacaagatattgtacataaaagaatttttttgtctttaaatagatacaaatgtctatcaactttaatcaagttgtaacttatattgaagacaatttgatacataataaaaaattatgacaatg

SEQ ID NO: 115782 - DNA, 1229 bp, Homo sapiens
  Payload ID: 2593
  Gene Symbol: CD9
  Gene Name: CD9 molecule
  ENST ID: ENST00000382515
  CDS Start-End: 319-798
gtggggagccgggccctcttgagatgaggcgtgcgggagggtcctgagcactttagctcgcctaggatttgagctggggtgtgtgtctgctcccagctcaagtccctccgagtgccagagaggaaggcagggagaagcggagcacccctctttgggccaaggccaaggaggactgtgcttgccgggattgctgtccttgccattggactatggctccgattcgactctcagaccaagagcatcttcgagcaagaaactaataataataattccagcttctacacaggagtctatattctgatcggagccggcgccctcatgatgctggtgggcttcctgggctgctgcggggctgtgcaggagtcccagtgcatgctgggactgttcttcggcttcctcttggtgatattcgccattgaaatagctgcggccatctggggatattcccacaaggatgaggtgattaaggaagtccaggagttttacaaggacacctacaacaagctgaaaaccaaggatgagccccagcgggaaacgctgaaagccatccactatgcgttgaactgctgtggtttggctgggggcgtggaacagtttatctcagacatctgccccaagaaggacgtactcgaaaccttcaccgtgaagtcctgtcctgatgccatcaaagaggtcttcgacaataaattccacatcatcggcgcagtgggcatcggcattgccgtggtcatgatatttggcatgatcttcagtatgatcttgtgctgtgctatccgcaggaaccgcgagatggtctagagtcagcttacatccctgagcaggaaagtttacccatgaagattggtgggattttttgtttgtttgttttgttttgtttgttgtttgttgtttgtttttttgccactaattttagtattcattctgcattgctagataaaagctgaagttactttatgtttgtcttttaatgcttcattcaatattgacatttgtagttgagcggggggtttggtttgctttggtttatattttttcagttgtttgtttttgcttgttatattaagcagaaatcctgcaatgaaaggtactatatttgctagactctagacaagatattgtacataaaagaatttttttgtctttaaatagatacaaatgtctatcaactttaatcaagttgtaacttatattgaagacaatttgatacataataaaaaattatgacaatg

SEQ ID NO: 115783 - DNA, 1556 bp, Homo sapiens
  Payload ID: 2593
  Gene Symbol: CD9
  Gene Name: CD9 molecule
  Uniprot ID: P21926
  ENST ID: ENST00000382518
  CDS Start-End: 437-1123
ctgcccagccctcagctgtgttattattcggtgataggtatttgctaattacttccaaaagcctcccatctgtcatcccacccagactgcgcgcttctaattcctcctaccccacatgctgtgcccaatgaaaagtatggtcagcgagcgaaggtttgcaaggagacagacgagggcgaaattaagccaggcggcttccctttaaatcctcgcaaagcagaagggcccctcactctggcagcaggccttggccaaggggcctttagccctgacgacccggggaagagtctcccaaagcagaacgcccggtccggcgcccagaccaaacgcgggggaaccggaagggcgaggcctccaccgccaggtcccgccagtcccagctgcgcgcgccccccagtcccgcacccgttcggcccaggctaagttagccctcaccatgccggtcaaaggaggcaccaagtgcatcaaatacctgctgttcggatttaacttcatcttctggcttgccgggattgctgtccttgccattggactatggctccgattcgactctcagaccaagagcatcttcgagcaagaaactaataataataattccagcttctacacaggagtctatattctgatcggagccggcgccctcatgatgctggtgggcttcctgggctgctgcggggctgtgcaggagtcccagtgcatgctgggactgttcttcggcttcctcttggtgatattcgccattgaaatagctgcggccatctggggatattcccacaaggatgaggtgattaaggaagtccaggagttttacaaggacacctacaacaagctgaaaaccaaggatgagccccagcgggaaacgctgaaagccatccactatgcgttgaactgctgtggtttggctgggggcgtggaacagtttatctcagacatctgccccaagaaggacgtactcgaaaccttcaccgtgaagtcctgtcctgatgccatcaaagaggtcttcgacaataaattccacatcatcggcgcagtgggcatcggcattgccgtggtcatgatatttggcatgatcttcagtatgatcttgtgctgtgctatccgcaggaaccgcgagatggtctagagtcagcttacatccctgagcaggaaagtttacccatgaagattggtgggattttttgtttgtttgttttgttttgtttgttgtttgttgtttgtttttttgccactaattttagtattcattctgcattgctagataaaagctgaagttactttatgtttgtcttttaatgcttcattcaatattgacatttgtagttgagcggggggtttggtttgctttggtttatattttttcagttgtttgtttttgcttgttatattaagcagaaatcctgcaatgaaaggtactatatttgctagactctagacaagatattgtacataaaagaatttttttgtctttaaatagatacaaatgtctatcaactttaatcaagttgtaacttatattgaagacaatttgatacataataaaaaattatgacaatgtc

SEQ ID NO: 115784 - DNA, 800 bp, Homo sapiens
  Payload ID: 2593
  Gene Symbol: CD9
  Gene Name: CD9 molecule
  ENST ID: ENST00000382519
  CDS Start-End: 116-800
cggagaccagcctacagccgcctgcatctgtatccagcgccaggtcccgccagtcccagctgcgcgcgccccccagtcccgcacccgttcggcccaggctaagttagccctcaccatgccggtcaaaggaggcaccaagtgcatcaaatacctgctgttcggatttaacttcatcttctggcttgccgggattgctgtccttgccattggactatggctccgattcgactctcagaccaagagcatcttcgagcaagaaactaataataataattccagcttctacacaggagtctatattctgatcggagccggcgccctcatgatgctggtgggcttcctgggctgctgcggggctgtgcaggagtcccagtgcatgctgggactggcaactaaaaggactatgtttcccccttttctcgaggaccacgtttgctttttttccctgaatccacagttcttcggcttcctcttggtgatattcgccattgaaatagctgcggccatctggggatattcccacaaggatgaggtgattaaggaagtccaggagttttacaaggacacctacaacaagctgaaaaccaaggatgagccccagcgggaaacgctgaaagccatccactatgcgttgaactgctgtggtttggctgggggcgtggaacagtttatctcagacatctgccccaagaaggacgtactcgaaaccttcaccgtgaagtcctgtcctgatgccatcaaagaggtcttcgacaataaattccacatcatcggcgcagtgggcatcggcattgccgtgg

SEQ ID NO: 115785 - DNA, 739 bp, Homo sapiens
  Payload ID: 2593
  Gene Symbol: CD9
  Gene Name: CD9 molecule
  ENST ID: ENST00000536586
  CDS Start-End: 315-739
aggagacagacgagggcgaaattaagccaggcggcttccctttaaatcctcgcaaagcagaagggcccctcactctggcagcaggccttggccaaggggcctttagccctgacgacccggggaagagtctcccaaagcagaacgcccggtccggcgcccagaccaaacgcgggggaaccggaagggcgaggcctccacccggagaccagcctacagccgcctgcatctgtatccagcgccaggtcccgccagtcccagctgcgcgcgccccccagtcccgcacccgttcggcccaggctaagttagccctcaccatgccggtcaaaggaggcaccaagtgcatcaaatacctgctgttcggatttaacttcatcttctggcttgccgggattgctgtccttgccattggactatggctccgattcgactctcagaccaagagcatcttcgagcaagaaactaataataataattccagcttctacacaggagtctatattctgatcggagccggcgccctcatgatgctggtgggcttcctgggctgctgcggggctgtgcaggagtcccagtgcatgctgggactgttcttcggcttcctcttggtgatattcgccattgaaatagctgcggccatctggggatattcccacaaggatgaggtgattaaggaagtccaggagttttacaaggacacctacaacaagctgaaaaccaaggatgagccccagcgggaaac

SEQ ID NO: 115786 - DNA, 1315 bp, Homo sapiens
  Payload ID: 2593
  Gene Symbol: CD9
  Gene Name: CD9 molecule
  ENST ID: ENST00000610354
  CDS Start-End: 185-733
cttttcccggcacatgcgcaccgcagcgggtcgcgcgccctaaggagtggcactttttaaaagtgcagccggagaccagcctacagccgcctgcatctgtatccagcgccaggtcccgccagtcccagctgcgcgcgccccccagtcccgcacccgttcggcccaggctaagttagccctcaccatgccggtcaaaggaggcaccaagtgcatcaaatacctgctgttcggatttaacttcatcttctggcttgccgggattgctgtccttgccattggactatggctccgattcgactctcagaccaagagcatcttcgagcaagaaactaataataataattccagcttctacacaggagtctatattctgatcggagccggcgccctcatgatgctggtgggcttcctgggctgctgcggggctgtgcaggagtcccagtgcatgctgggactgttcttcggcttcctcttggtgatattcgccattgaaatagctgcggccatctggggatattcccacaaggatgaggtgattaaggaagtccaggagttttacaaggacacctacaacaagctgaaaaccaaggatgagccccagcgggaaacgctgaaagccatccactatgcggttgaactgctgtggtttggctgggggcgtggaacagtttatctcagacatctgccccaagaaggacgtactcgaaaccttcaccgtgaagtcctgtcctgatgccatcaaagaggtcttcgacaataaattccacatcatcggcgcagtgggcatcggcattgccgtggtcatgatatttggcatgatcttcagtatgatcttgtgctgtgctatccgcaggaaccgcgagatggtctagagtcagcttacatccctgagcaggaaagtttacccatgaagattggtgggattttttgtttgtttgttttgttttgtttgttgtttgttgtttgtttttttgccactaattttagtattcattctgcattgctagataaaagctgaagttactttatgtttgtcttttaatgcttcattcaatattgacatttgtagttgagcggggggtttggtttgctttggtttatattttttcagttgtttgtttttgcttgttatattaagcagaaatcctgcaatgaaaggtactatatttgctagactctagacaagatattgtacataaaagaatttttttgtctttaaatagatacaaatgtctatcaactttaatcaagttgtaacttatattgaagacaatttgatacataataaaaaattatgacaatgtcctggactggt

SEQ ID NO: 115787 - DNA, 1229 bp, Homo sapiens
  Payload ID: 2593
  Gene Symbol: CD9
  Gene Name: CD9 molecule
  ENST ID: ENST00000617871
  CDS Start-End: 112-657
gaccagcctacagccgcctgcatctgtatccagcgccaggtcccgccagtcccagctgcgcgcgccccccagtcccgcacccgttcggcccaggctaagttagccctcaccatgccggtcaaaggaggcaccaagtgcatcaaatacctgctgttcggatttaacttcatcttctggcttgccgggattgctgtccttgccattggactatggctccgattcgactctcagaccaagagcatcttcgagcaagaaactaataataataattccagcttctacacaggagtctatattctgatcggagccggcgccctcatgatgctggtgggcttcctgggctgctgcggggctgtgcaggagtcccagtgcatgctgggactgttcttcggcttcctcttggtgatattcgccattgaaatagctgcggccatctggggatattcccacaaggatgaggtgattaaggaagtccaggagttttacaaggacacctacaacaagctgaaaaccaaggatgagccccagcgggaaacgctgaaagccatccactatgcgttgaacctgtggtttggctgggggcgtggaacagtttatctcagacatctgccccaagaaggacgtactcgaaaccttcaccgtgaagtcctgtcctgatgccatcaaagaggtcttcgacaataaattccacatcatcggcgcagtgggcatcggcattgccgtggtcatgatatttggcatgatcttcagtatgatcttgtgctgtgctatccgcaggaaccgcgagatggtctagagtcagcttacatccctgagcaggaaagtttacccatgaagattggtgggattttttgtttgtttgttttgttttgtttgttgtttgttgtttgtttttttgccactaattttagtattcattctgcattgctagataaaagctgaagttactttatgtttgtcttttaatgcttcattcaatattgacatttgtagttgagcggggggtttggtttgctttggtttatattttttcagttgtttgtttttgcttgttatattaagcagaaatcctgcaatgaaaggtactatatttgctagactctagacaagatattgtacataaaagaatttttttgtctttaaatagatacaaatgtctatcaactttaatcaagttgtaacttatattgaagacaatttgatacataataaaaaattatgacaatgtc

SEQ ID NO: 115788 - DNA, 6708 bp, Homo sapiens
  Payload ID: 2594
  Gene Symbol: CD93
  Gene Name: CD93 molecule
  Uniprot ID: Q9NPY3
  ENST ID: ENST00000246006
  CDS Start-End: 149-2107
aaagccctcagcctttgtgtccttctctgcgccggagtggctgcagctcacccctcagctccccttggggcccagctgggagccgagatagaagctcctgtcgccgctgggcttctcgcctcccgcagagggccacacagagaccgggatggccacctccatgggcctgctgctgctgctgctgctgctcctgacccagcccggggcggggacgggagctgacacggaggcggtggtctgcgtggggaccgcctgctacacggcccactcgggcaagctgagcgctgccgaggcccagaaccactgcaaccagaacgggggcaacctggccactgtgaagagcaaggaggaggcccagcacgtccagcgagtactggcccagctcctgaggcgggaggcagccctgacggcgaggatgagcaagttctggattgggctccagcgagagaagggcaagtgcctggaccctagtctgccgctgaagggcttcagctgggtgggcgggggggaggacacgccttactctaactggcacaaggagctccggaactcgtgcatctccaagcgctgtgtgtctctgctgctggacctgtcccagccgctccttcccagccgcctccccaagtggtctgagggcccctgtgggagcccaggctcccccggaagtaacattgagggcttcgtgtgcaagttcagcttcaaaggcatgtgccggcctctggccctggggggcccaggtcaggtgacctacaccacccccttccagaccaccagttcctccttggaggctgtgccctttgcctctgcggccaatgtagcctgtggggaaggtgacaaggacgagactcagagtcattatttcctgtgcaaggagaaggcccccgatgtgttcgactggggcagctcgggccccctctgtgtcagccccaagtatggctgcaacttcaacaatgggggctgccaccaggactgctttgaagggggggatggctccttcctctgcggctgccgaccaggattccggctgctggatgacctggtgacctgtgcctctcgaaacccttgcagctccagcccatgtcgtgggggggccacgtgcgtcctgggaccccatgggaaaaactacacgtgccgctgcccccaagggtaccagctggactcgagtcagctggactgtgtggacgtggatgaatgccaggactccccctgtgcccaggagtgtgtcaacacccctgggggcttccgctgcgaatgctgggttggctatgagccgggcggtcctggagagggggcctgtcaggatgtggatgagtgtgctctgggtcgctcgccttgcgcccagggctgcaccaacacagatggctcatttcactgctcctgtgaggagggctacgtcctggccggggaggacgggactcagtgccaggacgtggatgagtgtgtgggcccggggggccccctctgcgacagcttgtgcttcaacacacaagggtccttccactgtggctgcctgccaggctgggtgctggccccaaatggggtctcttgcaccatggggcctgtgtctctgggaccaccatctgggccccccgatgaggaggacaaaggagagaaagaagggagcaccgtgccccgtgctgcaacagccagtcccacaaggggccccgagggcacccccaaggctacacccaccacaagtagaccttcgctgtcatctgacgcccccatcacatctgccccactcaagatgctggcccccagtgggtccccaggcgtctggagggagcccagcatccatcacgccacagctgcctctggcccccaggagcctgcaggtggggactcctccgtggccacacaaaacaacgatggcactgacgggcaaaagctgcttttattctacatcctaggcaccgtggtggccatcctactcctgctggccctggctctggggctactggtctatcgcaagcggagagcgaagagggaggagaagaaggagaagaagccccagaatgcggcagacagttactcctgggttccagagcgagctgagagcagggccatggagaaccagtacagtccgacacctgggacagactgctgaaagtgaggtggccctagagacactagagtcaccagccaccatcctcagagctttgaactccccattccaaaggggcacccacatttttttgaaagactggactggaatcttagcaaacaattgtaagtctcctccttaaaggccccttggaacatgcaggtattttctacgggtgtttgatgttcctgaagtggaagctgtgtgttggcgtgccacggtggggatttcgtgactctataatgattgttactccccctcccttttcaaattccaatgtgaccaattccggatcagggtgtgaggaggccggggctaaggggctcccctgaatatcttctctgctcacttccaccatctaagaggaaaaggtgagttgctcatgctgattaggattgaaatgatttgtttctcttcctaggatgaaaactaaatcaattaattattcaattaggtaagaagatctggttttttggtcaaagggaacatgttcggactggaaacatttctttacatttgcattcctccatttcgccagcacaagtcttgctaaatgtgatactgttgacatcctccagaatggccagaagtgcaattaacctcttaggtggcaaggaggcaggaagtgcctctttagttcttacatttctaatagccttgggtttatttgcaaaggaagcttgaaaaatatgagaaaagttgcttgaagtgcattacaggtgtttgtgaagtcacataatctacggggctagggcgagagaggccagggatttgttcacagatacttgaattaattcatccaaatgtactgaggttaccacacacttgactacggatgtgatcaacactaacaaggaaacaaattcaaggacaacctgtctttgagccagggcaggcctcagacaccctgcctgtggccccgcctccacttcatcctgcccggaatgccagtgctccgagctcagacagaggaagccctgcagaaagttccatcaggctgtttcctaaaggatgtgtgaacgggagatgatgcactgtgttttgaaagttgtcattttaaagcattttagcacagttcatagtccacagttgatgcagcatcctgagattttaaatcctgaagtgtgggtggcgcacacaccaagtagggagctagtcaggcagtttgcttaaggaacttttgttctctgtctcttttccttaaaattgggggtaaggagggaaggaagagggaaagagatgactaactaaaatcatttttacagcaaaaactgctcaaagccatttaaattatatcctcattttaaaagttacatttgcaaatatttctccctatgataatgtagtcgatagtgtgcactctttctctctctctctctctctcacacacacacacacacacacacacacacacacagagacacggcaccattctgcctggggcactggaacacattcctgggggtcaccgatggtcagagtcactagaagttacctgagtatctctgggaggcctcatgtctcctgtgggctttttaccaccactgtgcaggagaacagacagaggaaatgtgtctccctccaaggccccaaagcctcagagaaagggtgtttctggttttgccttagcaatgcatcggtctctgaggtgacactctggagtggttgaagggccacaaggtgcagggttaatactcttgccagttttgaaatatagatgctatggttcagattgtttttaatagaaaactaaaggggcaggggaagtgaaaggaaagatggaggttttgtgcggctcgatggggcatttggaacttctttttaaagtcatctcatggtctccagttttcagttggaactctggtgtttaacacttaagggagacaaaggctgtgtccatttggcaaaacttccttggccacgagactctaggtgatgtgtgaagctgggcagtctgtggtgtggagagcagccatctgtctggccattcagaggattctaaagacatggctggatgcgctgctgaccaacatcagcacttaaataaatgcaaatgcaacatttctccctctgggccttgaaaatccttgcccttatcatttggggtgaaggagacatttctgtccttggcttcccacagccccaacgcagtctgtgtatgattcctgggatccaacgagccctcctattttcacagtgttctgattgctctcacagcccaggcccatcgtctgttctctgaatgcagccctgttctcaacaacagggaggtcatggaacccctctgtggaacccacaaggggagaaatgggtgataaagaatccagttcctcaaaaccttccctggcaggctgggtccctctcctgctgggtggtgctttctcttgcacaccactcccaccacggggggagagccagcaacccaaccagacagctcaggttgtgcatctgatggaaaccactgggctcaaacacgtgctttattctcctgtttatttttgctgttactttgaagcatggaaattcttgtttgggggatcttggggctacagtagtgggtaaacaaatgcccaccggccaagaggccattaacaaatcgtccttgtcctgaggggccccagcttgctcgggcgtggcacagtggggaatccaagggtcacagtatggggagaggtgcaccctgccacctgctaacttctcgctagacacagtgtttctgcccaggtgacctgttcagcagcagaacaagccagggccatggggacgggggaagttttcacttggagatggacaccaagacaatgaagatttgttgtccaaataggtcaataattctgggagactcttggaaaaaactgaatatattcaggaccaactctctccctcccctcatcccacatctcaaagcagacaatgtaaagagagaacatctcacacacccagctcgccatgcctactcattcctgaatttcaggtgccatcactgctctttctttcttctttgtcatttgagaaaggatgcaggaggacaattcccacagataatctgaggaatgcagaaaaaccagggcaggacagttatcgacaatgcattagaacttggtgagcatcctctgtagagggactccacccctgctcaacagcttggcttccaggcaagaccaaccacatctggtctctgccttcggtggcccacacacctaagcgtcatcgtcattgccatagcatcatgatgcaacacatctacgtgtagcactacgacgttatgtttgggtaatgtggggatgaactgcatgaggctctgattaaggatgtggggaagtgggctgcggtcactgtcggccttgcaaggccacctggaggcctgtctgttagccagtggtggaggagcaaggcttcaggaagggccagccacatgccatcttccctgcgatcaggcaaaaaagtggaattaaaaagtcaaacctttatatgcatgtgttatgtccattttgcaggatgaactgagtttaaaagaatttttttttctcttcaagttgctttgtcttttccatcctcatcacaagcccttgtttgagtgtcttatccctgagcaatctttcgatggatggagatgatcattaggtacttttgtttcaacctttattcctgtaaatatttctgtgaaaactaggagaacagagatgagatttgacaaaaaaaaattgaattaaaaataacacagtctttttaaaactaacataggaaagcctttcctattatttctcttcttagcttctccattgtctaaatcaggaaaacaggaaaacacagctttctagcagctgcaaaatggtttaatgccccctacatatttccatcaccttgaacaatagctttagcttgggaatctgagatatgatcccagaaaacatctgtctctacttcggctgcaaaacccatggtttaaatctatatggtttgtgcattttctcaactaaaaatagagatgataatccgaattctccatatattcactaatcaaagacactattttcatactagattcctgagacaaatactcactgaagggcttgtttaaaaataaattgtgttttggtctgttcttgtagataatgcccttctattttaggtagaagctctggaatccctttattgtgctgttgctcttatctgcaaggtggcaagcagttcttttcagcagattttgcccactattcctctgagctgaagttctttgcatagatttggcttaagcttgaattagatccctgcaaaggcttgctctgtgatgtcagatgtaattgtaaatgtcagtaatcacttcatgaatgctaaatgagaatgtaagtatttttaaatgtgtgtatttcaaatttgtttgactaattctggaattacaagatttctatgcaggatttaccttcatcctgtgcatgtttcccaaactgtgaggagggaaggctcagagatcgagcttctcctctgagttctaacaaaatggtgctttgagggtcagcctttaggaaggtgcagctttgttgtcctttgagctttctgttatgtgcctatcctaataaactcttaaacacattgattgtgaa

SEQ ID NO: 115789 - DNA, 4324 bp, Homo sapiens
  Payload ID: 2595
  Gene Symbol: CD96
  Gene Name: CD96 molecule
  Uniprot ID: P40200
  ENST ID: ENST00000283285
  CDS Start-End: 132-1889
ataaacagacccaggcgtgtgtggtagagttcgggttttttagcacgaagtgggtggctggagtttgcttgaaaacatcaattgactttgtgatcattacagaaatgctggtgtaaggtgttcagaagacaatggagaaaaaatggaaatactgtgctgtctattacatcatccagatacattttgtcaagggagtttgggaaaaaacagtcaacacagaagaaaatgtttatgctacacttggctctgatgtcaacctgacctgccaaacacagacagtaggcttcttcgtgcagatgcaatggtccaaggtcaccaataagatagacctgattgctgtctatcatccccaatacggcttctactgtgcctatgggagaccctgtgagtcacttgtgactttcacagaaactcctgagaatgggtcaaaatggactctgcacttaaggaatatgtcttgttcagtcagtggaaggtacgagtgtatgcttgttctgtatccagagggcattcagactaaaatctacaaccttctcattcagacacacgttacagcagatgaatggaacagcaaccatacgatagaaatagagataaatcagactctggaaataccatgctttcaaaatagctcctcaaaaatttcatctgagttcacctatgcatggtcggtggaaaacagcagcacggattcttgggtccttctttctaagggtataaaggaggataatggaactcaggaaacacttatctcccaaaatcacctcatcagcaattccacattacttaaagatagagtcaagcttggtacagactacagactccacctctctccagtccaaatcttcgatgatgggcggaagttctcttgccacattagagtcggtcctaacaaaatcttgaggagctccaccacagtcaaggtttttgctaaaccagaaatccctgtgattgtggaaaataactccacggatgtcttggtagagagaagatttacctgcttactaaagaatgtatttcccaaagcaaatatcacatggtttatagatggaagttttcttcatgatgaaaaagaaggaatatatattactaatgaagagagaaaaggcaaagatggatttttggaactgaagtctgttttaacaagggtacatagtaataaaccagcccaatcagacaacttgaccatttggtgtatggctctgtctccagtcccaggaaataaagtgtggaacatctcatcagaaaagatcacttttctcttaggttctgaaatttcctcaacagaccctccactgagtgttacagaatctacccttgacacccaaccttctccagccagcagtgtatctcctgcaagatatccagctacatcttcagtgacccttgtagatgtgagtgccttgaggccaaacaccactcctcaacccagcaattccagtatgactacccgaggcttcaactatccctggacctccagtgggacagataccaaaaaatcagtttcacggatacctagtgaaacatacagttcatccccgtcaggtgcaggctcaacacttcatgacaatgtctttaccagcacagccagagcattttcagaagtccccacaactgccaatggatctacgaaaactaatcacgtccatatcactggtattgtggtcaataagcccaaagatggaatgtcctggccagtgattgtagcagctttactcttttgctgcatgatattgtttggtcttggagtgagaaaatggtgtcagtaccaaaaagaaataatggaaagacctccacctttcaagccaccaccacctcccatcaagtacacttgcattcaagagcccaacgaaagtgatctgccttatcatgagatggagaccctctagtctcgtgagactttgccccatggcagaactctgctggaatcctattgagaaggtagacattgtgctttattaatatagtcgctcttcagccatgcctttgctgcagctgaaatggaagtcagaagtgagtgacctgttttcccagcaactcaccctcttccatctccaaacgcctgaagcttaaccaagagtgagaggatatgtcatgttcacactcaatgcaattcgtagtggttttcttgcttatgtaagaagtacatattagtctgccatctttaaaaaaaaatacagtattttcatttaaattctctgatggagggacaacaatggtttcaactgtatgcccatgcctgatcctcttatttgaacatctatcaacattgtaaactctttgccaaaatcctggggctttgctgcattccctaagataattacaggaaaaagaaaatgtaaaagtgctaacaaggctgccaagtaatggagaagtatggttagtcttcatattgaaattctgttgcttattttcatggaaggaaacagaatactttgcacaggaaccacattttcaatcctccttcactgtcttcctaccatgttcagcccagactcctgccacatggaccaggatgaagagggatcaaagagataattagccaaaaacccagtagcctagaagatacaaaactccactggcctctaaaattatattagccaagagtggtttcatttgagtgccttcgtgtgtatgtccatcaaactggaaccaaactgttttgtaagtaaacaggcagcctaagcccaaccctactttctaattccagttattctctttttcatctggggatttacctgttcatttaatctgcctgttttgatctgttttgaaaaagataaagagcctcaaatcagaccagcactgattaattaaccctgctcctaccaatcttttttaaagcagttgaagcagaatgtataggtgtcagagaagaaacctagtcagccagacgtgctctgtattcagcaatagtttgtgaatgaataaattactaatcctccttgtcgcttgaaaccttcccacactccctgctccaggagggaaaaacagatgttgttgacagatagagtgataggcaaattctgtgtggactttagtcccaaaaggaaactttagttcacttgcagtatgcttatccttgactgcacatgagaatgccttgtgcagagttatttggagattatgtctttttcttaaacaccatggctgtcacacttcagttcaattaaatcagaatgtctgaggagtgagacacaggcatcaacactctcaaatgattcacatgttcagccaaagttgagaaccatcgagcctgtggaagttctttctcatggctcagaatcttaggtaggtgcttaactcttgtggtggccagcctccaagatgagccccagtgttcttgcctcctactattcacatctttatgtggtcccctccaatgctgaatacagatgatttgtgtaacctgaggccaggattaaggggaggcaatcaatgcacctagggaaaaaatttaaggaggtattcacactcagggtcatgcacttgcacaatgttgagaatgagtaccactctcaccattggtatagccaaaaaagcttggaagtgaccaaggctaggtcacaaaatacactgtggcttcttctttgatctctctttgaccatactgacactgggaaaagcccattcccatgccatgaagacaccaaggcagccctattgagaaatctacctgtcgtggccgggcgcagtggctcacgcctgtaatcccagcactttgggaggccgaggtgggtggatcacgaggtcaggagatcgagaccatcctggctaacacagtgaaaccccgtctctactaaaaatacaaaaaattagccgggtgtggtgtcgggcacctgtagtcccagctactcaggaggctgaggcaggagaagggtgggaacccgggaggcagagcttgcagtgagccgagattgtgccactgcacactccaatctgggtgaaagaccgagactccgcctcaaaaaaaaaaaaaaaagaaagaaagaaagaaagaaagaaatctacctgtcaaggaactaaggtattttgctaacaagcaccaacttgccagccatgtaagggagccatcttggaagcagatcctccagcctccagtcaagtcttcagataattgcaacttcagttgatcttttgaccaagacctcaagagagccagaactacccagctaagccttttactaaatttctgaacttctaacactattagataataagtgcttattgtttaacaccattaattttgagtataatttgttacatagcgacagataactatacagctcaacaactagaaaaataaactgtttacctgccttaa

SEQ ID NO: 115790 - DNA, 4516 bp, Homo sapiens
  Payload ID: 2595
  Gene Symbol: CD96
  Gene Name: CD96 molecule
  Uniprot ID: P40200
  ENST ID: ENST00000352690
  CDS Start-End: 241-1950
acacaaatttcagagaacaatttcaacattgttctgtcgaacgttatactcagtcctgaaccacattactttcctgtctacgtttcatttcctgggggcttgccaagtgataaacagacccaggcgtgtgtggtagagttcgggttttttagcacgaagtgggtggctggagtttgcttgaaaacatcaattgactttgtgatcattacagaaatgctggtgtaaggtgttcagaagacaatggagaaaaaatggaaatactgtgctgtctattacatcatccagatacattttgtcaagggagtttgggaaaaaacagtcaacacagaagaaaatgtttatgctacacttggctctgatgtcaacctgacctgccaaacacagacagtaggcttcttcgtgcagatgcaatggtccaaggtcaccaataagatagacctgattgctgtctatcatccccaatacggcttctactgtgcctatgggagaccctgtgagtcacttgtgactttcacagaaactcctgagaatgggtcaaaatggactctgcacttaaggaatatgtcttgttcagtcagtggaaggtacgagtgtatgcttgttctgtatccagagggcattcagactaaaatctacaaccttctcattcagacacacgttacagcagatgaatggaacagcaaccatacgatagaaatagagataaatcagactctggaaataccatgctttcaaaatagctcctcaaaaatttcatctgagttcacctatgcatggtcggtggaggataatggaactcaggaaacacttatctcccaaaatcacctcatcagcaattccacattacttaaagatagagtcaagcttggtacagactacagactccacctctctccagtccaaatcttcgatgatgggcggaagttctcttgccacattagagtcggtcctaacaaaatcttgaggagctccaccacagtcaaggtttttgctaaaccagaaatccctgtgattgtggaaaataactccacggatgtcttggtagagagaagatttacctgcttactaaagaatgtatttcccaaagcaaatatcacatggtttatagatggaagttttcttcatgatgaaaaagaaggaatatatattactaatgaagagagaaaaggcaaagatggatttttggaactgaagtctgttttaacaagggtacatagtaataaaccagcccaatcagacaacttgaccatttggtgtatggctctgtctccagtcccaggaaataaagtgtggaacatctcatcagaaaagatcacttttctcttaggttctgaaatttcctcaacagaccctccactgagtgttacagaatctacccttgacacccaaccttctccagccagcagtgtatctcctgcaagatatccagctacatcttcagtgacccttgtagatgtgagtgccttgaggccaaacaccactcctcaacccagcaattccagtatgactacccgaggcttcaactatccctggacctccagtgggacagataccaaaaaatcagtttcacggatacctagtgaaacatacagttcatccccgtcaggtgcaggctcaacacttcatgacaatgtctttaccagcacagccagagcattttcagaagtccccacaactgccaatggatctacgaaaactaatcacgtccatatcactggtattgtggtcaataagcccaaagatggaatgtcctggccagtgattgtagcagctttactcttttgctgcatgatattgtttggtcttggagtgagaaaatggtgtcagtaccaaaaagaaataatggaaagacctccacctttcaagccaccaccacctcccatcaagtacacttgcattcaagagcccaacgaaagtgatctgccttatcatgagatggagaccctctagtctcgtgagactttgccccatggcagaactctgctggaatcctattgagaaggtagacattgtgctttattaatatagtcgctcttcagccatgcctttgctgcagctgaaatggaagtcagaagtgagtgacctgttttcccagcaactcaccctcttccatctccaaacgcctgaagcttaaccaagagtgagaggatatgtcatgttcacactcaatgcaattcgtagtggttttcttgcttatgtaagaagtacatattagtctgccatctttaaaaaaaaatacagtattttcatttaaattctctgatggagggacaacaatggtttcaactgtatgcccatgcctgatcctcttatttgaacatctatcaacattgtaaactctttgccaaaatcctggggctttgctgcattccctaagataattacaggaaaaagaaaatgtaaaagtgctaacaaggctgccaagtaatggagaagtatggttagtcttcatattgaaattctgttgcttattttcatggaaggaaacagaatactttgcacaggaaccacattttcaatcctccttcactgtcttcctaccatgttcagcccagactcctgccacatggaccaggatgaagagggatcaaagagataattagccaaaaacccagtagcctagaagatacaaaactccactggcctctaaaattatattagccaagagtggtttcatttgagtgccttcgtgtgtatgtccatcaaactggaaccaaactgttttgtaagtaaacaggcagcctaagcccaaccctactttctaattccagttattctctttttcatctggggatttacctgttcatttaatctgcctgttttgatctgttttgaaaaagataaagagcctcaaatcagaccagcactgattaattaaccctgctcctaccaatcttttttaaagcagttgaagcagaatgtataggtgtcagagaagaaacctagtcagccagacgtgctctgtattcagcaatagtttgtgaatgaataaattactaatcctccttgtcgcttgaaaccttcccacactccctgctccaggagggaaaaacagatgttgttgacagatagagtgataggcaaattctgtgtggactttagtcccaaaaggaaactttagttcacttgcagtatgcttatccttgactgcacatgagaatgccttgtgcagagttatttggagattatgtctttttcttaaacaccatggctgtcacacttcagttcaattaaatcagaatgtctgaggagtgagacacaggcatcaacactctcaaatgattcacatgttcagccaaagttgagaaccatcgagcctgtggaagttctttctcatggctcagaatcttaggtaggtgcttaactcttgtggtggccagcctccaagatgagccccagtgttcttgcctcctactattcacatctttatgtggtcccctccaatgctgaatacagatgatttgtgtaacctgaggccaggattaaggggaggcaatcaatgcacctagggaaaaaatttaaggaggtattcacactcagggtcatgcacttgcacaatgttgagaatgagtaccactctcaccattggtatagccaaaaaagcttggaagtgaccaaggctaggtcacaaaatacactgtggcttcttctttgatctctctttgaccatactgacactgggaaaagcccattcccatgccatgaagacaccaaggcagccctattgagaaatctacctgtcgtggccgggcgcagtggctcacgcctgtaatcccagcactttgggaggccgaggtgggtggatcacgaggtcaggagatcgagaccatcctggctaacacagtgaaaccccgtctctactaaaaatacaaaaaattagccgggtgtggtgtcgggcacctgtagtcccagctactcaggaggctgaggcaggagaagggtgggaacccgggaggcagagcttgcagtgagccgagattgtgccactgcacactccaatctgggtgaaagaccgagactccgcctcaaaaaaaaaaaaaaaagaaagaaagaaagaaagaaagaaatctacctgtcaaggaactaaggtattttgctaacaagcaccaacttgccagccatgtaagggagccatcttggaagcagatcctccagcctccagtcaagtcttcagataattgcaacttcagttgatcttttgaccaagacctcaagagagccagaactacccagctaagccttttactaaatttctgaacttctaacactattagataataagtgcttattgtttaacaccattaattttgagtataatttgttacatagcgacagataactatacagctcaacaactagaaaaataaactgtttacctgccttaattatttatctttagttccttattagttctcaagaaacaaatgctagcttcatatgtatggctgttgctttgcttcatgtgtatggctatttgtatttaacaagacttaatcatcagtaatttgtatacaaa

SEQ ID NO: 115791 - DNA, 1565 bp, Homo sapiens
  Payload ID: 2595
  Gene Symbol: CD96
  Gene Name: CD96 molecule
  ENST ID: ENST00000438817
  CDS Start-End: 100-1308
gggttttttagcacgaagtgggtggctggagtttgcttgaaaacatcaattgactttgtgatcattacagaaatgctggtgtaaggtgttcagaagacaatggagaaaaaatggaaatactgtgctgtctattacatcatccagatacattttgtcaagggagtttgggaaaaaacagtcaacacagaagaaaatgtttatgctacacttggctctgatgtcaacctgacctgccaaacacagacagtaggcttcttcgtgcagatgcaatggtccaaggtcaccaataagatagacctgattgctgtctatcatccccaatacggcttctactgtgcctatgggagaccctgtgagtcacttgtgactttcacagaaactcctgagaatgggtcaaaatggactctgcacttaaggaatatgtcttgttcagtcagtggaaggtacgagtgtatgcttgttctgtatccagagggcattcagactaaaatctacaaccttctcattcagacacacgttacagcagatgaatggaacagcaaccatacgatagaaatagagataaatcagactctggaaataccatgctttcaaaatagctcctcaaaaatttcatctgagttcacctatgcatggtcggtggaggataatggaactcaggaaacacttatctcccaaaatcacctcatcagcaattccacattacttaaagatagagtcaagcttggtacagactacagactccacctctctccagtccaaatcttcgatgatgggcggaagttctcttgccacattagagtcggtcctaacaaaatcttgaggagctccaccacagtcaaggtttttgctaaaccagaaatccctgtgattgtggaaaataactccacggatgtcttggtagagagaagatttacctgcttactaaagaatgtatttcccaaagcaaatatcacatggtttatagatggaagttttcttcatgatgaaaaagaaggaatatatattactaatgaagagagaaaaggcaaagatggatttttggaactgaagtctgttttaacaagggtacatagtaataaaccagcccaatcagacaacttgaccatttggtgtatggctctgtctccagtcccaggaaataaagtgtggaacatctcatcagaaaagatcacttttctcttaggttctgaaatttcctcaacagaccctccactgagtgttacagaatctacccttgacacccaaccttctccagccagcagtgtatctcctgcaagtaagaatgttttcacactgagctattgatttaaccaagcagattgataacgataaaatttcagcaaacttgcatcattcatgcctgtttcttagctatgacttttttggggctgaaattgggttttattttttaacagctttattgagatataattcacgtcacattaacttgcccatttaaaatgtatgatctaatggtttttagtatgttcacagacttgtacaaccatgactacagccaatttcagaacattttcatcatctaataaagaaactcctaaaca

SEQ ID NO: 115792 - DNA, 500 bp, Homo sapiens
  Payload ID: 2595
  Gene Symbol: CD96
  Gene Name: CD96 molecule
  ENST ID: ENST00000465428
  CDS Start-End: 1-439
ggaaataccatgctttcaaaatagctcctcaaaaatttcatctgagttcacctatgcatggtcggtggaggataatggaactcaggaaacacttatctcccaaaatcacctcatcagcaattccacattacttaaagatagagtcaagcttggtacagactacagactccacctctctccagtccaaatcttcgatgatgggcggaagttctcttgccacattagagtcggtcctaacaaaatcttgaggagctccaccacagtcaaggtttttggtaagggcttttgttctacagactcactggcatcctcctgtctcctgccctgctcttccttgaagaggaagcaccctattatgctgcagagcagccacatgtgggtaacagtgctggagtctgtttccctggatacttgtcattcttgttgggcagggggatgagggtaggatgctaaagaatgatgattctgttaacagaataaaatcatacagaagccaataa

SEQ ID NO: 115793 - DNA, 2039 bp, Homo sapiens
  Payload ID: 2595
  Gene Symbol: CD96
  Gene Name: CD96 molecule
  ENST ID: ENST00000494798
  CDS Start-End: 57-1763
catcaattgactttgtgatcattacagaaatgctggtgtaaggtgttcagaagacaatggagaaaaaatggaaatactgtgctgtctattacatcatccagatacattttgtcaagggagtttgggaaaaaacagtcaacacagaagaaaatgtttatgctacacttggctctgatgtcaacctgacctgccaaacacagacagtaggcttcttcgtgcagatgcaatggtccaaggtcaccaataagatagacctgattgctgtctatcatccccaatacggcttctactgtgcctatgggagaccctgtgagtcacttgtgactttcacagaaactcctgagaatgggtcaaaatggactctgcacttaaggaatatgtcttgttcagtcagtggaaggtacgagtgtatgcttgttctgtatccagagggcattcagactaaaatctacaaccttctcattcagacacacgttacagcagatgaatggaacagcaaccatacgatagaaatagagataaatcagactctggaaataccatgctttcaaaatagctcctcaaaaatttcatctgagttcacctatgcatggtcggtggaggataatggaactcaggaaacacttatctcccaaaatcacctcatcagcaattccacattacttaaagatagagtcaagcttggtacagactacagactccacctctctccagtccaaatcttcgatgatgggcggaagttctcttgccacattagagtcggtcctaacaaaatcttgaggagctccaccacagtcaaggtttttgctaaaccagaaatccctgtgattgtggaaaataactccacggatgtcttggtagagagaagatttacctgcttactaaagaatgtatttcccaaagcaaatatcacatggtttatagatggaagttttcttcatgatgaaaaagaaggaatatatattactaatgaagagagaaaaggcaaagatggatttttggaactgaagtctgttttaacaagggtacatagtaataaaccagcccaatcagacaacttgaccatttggtgtatggctctgtctccagtcccaggaaataaagtgtggaacatctcatcagaaaagatcacttttctcttaggttctgaaatttcctcaacagaccctccactgagtgttacagaatctacccttgacacccaaccttctccagccagcagtgtatctcctgcaagatatccagctacatcttcagtgacccttgtagatgtgagtgccttgaggccaaacaccactcctcaacccagcaattccagtatgactacccgaggcttcaactatccctggacctccagtgggacagataccaaaaaattttcacggatacctagtgaaacatacagttcatccccgtcaggtgcaggctcaacacttcatgacaatgtctttaccagcacagccagagcattttcagaagtccccacaactgccaatggatctacgaaaactaatcacgtccatatcactggtattgtggtcaataagcccaaagatggaatgtcctggccagtgattgtagcagctttactcttttgctgcatgatattgtttggtcttggagtgagaaaatggtgtcagtaccaaaaagaaataatggaaagacctccacctttcaagccaccaccacctcccatcaagtacacttgcattcaagagcccaacgaaagtgatctgccttatcatgagatggagaccctctagtctcgtgagactttgccccatggcagaactctgctggaatcctattgagaaggtattggctgggatccaccaaaacttcaatcaattttcctttcttaaggagataattggagccctttgattttcccaaaactccagagcaaacttaccctctcaccgttgaaccatttcatatcaaagaaaactaagctgtgtttctccagactccacccaagaaagagactttcattcctccctcaaacccttgggcagtgttttttgttgctactttagtag

SEQ ID NO: 115794 - DNA, 573 bp, Homo sapiens
  Payload ID: 2595
  Gene Symbol: CD96
  Gene Name: CD96 molecule
  ENST ID: ENST00000488054
  CDS Start-End: 66-422
gcttgaaaacatcaattgactttgtgatcattacagaaatgctggtgtaaggtgttcagaagacaatggagaaaaaatggaaatactgtgctgtctattacatcatccagatacattttgtcaagggagtttgggaaaaaacagtcaacacagaagaaaatgtttatgctacacttggctctgatgtcaacctgacctgccaaacacagacagtaggcttcttcgtgcagatgcaatggtccaaggtcaccaataagatagacctgattgctgtctatcatccccaatacggcttctactgtgcctatgggagaccctgtgagtcacttgtgactttcacagaaactcctgagaatgggtcaaaatggactctgcacttaaggaatatgtcttgttcagtcagtggaagttacagcagatgaatggaacagcaaccatacgatagaaatagagataaatcagactctggaaataccatgctttcaaaatagctcctcaaaaatttcatctgagttcacctatgcatggtcggtggaaaacagcagcacggattcttgggtccttctttctaag

SEQ ID NO: 115795 - DNA, 546 bp, Homo sapiens
  Payload ID: 2595
  Gene Symbol: CD96
  Gene Name: CD96 molecule
  ENST ID: ENST00000460744
  CDS Start-End: 493-546
tctccctgtggtctttccccagctccaccggcagccctccctaaggactcctgcgagacaaagacagaaatggcttccctgaggactgagagtggttacagggctcttcctgctgcttcctctactcctgtatttcacttggctctctaaatttgtttcagctccagagcccagtgcagctgaaatcctagaagacctcacaactgtgttaaattttcacagctgaccacttaaaggcagttctcttcaaataagagagtctcactctctcacccaggctggagtgcggtggcacgatctcagctcactgcaacatctgcctcccaggttcaagagattctcctgcctcacttacatagatgagtttgataacagtcaagctgaaactaaaaagacgcagcttgactgacacagagatcctgaataagagactctttggatactgaaaagtctcttaaataagaaatgctggtgtaaggtgttcagaagacaatggagaaaaaatggaaatactgtgctgtctattacatcatccagatacatttt

SEQ ID NO: 115796 - DNA, 756 bp, Homo sapiens
  Payload ID: 2596
  Gene Symbol: CD99
  Gene Name: CD99 molecule
  ENST ID: ENST00000381177
  CDS Start-End: 1-186
accagaaaaagaagctatgcttcaaagaaaatgaaagagcttccatgtgcgtgttcctcagtgtttagggagaagaaagcaacccttaaaatagaggaaaatgaagctgcttggattaccctgttgaagttcatctctgcctgtgccatgcatgaaaaaatactggcaaagtcttcacttacatgagtgttagactccatgttcccagtgggtctcggggttcagaactgagtgctctcatccaagcaataggagcgtcgacctcaggaaagcccaagtgttttgtgtgtattttgaggagtgggttatctgttgcactgagcctctctgtgtattttcttcttcttttcagcagaacaaggggaggtggacatggagagccaccggaatgccaacgcagagccagctgttcagcgtactcttttagagaaatagaagattgtcggcagaaacagcccaggcgttggcagcagggttagaacagctgcctgaggctcctccctgaaggacacctgcctgagagcagagatggaggccttctgttcacggcggattctttgttttaatcttgcgatgtgctttgcttgttgctgggcggatgatgtttactaacgatgaattttacatccaaagggggataggcacttggacccccattctccaaggcccgggggggcggtttcccatgggatgtgaaaggctggccattattaagtccctgtaactcaaatgtcaaccccaccgaggcaccccccc

SEQ ID NO: 115797 - DNA, 530 bp, Homo sapiens
  Payload ID: 2596
  Gene Symbol: CD99
  Gene Name: CD99 molecule
  ENST ID: ENST00000381180
  CDS Start-End: 1-231
atggcccgcggggctgcgctggcgctgctgctcttcggcctgctgggtgttctggtcgccgccccggggtttggggacctgcgtcttcaggccgcgcgcggaggccgccctggagttgcctgtcacagccacgccctgcgtcccgggcctaaatttggaatcgctaggagcctgagacccgggtggtggggggaagggaaggaaaagttagaaaaaaactttgagccctgaaaatgttcaaaaatactctgtggatgcgggctccgggaatttcagcgcgtgctgtgcgccaagcaacacggggcgcagaaagaaacgtgtgcttaccaaattgtccatctgcggcggtggagaattcggaaaacagaaaaagtgggcagggaagaaagagccacggtcaccctcccacgccctaaaccgggcctatttctaattattactttaatcatgtttttctgtttccctccctttgaaacggaaacggagaccctgccggatgtggtatgttataaattcttttttcatgttat

SEQ ID NO: 115798 - DNA, 918 bp, Homo sapiens
  Payload ID: 2596
  Gene Symbol: CD99
  Gene Name: CD99 molecule
  ENST ID: ENST00000381184
  CDS Start-End: 82-615
ggcccgtgggggagtatctgtcctgccgccttcgcccacgccctgcactccgggaccgtccctgcgcgctctgggcgcaccatggcccgcggggctgcgctggcgctgctgctcttcggcctgctgggtgttctggtcgccgccccggatggtggtttcgatttatccgatgcccttcctgacaatgaaaacaagaaacccactgcaatccccaagaaacccagtgctggggatgactttgacttaggagatgctgttgttgatggagaaaatgacgacccacgaccaccgaacccacccaaaccgatgccaaatccaaaccccaaccaccctagttcctccggtagcttttcagatgctgaccttgcggatggcgtttcaggtggagaaggaaaaggaggcagtgatggtggaggcagccacaggaaagaaggggaagaggccgacgccccaggcgtgatccccgggattgtgggggctgtcgtggtcgccgtggctggagccatctctagcttcattgcttaccagaaaaagaagctatgcttcaaagaaaatggtcagctggcaggctctttgggaccttgtattgggatccgccgtgaagctgatggctgaagacctaggggtgagcagagaacccagcccaggcctgcggagcgtcctgaccgtaatcgttttatctgctaagacatagccttaaagcaaacccttccatctgccgctcccctcgccctgctggcaaattcccaccacgatgggattctcaatcacatggcggattctctgccttcagttccatatgcttttgcctttctggatgcacagaagctcattatagcaaatcatatttctgcataagagcttcagaaaatgaagagaaatgcagatattttcttttaaacatgaatctaacagaaa

SEQ ID NO: 115799 - DNA, 892 bp, Homo sapiens
  Payload ID: 2596
  Gene Symbol: CD99
  Gene Name: CD99 molecule
  Uniprot ID: P14209
  ENST ID: ENST00000381187
  CDS Start-End: 86-595
acccggcccgtgggggagtatctgtcctgccgccttcgcccacgccctgcactccgggaccgtccctgcgcgctctgggcgcaccatggcccgcggggctgcgctggcgctgctgctcttcggcctgctgggtgttctggtcgccgccccggatggtggtttcgatttatccgatgcccttcctggggatgactttgacttaggagatgctgttgttgatggagaaaatgacgacccacgaccaccgaacccacccaaaccgatgccaaatccaaaccccaaccaccctagttcctccggtagcttttcagatgctgaccttgcggatggcgtttcaggtggagaaggaaaaggaggcagtgatggtggaggcagccacaggaaagaaggggaagaggccgacgccccaggcgtgatccccgggattgtgggggctgtcgtggtcgccgtggctggagccatctctagcttcattgcttaccagaaaaagaagctatgcttcaaagaaaatgcagaacaaggggaggtggacatggagagccaccggaatgccaacgcagagccagctgttcagcgtactcttttagagaaatagaagattgtcggcagaaacagcccaggcgttggcagcagggttagaacagctgcctgaggctcctccctgaaggacacctgcctgagagcagagatggaggccttctgttcacggcggattctttgttttaatcttgcgatgtgctttgcttgttgctgggcggatgatgtttactaacgatgaattttacatccaaagggggataggcacttggacccccattctccaaggcccgggggggcggtttcccatgggatgtgaaaggctggccattattaagtccctgtaactcaaatg

SEQ ID NO: 115800 - DNA, 1245 bp, Homo sapiens
  Payload ID: 2596
  Gene Symbol: CD99
  Gene Name: CD99 molecule
  Uniprot ID: P14209
  ENST ID: ENST00000381192
  CDS Start-End: 183-740
gcgcgcgtggaggccggggcggggcgggcgcagccggcgctgagcttgcagggccgctcccctcacccgcccccttcgagtccccgggcttcgccccacccggcccgtgggggagtatctgtcctgccgccttcgcccacgccctgcactccgggaccgtccctgcgcgctctgggcgcaccatggcccgcggggctgcgctggcgctgctgctcttcggcctgctgggtgttctggtcgccgccccggatggtggtttcgatttatccgatgcccttcctgacaatgaaaacaagaaacccactgcaatccccaagaaacccagtgctggggatgactttgacttaggagatgctgttgttgatggagaaaatgacgacccacgaccaccgaacccacccaaaccgatgccaaatccaaaccccaaccaccctagttcctccggtagcttttcagatgctgaccttgcggatggcgtttcaggtggagaaggaaaaggaggcagtgatggtggaggcagccacaggaaagaaggggaagaggccgacgccccaggcgtgatccccgggattgtgggggctgtcgtggtcgccgtggctggagccatctctagcttcattgcttaccagaaaaagaagctatgcttcaaagaaaatgcagaacaaggggaggtggacatggagagccaccggaatgccaacgcagagccagctgttcagcgtactcttttagagaaatagaagattgtcggcagaaacagcccaggcgttggcagcagggttagaacagctgcctgaggctcctccctgaaggacacctgcctgagagcagagatggaggccttctgttcacggcggattctttgttttaatcttgcgatgtgctttgcttgttgctgggcggatgatgtttactaacgatgaattttacatccaaagggggataggcacttggacccccattctccaaggcccgggggggcggtttcccatgggatgtgaaaggctggccattattaagtccctgtaactcaaatgtcaaccccaccgaggcacccccccgtcccccagaatcttggctgtttacaaatcacgtgtccatcgagcacgtctgaaacccctggtagccccgacttctttttaattaaaataaggtaagcccttcaatttgtttcttcaatatttctttcatttgtagggatatttgtttttcatatcagactaataaaaagaaattagaaaccaa

SEQ ID NO: 115801 - DNA, 604 bp, Homo sapiens
  Payload ID: 2596
  Gene Symbol: CD99
  Gene Name: CD99 molecule
  ENST ID: ENST00000449611
  CDS Start-End: 1-604
cggcgttgggggcgccccgcggggacacccggagcctcctccctgcccggcaggacgcgctgtgcccacgggggcccaggcccggaggaggcgcccactttctccccaacgcttttcctggagccgttccagagagaaaagtcagcgtttgttgtcggagttgcaaactcttacatgtggggcggccttgggagagatggtggtttcgatttatccgatgcccttcctgacaatgaaaacaagaaacccactgcaatccccaagaaacccagtgctggggatgactttgacttaggagatgctgttgttgatggagaaaatgacgacccacgaccaccgaacccacccaaaccgatgccaaatccaaaccccaaccaccctagttcctccggtagcttttcagatgctgaccttgcggatggcgtttcaggtggagaaggaaaaggaggcagtgatggtggaggcagccacaggaaagaaggggaagaggccgacgccccaggcgtgatccccgggattgtgggggctgtcgtggtcgccgtggctggagccatctctagcttcattgcttaccagaaaaagaagctatgcttcaaagaaaatg

SEQ ID NO: 115802 - DNA, 1243 bp, Homo sapiens
  Payload ID: 2596
  Gene Symbol: CD99
  Gene Name: CD99 molecule
  Uniprot ID: P14209
  ENST ID: ENST00000611428
  CDS Start-End: 175-657
ggaggccggggcggggcgggcgcagccggcgctgagcttgcagggccgctcccctcacccgcccccttcgagtccccgggcttcgccccacccggcccgtgggggagtatctgtcctgccgccttcgcccacgccctgcactccgggaccgtccctgcgcgctctgggcgcaccatggcccgcggggctgcgctggcgctgctgctcttcggcctgctgggtgttctggtcgccgccccggatggtggtttcgatttatccgatgcccttcctgacaatgaaaacaagaaacccactgcaatccccaagaaacccagtgctggggatgactttgacttaggagatgctgttgttgatggagaaaatgacgacccacgaccaccgaacccacccaaaccgatgccaaatccaaaccccaaccaccctagttcctccggtagcttttcagatgctgaccttgcggatggcgtttcaggtggagaaggaaaaggaggcagtgatggtggaggcagccacaggaaagaaggggaagaggccgacgccccaggcgtgatccccgggattgtgggggctgtcgtggtcgccgtggctggagccatctctagcttcattgcttaccagaaaaagaagctatgcttcaaagaaaatgatggctgaagacctagggaacaaggggaggtggacatggagagccaccggaatgccaacgcagagccagctgttcagcgtactcttttagagaaatagaagattgtcggcagaaacagcccaggcgttggcagcagggttagaacagctgcctgaggctcctccctgaaggacacctgcctgagagcagagatggaggccttctgttcacggcggattctttgttttaatcttgcgatgtgctttgcttgttgctgggcggatgatgtttactaacgatgaattttacatccaaagggggataggcacttggacccccattctccaaggcccgggggggcggtttcccatgggatgtgaaaggctggccattattaagtccctgtaactcaaatgtcaaccccaccgaggcacccccccgtcccccagaatcttggctgtttacaaatcacgtgtccatcgagcacgtctgaaacccctggtagccccgacttctttttaattaaaataaggtaagcccttcaatttgtttcttcaatatttctttcatttgtagggatatttgtttttcatatcagactaataaaaagaaatt

SEQ ID NO: 115803 - DNA, 1089 bp, Homo sapiens
  Payload ID: 2596
  Gene Symbol: CD99
  Gene Name: CD99 molecule
  ENST ID: ENST00000624481
  CDS Start-End: 49-603
gcccacgccctgcactccgggaccgtccctgcgcgctctgggcgcaccatggcccgcggggctgcgctggcgctgctgctcttcggcctgctgggtgttctggtcgccgccccggatggtggtttcgatttatccgatgcccttcctgacaatgaaaacaagaaacccactgcaatccccaagaaacccagtgctggggatgactttgacttaggagatgctgttgttgatggagaaaatgacgacccacgaccaccgaacccacccaaaccgatgccaaatccaaaccccaaccaccctagttcctccggtagcttttcagatgctgaccttgcggatggcgtttcaggtggagaaggaaaaggaggcagtgatggtggaggcagccacaggaaagaaggggaagaggccgacgccccaggcgtgatccccgggattgtgggggctgtcgtggtcgccgtggctggagccatctctagcttcattgcttaccagaaaaagaagctatgcttcaaagaaaatgaacaaggggaggtggacatggagagccaccggaatgccaacgcagagccagctgttcagcgtactcttttagagaaatagaagattgtcggcagaaacagcccaggcgttggcagcagggttagaacagctgcctgaggctcctccctgaaggacacctgcctgagagcagagatggaggccttctgttcacggcggattctttgttttaatcttgcgatgtgctttgcttgttgctgggcggatgatgtttactaacgatgaattttacatccaaagggggataggcacttggacccccattctccaaggcccgggggggcggtttcccatgggatgtgaaaggctggccattattaagtccctgtaactcaaatgtcaaccccaccgaggcacccccccgtcccccagaatcttggctgtttacaaatcacgtgtccatcgagcacgtctgaaacccctggtagccccgacttctttttaattaaaataaggtaagcccttcaatttgtttcttcaatatttctttcatttgtagggatatttgtttttcatatcagactaata

SEQ ID NO: 115804 - DNA, 573 bp, Homo sapiens
  Payload ID: 2596
  Gene Symbol: CD99
  Gene Name: CD99 molecule
  Uniprot ID: P14209
  ENST ID: ENST00000623253
  CDS Start-End: 1-483
atggcccgcggggctgcgctggcgctgctgctcttcggcctgctgggtgttctggtcgccgccccggatggtggtttcgatttatccgatgcccttcctgacaatgaaaacaagaaacccactgcaatccccaagaaacccagtgctggggatgactttgacttaggagatgctgttgttgatggagaaaatgacgacccacgaccaccgaacccacccaaaccgatgccaaatccaaaccccaaccaccctagttcctccggtagcttttcagatgctgaccttgcggatggcgtttcaggtggagaaggaaaaggaggcagtgatggtggaggcagccacaggaaagaaggggaagaggccgacgccccaggcgtgatccccgggattgtgggggctgtcgtggtcgccgtggctggagccatctctagcttcattgcttaccagaaaaagaagctatgcttcaaagaaaatgatggctgaagacctagggaacaaggggaggtggacatggagagccaccggaatgccaacgcagagccagctgttcagcgtactcttttagagaaatag

SEQ ID NO: 115805 - DNA, 1278 bp, Homo sapiens
  Payload ID: 2597
  Gene Symbol: CD99L2
  Gene Name: CD99 molecule-like 2
  Uniprot ID: Q8TCZ2
  ENST ID: ENST00000355149
  CDS Start-End: 39-611
aactgtgctcctccggggccctccgcctgctcccagccatggtggcctggcgctcggcgttccttgtctgcctcgctttctccttggccaccctggtccagcgaggatctggggactttgatgattttaacctggaggatgcagtgaaagaaacttcctcagtaaagcgaaatgattttgacttggctgatgccctggatgatcgaaatgatcgagatgatggccgcaggaaaccaattgctggaggaggaggtttttcagacaaggatcttgaagacatagtagggggtggagaatacaaacctgacaagggtaaaggtgatggccggtacggcagcaatgacgaccctggatctggcatggtggcagagcctggcaccattgccggggtggccagcgccctggccatggccctcatcggtgccgtctccagctacatctcctaccagcagaagaagttctgcttcagcattcagcagggtctcaacgcagactacgtgaagggagagaacctggaagccgtggtatgtgaggaaccccaagtgaaatactccacgttgcacacgcagtctgcagagccgccgccgccgcccgaaccagcccggatctgagggccctgtccagctgcaggcatgcacaatggtgccaccgcttgtcacccggctccccccaccccttcatttggacccgcagctgctgtgctgctctgtgccatcggctccttgttggtctgagtttcccggatgagctctgggtgtttgtgagtttggtttctctgccctgccccaagcgtgctgagacttggtgccgaaattcaagagccagctctgatagaaagccagcaccagcctcgggagctgctgagccaccaactcccaaagccagcctgcctccagctttactgagcacaggatgcgggggccaagatgatgctgaggcctgatgacatttatgcttaggggacaagagtttgaactcaagggactgtgacccctgcacactggagtggctcattgtggcaggtttctgccaatagacagcccctgacagtggcctcaaggagctgcaggtggggggctcagcctgcacccacttggagcccctgcaaggagcgaaccggtcagcaccaagtaacaccacacacacgcagcacccaggatgatggtttcacttcagtcttccccatcccaggttttatgttgctgggcttccggagagccggtccaagcggaggctttcagtgatttaagtacaaacatgcatctcgtgatagtcctg

SEQ ID NO: 115806 - DNA, 3604 bp, Homo sapiens
  Payload ID: 2597
  Gene Symbol: CD99L2
  Gene Name: CD99 molecule-like 2
  Uniprot ID: Q8TCZ2
  ENST ID: ENST00000370377
  CDS Start-End: 119-907
gctttgggcgggaccctgcagaggcggcggggctcctcctcccgctcctcctcggcctccccttcgggcgctctcgcgctaactgtgctcctccggggccctccgcctgctcccagccatggtggcctggcgctcggcgttccttgtctgcctcgctttctccttggccaccctggtccagcgaggatctggggactttgatgattttaacctggaggatgcagtgaaagaaacttcctcagtaaagcagccatgggaccacaccaccaccaccacaaccaataggccaggaaccaccagagctccggcaaaacctccaggtagtggattggacttggctgatgctttggatgatcaagatgatggccgcaggaaaccgggtataggaggaagagagagatggaaccatgtaaccaccacgaccaagaggccagtaaccaccagagctccagcaaatactttaggaaatgattttgacttggctgatgccctggatgatcgaaatgatcgagatgatggccgcaggaaaccaattgctggaggaggaggtttttcagacaaggatcttgaagacatagtagggggtggagaatacaaacctgacaagggtaaaggtgatggccggtacggcagcaatgacgaccctggatctggcatggtggcagagcctggcaccattgccggggtggccagcgccctggccatggccctcatcggtgccgtctccagctacatctcctaccagcagaagaagttctgcttcagcattcagcagggtctcaacgcagactacgtgaagggagagaacctggaagccgtggtatgtgaggaaccccaagtgaaatactccacgttgcacacgcagtctgcagagccgccgccgccgcccgaaccagcccggatctgagggccctgtccagctgcaggcatgcacaatggtgccaccgcttgtcacccggctccccccaccccttcatttggacccgcagctgctgtgctgctctgtgccatcggctccttgttggtctgagtttcccggatgagctctgggtgtttgtgagtttggtttctctgccctgccccaagcgtgctgagacttggtgccgaaattcaagagccagctctgatagaaagccagcaccagcctcgggagctgctgagccaccaactcccaaagccagcctgcctccagctttactgagcacaggatgcgggggccaagatgatgctgaggcctgatgacatttatgcttaggggacaagagtttgaactcaagggactgtgacccctgcacactggagtggctcattgtggcaggtttctgccaatagacagcccctgacagtggcctcaaggagctgcaggtggggggctcagcctgcacccacttggagcccctgcaaggagcgaaccggtcagcaccaagtaacaccacacacacgcagcacccaggatgatggtttcacttcagtcttccccatcccaggttttatgttgctgggcttccggagagccggtccaagcggaggctttcagtgatttaagtacaaacatgcatctcgtgatagtcctgccttgagagcttaggaatcttccggataagtatgaagcaattcgtaggcctgtttcccatctgattccatagggggctgggtgtggccttcgggttgacatgagaaaggtctttagcaatcatttctgcaccggagatgagttttatcctgtgttggggagaggtgctcaccctccaccctgtgtccctgttttggtagcaagagtgaccgatgtcaagaacgagcatcaaagccagaatcctgcttgtttgcttaaaaatgtaattgggggcggcgggggaggagaggggaaagagacattcgcttggtttagtgaaacgcaggtgactttgtagctctgtggtcagcctacttgtctgctctgagggagagtgcgtggggagccatgctcaccgtggcaaacacaggaaccccatgactcgcccctcacctggcgtggagctgcctggtttgggctggagcagagctggtttcctggaatgttcctttggcccacatatggttctgtcccggtgagctctgttgtcagaggctcacgggacagaaccacatgctagggtctagggcccctgtctactgatagtcagtttgctgtgtcagaaagcacttctgaaagcagatatgagtcaccagacaggcaggatcttacaaaactcacgggcctctttggtctgcatgatggccccatgcgtttcataggctgtccactgagcgggattgtctgctgagtgggatgagccaactccagtttcttaaggaaaccactggaatctgcagcccccacatgcatctgtctaacgcatgcctcgtgttcgttttgcaaacatgcctgtggtggagggtggtcagttgtagccctgtgcgtctcaaggctgccttgtgaggccattcccagtgcgtgcccttgagctccttaccaccccttttcctgctcggccctttaatccctgacagacctggactgtgtggctgaagggggacctgcagcactgcagaaatgcctctgcgtggtgccatgaaggaaagaaaccttggcctggtctcgagaagcttcccatgcttcaggaagttagtaagggtggggtggcttgcaggattggcctgtttccagggcctcccacactcattggccagattgtgaactttgtcaggcttgtccctccctgataccaagtatgtcgagaaccgatggccccaccctctggctggtgctgggccggaggtggctatggaggattttggcatgcgtggcctgtcgccacctggacagcgtgacctcaggggttgtccactttacctttatggtgaggcctgtcggatggctaagtccttgaaaccctagagctgtgacgtagaatatgtgctgtctgtgagaccgtgttcccaggagcactgactgcagttgagagagacccattttgctctcccttaccgccccccgccccgggtgctttctgcacaaagcctagagcctggcactcaagcccaccggtggcagctcctagtgactggacatgcctggaagacccctcagccttctgtttgcagaacgttcatttcaggagcttctccttcccacagacatcttacacttgctcgacactgccacctgcagaagcctggcgggctctggtcaccatgtgtctatctgaaggttgcactggccagcatgggcctgtcccaagcgagaggggagacacagtggactgaaaggactggttgaaagtggccaatctctatcagcttaatttggcagagaaaatttgtaacaactctgagcacatgctgggtgaagtcacagctcaaggaaagataaagctgggcggaaggaggtgtgcgtggcttctggggtgggacccagaggggaggctctgggacaggggctggggttcagtgccagggccctgaggaagaaatggggactgatctcaaaattccagaattccctgtacatctgttcacgtgcttgtgtccaggtgtgacttgtaaactgtctagtgtttgcattaaataaaatggcaccgagcag

SEQ ID NO: 115807 - DNA, 965 bp, Homo sapiens
  Payload ID: 2597
  Gene Symbol: CD99L2
  Gene Name: CD99 molecule-like 2
  ENST ID: ENST00000418547
  CDS Start-End: 1-473
aaacttcctcagtaaagcagccatgggaccacaccaccaccaccacaaccaataggccaggaaccaccagagctccggcaaaacctccaggtagtggattggacttggctgatgctttggatgatcaagatgatggccgcaggaaaccgggtataggaggaagagagagatggaaccatgtaaccaccacgaccaagaggccagtaaccaccagagctccagcaaatactttaggaaatgattttgacttggctgatgccctggatgatcgaaatgatcgagatgatggccgcaggaaaccaattgctggaggaggaggtttttcagacaaggatcttgaagacatagtagggggtggagaatacaaacctgacaagggtaaaggtgatggccggtacggcagcaatgacgaccctggatctggtgggtttctgaatcctgaggctcctgttggccatgtgaaaggaaaatgaatctcaggaccccaaaatcactaagccaagggaaaagtcaagctagaaactgcatcaggcaaacgtgcctcccattctactcctaaataagatagctgcaaagatggaaaaagctgcacgcctccctcacaatttgcctacaaagaaatttcttatgggcctcaatatctttaccctaaaacagttctgtgaatttcaccctggcaatacaaactgatagctgatctttacagagggagagagagccgtccctctgctcccctgatacaaatgcatctctggttgcttcctctgcccaattgcttatgtaaaaatgcaggttcactgagccagacaaaattgtgtattcagtgaaaggctgatcaaggactcaaaagaatgcaaccttttgtctctttctcttatctccctatgacctggaagcaccccacctctacccctgctttgagttgtcccacctttctggaccaaaccaatgtacgtcttacacat

SEQ ID NO: 115808 - DNA, 3493 bp, Homo sapiens
  Payload ID: 2597
  Gene Symbol: CD99L2
  Gene Name: CD99 molecule-like 2
  Uniprot ID: Q8TCZ2
  ENST ID: ENST00000437787
  CDS Start-End: 229-798
gcagcctcgccccgccccccggcctaaccccagcccaggcgccctcaggcgccggctctctagcgcgcccgacctccatcttcccggggccgcgccgcgcgcgcgcgcgggctttgggcgggaccctgcagaggcggcggggctcctcctcccgctcctcctcggcctccccttcgggcgctctcgcgctaactgtgctcctccggggccctccgcctgctcccagccatggtggcctggcgctcggcgttccttgtctgcctcgctttctccttggccaccctggtccagcgaggatctggggactttgatgattttaacctggaggatgcagtgaaagaaacttcctcagtaaagcagccatgggaccacaccaccaccaccacaaccaataggccaggaaccaccagagctccggcaaaacctccaggtagtggattggacttggctgatgctttggatgatcaagatgatggccgcaggaaaccgggtataggaggaagaggtgatggccggtacggcagcaatgacgaccctggatctggcatggtggcagagcctggcaccattgccggggtggccagcgccctggccatggccctcatcggtgccgtctccagctacatctcctaccagcagaagaagttctgcttcagcattcagcagggtctcaacgcagactacgtgaagggagagaacctggaagccgtggtatgtgaggaaccccaagtgaaatactccacgttgcacacgcagtctgcagagccgccgccgccgcccgaaccagcccggatctgagggccctgtccagctgcaggcatgcacaatggtgccaccgcttgtcacccggctccccccaccccttcatttggacccgcagctgctgtgctgctctgtgccatcggctccttgttggtctgagtttcccggatgagctctgggtgtttgtgagtttggtttctctgccctgccccaagcgtgctgagacttggtgccgaaattcaagagccagctctgatagaaagccagcaccagcctcgggagctgctgagccaccaactcccaaagccagcctgcctccagctttactgagcacaggatgcgggggccaagatgatgctgaggcctgatgacatttatgcttaggggacaagagtttgaactcaagggactgtgacccctgcacactggagtggctcattgtggcaggtttctgccaatagacagcccctgacagtggcctcaaggagctgcaggtggggggctcagcctgcacccacttggagcccctgcaaggagcgaaccggtcagcaccaagtaacaccacacacacgcagcacccaggatgatggtttcacttcagtcttccccatcccaggttttatgttgctgggcttccggagagccggtccaagcggaggctttcagtgatttaagtacaaacatgcatctcgtgatagtcctgccttgagagcttaggaatcttccggataagtatgaagcaattcgtaggcctgtttcccatctgattccatagggggctgggtgtggccttcgggttgacatgagaaaggtctttagcaatcatttctgcaccggagatgagttttatcctgtgttggggagaggtgctcaccctccaccctgtgtccctgttttggtagcaagagtgaccgatgtcaagaacgagcatcaaagccagaatcctgcttgtttgcttaaaaatgtaattgggggcggcgggggaggagaggggaaagagacattcgcttggtttagtgaaacgcaggtgactttgtagctctgtggtcagcctacttgtctgctctgagggagagtgcgtggggagccatgctcaccgtggcaaacacaggaaccccatgactcgcccctcacctggcgtggagctgcctggtttgggctggagcagagctggtttcctggaatgttcctttggcccacatatggttctgtcccggtgagctctgttgtcagaggctcacgggacagaaccacatgctagggtctagggcccctgtctactgatagtcagtttgctgtgtcagaaagcacttctgaaagcagatatgagtcaccagacaggcaggatcttacaaaactcacgggcctctttggtctgcatgatggccccatgcgtttcataggctgtccactgagcgggattgtctgctgagtgggatgagccaactccagtttcttaaggaaaccactggaatctgcagcccccacatgcatctgtctaacgcatgcctcgtgttcgttttgcaaacatgcctgtggtggagggtggtcagttgtagccctgtgcgtctcaaggctgccttgtgaggccattcccagtgcgtgcccttgagctccttaccaccccttttcctgctcggccctttaatccctgacagacctggactgtgtggctgaagggggacctgcagcactgcagaaatgcctctgcgtggtgccatgaaggaaagaaaccttggcctggtctcgagaagcttcccatgcttcaggaagttagtaagggtggggtggcttgcaggattggcctgtttccagggcctcccacactcattggccagattgtgaactttgtcaggcttgtccctccctgataccaagtatgtcgagaaccgatggccccaccctctggctggtgctgggccggaggtggctatggaggattttggcatgcgtggcctgtcgccacctggacagcgtgacctcaggggttgtccactttacctttatggtgaggcctgtcggatggctaagtccttgaaaccctagagctgtgacgtagaatatgtgctgtctgtgagaccgtgttcccaggagcactgactgcagttgagagagacccattttgctctcccttaccgccccccgccccgggtgctttctgcacaaagcctagagcctggcactcaagcccaccggtggcagctcctagtgactggacatgcctggaagacccctcagccttctgtttgcagaacgttcatttcaggagcttctccttcccacagacatcttacacttgctcgacactgccacctgcagaagcctggcgggctctggtcaccatgtgtctatctgaaggttgcactggccagcatgggcctgtcccaagcgagaggggagacacagtggactgaaaggactggttgaaagtggccaatctctatcagcttaatttggcagagaaaatttgtaacaactctgagcacatgctgggtgaagtcacagctcaaggaaagataaagctgggcggaaggaggtgtgcgtggcttctggggtgggacccagaggggaggctctgggacaggggctggggttcagtgccagggccctgaggaagaaatggggactgatctcaaaattccagaattccctgtacatctgttcacgtgcttgtgtccaggtgtgacttgtaaactgtctagtgtttgcattaaataaaatggcaccgagc

SEQ ID NO: 115809 - DNA, 988 bp, Homo sapiens
  Payload ID: 2597
  Gene Symbol: CD99L2
  Gene Name: CD99 molecule-like 2
  Uniprot ID: Q8TCZ2
  ENST ID: ENST00000466436
  CDS Start-End: 42-683
gctaactgtgctcctccggggccctccgcctgctcccagccatggtggcctggcgctcggcgttccttgtctgcctcgctttctccttggccaccctggtccagcgaggatctggggactttgatgattttaacctggaggatgcagtgaaagaaacttcctcagtaaagcagagatggaaccatgtaaccaccacgaccaagaggccagtaaccaccagagctccagcaaatactttaggaaatgattttgacttggctgatgccctggatgatcgaaatgatcgagatgatggccgcaggaaaccaattgctggaggaggaggtttttcagacaaggatcttgaagacatagtagggggtggagaatacaaacctgacaagggtaaaggtgatggccggtacggcagcaatgacgaccctggatctggcatggtggcagagcctggcaccattgccggggtggccagcgccctggccatggccctcatcggtgccgtctccagctacatctcctaccagcagaagaagttctgcttcagcattcagcagggtctcaacgcagactacgtgaagggagagaacctggaagccgtggtatgtgaggaaccccaagtgaaatactccacgttgcacacgcagtctgcagagccgccgccgccgcccgaaccagcccggatctgagggccctgtccagctgcaggcatgcacaatggtgccaccgcttgtcacccggctccccccaccccttcatttggacccgcagctgctgtgctgctctgtgccatcggctccttgttggtctgagtttcccggatgagctctgggtgtttgtgagtttggtttctctgccctgccccaagcgtgctgagacttggtgccgaaattcaagagccagctctgatagaaagccagcaccagcctcgggagctgctgagccaccaactcccaaagccagcctgcctccagctttactgagcacaggatgc

SEQ ID NO: 115810 - DNA, 3742 bp, Homo sapiens
  Payload ID: 2597
  Gene Symbol: CD99L2
  Gene Name: CD99 molecule-like 2
  Uniprot ID: Q8TCZ2
  ENST ID: ENST00000613030
  CDS Start-End: 229-1047
gcagcctcgccccgccccccggcctaaccccagcccaggcgccctcaggcgccggctctctagcgcgcccgacctccatcttcccggggccgcgccgcgcgcgcgcgcgggctttgggcgggaccctgcagaggcggcggggctcctcctcccgctcctcctcggcctccccttcgggcgctctcgcgctaactgtgctcctccggggccctccgcctgctcccagccatggtggcctggcgctcggcgttccttgtctgcctcgctttctccttggccaccctggtccagcgaggatctggggactttgatgattttaacctggaggatgcagtgaaagaaacttcctcagtaaagcagccatgggaccacaccaccaccaccacaaccaataggccaggaaccaccagagctccggcaaaacctccagggcccactgaaggtagtggattggacttggctgatgctttggatgatcaagatgatggccgcaggaaaccgggtataggaggaagagagagatggaaccatgtaaccaccacgaccaagaggccagtaaccaccagagctccagcaaatactttaggaaatgattttgacttggctgatgccctggatgatcgaaatgatcgagatgatggccgcaggaaaccaattgctggaggaggaggtttttcagacaaggatcttgaagacatagtagggggtggagaatacaaacctgacaagggtaaaggtgatggccggtacggcagcaatgacgaccctggatctggcatggtggcagagcctggcaccattgccggggtggccagcgccctggccatggccctcatcggtgccgtctccagctacatctcctaccagcagaagaagttctgcttcagcattcagcatgcagcagcaggtcaagagggtctcaacgcagactacgtgaagggagagaacctggaagccgtggtatgtgaggaaccccaagtgaaatactccacgttgcacacgcagtctgcagagccgccgccgccgcccgaaccagcccggatctgagggccctgtccagctgcaggcatgcacaatggtgccaccgcttgtcacccggctccccccaccccttcatttggacccgcagctgctgtgctgctctgtgccatcggctccttgttggtctgagtttcccggatgagctctgggtgtttgtgagtttggtttctctgccctgccccaagcgtgctgagacttggtgccgaaattcaagagccagctctgatagaaagccagcaccagcctcgggagctgctgagccaccaactcccaaagccagcctgcctccagctttactgagcacaggatgcgggggccaagatgatgctgaggcctgatgacatttatgcttaggggacaagagtttgaactcaagggactgtgacccctgcacactggagtggctcattgtggcaggtttctgccaatagacagcccctgacagtggcctcaaggagctgcaggtggggggctcagcctgcacccacttggagcccctgcaaggagcgaaccggtcagcaccaagtaacaccacacacacgcagcacccaggatgatggtttcacttcagtcttccccatcccaggttttatgttgctgggcttccggagagccggtccaagcggaggctttcagtgatttaagtacaaacatgcatctcgtgatagtcctgccttgagagcttaggaatcttccggataagtatgaagcaattcgtaggcctgtttcccatctgattccatagggggctgggtgtggccttcgggttgacatgagaaaggtctttagcaatcatttctgcaccggagatgagttttatcctgtgttggggagaggtgctcaccctccaccctgtgtccctgttttggtagcaagagtgaccgatgtcaagaacgagcatcaaagccagaatcctgcttgtttgcttaaaaatgtaattgggggcggcgggggaggagaggggaaagagacattcgcttggtttagtgaaacgcaggtgactttgtagctctgtggtcagcctacttgtctgctctgagggagagtgcgtggggagccatgctcaccgtggcaaacacaggaaccccatgactcgcccctcacctggcgtggagctgcctggtttgggctggagcagagctggtttcctggaatgttcctttggcccacatatggttctgtcccggtgagctctgttgtcagaggctcacgggacagaaccacatgctagggtctagggcccctgtctactgatagtcagtttgctgtgtcagaaagcacttctgaaagcagatatgagtcaccagacaggcaggatcttacaaaactcacgggcctctttggtctgcatgatggccccatgcgtttcataggctgtccactgagcgggattgtctgctgagtgggatgagccaactccagtttcttaaggaaaccactggaatctgcagcccccacatgcatctgtctaacgcatgcctcgtgttcgttttgcaaacatgcctgtggtggagggtggtcagttgtagccctgtgcgtctcaaggctgccttgtgaggccattcccagtgcgtgcccttgagctccttaccaccccttttcctgctcggccctttaatccctgacagacctggactgtgtggctgaagggggacctgcagcactgcagaaatgcctctgcgtggtgccatgaaggaaagaaaccttggcctggtctcgagaagcttcccatgcttcaggaagttagtaagggtggggtggcttgcaggattggcctgtttccagggcctcccacactcattggccagattgtgaactttgtcaggcttgtccctccctgataccaagtatgtcgagaaccgatggccccaccctctggctggtgctgggccggaggtggctatggaggattttggcatgcgtggcctgtcgccacctggacagcgtgacctcaggggttgtccactttacctttatggtgaggcctgtcggatggctaagtccttgaaaccctagagctgtgacgtagaatatgtgctgtctgtgagaccgtgttcccaggagcactgactgcagttgagagagacccattttgctctcccttaccgccccccgccccgggtgctttctgcacaaagcctagagcctggcactcaagcccaccggtggcagctcctagtgactggacatgcctggaagacccctcagccttctgtttgcagaacgttcatttcaggagcttctccttcccacagacatcttacacttgctcgacactgccacctgcagaagcctggcgggctctggtcaccatgtgtctatctgaaggttgcactggccagcatgggcctgtcccaagcgagaggggagacacagtggactgaaaggactggttgaaagtggccaatctctatcagcttaatttggcagagaaaatttgtaacaactctgagcacatgctgggtgaagtcacagctcaaggaaagataaagctgggcggaaggaggtgtgcgtggcttctggggtgggacccagaggggaggctctgggacaggggctggggttcagtgccagggccctgaggaagaaatggggactgatctcaaaattccagaattccctgtacatctgttcacgtgcttgtgtccaggtgtgacttgtaaactgtctagtgtttgcattaaataaaatggcaccgagc

SEQ ID NO: 115811 - DNA, 590 bp, Homo sapiens
  Payload ID: 2597
  Gene Symbol: CD99L2
  Gene Name: CD99 molecule-like 2
  ENST ID: ENST00000634795
  CDS Start-End: 1-533
gagagagatggaaccatgtaaccaccacgaccaagaggccagtaaccaccagagctccagcaaatactttaggaaatgattttgacttggctgatgccctggatgatcgaaatgatcgagatgatggccgcaggaaaccaattgctggaggaggaggtttttcagacaaggatcttgaagacatagtagggggtggagaatacaaacctgacaagggtaaaggtgatggccggtacggcagcaatgacgaccctggatctggcatggtggcagagcctggcaccattgccggggtggccagcgccctggccatggccctcatcggtgccgtctccagctacatctcctaccagcagaagaagttctgcttcagcattcagcatgcagcagcaggtcaagagggtctcaacgcagactacgtgaagggagagaacctggaagccgtggtatgtgaggaaccccaagtgaaatactccacgttgcacacgcagtctgcagagccgccgccgccgcccgaaccagcccggatctgagggccctgtccagctgcaggcatgcacaatggtgccaccgcttgtcacccggctccc

SEQ ID NO: 115812 - DNA, 4935 bp, Homo sapiens
  Payload ID: 2597
  Gene Symbol: CD99L2
  Gene Name: CD99 molecule-like 2
  ENST ID: ENST00000346693
  CDS Start-End: 43-480
cgctaactgtgctcctccggggccctccgcctgctcccagccatggtggcctggcgctcggcgttccttgtctgcctcgctttctccttggccaccctggtccagcgaggatctggggactttgatgattttaacctggaggatgcagtgaaagaaacttcctcagtaaagcctgccttaggaatgtaccacaaactagatggcttaaaacaacagaactttattctgtcactgttctggatgctagaagttctatatcaaggtgttggttgggccacattctctctgaaggctctagggaagaatctttccttgactttccccacttctggtggctctaggtgttccttggtttgtggttgcatcactccaatctctgcctctgttgtcacgtggtgttcccctttctgtgtctctctcctttctcttacaaagatgcttgttagtgggtttaaggcccacctggataatccaggatgatctcatcttgagatctttcacttaattacatctgcagagatcctttttccaaataaggaaatatatatttatagatatataatatatatacacatacatatatgtgcgcatatatatatacacacatcccttattcgttttaagcactgcacggtatgccatagtatgcattcagtaaatgtctgagtgccagctgtgtatcagttactgttttaggctttggggctacagccatggacaaatcacacataaacctgtgccttgtggagccagcgttccagtagtgtggatttggccatgacctgtattgccatttccttactggcagacacgtggtttatttcctttttatgcaattacaaatagggctacagtggacattcttgtccatgtcctttgtgcctaagtgcattgtgactgctaggaccaaagatatgtgttttttatattataaaaaacgctgccaaattgttttccaaagtggatttgccattatgcactgtcactgatgttgttataatagtacctgttttcccagacccacgccaacactgaattttatcaataaaaatattttaccaatatgatggacaaaataatatctcattgcttattatgcattcccctgattgtagtcaaatggagcatcatatatttactggccatttgcatttgcctctttggtaaattgttcacattcttcccccatttttctgccagattgcttgccttttaaaaatgggtttattaagatctctttgtattatatattgagttgagaaagtcaagggctttggagtcagacttcttgggtctaaactctacctctgccacttctgaactgtcaccttgggtaagtcacctgacttgtctgcacctcagtttccttatctcttacatgaagataataagaagccctacctcctaggatcactgtaaggatgacatgggaggagccatgtgaagcactcagcacagtccttggaacaagagccatgggaccacaccaccaccaccacaaccaataggccaggaaccaccagagctccggcaaaacctccaggtagtggattggacttggctgatgctttggatgatcaagatgatggccgcaggaaaccgggtataggaggaagagagagatggaaccatgtaaccaccacgaccaagaggccagtaaccaccagagctccagcaaatactttaggaaatgattttgacttggctgatgccctggatgatcgaaatgatcgagatgatggccgcaggaaaccaattgctggaggaggaggtttttcagacaaggatcttgaagacatagtagggggtggagaatacaaacctgacaagggtaaaggtgatggccggtacggcagcaatgacgaccctggatctggtgggtttctgaatcctgaggctcctgttggccatgtgaaaggaaaatgaatctcaggaccccaaaatcactaagccaagggaaaagtcaagctagaaactgcatcaggcatggtggcagagcctggcaccattgccggggtggccagcgccctggccatggccctcatcggtgccgtctccagctacatctcctaccagcagaagaagttctgcttcagcattcagcagggtctcaacgcagactacgtgaagggagagaacctggaagccgtggtatgtgaggaaccccaagtgaaatactccacgttgcacacgcagtctgcagagccgccgccgccgcccgaaccagcccggatctgagggccctgtccagctgcaggcatgcacaatggtgccaccgcttgtcacccggctccccccaccccttcatttggacccgcagctgctgtgctgctctgtgccatcggctccttgttggtctgagtttcccggatgagctctgggtgtttgtgagtttggtttctctgccctgccccaagcgtgctgagacttggtgccgaaattcaagagccagctctgatagaaagccagcaccagcctcgggagctgctgagccaccaactcccaaagccagcctgcctccagctttactgagcacaggatgcgggggccaagatgatgctgaggcctgatgacatttatgcttaggggacaagagtttgaactcaagggactgtgacccctgcacactggagtggctcattgtggcaggtttctgccaatagacagcccctgacagtggcctcaaggagctgcaggtggggggctcagcctgcacccacttggagcccctgcaaggagcgaaccggtcagcaccaagtaacaccacacacacgcagcacccaggatgatggtttcacttcagtcttccccatcccaggttttatgttgctgggcttccggagagccggtccaagcggaggctttcagtgatttaagtacaaacatgcatctcgtgatagtcctgccttgagagcttaggaatcttccggataagtatgaagcaattcgtaggcctgtttcccatctgattccatagggggctgggtgtggccttcgggttgacatgagaaaggtctttagcaatcatttctgcaccggagatgagttttatcctgtgttggggagaggtgctcaccctccaccctgtgtccctgttttggtagcaagagtgaccgatgtcaagaacgagcatcaaagccagaatcctgcttgtttgcttaaaaatgtaattgggggcggcgggggaggagaggggaaagagacattcgcttggtttagtgaaacgcaggtgactttgtagctctgtggtcagcctacttgtctgctctgagggagagtgcgtggggagccatgctcaccgtggcaaacacaggaaccccatgactcgcccctcacctggcgtggagctgcctggtttgggctggagcagagctggtttcctggaatgttcctttggcccacatatggttctgtcccggtgagctctgttgtcagaggctcacgggacagaaccacatgctagggtctagggcccctgtctactgatagtcagtttgctgtgtcagaaagcacttctgaaagcagatatgagtcaccagacaggcaggatcttacaaaactcacgggcctctttggtctgcatgatggccccatgcgtttcataggctgtccactgagcgggattgtctgctgagtgggatgagccaactccagtttcttaaggaaaccactggaatctgcagcccccacatgcatctgtctaacgcatgcctcgtgttcgttttgcaaacatgcctgtggtggagggtggtcagttgtagccctgtgcgtctcaaggctgccttgtgaggccattcccagtgcgtgcccttgagctccttaccaccccttttcctgctcggccctttaatccctgacagacctggactgtgtggctgaagggggacctgcagcactgcagaaatgcctctgcgtggtgccatgaaggaaagaaaccttggcctggtctcgagaagcttcccatgcttcaggaagttagtaagggtggggtggcttgcaggattggcctgtttccagggcctcccacactcattggccagattgtgaactttgtcaggcttgtccctccctgataccaagtatgtcgagaaccgatggccccaccctctggctggtgctgggccggaggtggctatggaggattttggcatgcgtggcctgtcgccacctggacagcgtgacctcaggggttgtccactttacctttatggtgaggcctgtcggatggctaagtccttgaaaccctagagctgtgacgtagaatatgtgctgtctgtgagaccgtgttcccaggagcactgactgcagttgagagagacccattttgctctcccttaccgccccccgccccgggtgctttctgcacaaagcctagagcctggcactcaagcccaccggtggcagctcctagtgactggacatgcctggaagacccctcagccttctgtttgcagaacgttcatttcaggagcttctccttcccacagacatcttacacttgctcgacactgccacctgcagaagcctggcgggctctggtcaccatgtgtctatctgaaggttgcactggccagcatgggcctgtcccaagcgagaggggagacacagtggactgaaaggactggttgaaagtggccaatctctatcagcttaatttggcagagaaaatttgtaacaactctgagcacatgctgggtgaagtcacagctcaaggaaagataaagctgggcggaaggaggtgtgcgtggcttctggggtgggacccagaggggaggctctgggacaggggctggggttcagtgccagggccctgaggaagaaatggggactgatctcaaaattccagaattccctgtacatctgttcacgtgcttgtgtccaggtgtgacttgtaaactgtctagtgtttgcattaaataaaatggcaccgagcag

SEQ ID NO: 115813 - DNA, 759 bp, Homo sapiens
  Payload ID: 2598
  Gene Symbol: CKS1B
  Gene Name: CDC28 protein kinase regulatory subunit 1B
  Uniprot ID: P61024
  ENST ID: ENST00000308987
  CDS Start-End: 48-287
cttggaggttggcggcgcggggctgaaggctagcaaaccgagcgatcatgtcgcacaaacaaatttactattcggacaaatacgacgacgaggagtttgagtatcgacatgtcatgctgcccaaggacatagccaagctggtccctaaaacccatctgatgtctgaatctgaatggaggaatcttggcgttcagcagagtcagggatgggtccattatatgatccatgaaccagaacctcacatcttgctgttccggcgcccactacccaagaaaccaaagaaatgaagctggcaagctacttttcagcctcaagctttacacagctgtccttacttcctaacatctttctgataacattattatgttgccttcttgtttctcactttgatatttaaaagatgttcaatacactgtttgaatgtgctggtaactgctttgcttcttgagtagagccaccaccaccatagcccagccagatgagtgctctgtggacccacagcctaagctgagtgtgaccccagaagccacgatgtgctctgtatccagaacacacttggcagatggaggaagcatctgagtttgagaccatggctgttacagggatcatgtaaacttgctgtttttgttttttcctgccgggtgttgtatgtgtggtgacttgcggatttatgtttcagtgtactggaaactttccattttattcaagaaatctgttcatgttaaaagccttgattaaagaggaagtttttataatcta

SEQ ID NO: 115814 - DNA, 820 bp, Homo sapiens
  Payload ID: 2598
  Gene Symbol: CKS1B
  Gene Name: CDC28 protein kinase regulatory subunit 1B
  ENST ID: ENST00000368436
  CDS Start-End: 64-267
gtgctgttgggagttgcttggaggttggcggcgcggggctgaaggctagcaaaccgagcgatcatgtcgcacaaacaaatttactattcggacaaatacgacgacgaggagtttgagtatcgacatgtcatgctgcccaaggacatagccaagctggtccctaaaacccatctgatgtctgaatctgaatggaggaatcttggcgttcagcagagtcagggatgggtccattatatgatccatgaaccaggtcagtgcactggctaaaaacaaccatatagaactgctacactgagagaatgaaagaataagattgtataacccaaatagggagataggaaatggtttactggttccttccccctccagtcgtgggggatttttttaaaaaaaaactagtgaccaaaaataagactaaaatatctgggaagttcagagacaacctgtcactgaaaaacctcctgtaatctttcattcaatcagagggtattctttttaaggccacatatagcctgatcatagcccctgcctcattctccatcgaaaacattcttggatgtgttctaaataagcaaaggaaagtatatttattgataagacaccagacacccagctgccaggcaaaactaataagggacaccctggggctgtataaacatagcaaaagaactgatattaacaattctgtacttggcagacagtccagacttctgggtctgcttctaaggccatatgcttaagtctttatttagttataaagatctgagtgggtgatagctggggaggtggtagtggaatacactataggttgtacatagaa

SEQ ID NO: 115815 - DNA, 912 bp, Homo sapiens
  Payload ID: 2598
  Gene Symbol: CKS1B
  Gene Name: CDC28 protein kinase regulatory subunit 1B
  ENST ID: ENST00000368439
  CDS Start-End: 250-441
tgaaagcgaggccaaagtgggtgggagcgcgtgctgttgggagttgcttggaggttggcggcgcggggctgaaggctagcaaaccgagcgatcatgtcgcacaaacaaatttactattcggacaaatacgacgacgaggagtttgagtatcggttagtgctggcgcgggagcaatagcgagggtcgtgagctttggccgctgagggcacaaggaattagtaacaggaactgaggcgatagaattggcgcatgcgtacgagacatgtcatgctgcccaaggacatagccaagctggtccctaaaacccatctgatgtctgaatctgaatggaggaatcttggcgttcagcagagtcagggatgggtccattatatgatccatgaaccagaacctcacatcttgctgttccggcgcccactacccaagaaaccaaagaaatgaagctggcaagctacttttcagcctcaagctttacacagctgtccttacttcctaacatctttctgataacattattatgttgccttcttgtttctcactttgatatttaaaagatgttcaatacactgtttgaatgtgctggtaactgctttgcttcttgagtagagccaccaccaccatagcccagccagatgagtgctctgtggacccacagcctaagctgagtgtgaccccagaagccacgatgtgctctgtatccagaacacacttggcagatggaggaagcatctgagtttgagaccatggctgttacagggatcatgtaaacttgctgtttttgttttttcctgccgggtgttgtatgtgtggtgacttgcggatttatgtttcagtgtactggaaactttccattttattcaagaaatctgttcatgttaaaagccttgattaaagaggaagtttttataatct

SEQ ID NO: 115816 - DNA, 613 bp, Homo sapiens
  Payload ID: 2599
  Gene Symbol: CKS2
  Gene Name: CDC28 protein kinase regulatory subunit 2
  Uniprot ID: P33552
  ENST ID: ENST00000314355
  CDS Start-End: 96-335
agtctccggcgagttgttgcctgggctggacgtggttttgtctgctgcgcccgctcttcgcgctctcgtttcattttctgcagcgcgccagcaggatggcccacaagcagatctactactcggacaagtacttcgacgaacactacgagtaccggcatgttatgttacccagagaactttccaaacaagtacctaaaactcatctgatgtctgaagaggagtggaggagacttggtgtccaacagagtctaggctgggttcattacatgattcatgagccagaaccacatattcttctctttagacgacctcttccaaaagatcaacaaaaatgaagtttatctggggatcgtcaaatctttttcaaatttaatgtatatgtgtatataaggtagtattcagtgaatacttgagaaatgtacaaatctttcatccatacctgtgcatgagctgtattcttcacagcaacagagctcagttaaatgcaactgcaagtaggttactgtaagatgtttaagataaaagttcttccagtcagtttttctcttaagtgcctgtttgagtttactgaaacagtttacttttgttcaataaagtttgtatgttgcattta

SEQ ID NO: 115817 - DNA, 10134 bp, Homo sapiens
  Payload ID: 2600
  Gene Symbol: CDC42BPA
  Gene Name: CDC42 binding protein kinase alpha (DMPK-like)
  Uniprot ID: Q5VT25
  ENST ID: ENST00000334218
  CDS Start-End: 533-5731
atttgcagcaacatttttggttttccctcccccttctatgcattctgtttttttcctcccttttctgtttttcttcttcccgggaagtgaattgctgatgcaaatcggactttattcattaatgatgcaaccggattcgtttcaggattacgttgcacgagttgaattttgaatgaaggagaagagtttttttttttttttttaaagaagtgttgactctctagttcgttgtacttttaattattattttatttaaatatacgacttaattgtattcttttaaaaatgcattaagtatatattttatggtaatttaccctcaaaatatatgtatatgggtgaaattgaagacgcttcagttaagtgaggttactggtgtgttggatgtttaattcagcaccagcattgcatgacagttgtttgaataacaagtggtttatttttaaaaccataccttttaaaatttaggttcagataatagtaaaagtcatcataataatttaaaggaaaaccagcagaaatcgaagcaaacatgtctggagaagtgcgtttgaggcagttggagcagtttattttggacgggcccgctcagaccaatgggcagtgcttcagtgtggagacattactggatatactcatctgcctttatgatgaatgcaataattctccattgagaagagagaagaacattctcgaatacctagaatgggctaaaccatttacttctaaagtgaaacaaatgcgattacatagagaagactttgaaatattaaaggtgattggtcgaggagcttttggggaggttgctgtagtaaaactaaaaaatgcagataaagtgtttgccatgaaaatattgaataaatgggaaatgctgaaaagagctgagacagcatgttttcgtgaagaaagggatgtattagtgaatggagacaataaatggattacaaccttgcactatgctttccaggatgacaataacttatacctggttatggattattatgttggtggggatttgcttactctactcagcaaatttgaagatagattgcctgaagatatggctagattttacttggctgagatggtgatagcaattgactcagttcatcagctacattatgtacacagagacattaaacctgacaatatactgatggatatgaatggacatattcggttagcagattttggttcttgtctgaagctgatggaagatggaacggttcagtcctcagtggctgtaggaactccagattatatctctcctgaaatccttcaagccatggaagatggaaaagggagatatggacctgaatgtgactggtggtctttgggggtctgtatgtatgaaatgctttacggagaaacaccattttatgcagaatcgctggtggagacatacggaaaaatcatgaaccacaaagagaggtttcagtttccagcccaagtgactgatgtgtctgaaaatgctaaggatcttattcgaaggctcatttgtagcagagaacatcgacttggtcaaaatggaatagaagactttaagaaacacccatttttcagtggaattgattgggataatattcggaactgtgaagcaccttatattccagaagttagtagcccaacagatacatcgaattttgatgtagatgatgattgtttaaaaaattctgaaacgatgcccccaccaacacatactgcattttctggccaccatctgccatttgttggttttacatatactagtagctgtgtactttctgatcggagctgtttaagagttacggctggtcccacctcactggatcttgatgttaatgttcagaggactctagacaacaacttagcaactgaagcttatgaaagaagaattaagcgccttgagcaagaaaaacttgaactcagtagaaaacttcaagagtcaacacagactgtccaagctctgcagtattcaactgttgatggtccactaacagcaagcaaagatttagaaataaaaaacttaaaagaagaaattgaaaaactaagaaaacaagtaacagaatcaagtcatttggaacagcaacttgaagaagctaatgctgtgaggcaagaactagatgatgcttttagacaaatcaaggcttatgaaaaacaaatcaaaacgttacaacaagaaagagaagatctaaataaggaactagtccaggctagtgagcgattaaaaaaccaatccaaagagctgaaagacgcacactgtcagaggaaactggccatgcaggaattcatggagatcaatgagcggctaacagaattgcacacccaaaaacagaaacttgctcgccatgtccgagataaggaagaagaggtggacctggtgatgcaaaaagttgaaagcttaaggcaagaactgcgcagaacagaaagagccaaaaaagagctggaagttcatacagaagctctagctgctgaagcatctaaagacaggaagctacgtgaacagagtgagcactattctaagcaactggaaaatgaattggagggactgaagcaaaaacaaattagttactcaccaggagtatgcagcatagaacatcagcaagagataaccaaactaaagactgatttggaaaagaaaagtatcttttatgaagaagaattatctaaaagagaaggaatacatgcaaatgaaataaaaaatcttaagaaagaactgcatgattcagaaggtcagcaacttgctctcaacaaagaaattatgattttaaaagacaaattggaaaaaaccagaagagaaagtcaaagtgaaagggaggaatttgaaagtgagttcaaacaacaatatgaacgagaaaaagtgttgttaactgaagaaaataaaaagctgacgagtgaacttgataagcttactactttgtatgagaacttaagtatacacaaccagcagttagaagaagaggttaaagatctagcagacaagaaagaatcagttgcacattgggaagcccaaatcacagaaataattcagtgggtcagcgatgaaaaggatgcacgagggtatcttcaggccttagcttctaaaatgactgaagaattggaggcattaagaaattccagcttgggtacacgagcaacagatatgccctggaaaatgcgtcgttttgcgaaactggatatgtcagctagactggagttgcagtcggctctggatgcagaaataagagccaaacaggccatccaagaagagttgaataaagttaaagcatctaatatcataacagaatgtaaactaaaagattcagagaagaagaacttggaactactctcagaaatcgaacagctgataaaggacactgaagagcttagatctgaaaagggtatagagcaccaagactcacagcattctttcttggcatttttgaatacgcctaccgatgctctggatcaatttgaacgctctccatcctgtactccagctagcaaaggcagacgtactgtagactccactccactttcagttcacacaccaaccttaaggaaaaaaggatgtcctggttcaactggctttccacctaagcgcaagactcaccagttttttgtaaaatcttttactactcctaccaagtgtcatcagtgtacctccttgatggtgggtttaataagacagggctgttcatgtgaagtgtgtggattctcatgccatataacttgtgtaaacaaagctccaaccacttgtccagttcctcctgaacagacaaaaggtcccctgggtatagatcctcagaaaggaataggaacagcatatgaaggtcatgtcaggattcctaagccagctggagtgaagaaagggtggcagagagcactggctatagtgtgtgacttcaaactctttctgtacgatattgctgaaggaaaagcatctcagcccagtgttgtcattagtcaagtgattgacatgagggatgaagaattttctgtgagttcagtcttggcttctgatgttatccatgcaagtcggaaagatataccctgtatatttagggtcacagcttcccagctctcagcatctaataacaaatgttcaatcctgatgctagcagacactgagaatgagaagaataagtgggtgggagtgctgagtgaattgcacaagattttgaagaaaaacaaattcagagaccgctcagtctatgttcccaaagaggcttatgacagcactctacccctcattaaaacaacccaggcagccgcaatcatagatcatgaaagaattgctttgggaaacgaagaagggttatttgttgtacatgtcaccaaagatgaaattattagagttggtgacaataagaagattcatcagattgaactcattccaaatgatcagcttgttgctgtgatctcaggacgaaatcgtcatgtacgactttttcctatgtcagcattggatgggcgagagaccgatttttacaagctgtcagaaactaaagggtgtcaaaccgtaacttctggaaaggtgcgccatggagctctcacatgcctgtgtgtggctatgaaaaggcaggtcctctgttatgaactatttcagagcaagacccgtcacagaaaatttaaagaaattcaagtcccatataatgtccagtggatggcaatcttcagtgaacaactctgtgtgggattccagtcaggatttctaagataccccttgaatggagaaggaaatccatacagtatgctccattcaaatgaccatacactatcatttattgcacatcaaccaatggatgctatctgcgcagttgagatctccagtaaagaatatctgctgtgttttaacagcattgggatatacactgactgccagggccgaagatctagacaacaggaattgatgtggccagcaaatccttcctcttgttgttacaatgcaccatatctctcggtgtacagtgaaaatgcagttgatatctttgatgtgaactccatggaatggattcagactcttcctctcaaaaaggttcgacccttaaacaatgaaggatcattaaatcttttagggttggagaccattagattaatatatttcaaaaataagatggcagaaggggacgaactggtagtacctgaaacatcagataatagtcggaaacaaatggttagaaacattaacaataagcggcgttattccttcagagtcccagaagaggaaaggatgcagcagaggagggaaatgctacgagatccagaaatgagaaataaattaatttctaatccaactaattttaatcacatagcacacatgggtcctggagatggaatacagatcctgaaagatctgcccatgaaccctcggcctcaggaaagtcggacagtattcagtggctcagtcagtattccatctatcaccaaatcccgccctgagccaggccgctccatgagtgctagcagtggcttgtcagcaaggtcatccgcacagaatggcagcgcattaaagagggaattctctggaggaagctacagtgccaagcggcagcccatgccctccccgtcagagggctctttgtcctctggaggcatggaccaaggaagtgatgccccagcgagggactttgacggagaggactctgactctccgaggcattccacagcttccaacagttccaacctaagcagccccccaagcccagcttcaccccgaaaaaccaagagcctctccctggagagcactgaccgcgggagctgggacccgtgagctgcctcagcactgggacctctcgctctccgctccctgccactcgcctcctctcactttcatctcttccctccacctcgcctgctcggcctgaaagccaccaggggctggcagcagtagcaggacagggattcaggagttctgacgacacgactctcagatccacgcccccagcctaacagcaacaacaaagacagactttccgtagcagcttagattaacgttgatttcattccatgcacttagagttgctttcagtaacattttacccctactcccaaaggtagcttaaatagacagattacacaaatgtaagtgataagaataagattagacagattttgctttcacagtagagtctcattatagtcctaaaatagctcatgggcttctccgcatccagaagggagaattggtccctggagtggctcactaagctcttaatcagcaaacgcagtgagtatcaacctgattgttgccaggaaatccttatgaattaaaacaatgcatattttactacagtacagagtttaaatgaatacataaatgtagaagtactgaatgtatatatttaaaaggagcctcttgtattcaacaaaagatggatgcatatataagagagatgatttaatttaaagaaatatgttgtttcttgtctgtaatgtaatgtaaagggtggaaaggcctcaagctcacatttgtagagagagagcgagagaaatcagagttccctttattgccctgtcctcaaactggtcataggctctagtcacctggggagctgtagaaaacacttgcagagccaggttttgctggtttggggcatgccctgggcaccagagctttaacatttgaagccacttcagcagcagcagcaaaaggcgaactcatctctacccaagatgtttcttttcctagtggtggaatttgaacacttctcactttttattgtattttatcttccgcagataaatgtagaaatacacgattctgtcacctctgatcccttccatctgaaaggttacaaggagtgttgtagcttctgaaggtgcagaaaacaatttctaaaaatgcttttattcctgggctaatcctgtccctccctaagtcacagcgaggtgtctgtcccagggctggagatgcttcccaaggaggagtctgttttgttgagagtgggcgtgggcttcttcacataagcctggggaaggaagaaaaaacggctttcattaccaaataatgtaaaacctcaaaagcaagggcttcaacagccttaaccaaatattattccccatagccagtggaaaatggatgtgacaaccccagtgcgcaggccagagtgagtgagcccagcacggcgctccgactggcttcctctctcaggtgctggattgtggggttagtggcatttccagctggattcctcctgttgtagttgccataaggaaatgagatgcagaatcagaaggatctatttctacagaatcatttcaccagttaagcacatgagtagagaaagagataaaaataaaagtatctcatgaaggaaagagattttgcctctcttttacttttcacctaagtttctctgagaaatagagacaggattctctctttaaaattcagtgaaaatgaagaaagttttcctgcagttgctaacctgagttgcagtgtttaaggccatcatttcactgctgctgtctgtgactccacgtctgtgtcactgaggtgacctgcgtgtcactgaggtggccaccatgctggcctgcggcatgtgcagggagctgaggctgtttccaggtgatgctgctgtgtggagaaggttctgagatgcagtgagggaagaaaggatcctgctggggattccattgtaagcacctataatcgggaattttcatgtaacagctttgacatttaaacattctgagtttggtgccagctcagatttgattatattttattttggatgggtgtaattcacagcacagttctaatctcccaaatctttctgctttttagaatgaagtataaaaatacttttctcacctgaataccaagggttggccctttagttggatcattgtcatatgacttggtagatccttgtcctcagcacctcacgtgagagaagggagtcagccagccggccccctgcttggtgctcgtgaccagctcgcaccccttctgtccacccttctctcctctcctccccactctccccaccctcctcactctccccaccctcctcactctccccaccctcccctcctctcctcctcactcttcccaccctccccatccccaccctccccatcctcctcttccctttccccttgccttctcctctctcccttctcttctcaggcagggaggaggccatcccaagccgagattaacaggacttgacataagccattagtttgtagctttgacaagtaattatgaatttttgttgcttataggtgcttattttgcaaaggatgcttttaagatcaaaataataaccctacctaaagtctagctccactgctatgggtcatactcttcagcctcccaacagggcagagagagagagctactgaggcttgtctaggttgccaggctaactgggcgacttgtccatattcaccccatggattgcaccatggcactctttgatttttccactgcaatggcaagtaatctcatcagtcataatagagcagtcccgaatgcgtgcagattctaaaagcagggctttaggagagaaacactgccagggggaatagttttggggagggttttcccaaaataacggtcatcctactgggtttatcccacccttaaatatgaagcctgttacctccagaagcttctgagaagaatgatgtgaaaagacagggagtgggttctaggcaaagaaaacataatgaccattcagaggagtcagtagcacagctcacagataaagtattttattactatctgaagttttcttttgttttcatgcaggacattttaaaaacgtatatggcagcagaaacctgtttctcaatagaaaaaatacattcagaggcatttctgggatagtctatctgtgttagtatttggtgctatctatgtccagccaagttatctaccctcaaattctgactaatcatgtttgtgctttgggtatttaaaattacatacatatatattctttttgccaaaaacaaaagtcttgcttcttgtcaaatgattgctaaagtagatcttacattttttgttattatgtatgtatttatacacatccccaacacacttagtgatttctgttatttcctagggagcacagctttaaggctatgagatacaactaaaaggagcccatctatttggttttccagccaattattgtactcacatttcaggggagaatctgaaattcctgtcatgtttacagcaacaatctatcattcctggctagctctcagcctctctctccttccataggttagaattatgtcattttgttacttagtggccacgtctatttctgagaaagactggttacatttatgtggcatctcaggtatcattaaggaaaagccagagcaggggtgagcagaggtcaaaaccacagacgcagcagggccatttgccgcctttggccgggatcacaaccactgcagtctcccagcaggtaggccttgccaagcctaaggctccccatccaatctagacagaggggcgctcagagcagactttgccgtagcccatgtctggtgagcacaacagggaatgaattgggcactccactcccccgtctctctggcccagccctgaactagatgagctgcatttcatggagcccattttaaaatctctttccttatgactttgttactcaagtccagagttctctgtgcacttctgctagataaggagtgtaagccctgccccccagcactggcagcacgctgggccctccccacacaggacaccgtgcagttccgggggaagctgactcaaatcaaccttgaaatctcatgaaaacaaaatgacttgtctttttatttgatagtgtaatatcattcattttataaattttttagggtttttctcgtaatattgtacagttttgcatggcctggtgtgatcattttttggttagaatataatgctgacaaatgtggatggaggggaagatactgctttagcctatcactccttattttattttgtttggttttatgccctcagtgtcttagggaactttttaagagatcctctgctaccaaacaatgatgtggattcttttgcacagaaatatttaaggtgggatggtaaaaaatgtcacaaaagactcctcaccaatactttatgttgatatcacttaatattaaccagactttgctgtattgcaataaaacagagaactgtta

SEQ ID NO: 115818 - DNA, 10445 bp, Homo sapiens
  Payload ID: 2600
  Gene Symbol: CDC42BPA
  Gene Name: CDC42 binding protein kinase alpha (DMPK-like)
  ENST ID: ENST00000366764
  CDS Start-End: 944-6043
gcggcccggtgcgggtgtcggggagaccgggctctctgcccggcgcggcgcggcgcggctcggcccacgagcgaccaccgacatggagtgggctcgggcggccaagtagccgcttctccggagcccggtgccagtgccgcccgcagcccgccttccacccccggccgcgccgccggtcaggccctagggtgaagccgggaggaaaatgaagagttttcaccggaatccgttgaaaataggactgactgcaaagccttaaagaaagaaggacctcgggaggagaaacgaaaagccgcctccgggcaagacttggcgtgctccgagccgaggggctgcttcagggacctcgccccctccctttcccgctggagaaattgccgctgatgcattatccaagtggtggttgggaggatttgcagcaacatttttggttttccctcccccttctatgcattctgtttttttcctcccttttctgtttttcttcttcccgggaagtgaattgctgatgcaaatcggactttattcattaatgatgcaaccggattcgtttcaggattacgttgcacgagttgaattttgaatgaaggagaagagtttttttttttttttttaaagaagtgttgactctctagttcgttgtacttttaattattattttatttaaatatacgacttaattgtattcttttaaaaatgcattaagtatatattttatggtaatttaccctcaaaatatatgtatatgggtgaaattgaagacgcttcagttaagtgaggttactggtgtgttggatgtttaattcagcaccagcattgcatgacagttgtttgaataacaagtggtttatttttaaaaccataccttttaaaatttaggttcagataatagtaaaagtcatcataataatttaaaggaaaaccagcagaaatcgaagcaaacatgtctggagaagtgcgtttgaggcagttggagcagtttattttggacgggcccgctcagaccaatgggcagtgcttcagtgtggagacattactggatatactcatctgcctttatgatgaatgcaataattctccattgagaagagagaagaacattctcgaatacctagaatgggctaaaccatttacttctaaagtgaaacaaatgcgattacatagagaagactttgaaatattaaaggtgattggtcgaggagcttttggggaggttgctgtagtaaaactaaaaaatgcagataaagtgtttgccatgaaaatattgaataaatgggaaatgctgaaaagagctgagacagcatgttttcgtgaagaaagggatgtattagtgaatggagacaataaatggattacaaccttgcactatgctttccaggatgacaataacttatacctggttatggattattatgttggtggggatttgcttactctactcagcaaatttgaagatagattgcctgaagatatggctagattttacttggctgagatggtgatagcaattgactcagttcatcagctacattatgtacacagagacattaaacctgacaatatactgatggatatgaatggacatattcggttagcagattttggttcttgtctgaagctgatggaagatggaacggttcagtcctcagtggctgtaggaactccagattatatctctcctgaaatccttcaagccatggaagatggaaaagggagatatggacctgaatgtgactggtggtctttgggggtctgtatgtatgaaatgctttacggagaaacaccattttatgcagaatcgctggtggagacatacggaaaaatcatgaaccacaaagagaggtttcagtttccagcccaagtgactgatgtgtctgaaaatgctaaggatcttattcgaaggctcatttgtagcagagaacatcgacttggtcaaaatggaatagaagactttaagaaacacccatttttcagtggaattgattgggataatattcggaactgtgaagcaccttatattccagaagttagtagcccaacagatacatcgaattttgatgtagatgatgattgtttaaaaaattctgaaacgatgcccccaccaacacatactgcattttctggccaccatctgccatttgttggttttacatatactagtagctgtgtactttctgatcggagctgtttaagagttacggctggtcccacctcactggatcttgatgttaatgttcagaggactctagacaacaacttagcaactgaagcttatgaaagaagaattaagcgccttgagcaagaaaaacttgaactcagtagaaaacttcaagagtcaacacagactgtccaagctctgcagtattcaactgttgatggtccactaacagcaagcaaagatttagaaataaaaaacttaaaagaagaaattgaaaaactaagaaaacaagtaacagaatcaagtcatttggaacagcaacttgaagaagctaatgctgtgaggcaagaactagatgatgcttttagacaaatcaaggcttatgaaaaacaaatcaaaacgttacaacaagaaagagaagatctaaataaggaactagtccaggctagtgagcgattaaaaaaccaatccaaagagctgaaagacgcacactgtcagaggaaactggccatgcaggaattcatggagatcaatgagcggctaacagaattgcacacccaaaaacagaaacttgctcgccatgtccgagataaggaagaagaggtggacctggtgatgcaaaaagttgaaagcttaaggcaagaactgcgcagaacagaaagagccaaaaaagagctggaagttcatacagaagctctagctgctgaagcatctaaagacaggaagctacgtgaacagagtgagcactattctaagcaactggaaaatgaattggagggactgaagcaaaaacaaattagttactcaccaggagtatgcagcatagaacatcagcaagagataaccaaactaaagactgatttggaaaagaaaagtatcttttatgaagaagaattatctaaaagagaaggaatacatgcaaatgaaataaaaaatcttaagaaagaactgcatgattcagaaggtcagcaacttgctctcaacaaagaaattatgattttaaaagacaaattggaaaaaaccagaagagaaagtcaaagtgaaagggaggaatttgaaagtgagttcaaacaacaatatgaacgagaaaaagtgttgttaactgaagaaaataaaaagctgacgagtgaacttgataagcttactactttgtatgagaacttaagtatacacaaccagcagttagaagaagaggttaaagatctagcagacaagaaagaatcagttgcacattgggaagcccaaatcacagaaataattcagtgggtcagcgatgaaaaggatgcacgagggtatcttcaggccttagcttctaaaatgactgaagaattggaggcattaagaaattccagcttgggtacacgagcaacagatatgccctggaaaatgcgtcgttttgcgaaactggatatgtcagctagactggagttgcagtcggctctggatgcagaaataagagccaaacaggccatccaagaagagttgaataaagttaaagcatctaatatcataacagaatgtaaactaaaagattcagagaagaagaacttggaactactctcagaaatcgaacagctgataaaggacactgaagagcttagatctgaaaaggctagcaaaggcagacgtactgtagactccactccactttcagttcacacaccaaccttaaggaaaaaaggatgtcctggttcaactggctttccacctaagcgcaagactcaccagttttttgtaaaatcttttactactcctaccaagtgtcatcagtgtacctccttgatggtgggtttaataagacagggctgttcatgtgaagtgtgtggattctcatgccatataacttgtgtaaacaaagctccaaccacttgtccagttcctcctgaacagacaaaaggtcccctgggtatagatcctcagaaaggaataggaacagcatatgaaggtcatgtcaggattcctaagccagctggagtgaagaaagggtggcagagagcactggctatagtgtgtgacttcaaactctttctgtacgatattgctgaaggaaaagcatctcagcccagtgttgtcattagtcaagtgattgacatgagggatgaagaattttctgtgagttcagtcttggcttctgatgttatccatgcaagtcggaaagatataccctgtatatttagggtcacagcttcccagctctcagcatctaataacaaatgttcaatcctgatgctagcagacactgagaatgagaagaataagtgggtgggagtgctgagtgaattgcacaagattttgaagaaaaacaaattcagagaccgctcagtctatgttcccaaagaggcttatgacagcactctacccctcattaaaacaacccaggcagccgcaatcatagatcatgaaagaattgctttgggaaacgaagaagggttatttgttgtacatgtcaccaaagatgaaattattagagttggtgacaataagaagattcatcagattgaactcattccaaatgatcagcttgttgctgtgatctcaggacgaaatcgtcatgtacgactttttcctatgtcagcattggatgggcgagagaccgatttttacaagctgtcagaaactaaagggtgtcaaaccgtaacttctggaaaggtgcgccatggagctctcacatgcctgtgtgtggctatgaaaaggcaggtcctctgttatgaactatttcagagcaagacccgtcacagaaaatttaaagaaattcaagtcccatataatgtccagtggatggcaatcttcagtgaacaactctgtgtgggattccagtcaggatttctaagataccccttgaatggagaaggaaatccatacagtatgctccattcaaatgaccatacactatcatttattgcacatcaaccaatggatgctatctgcgcagttgagatctccagtaaagaatatctgctgtgttttaacagcattgggatatacactgactgccagggccgaagatctagacaacaggaattgatgtggccagcaaatccttcctcttgttgttacaatgcaccatatctctcggtgtacagtgaaaatgcagttgatatctttgatgtgaactccatggaatggattcagactcttcctctcaaaaaggttcgacccttaaacaatgaaggatcattaaatcttttagggttggagaccattagattaatatatttcaaaaataagatggcagaaggggacgaactggtagtacctgaaacatcagataatagtcggaaacaaatggttagaaacattaacaataagcggcgttattccttcagagtcccagaagaggaaaggatgcagcagaggagggaaatgctacgagatccagaaatgagaaataaattaatttctaatccaactaattttaatcacatagcacacatgggtcctggagatggaatacagatcctgaaagatctgcccatgaaccctcggcctcaggaaagtcggacagtattcagtggctcagtcagtattccatctatcaccaaatcccgccctgagccaggccgctccatgagtgctagcagtggcttgtcagcaaggtcatccgcacagaatggcagcgcattaaagagggaattctctggaggaagctacagtgccaagcggcagcccatgccctccccgtcagagggctctttgtcctctggaggcatggaccaaggaagtgatgccccagcgagggactttgacggagaggactctgactctccgaggcattccacagcttccaacagttccaacctaagcagccccccaagcccagcttcaccccgaaaaaccaagagcctctccctggagagcactgaccgcgggagctgggacccgtgagctgcctcagcactgggacctctcgctctccgctccctgccactcgcctcctctcactttcatctcttccctccacctcgcctgctcggcctgaaagccaccaggggctggcagcagtagcaggacagggattcaggagttctgacgacacgactctcagatccacgcccccagcctaacagcaacaacaaagacagactttccgtagcagcttagattaacgttgatttcattccatgcacttagagttgctttcagtaacattttacccctactcccaaaggtagcttaaatagacagattacacaaatgtaagtgataagaataagattagacagattttgctttcacagtagagtctcattatagtcctaaaatagctcatgggcttctccgcatccagaagggagaattggtccctggagtggctcactaagctcttaatcagcaaacgcagtgagtatcaacctgattgttgccaggaaatccttatgaattaaaacaatgcatattttactacagtacagagtttaaatgaatacataaatgtagaagtactgaatgtatatatttaaaaggagcctcttgtattcaacaaaagatggatgcatatataagagagatgatttaatttaaagaaatatgttgtttcttgtctgtaatgtaatgtaaagggtggaaaggcctcaagctcacatttgtagagagagagcgagagaaatcagagttccctttattgccctgtcctcaaactggtcataggctctagtcacctggggagctgtagaaaacacttgcagagccaggttttgctggtttggggcatgccctgggcaccagagctttaacatttgaagccacttcagcagcagcagcaaaaggcgaactcatctctacccaagatgtttcttttcctagtggtggaatttgaacacttctcactttttattgtattttatcttccgcagataaatgtagaaatacacgattctgtcacctctgatcccttccatctgaaaggttacaaggagtgttgtagcttctgaaggtgcagaaaacaatttctaaaaatgcttttattcctgggctaatcctgtccctccctaagtcacagcgaggtgtctgtcccagggctggagatgcttcccaaggaggagtctgttttgttgagagtgggcgtgggcttcttcacataagcctggggaaggaagaaaaaacggctttcattaccaaataatgtaaaacctcaaaagcaagggcttcaacagccttaaccaaatattattccccatagccagtggaaaatggatgtgacaaccccagtgcgcaggccagagtgagtgagcccagcacggcgctccgactggcttcctctctcaggtgctggattgtggggttagtggcatttccagctggattcctcctgttgtagttgccataaggaaatgagatgcagaatcagaaggatctatttctacagaatcatttcaccagttaagcacatgagtagagaaagagataaaaataaaagtatctcatgaaggaaagagattttgcctctcttttacttttcacctaagtttctctgagaaatagagacaggattctctctttaaaattcagtgaaaatgaagaaagttttcctgcagttgctaacctgagttgcagtgtttaaggccatcatttcactgctgctgtctgtgactccacgtctgtgtcactgaggtgacctgcgtgtcactgaggtggccaccatgctggcctgcggcatgtgcagggagctgaggctgtttccaggtgatgctgctgtgtggagaaggttctgagatgcagtgagggaagaaaggatcctgctggggattccattgtaagcacctataatcgggaattttcatgtaacagctttgacatttaaacattctgagtttggtgccagctcagatttgattatattttattttggatgggtgtaattcacagcacagttctaatctcccaaatctttctgctttttagaatgaagtataaaaatacttttctcacctgaataccaagggttggccctttagttggatcattgtcatatgacttggtagatccttgtcctcagcacctcacgtgagagaagggagtcagccagccggccccctgcttggtgctcgtgaccagctcgcaccccttctgtccacccttctctcctctcctccccactctccccaccctcctcactctccccaccctcctcactctccccaccctcccctcctctcctcctcactcttcccaccctccccatccccaccctccccatcctcctcttccctttccccttgccttctcctctctcccttctcttctcaggcagggaggaggccatcccaagccgagattaacaggacttgacataagccattagtttgtagctttgacaagtaattatgaatttttgttgcttataggtgcttattttgcaaaggatgcttttaagatcaaaataataaccctacctaaagtctagctccactgctatgggtcatactcttcagcctcccaacagggcagagagagagagctactgaggcttgtctaggttgccaggctaactgggcgacttgtccatattcaccccatggattgcaccatggcactctttgatttttccactgcaatggcaagtaatctcatcagtcataatagagcagtcccgaatgcgtgcagattctaaaagcagggctttaggagagaaacactgccagggggaatagttttggggagggttttcccaaaataacggtcatcctactgggtttatcccacccttaaatatgaagcctgttacctccagaagcttctgagaagaatgatgtgaaaagacagggagtgggttctaggcaaagaaaacataatgaccattcagaggagtcagtagcacagctcacagataaagtattttattactatctgaagttttcttttgttttcatgcaggacattttaaaaacgtatatggcagcagaaacctgtttctcaatagaaaaaatacattcagaggcatttctgggatagtctatctgtgttagtatttggtgctatctatgtccagccaagttatctaccctcaaattctgactaatcatgtttgtgctttgggtatttaaaattacatacatatatattctttttgccaaaaacaaaagtcttgcttcttgtcaaatgattgctaaagtagatcttacattttttgttattatgtatgtatttatacacatccccaacacacttagtgatttctgttatttcctagggagcacagctttaaggctatgagatacaactaaaaggagcccatctatttggttttccagccaattattgtactcacatttcaggggagaatctgaaattcctgtcatgtttacagcaacaatctatcattcctggctagctctcagcctctctctccttccataggttagaattatgtcattttgttacttagtggccacgtctatttctgagaaagactggttacatttatgtggcatctcaggtatcattaaggaaaagccagagcaggggtgagcagaggtcaaaaccacagacgcagcagggccatttgccgcctttggccgggatcacaaccactgcagtctcccagcaggtaggccttgccaagcctaaggctccccatccaatctagacagaggggcgctcagagcagactttgccgtagcccatgtctggtgagcacaacagggaatgaattgggcactccactcccccgtctctctggcccagccctgaactagatgagctgcatttcatggagcccattttaaaatctctttccttatgactttgttactcaagtccagagttctctgtgcacttctgctagataaggagtgtaagccctgccccccagcactggcagcacgctgggccctccccacacaggacaccgtgcagttccgggggaagctgactcaaatcaaccttgaaatctcatgaaaacaaaatgacttgtctttttatttgatagtgtaatatcattcattttataaattttttagggtttttctcgtaatattgtacagttttgcatggcctggtgtgatcattttttggttagaatataatgctgacaaatgtggatggaggggaagatactgctttagcctatcactccttattttattttgtttggttttatgccctcagtgtcttagggaactttttaagagatcctctgctaccaaacaatgatgtggattcttttgcacagaaatatttaaggtgggatggtaaaaaatgtcacaaaagactcctcaccaatactttatgttgatatcacttaatattaaccagactttgctgtattgcaataaaacagagaactgtt

SEQ ID NO: 115819 - DNA, 10610 bp, Homo sapiens
  Payload ID: 2600
  Gene Symbol: CDC42BPA
  Gene Name: CDC42 binding protein kinase alpha (DMPK-like)
  ENST ID: ENST00000366766
  CDS Start-End: 3152-6208
gcggcccggtgcgggtgtcggggagaccgggctctctgcccggcgcggcgcggcgcggctcggcccacgagcgaccaccgacatggagtgggctcgggcggccaagtagccgcttctccggagcccggtgccagtgccgcccgcagcccgccttccacccccggccgcgccgccggtcaggccctagggtgaagccgggaggaaaatgaagagttttcaccggaatccgttgaaaataggactgactgcaaagccttaaagaaagaaggacctcgggaggagaaacgaaaagccgcctccgggcaagacttggcgtgctccgagccgaggggctgcttcagggacctcgccccctccctttcccgctggagaaattgccgctgatgcattatccaagtggtggttgggaggatttgcagcaacatttttggttttccctcccccttctatgcattctgtttttttcctcccttttctgtttttcttcttcccgggaagtgaattgctgatgcaaatcggactttattcattaatgatgcaaccggattcgtttcaggattacgttgcacgagttgaattttgaatgaaggagaagagtttttttttttttttttaaagaagtgttgactctctagttcgttgtacttttaattattattttatttaaatatacgacttaattgtattcttttaaaaatgcattaagtatatattttatggtaatttaccctcaaaatatatgtatatgggtgaaattgaagacgcttcagttaagtgaggttactggtgtgttggatgtttaattcagcaccagcattgcatgacagttgtttgaataacaagtggtttatttttaaaaccataccttttaaaatttaggttcagataatagtaaaagtcatcataataatttaaaggaaaaccagcagaaatcgaagcaaacatgtctggagaagtgcgtttgaggcagttggagcagtttattttggacgggcccgctcagaccaatgggcagtgcttcagtgtggagacattactggatatactcatctgcctttatgatgaatgcaataattctccattgagaagagagaagaacattctcgaatacctagaatgggctaaaccatttacttctaaagtgaaacaaatgcgattacatagagaagactttgaaatattaaaggtgattggtcgaggagcttttggggaggttgctgtagtaaaactaaaaaatgcagataaagtgtttgccatgaaaatattgaataaatgggaaatgctgaaaagagctgagacagcatgttttcgtgaagaaagggatgtattagtgaatggagacaataaatggattacaaccttgcactatgctttccaggatgacaataacttatacctggttatggattattatgttggtggggatttgcttactctactcagcaaatttgaagatagattgcctgaagatatggctagattttacttggctgagatggtgatagcaattgactcagttcatcagctacattatgtacacagagacattaaacctgacaatatactgatggatatgaatggacatattcggttagcagattttggttcttgtctgaagctgatggaagatggaacggttcagtcctcagtggctgtaggaactccagattatatctctcctgaaatccttcaagccatggaagatggaaaagggagatatggacctgaatgtgactggtggtctttgggggtctgtatgtatgaaatgctttacggagaaacaccattttatgcagaatcgctggtggagacatacggaaaaatcatgaaccacaaagagaggtttcagtttccagcccaagtgactgatgtgtctgaaaatgctaaggatcttattcgaaggctcatttgtagcagagaacatcgacttggtcaaaatggaatagaagactttaagaaacacccatttttcagtggaattgattgggataatattcggaactgtgaagcaccttatattccagaagttagtagcccaacagatacatcgaattttgatgtagatgatgattgtttaaaaaattctgaaacgatgcccccaccaacacatactgcattttctggccaccatctgccatttgttggttttacatatactagtagctgtgtactttctgatcggagctgtttaagagttacggctggtcccacctcactggatcttgatgttaatgttcagaggactctagacaacaacttagcaactgaagcttatgaaagaagaattaagcgccttgagcaagaaaaacttgaactcagtagaaaacttcaagagtcaacacagactgtccaagctctgcagtattcaactgttgatggtccactaacagcaagcaaagatttagaaataaaaaacttaaaagaagaaattgaaaaactaagaaaacaagtaacagaatcaagtcatttggaacagcaacttgaagaagctaatgctgtgaggcaagaactagatgatgcttttagacaaatcaaggcttatgaaaaacaaatcaaaacgttacaacaagaaagagaagatctaaataaggaactagtccaggctagtgagcgattaaaaaaccaatccaaagagctgaaagacgcacactgtcagaggaaactggccatgcaggaattcatggagatcaatgagcggctaacagaattgcacacccaaaaacagaaacttgctcgccatgtccgagataaggaagaagaggtggacctggtgatgcaaaaagttgaaagcttaaggcaagaactgcgcagaacagaaagagccaaaaaagagctggaagttcatacagaagctctagctgctgaagcatctaaagacaggaagctacgtgaacagagtgagcactattctaagcaactggaaaatgaattggagggactgaagcaaaaacaaattagttactcaccaggagtatgcagcatagaacatcagcaagagataaccaaactaaagactgatttggaaaagaaaagtatcttttatgaagaagaattatctaaaagagaaggaatacatgcaaatgaaataaaaaatcttaagaaagaactgcatgattcagaaggtcagcaacttgctctcaacaaagaaattatgattttaaaagacaaattggaaaaaaccagaagagaaagtcaaagtgaaagggaggaatttgaaagtgagttcaaacaacaatatgaacgagaaaaagtgttgttaactgaagaaaataaaaagctgacgagtgaacttgataagcttactactttgtatgagaacttaagtatacacaaccagcagttagaagaagaggttaaagatctagcagacaagaaagaatcagttgcacattgggaagcccaaatcacagaaataattcagtgggtcagcgatgaaaaggatgcacgagggtatcttcaggccttagcttctaaaatgactgaagaattggaggcattaagaaattccagcttgggtacacgagcaacagatatgccctggaaaatgcgtcgttttgcgaaactggatatgtcagctagactggagttgcagtcggctctggatgcagaaataagagccaaacaggccatccaagaagagttgaataaagttaaagcatctaatatcataacagaatgtaaactaaaagattcagagaagaagaacttggaactactctcagaaatcgaacagctgataaaggacactgaagagcttagatctgaaaagggtatagagcaccaagactcacagcattctttcttggcatttttgaatacgcctaccgatgctctggatcaatttgaaactgatcccgttgagaacacatatgtatggaacccgagcgtcaagtttcacatccagtcacggtccacatctccttccacatctagtgaagctgagccagttaagactgtagactccactccactttcagttcacacaccaaccttaaggaaaaaaggatgtcctggttcaactggctttccacctaagcgcaagactcaccagttttttgtaaaatcttttactactcctaccaagtgtcatcagtgtacctccttgatggtgggtttaataagacagggctgttcatgtgaagtgtgtggattctcatgccatataacttgtgtaaacaaagctccaaccacttgtccagttcctcctgaacagacaaaaggtcccctgggtatagatcctcagaaaggaataggaacagcatatgaaggtcatgtcaggattcctaagccagctggagtgaagaaagggtggcagagagcactggctatagtgtgtgacttcaaactctttctgtacgatattgctgaaggaaaagcatctcagcccagtgttgtcattagtcaagtgattgacatgagggatgaagaattttctgtgagttcagtcttggcttctgatgttatccatgcaagtcggaaagatataccctgtatatttagggtcacagcttcccagctctcagcatctaataacaaatgttcaatcctgatgctagcagacactgagaatgagaagaataagtgggtgggagtgctgagtgaattgcacaagattttgaagaaaaacaaattcagagaccgctcagtctatgttcccaaagaggcttatgacagcactctacccctcattaaaacaacccaggcagccgcaatcatagatcatgaaagaattgctttgggaaacgaagaagggttatttgttgtacatgtcaccaaagatgaaattattagagttggtgacaataagaagattcatcagattgaactcattccaaatgatcagcttgttgctgtgatctcaggacgaaatcgtcatgtacgactttttcctatgtcagcattggatgggcgagagaccgatttttacaagctgtcagaaactaaagggtgtcaaaccgtaacttctggaaaggtgcgccatggagctctcacatgcctgtgtgtggctatgaaaaggcaggtcctctgttatgaactatttcagagcaagacccgtcacagaaaatttaaagaaattcaagtcccatataatgtccagtggatggcaatcttcagtgaacaactctgtgtgggattccagtcaggatttctaagataccccttgaatggagaaggaaatccatacagtatgctccattcaaatgaccatacactatcatttattgcacatcaaccaatggatgctatctgcgcagttgagatctccagtaaagaatatctgctgtgttttaacagcattgggatatacactgactgccagggccgaagatctagacaacaggaattgatgtggccagcaaatccttcctcttgttgttacaatgcaccatatctctcggtgtacagtgaaaatgcagttgatatctttgatgtgaactccatggaatggattcagactcttcctctcaaaaaggttcgacccttaaacaatgaaggatcattaaatcttttagggttggagaccattagattaatatatttcaaaaataagatggcagaaggggacgaactggtagtacctgaaacatcagataatagtcggaaacaaatggttagaaacattaacaataagcggcgttattccttcagagtcccagaagaggaaaggatgcagcagaggagggaaatgctacgagatccagaaatgagaaataaattaatttctaatccaactaattttaatcacatagcacacatgggtcctggagatggaatacagatcctgaaagatctgcccatgaaccctcggcctcaggaaagtcggacagtattcagtggctcagtcagtattccatctatcaccaaatcccgccctgagccaggccgctccatgagtgctagcagtggcttgtcagcaaggtcatccgcacagaatggcagcgcattaaagagggaattctctggaggaagctacagtgccaagcggcagcccatgccctccccgtcagagggctctttgtcctctggaggcatggaccaaggaagtgatgccccagcgagggactttgacggagaggactctgactctccgaggcattccacagcttccaacagttccaacctaagcagccccccaagcccagcttcaccccgaaaaaccaagagcctctccctggagagcactgaccgcgggagctgggacccgtgagctgcctcagcactgggacctctcgctctccgctccctgccactcgcctcctctcactttcatctcttccctccacctcgcctgctcggcctgaaagccaccaggggctggcagcagtagcaggacagggattcaggagttctgacgacacgactctcagatccacgcccccagcctaacagcaacaacaaagacagactttccgtagcagcttagattaacgttgatttcattccatgcacttagagttgctttcagtaacattttacccctactcccaaaggtagcttaaatagacagattacacaaatgtaagtgataagaataagattagacagattttgctttcacagtagagtctcattatagtcctaaaatagctcatgggcttctccgcatccagaagggagaattggtccctggagtggctcactaagctcttaatcagcaaacgcagtgagtatcaacctgattgttgccaggaaatccttatgaattaaaacaatgcatattttactacagtacagagtttaaatgaatacataaatgtagaagtactgaatgtatatatttaaaaggagcctcttgtattcaacaaaagatggatgcatatataagagagatgatttaatttaaagaaatatgttgtttcttgtctgtaatgtaatgtaaagggtggaaaggcctcaagctcacatttgtagagagagagcgagagaaatcagagttccctttattgccctgtcctcaaactggtcataggctctagtcacctggggagctgtagaaaacacttgcagagccaggttttgctggtttggggcatgccctgggcaccagagctttaacatttgaagccacttcagcagcagcagcaaaaggcgaactcatctctacccaagatgtttcttttcctagtggtggaatttgaacacttctcactttttattgtattttatcttccgcagataaatgtagaaatacacgattctgtcacctctgatcccttccatctgaaaggttacaaggagtgttgtagcttctgaaggtgcagaaaacaatttctaaaaatgcttttattcctgggctaatcctgtccctccctaagtcacagcgaggtgtctgtcccagggctggagatgcttcccaaggaggagtctgttttgttgagagtgggcgtgggcttcttcacataagcctggggaaggaagaaaaaacggctttcattaccaaataatgtaaaacctcaaaagcaagggcttcaacagccttaaccaaatattattccccatagccagtggaaaatggatgtgacaaccccagtgcgcaggccagagtgagtgagcccagcacggcgctccgactggcttcctctctcaggtgctggattgtggggttagtggcatttccagctggattcctcctgttgtagttgccataaggaaatgagatgcagaatcagaaggatctatttctacagaatcatttcaccagttaagcacatgagtagagaaagagataaaaataaaagtatctcatgaaggaaagagattttgcctctcttttacttttcacctaagtttctctgagaaatagagacaggattctctctttaaaattcagtgaaaatgaagaaagttttcctgcagttgctaacctgagttgcagtgtttaaggccatcatttcactgctgctgtctgtgactccacgtctgtgtcactgaggtgacctgcgtgtcactgaggtggccaccatgctggcctgcggcatgtgcagggagctgaggctgtttccaggtgatgctgctgtgtggagaaggttctgagatgcagtgagggaagaaaggatcctgctggggattccattgtaagcacctataatcgggaattttcatgtaacagctttgacatttaaacattctgagtttggtgccagctcagatttgattatattttattttggatgggtgtaattcacagcacagttctaatctcccaaatctttctgctttttagaatgaagtataaaaatacttttctcacctgaataccaagggttggccctttagttggatcattgtcatatgacttggtagatccttgtcctcagcacctcacgtgagagaagggagtcagccagccggccccctgcttggtgctcgtgaccagctcgcaccccttctgtccacccttctctcctctcctccccactctccccaccctcctcactctccccaccctcctcactctccccaccctcccctcctctcctcctcactcttcccaccctccccatccccaccctccccatcctcctcttccctttccccttgccttctcctctctcccttctcttctcaggcagggaggaggccatcccaagccgagattaacaggacttgacataagccattagtttgtagctttgacaagtaattatgaatttttgttgcttataggtgcttattttgcaaaggatgcttttaagatcaaaataataaccctacctaaagtctagctccactgctatgggtcatactcttcagcctcccaacagggcagagagagagagctactgaggcttgtctaggttgccaggctaactgggcgacttgtccatattcaccccatggattgcaccatggcactctttgatttttccactgcaatggcaagtaatctcatcagtcataatagagcagtcccgaatgcgtgcagattctaaaagcagggctttaggagagaaacactgccagggggaatagttttggggagggttttcccaaaataacggtcatcctactgggtttatcccacccttaaatatgaagcctgttacctccagaagcttctgagaagaatgatgtgaaaagacagggagtgggttctaggcaaagaaaacataatgaccattcagaggagtcagtagcacagctcacagataaagtattttattactatctgaagttttcttttgttttcatgcaggacattttaaaaacgtatatggcagcagaaacctgtttctcaatagaaaaaatacattcagaggcatttctgggatagtctatctgtgttagtatttggtgctatctatgtccagccaagttatctaccctcaaattctgactaatcatgtttgtgctttgggtatttaaaattacatacatatatattctttttgccaaaaacaaaagtcttgcttcttgtcaaatgattgctaaagtagatcttacattttttgttattatgtatgtatttatacacatccccaacacacttagtgatttctgttatttcctagggagcacagctttaaggctatgagatacaactaaaaggagcccatctatttggttttccagccaattattgtactcacatttcaggggagaatctgaaattcctgtcatgtttacagcaacaatctatcattcctggctagctctcagcctctctctccttccataggttagaattatgtcattttgttacttagtggccacgtctatttctgagaaagactggttacatttatgtggcatctcaggtatcattaaggaaaagccagagcaggggtgagcagaggtcaaaaccacagacgcagcagggccatttgccgcctttggccgggatcacaaccactgcagtctcccagcaggtaggccttgccaagcctaaggctccccatccaatctagacagaggggcgctcagagcagactttgccgtagcccatgtctggtgagcacaacagggaatgaattgggcactccactcccccgtctctctggcccagccctgaactagatgagctgcatttcatggagcccattttaaaatctctttccttatgactttgttactcaagtccagagttctctgtgcacttctgctagataaggagtgtaagccctgccccccagcactggcagcacgctgggccctccccacacaggacaccgtgcagttccgggggaagctgactcaaatcaaccttgaaatctcatgaaaacaaaatgacttgtctttttatttgatagtgtaatatcattcattttataaattttttagggtttttctcgtaatattgtacagttttgcatggcctggtgtgatcattttttggttagaatataatgctgacaaatgtggatggaggggaagatactgctttagcctatcactccttattttattttgtttggttttatgccctcagtgtcttagggaactttttaagagatcctctgctaccaaacaatgatgtggattcttttgcacagaaatatttaaggtgggatggtaaaaaatgtcacaaaagactcctcaccaatactttatgttgatatcacttaatattaaccagactttgctgtattgcaataaaacagagaactgtt

SEQ ID NO: 115820 - DNA, 9320 bp, Homo sapiens
  Payload ID: 2600
  Gene Symbol: CDC42BPA
  Gene Name: CDC42 binding protein kinase alpha (DMPK-like)
  Uniprot ID: Q5VT25
  ENST ID: ENST00000366767
  CDS Start-End: 1-4917
atgtctggagaagtgcgtttgaggcagttggagcagtttattttggacgggcccgctcagaccaatgggcagtgcttcagtgtggagacattactggatatactcatctgcctttatgatgaatgcaataattctccattgagaagagagaagaacattctcgaatacctagaatgggctaaaccatttacttctaaagtgaaacaaatgcgattacatagagaagactttgaaatattaaaggtgattggtcgaggagcttttggggaggttgctgtagtaaaactaaaaaatgcagataaagtgtttgccatgaaaatattgaataaatgggaaatgctgaaaagagctgagacagcatgttttcgtgaagaaagggatgtattagtgaatggagacaataaatggattacaaccttgcactatgctttccaggatgacaataacttatacctggttatggattattatgttggtggggatttgcttactctactcagcaaatttgaagatagattgcctgaagatatggctagattttacttggctgagatggtgatagcaattgactcagttcatcagctacattatgtacacagagacattaaacctgacaatatactgatggatatgaatggacatattcggttagcagattttggttcttgtctgaagctgatggaagatggaacggttcagtcctcagtggctgtaggaactccagattatatctctcctgaaatccttcaagccatggaagatggaaaagggagatatggacctgaatgtgactggtggtctttgggggtctgtatgtatgaaatgctttacggagaaacaccattttatgcagaatcgctggtggagacatacggaaaaatcatgaaccacaaagagaggtttcagtttccagcccaagtgactgatgtgtctgaaaatgctaaggatcttattcgaaggctcatttgtagcagagaacatcgacttggtcaaaatggaatagaagactttaagaaacacccatttttcagtggaattgattgggataatattcggaactgtgaagcaccttatattccagaagttagtagcccaacagatacatcgaattttgatgtagatgatgattgtttaaaaaattctgaaacgatgcccccaccaacacatactgcattttctggccaccatctgccatttgttggttttacatatactagtagctgtgtactttctgatcggagctgtttaagagttacggctggtcccacctcactggatcttgatgttaatgttcagaggactctagacaacaacttagcaactgaagcttatgaaagaagaattaagcgccttgagcaagaaaaacttgaactcagtagaaaacttcaagagtcaacacagactgtccaagctctgcagtattcaactgttgatggtccactaacagcaagcaaagatttagaaataaaaaacttaaaagaagaaattgaaaaactaagaaaacaagtaacagaatcaagtcatttggaacagcaacttgaagaagctaatgctgtgaggcaagaactagatgatgcttttagacaaatcaaggcttatgaaaaacaaatcaaaacgttacaacaagaaagagaagatctaaataagctggaagttcatacagaagctctagctgctgaagcatctaaagacaggaagctacgtgaacagagtgagcactattctaagcaactggaaaatgaattggagggactgaagcaaaaacaaattagttactcaccaggagtatgcagcatagaacatcagcaagagataaccaaactaaagactgatttggaaaagaaaagtatcttttatgaagaagaattatctaaaagagaaggaatacatgcaaatgaaataaaaaatcttaagaaagaactgcatgattcagaaggtcagcaacttgctctcaacaaagaaattatgattttaaaagacaaattggaaaaaaccagaagagaaagtcaaagtgaaagggaggaatttgaaagtgagttcaaacaacaatatgaacgagaaaaagtgttgttaactgaagaaaataaaaagctgacgagtgaacttgataagcttactactttgtatgagaacttaagtatacacaaccagcagttagaagaagaggttaaagatctagcagacaagaaagaatcagttgcacattgggaagcccaaatcacagaaataattcagtgggtcagcgatgaaaaggatgcacgagggtatcttcaggccttagcttctaaaatgactgaagaattggaggcattaagaaattccagcttgggtacacgagcaacagatatgccctggaaaatgcgtcgttttgcgaaactggatatgtcagctagactggagttgcagtcggctctggatgcagaaataagagccaaacaggccatccaagaagagttgaataaagttaaagcatctaatatcataacagaatgtaaactaaaagattcagagaagaagaacttggaactactctcagaaatcgaacagctgataaaggacactgaagagcttagatctgaaaagggtatagagcaccaagactcacagcattctttcttggcatttttgaatacgcctaccgatgctctggatcaatttgaaactgtagactccactccactttcagttcacacaccaaccttaaggaaaaaaggatgtcctggttcaactggctttccacctaagcgcaagactcaccagttttttgtaaaatcttttactactcctaccaagtgtcatcagtgtacctccttgatggtgggtttaataagacagggctgttcatgtgaagtgtgtggattctcatgccatataacttgtgtaaacaaagctccaaccacttgtccagttcctcctgaacagacaaaaggtcccctgggtatagatcctcagaaaggaataggaacagcatatgaaggtcatgtcaggattcctaagccagctggagtgaagaaagggtggcagagagcactggctatagtgtgtgacttcaaactctttctgtacgatattgctgaaggaaaagcatctcagcccagtgttgtcattagtcaagtgattgacatgagggatgaagaattttctgtgagttcagtcttggcttctgatgttatccatgcaagtcggaaagatataccctgtatatttagggtcacagcttcccagctctcagcatctaataacaaatgttcaatcctgatgctagcagacactgagaatgagaagaataagtgggtgggagtgctgagtgaattgcacaagattttgaagaaaaacaaattcagagaccgctcagtctatgttcccaaagaggcttatgacagcactctacccctcattaaaacaacccaggcagccgcaatcatagatcatgaaagaattgctttgggaaacgaagaagggttatttgttgtacatgtcaccaaagatgaaattattagagttggtgacaataagaagattcatcagattgaactcattccaaatgatcagcttgttgctgtgatctcaggacgaaatcgtcatgtacgactttttcctatgtcagcattggatgggcgagagaccgatttttacaagctgtcagaaactaaagggtgtcaaaccgtaacttctggaaaggtgcgccatggagctctcacatgcctgtgtgtggctatgaaaaggcaggtcctctgttatgaactatttcagagcaagacccgtcacagaaaatttaaagaaattcaagtcccatataatgtccagtggatggcaatcttcagtgaacaactctgtgtgggattccagtcaggatttctaagataccccttgaatggagaaggaaatccatacagtatgctccattcaaatgaccatacactatcatttattgcacatcaaccaatggatgctatctgcgcagttgagatctccagtaaagaatatctgctgtgttttaacagcattgggatatacactgactgccagggccgaagatctagacaacaggaattgatgtggccagcaaatccttcctcttgttgttacaatgcaccatatctctcggtgtacagtgaaaatgcagttgatatctttgatgtgaactccatggaatggattcagactcttcctctcaaaaaggttcgacccttaaacaatgaaggatcattaaatcttttagggttggagaccattagattaatatatttcaaaaataagatggcagaaggggacgaactggtagtacctgaaacatcagataatagtcggaaacaaatggttagaaacattaacaataagcggcgttattccttcagagtcccagaagaggaaaggatgcagcagaggagggaaatgctacgagatccagaaatgagaaataaattaatttctaatccaactaattttaatcacatagcacacatgggtcctggagatggaatacagatcctgaaagatctgcccatgaaccctcggcctcaggaaagtcggacagtattcagtggctcagtcagtattccatctatcaccaaatcccgccctgagccaggccgctccatgagtgctagcagtggcttgtcagcaaggtcatccgcacagaatggcagcgcattaaagagggaattctctggaggaagctacagtgccaagcggcagcccatgccctccccgtcagagggctctttgtcctctggaggcatggaccaaggaagtgatgccccagcgagggactttgacggagaggactctgactctccgaggcattccacagcttccaacagttccaacctaagcagccccccaagcccagcttcaccccgaaaaaccaagagcctctccctggagagcactgaccgcgggagctgggacccgtgagctgcctcagcactgggacctctcgctctccgctccctgccactcgcctcctctcactttcatctcttccctccacctcgcctgctcggcctgaaagccaccaggggctggcagcagtagcaggacagggattcaggagttctgacgacacgactctcagatccacgcccccagcctaacagcaacaacaaagacagactttccgtagcagcttagattaacgttgatttcattccatgcacttagagttgctttcagtaacattttacccctactcccaaaggtagcttaaatagacagattacacaaatgtaagtgataagaataagattagacagattttgctttcacagtagagtctcattatagtcctaaaatagctcatgggcttctccgcatccagaagggagaattggtccctggagtggctcactaagctcttaatcagcaaacgcagtgagtatcaacctgattgttgccaggaaatccttatgaattaaaacaatgcatattttactacagtacagagtttaaatgaatacataaatgtagaagtactgaatgtatatatttaaaaggagcctcttgtattcaacaaaagatggatgcatatataagagagatgatttaatttaaagaaatatgttgtttcttgtctgtaatgtaatgtaaagggtggaaaggcctcaagctcacatttgtagagagagagcgagagaaatcagagttccctttattgccctgtcctcaaactggtcataggctctagtcacctggggagctgtagaaaacacttgcagagccaggttttgctggtttggggcatgccctgggcaccagagctttaacatttgaagccacttcagcagcagcagcaaaaggcgaactcatctctacccaagatgtttcttttcctagtggtggaatttgaacacttctcactttttattgtattttatcttccgcagataaatgtagaaatacacgattctgtcacctctgatcccttccatctgaaaggttacaaggagtgttgtagcttctgaaggtgcagaaaacaatttctaaaaatgcttttattcctgggctaatcctgtccctccctaagtcacagcgaggtgtctgtcccagggctggagatgcttcccaaggaggagtctgttttgttgagagtgggcgtgggcttcttcacataagcctggggaaggaagaaaaaacggctttcattaccaaataatgtaaaacctcaaaagcaagggcttcaacagccttaaccaaatattattccccatagccagtggaaaatggatgtgacaaccccagtgcgcaggccagagtgagtgagcccagcacggcgctccgactggcttcctctctcaggtgctggattgtggggttagtggcatttccagctggattcctcctgttgtagttgccataaggaaatgagatgcagaatcagaaggatctatttctacagaatcatttcaccagttaagcacatgagtagagaaagagataaaaataaaagtatctcatgaaggaaagagattttgcctctcttttacttttcacctaagtttctctgagaaatagagacaggattctctctttaaaattcagtgaaaatgaagaaagttttcctgcagttgctaacctgagttgcagtgtttaaggccatcatttcactgctgctgtctgtgactccacgtctgtgtcactgaggtgacctgcgtgtcactgaggtggccaccatgctggcctgcggcatgtgcagggagctgaggctgtttccaggtgatgctgctgtgtggagaaggttctgagatgcagtgagggaagaaaggatcctgctggggattccattgtaagcacctataatcgggaattttcatgtaacagctttgacatttaaacattctgagtttggtgccagctcagatttgattatattttattttggatgggtgtaattcacagcacagttctaatctcccaaatctttctgctttttagaatgaagtataaaaatacttttctcacctgaataccaagggttggccctttagttggatcattgtcatatgacttggtagatccttgtcctcagcacctcacgtgagagaagggagtcagccagccggccccctgcttggtgctcgtgaccagctcgcaccccttctgtccacccttctctcctctcctccccactctccccaccctcctcactctccccaccctcctcactctccccaccctcccctcctctcctcctcactcttcccaccctccccatccccaccctccccatcctcctcttccctttccccttgccttctcctctctcccttctcttctcaggcagggaggaggccatcccaagccgagattaacaggacttgacataagccattagtttgtagctttgacaagtaattatgaatttttgttgcttataggtgcttattttgcaaaggatgcttttaagatcaaaataataaccctacctaaagtctagctccactgctatgggtcatactcttcagcctcccaacagggcagagagagagagctactgaggcttgtctaggttgccaggctaactgggcgacttgtccatattcaccccatggattgcaccatggcactctttgatttttccactgcaatggcaagtaatctcatcagtcataatagagcagtcccgaatgcgtgcagattctaaaagcagggctttaggagagaaacactgccagggggaatagttttggggagggttttcccaaaataacggtcatcctactgggtttatcccacccttaaatatgaagcctgttacctccagaagcttctgagaagaatgatgtgaaaagacagggagtgggttctaggcaaagaaaacataatgaccattcagaggagtcagtagcacagctcacagataaagtattttattactatctgaagttttcttttgttttcatgcaggacattttaaaaacgtatatggcagcagaaacctgtttctcaatagaaaaaatacattcagaggcatttctgggatagtctatctgtgttagtatttggtgctatctatgtccagccaagttatctaccctcaaattctgactaatcatgtttgtgctttgggtatttaaaattacatacatatatattctttttgccaaaaacaaaagtcttgcttcttgtcaaatgattgctaaagtagatcttacattttttgttattatgtatgtatttatacacatccccaacacacttagtgatttctgttatttcctagggagcacagctttaaggctatgagatacaactaaaaggagcccatctatttggttttccagccaattattgtactcacatttcaggggagaatctgaaattcctgtcatgtttacagcaacaatctatcattcctggctagctctcagcctctctctccttccataggttagaattatgtcattttgttacttagtggccacgtctatttctgagaaagactggttacatttatgtggcatctcaggtatcattaaggaaaagccagagcaggggtgagcagaggtcaaaaccacagacgcagcagggccatttgccgcctttggccgggatcacaaccactgcagtctcccagcaggtaggccttgccaagcctaaggctccccatccaatctagacagaggggcgctcagagcagactttgccgtagcccatgtctggtgagcacaacagggaatgaattgggcactccactcccccgtctctctggcccagccctgaactagatgagctgcatttcatggagcccattttaaaatctctttccttatgactttgttactcaagtccagagttctctgtgcacttctgctagataaggagtgtaagccctgccccccagcactggcagcacgctgggccctccccacacaggacaccgtgcagttccgggggaagctgactcaaatcaaccttgaaatctcatgaaaacaaaatgacttgtctttttatttgatagtgtaatatcattcattttataaattttttagggtttttctcgtaatattgtacagttttgcatggcctggtgtgatcattttttggttagaatataatgctgacaaatgtggatggaggggaagatactgctttagcctatcactccttattttattttgtttggttttatgccctcagtgtcttagggaactttttaagagatcctctgctaccaaacaatgatgtggattcttttgcacagaaatatttaaggtgggatggtaaaaaatgtcacaaaagactcctcaccaatactttatgttgatatcacttaatattaaccagactttgctgtattgcaataaaacagagaactgtta

SEQ ID NO: 115821 - DNA, 10855 bp, Homo sapiens
  Payload ID: 2600
  Gene Symbol: CDC42BPA
  Gene Name: CDC42 binding protein kinase alpha (DMPK-like)
  Uniprot ID: Q5VT25
  ENST ID: ENST00000366769
  CDS Start-End: 1293-6452
tccgcaagcctccgcctctgtgcggcgggactggaggagcctcgctgagcccagggcgcgagcgcgagaggagagggaaggcgggggagggctggaagggagaggaagggagtggttgggagccgggctgccgcagcctctagtctcctcagccgcggaagcgacccctcctcctgcgccgggccgcctccctcctcgctgtggaaagatgcccttagcccaggggtgtgaagaagggggagaagtagctgccagagccgcccgcgccgccgccgcagctgctgctgcttgtgtcctttgaattcagagaagcacccccccgcctggggcgtcgggagcctccggcgcggcggcccggtgcgggtgtcggggagaccgggctctctgcccggcgcggcgcggcgcggctcggcccacgagcgaccaccgacatggagtgggctcgggcggccaagtagccgcttctccggagcccggtgccagtgccgcccgcagcccgccttccacccccggccgcgccgccggtcaggccctagggtgaagccgggaggaaaatgaagagttttcaccggaatccgttgaaaataggactgactgcaaagccttaaagaaagaaggacctcgggaggagaaacgaaaagccgcctccgggcaagacttggcgtgctccgagccgaggggctgcttcagggacctcgccccctccctttcccgctggagaaattgccgctgatgcattatccaagtggtggttgggaggatttgcagcaacatttttggttttccctcccccttctatgcattctgtttttttcctcccttttctgtttttcttcttcccgggaagtgaattgctgatgcaaatcggactttattcattaatgatgcaaccggattcgtttcaggattacgttgcacgagttgaattttgaatgaaggagaagagtttttttttttttttttaaagaagtgttgactctctagttcgttgtacttttaattattattttatttaaatatacgacttaattgtattcttttaaaaatgcattaagtatatattttatggtaatttaccctcaaaatatatgtatatgggtgaaattgaagacgcttcagttaagtgaggttactggtgtgttggatgtttaattcagcaccagcattgcatgacagttgtttgaataacaagtggtttatttttaaaaccataccttttaaaatttaggttcagataatagtaaaagtcatcataataatttaaaggaaaaccagcagaaatcgaagcaaacatgtctggagaagtgcgtttgaggcagttggagcagtttattttggacgggcccgctcagaccaatgggcagtgcttcagtgtggagacattactggatatactcatctgcctttatgatgaatgcaataattctccattgagaagagagaagaacattctcgaatacctagaatgggctaaaccatttacttctaaagtgaaacaaatgcgattacatagagaagactttgaaatattaaaggtgattggtcgaggagcttttggggaggttgctgtagtaaaactaaaaaatgcagataaagtgtttgccatgaaaatattgaataaatgggaaatgctgaaaagagctgagacagcatgttttcgtgaagaaagggatgtattagtgaatggagacaataaatggattacaaccttgcactatgctttccaggatgacaataacttatacctggttatggattattatgttggtggggatttgcttactctactcagcaaatttgaagatagattgcctgaagatatggctagattttacttggctgagatggtgatagcaattgactcagttcatcagctacattatgtacacagagacattaaacctgacaatatactgatggatatgaatggacatattcggttagcagattttggttcttgtctgaagctgatggaagatggaacggttcagtcctcagtggctgtaggaactccagattatatctctcctgaaatccttcaagccatggaagatggaaaagggagatatggacctgaatgtgactggtggtctttgggggtctgtatgtatgaaatgctttacggagaaacaccattttatgcagaatcgctggtggagacatacggaaaaatcatgaaccacaaagagaggtttcagtttccagcccaagtgactgatgtgtctgaaaatgctaaggatcttattcgaaggctcatttgtagcagagaacatcgacttggtcaaaatggaatagaagactttaagaaacacccatttttcagtggaattgattgggataatattcggaactgtgaagcaccttatattccagaagttagtagcccaacagatacatcgaattttgatgtagatgatgattgtttaaaaaattctgaaacgatgcccccaccaacacatactgcattttctggccaccatctgccatttgttggttttacatatactagtagctgtgtactttctgatcggagctgtttaagagttacggctggtcccacctcactggatcttgatgttaatgttcagaggactctagacaacaacttagcaactgaagcttatgaaagaagaattaagcgccttgagcaagaaaaacttgaactcagtagaaaacttcaagagtcaacacagactgtccaagctctgcagtattcaactgttgatggtccactaacagcaagcaaagatttagaaataaaaaacttaaaagaagaaattgaaaaactaagaaaacaagtaacagaatcaagtcatttggaacagcaacttgaagaagctaatgctgtgaggcaagaactagatgatgcttttagacaaatcaaggcttatgaaaaacaaatcaaaacgttacaacaagaaagagaagatctaaataaggaactagtccaggctagtgagcgattaaaaaaccaatccaaagagctgaaagacgcacactgtcagaggaaactggccatgcaggaattcatggagatcaatgagcggctaacagaattgcacacccaaaaacagaaacttgctcgccatgtccgagataaggaagaagaggtggacctggtgatgcaaaaagttgaaagcttaaggcaagaactgcgcagaacagaaagagccaaaaaagagctggaagttcatacagaagctctagctgctgaagcatctaaagacaggaagctacgtgaacagagtgagcactattctaagcaactggaaaatgaattggagggactgaagcaaaaacaaattagttactcaccaggagtatgcagcatagaacatcagcaagagataaccaaactaaagactgatttggaaaagaaaagtatcttttatgaagaagaattatctaaaagagaaggaatacatgcaaatgaaataaaaaatcttaagaaagaactgcatgattcagaaggtcagcaacttgctctcaacaaagaaattatgattttaaaagacaaattggaaaaaaccagaagagaaagtcaaagtgaaagggaggaatttgaaagtgagttcaaacaacaatatgaacgagaaaaagtgttgttaactgaagaaaataaaaagctgacgagtgaacttgataagcttactactttgtatgagaacttaagtatacacaaccagcagttagaagaagaggttaaagatctagcagacaagaaagaatcagttgcacattgggaagcccaaatcacagaaataattcagtgggtcagcgatgaaaaggatgcacgagggtatcttcaggccttagcttctaaaatgactgaagaattggaggcattaagaaattccagcttgggtacacgagcaacagatatgccctggaaaatgcgtcgttttgcgaaactggatatgtcagctagactggagttgcagtcggctctggatgcagaaataagagccaaacaggccatccaagaagagttgaataaagttaaagcatctaatatcataacagaatgtaaactaaaagattcagagaagaagaacttggaactactctcagaaatcgaacagctgataaaggacactgaagagcttagatctgaaaagggtatagagcaccaagactcacagcattctttcttggcatttttgaatacgcctaccgatgctctggatcaatttgaaactgtagactccactccactttcagttcacacaccaaccttaaggaaaaaaggatgtcctggttcaactggctttccacctaagcgcaagactcaccagttttttgtaaaatcttttactactcctaccaagtgtcatcagtgtacctccttgatggtgggtttaataagacagggctgttcatgtgaagtgtgtggattctcatgccatataacttgtgtaaacaaagctccaaccacttgtccagttcctcctgaacagacaaaaggtcccctgggtatagatcctcagaaaggaataggaacagcatatgaaggtcatgtcaggattcctaagccagctggagtgaagaaagggtggcagagagcactggctatagtgtgtgacttcaaactctttctgtacgatattgctgaaggaaaagcatctcagcccagtgttgtcattagtcaagtgattgacatgagggatgaagaattttctgtgagttcagtcttggcttctgatgttatccatgcaagtcggaaagatataccctgtatatttagggtcacagcttcccagctctcagcatctaataacaaatgttcaatcctgatgctagcagacactgagaatgagaagaataagtgggtgggagtgctgagtgaattgcacaagattttgaagaaaaacaaattcagagaccgctcagtctatgttcccaaagaggcttatgacagcactctacccctcattaaaacaacccaggcagccgcaatcatagatcatgaaagaattgctttgggaaacgaagaagggttatttgttgtacatgtcaccaaagatgaaattattagagttggtgacaataagaagattcatcagattgaactcattccaaatgatcagcttgttgctgtgatctcaggacgaaatcgtcatgtacgactttttcctatgtcagcattggatgggcgagagaccgatttttacaagctgtcagaaactaaagggtgtcaaaccgtaacttctggaaaggtgcgccatggagctctcacatgcctgtgtgtggctatgaaaaggcaggtcctctgttatgaactatttcagagcaagacccgtcacagaaaatttaaagaaattcaagtcccatataatgtccagtggatggcaatcttcagtgaacaactctgtgtgggattccagtcaggatttctaagataccccttgaatggagaaggaaatccatacagtatgctccattcaaatgaccatacactatcatttattgcacatcaaccaatggatgctatctgcgcagttgagatctccagtaaagaatatctgctgtgttttaacagcattgggatatacactgactgccagggccgaagatctagacaacaggaattgatgtggccagcaaatccttcctcttgttgttacaatgcaccatatctctcggtgtacagtgaaaatgcagttgatatctttgatgtgaactccatggaatggattcagactcttcctctcaaaaaggttcgacccttaaacaatgaaggatcattaaatcttttagggttggagaccattagattaatatatttcaaaaataagatggcagaaggggacgaactggtagtacctgaaacatcagataatagtcggaaacaaatggttagaaacattaacaataagcggcgttattccttcagagtcccagaagaggaaaggatgcagcagaggagggaaatgctacgagatccagaaatgagaaataaattaatttctaatccaactaattttaatcacatagcacacatgggtcctggagatggaatacagatcctgaaagatctgcccatgaaccctcggcctcaggaaagtcggacagtattcagtggctcagtcagtattccatctatcaccaaatcccgccctgagccaggccgctccatgagtgctagcagtggcttgtcagcaaggtcatccgcacagaatggcagcgcattaaagagggaattctctggaggaagctacagtgccaagcggcagcccatgccctccccgtcagagggctctttgtcctctggaggcatggaccaaggaagtgatgccccagcgagggactttgacggagaggactctgactctccgaggcattccacagcttccaacagttccaacctaagcagccccccaagcccagcttcaccccgaaaaaccaagagcctctccctggagagcactgaccgcgggagctgggacccgtgagctgcctcagcactgggacctctcgctctccgctccctgccactcgcctcctctcactttcatctcttccctccacctcgcctgctcggcctgaaagccaccaggggctggcagcagtagcaggacagggattcaggagttctgacgacacgactctcagatccacgcccccagcctaacagcaacaacaaagacagactttccgtagcagcttagattaacgttgatttcattccatgcacttagagttgctttcagtaacattttacccctactcccaaaggtagcttaaatagacagattacacaaatgtaagtgataagaataagattagacagattttgctttcacagtagagtctcattatagtcctaaaatagctcatgggcttctccgcatccagaagggagaattggtccctggagtggctcactaagctcttaatcagcaaacgcagtgagtatcaacctgattgttgccaggaaatccttatgaattaaaacaatgcatattttactacagtacagagtttaaatgaatacataaatgtagaagtactgaatgtatatatttaaaaggagcctcttgtattcaacaaaagatggatgcatatataagagagatgatttaatttaaagaaatatgttgtttcttgtctgtaatgtaatgtaaagggtggaaaggcctcaagctcacatttgtagagagagagcgagagaaatcagagttccctttattgccctgtcctcaaactggtcataggctctagtcacctggggagctgtagaaaacacttgcagagccaggttttgctggtttggggcatgccctgggcaccagagctttaacatttgaagccacttcagcagcagcagcaaaaggcgaactcatctctacccaagatgtttcttttcctagtggtggaatttgaacacttctcactttttattgtattttatcttccgcagataaatgtagaaatacacgattctgtcacctctgatcccttccatctgaaaggttacaaggagtgttgtagcttctgaaggtgcagaaaacaatttctaaaaatgcttttattcctgggctaatcctgtccctccctaagtcacagcgaggtgtctgtcccagggctggagatgcttcccaaggaggagtctgttttgttgagagtgggcgtgggcttcttcacataagcctggggaaggaagaaaaaacggctttcattaccaaataatgtaaaacctcaaaagcaagggcttcaacagccttaaccaaatattattccccatagccagtggaaaatggatgtgacaaccccagtgcgcaggccagagtgagtgagcccagcacggcgctccgactggcttcctctctcaggtgctggattgtggggttagtggcatttccagctggattcctcctgttgtagttgccataaggaaatgagatgcagaatcagaaggatctatttctacagaatcatttcaccagttaagcacatgagtagagaaagagataaaaataaaagtatctcatgaaggaaagagattttgcctctcttttacttttcacctaagtttctctgagaaatagagacaggattctctctttaaaattcagtgaaaatgaagaaagttttcctgcagttgctaacctgagttgcagtgtttaaggccatcatttcactgctgctgtctgtgactccacgtctgtgtcactgaggtgacctgcgtgtcactgaggtggccaccatgctggcctgcggcatgtgcagggagctgaggctgtttccaggtgatgctgctgtgtggagaaggttctgagatgcagtgagggaagaaaggatcctgctggggattccattgtaagcacctataatcgggaattttcatgtaacagctttgacatttaaacattctgagtttggtgccagctcagatttgattatattttattttggatgggtgtaattcacagcacagttctaatctcccaaatctttctgctttttagaatgaagtataaaaatacttttctcacctgaataccaagggttggccctttagttggatcattgtcatatgacttggtagatccttgtcctcagcacctcacgtgagagaagggagtcagccagccggccccctgcttggtgctcgtgaccagctcgcaccccttctgtccacccttctctcctctcctccccactctccccaccctcctcactctccccaccctcctcactctccccaccctcccctcctctcctcctcactcttcccaccctccccatccccaccctccccatcctcctcttccctttccccttgccttctcctctctcccttctcttctcaggcagggaggaggccatcccaagccgagattaacaggacttgacataagccattagtttgtagctttgacaagtaattatgaatttttgttgcttataggtgcttattttgcaaaggatgcttttaagatcaaaataataaccctacctaaagtctagctccactgctatgggtcatactcttcagcctcccaacagggcagagagagagagctactgaggcttgtctaggttgccaggctaactgggcgacttgtccatattcaccccatggattgcaccatggcactctttgatttttccactgcaatggcaagtaatctcatcagtcataatagagcagtcccgaatgcgtgcagattctaaaagcagggctttaggagagaaacactgccagggggaatagttttggggagggttttcccaaaataacggtcatcctactgggtttatcccacccttaaatatgaagcctgttacctccagaagcttctgagaagaatgatgtgaaaagacagggagtgggttctaggcaaagaaaacataatgaccattcagaggagtcagtagcacagctcacagataaagtattttattactatctgaagttttcttttgttttcatgcaggacattttaaaaacgtatatggcagcagaaacctgtttctcaatagaaaaaatacattcagaggcatttctgggatagtctatctgtgttagtatttggtgctatctatgtccagccaagttatctaccctcaaattctgactaatcatgtttgtgctttgggtatttaaaattacatacatatatattctttttgccaaaaacaaaagtcttgcttcttgtcaaatgattgctaaagtagatcttacattttttgttattatgtatgtatttatacacatccccaacacacttagtgatttctgttatttcctagggagcacagctttaaggctatgagatacaactaaaaggagcccatctatttggttttccagccaattattgtactcacatttcaggggagaatctgaaattcctgtcatgtttacagcaacaatctatcattcctggctagctctcagcctctctctccttccataggttagaattatgtcattttgttacttagtggccacgtctatttctgagaaagactggttacatttatgtggcatctcaggtatcattaaggaaaagccagagcaggggtgagcagaggtcaaaaccacagacgcagcagggccatttgccgcctttggccgggatcacaaccactgcagtctcccagcaggtaggccttgccaagcctaaggctccccatccaatctagacagaggggcgctcagagcagactttgccgtagcccatgtctggtgagcacaacagggaatgaattgggcactccactcccccgtctctctggcccagccctgaactagatgagctgcatttcatggagcccattttaaaatctctttccttatgactttgttactcaagtccagagttctctgtgcacttctgctagataaggagtgtaagccctgccccccagcactggcagcacgctgggccctccccacacaggacaccgtgcagttccgggggaagctgactcaaatcaaccttgaaatctcatgaaaacaaaatgacttgtctttttatttgatagtgtaatatcattcattttataaattttttagggtttttctcgtaatattgtacagttttgcatggcctggtgtgatcattttttggttagaatataatgctgacaaatgtggatggaggggaagatactgctttagcctatcactccttattttattttgtttggttttatgccctcagtgtcttagggaactttttaagagatcctctgctaccaaacaatgatgtggattcttttgcacagaaatatttaaggtgggatggtaaaaaatgtcacaaaagactcctcaccaatactttatgttgatatcacttaatattaaccagactttgctgtattgcaataaaacagagaactgtta

SEQ ID NO: 115822 - DNA, 3786 bp, Homo sapiens
  Payload ID: 2600
  Gene Symbol: CDC42BPA
  Gene Name: CDC42 binding protein kinase alpha (DMPK-like)
  ENST ID: ENST00000442054
  CDS Start-End: 1-3145
agaaggaatacatgcaaatgaaataaaaaatcttaagaaagaactgcatgattcagaaggtcagcaacttgctctcaacaaagaaattatgattttaaaagacaaattggaaaaaaccagaagagaaagtcaaagtgaaagggaggaatttgaaagtgagttcaaacaacaatatgaacgagaaaaagtgttgttaactgaagaaaataaaaagctgacgagtgaacttgataagcttactactttgtatgagaacttaagtatacacaaccagcagttagaagaagaggttaaagatctagcagacaagaaagaatcagttgcacattgggaagcccaaatcacagaaataattcagtgggtcagcgatgaaaaggatgcacgagggtatcttcaggccttagcttctaaaatgactgaagaattggaggcattaagaaattccagcttgggtacacgagcaacagatatgccctggaaaatgcgtcgttttgcgaaactggatatgtcagctagactggagttgcagtcggctctggatgcagaaataagagccaaacaggccatccaagaagagttgaataaagttaaagcatctaatatcataacagaatgtaaactaaaagattcagagaagaagaacttggaactactctcagaaatcgaacagctgataaaggacactgaagagcttagatctgaaaagggtatagagcaccaagactcacagcattctttcttggcatttttgaatacgcctaccgatgctctggatcaatttgaaactgatcccgttgagaacacatatgtatggaacccgagcgtcaagtttcacatccagtcacggtccacatctccttccacatctagtgaagctgagccagttaagactgtagactccactccactttcagttcacacaccaaccttaaggaaaaaaggatgtcctggttcaactggctttccacctaagcgcaagactcaccagttttttgtaaaatcttttactactcctaccaagtgtcatcagtgtacctccttgatggtgggtttaataagacagggctgttcatgtgaagtgtgtggattctcatgccatataacttgtgtaaacaaagctccaaccacttgtccagttcctcctgaacagacaaaaggtcccctgggtatagatcctcagaaaggaataggaacagcatatgaaggtcatgtcaggattcctaagccagctggagtgaagaaagggtggcagagagcactggctatagtgtgtgacttcaaactctttctgtacgatattgctgaaggaaaagcatctcagcccagtgttgtcattagtcaagtgattgacatgagggatgaagaattttctgtgagttcagtcttggcttctgatgttatccatgcaagtcggaaagatataccctgtatatttagggtcacagcttcccagctctcagcatctaataacaaatgttcaatcctgatgctagcagacactgagaatgagaagaataagtgggtgggagtgctgagtgaattgcacaagattttgaagaaaaacaaattcagagaccgctcagtctatgttcccaaagaggcttatgacagcactctacccctcattaaaacaacccaggcagccgcaatcatagatcatgaaagaattgctttgggaaacgaagaagggttatttgttgtacatgtcaccaaagatgaaattattagagttggtgacaataagaagattcatcagattgaactcattccaaatgatcagcttgttgctgtgatctcaggacgaaatcgtcatgtacgactttttcctatgtcagcattggatgggcgagagaccgatttttacaagctgtcagaaactaaagggtgtcaaaccgtaacttctggaaaggtgcgccatggagctctcacatgcctgtgtgtggctatgaaaaggcaggtcctctgttatgaactatttcagagcaagacccgtcacagaaaatttaaagaaattcaagtcccatataatgtccagtggatggcaatcttcagtgaacaactctgtgtgggattccagtcaggatttctaagataccccttgaatggagaaggaaatccatacagtatgctccattcaaatgaccatacactatcatttattgcacatcaaccaatggatgctatctgcgcagttgagatctccagtaaagaatatctgctgtgttttaacagcattgggatatacactgactgccagggccgaagatctagacaacaggaattgatgtggccagcaaatccttcctcttgttgttacaatgcaccatatctctcggtgtacagtgaaaatgcagttgatatctttgatgtgaactccatggaatggattcagactcttcctctcaaaaaggttcgacccttaaacaatgaaggatcattaaatcttttagggttggagaccattagattaatatatttcaaaaataagatggcagaaggggacgaactggtagtacctgaaacatcagataatagtcggaaacaaatggttagaaacattaacaataagcggcgttattccttcagagtcccagaagaggaaaggatgcagcagaggagggaaatgctacgagatccagaaatgagaaataaattaatttctaatccaactaattttaatcacatagcacacatgggtcctggagatggaatacagatcctgaaagatctgcccatgaaccctcggcctcaggaaagtcggacagtattcagtggctcagtcagtattccatctatcaccaaatcccgccctgagccaggccgctccatgagtgctagcagtggcttgtcagcaaggtcatccgcacagaatggcagcgcattaaagagggaattctctggaggaagctacagtgccaagcggcagcccatgccctccccgtcagagggctctttgtcctctggaggcatggaccaaggaagtgatgccccagcgagggactttgacggagaggactctgactctccgaggcattccacagcttccaacagttccaacctaagcagccccccaagcccagcttcaccccgaaaaaccaagagcctctccctggagagcactgaccgcgggagctgggacccgtgagctgcctcagcactgggacctctcgctctccgctccctgccactcgcctcctctcactttcatctcttccctccacctcgcctgctcggcctgaaagccaccaggggctggcagcagtagcaggacagggattcaggagttctgacgacacgactctcagatccacgcccccagcctaacagcaacaacaaagacagactttccgtagcagcttagattaacgttgatttcattccatgcacttagagttgctttcagtaacattttacccctactcccaaaggtagcttaaatagacagattacacaaatgtaagtgataagaataagattagacagattttgctttcacagtagagtctcattatagtcctaaaatagctcatgggcttctccgcatccagaagggagaattggtccctggagtggctcactaagctcttaatcagcaaacgcagtgagtatcaacctgattgttgccaggaaatccttatgaattaaaacaatgcatattttactacagtacagagtttaaatgaatacataaatgtagaagtactgaatgtatatatttaaaaggagcctcttgtattcaacaaaagatggatgcatatataagagagatgatttaatttaaagaaa

SEQ ID NO: 115823 - DNA, 2501 bp, Homo sapiens
  Payload ID: 2600
  Gene Symbol: CDC42BPA
  Gene Name: CDC42 binding protein kinase alpha (DMPK-like)
  ENST ID: ENST00000429440
  CDS Start-End: 1-1639
cgatattgctgaaggaaaagcatctcagcccagtgttgtcattagtcaagtgattgacatgagggatgaagaattttctgtgagttcagtcttggcttctgatgttatccatgcaagtcggaaagatataccctgtatatttagggtcacagcttcccagctctcagcatctaataacaaatgttcaatcctgatgctagcagacactgagaatgagaagaataagtgggtgggagtgctgagtgaattgcacaagattttgaagaaaaacaaattcagagaccgctcagtctatgttcccaaagaggcttatgacagcactctacccctcattaaaacaacccaggcagccgcaatcatagatcatgaaagaattgctttgggaaacgaagaagggttatttgttgtacatgtcaccaaagatgaaattattagagttggtgacaataagaagattcatcagattgaactcattccaaatgatcagcttgttgctgtgatctcaggacgaaatcgtcatgtacgactttttcctatgtcagcattggatgggcgagagaccgatttttacaagctgtcagaaactaaagggtgtcaaaccgtaacttctggaaaggtgcgccatggagctctcacatgcctgtgtgtggctatgaaaaggcaggtcctctgttatgaactatttcagagcaagacccgtcacagaaaatttaaagaaattcaagtcccatataatgtccagtggatggcaatcttcagtgaacaactctgtgtgggattccagtcaggatttctaagataccccttgaatggagaaggaaatccatacagtatgctccattcaaatgaccatacactatcatttattgcacatcaaccaatggatgctatctgcgcagttgagatctccagtaaagaatatctgctgtgttttaacagcattgggatatacactgactgccagggccgaagatctagacaacaggaattgatgtggccagcaaatccttcctcttgttgttacaatgcaccatatctctcggtgtacagtgaaaatgcagttgatatctttgatgtgaactccatggaatggattcagactcttcctctcaaaaaggttcgacccttaaacaatgaaggatcattaaatcttttagggttggagaccattagattaatatatttcaaaaataagatggcagaaggggacgaactggtagtacctgaaacatcagataatagtcggaaacaaatggttagaaacattaacaataagcggcgttattccttcagagtcccagaagaggaaaggatgcagcagaggagggaaatgctacgagatccagaaatgagaaataaattaatttctaatccaactaattttaatcacatagcacacatgggtcctggagatggaatacagatcctgaaagatctgcccatgaaccctcggcctcaggaaagtcggacagtattcagtggctcagtcagtattccatctatcaccaaatcccgccctgagccaggccgctccatgagtgctagcagtggcttgtcagcaagtaagtgccggggctacaggaaggtgcctctgagacagggtgacccccagctccctcccctcctgtcccgtgggtgacatgtccttcacttacgtgtgcccattgcattctcaagtggctgcagtgtctcagaccctgctgggtaatgcctaataggcacaaatgcagttgttaagaaaatagtcccagagtccttctagagtgtacaggccatctgggagacagacaaatatgattacaaattgtgatgataaaggctctgaaggaagtaaacagcatacattaatagagaataacaaggggtagctgttagggatgaatccctacttggcagaataattaggaaaatcactccctagaggtggagtcatgtttgagtaatgtttggttaactgaaagaaggctagtatggctacatggtagtggtgaggaagtaacaaaaattagagcggggtagcaggtaagggtcagaccagcagggacttgaagaccaaggtaagacattttttactttattcaaaaggaaaaggaagacttttaagtagggaagaattttctttcaatttacattcttaaaacaatcctgcgggctgccaagtggagaatggactagaggcaggaagagtggaagccagcatccagataggagactcctagagtggtcccaatggaaaccaatgagggcttgggatgcagcaggggcagaaggagagaagatggtagattctccagatatattttcagagttaaaagcagtaagacttgatgatgaattagtcatggaaaagtaagggagagagttaaagatgactcccagacttcctgctagggccttagtatgataccatttactcccatttaccaccgtttaagaaggggctgaggcaggacattccacgcatgtccaaaggtcccgaggtagcaaaaaaaaaaaaaaaa

SEQ ID NO: 115824 - DNA, 2183 bp, Homo sapiens
  Payload ID: 2600
  Gene Symbol: CDC42BPA
  Gene Name: CDC42 binding protein kinase alpha (DMPK-like)
  ENST ID: ENST00000441725
  CDS Start-End: 1-2183
ggtcagcgatgaaaaggatgcacgagggtatcttcaggccttagcttctaaaatgactgaagaattggaggcattaagaaattccagcttgggtacacgagcaacagatatgccctggaaaatgcgtcgttttgcgaaactggatatgtcagctagactggagttgcagtcggctctggatgcagaaataagagccaaacaggccatccaagaagagttgaataaagttaaagcatctaatatcataacagaatgtaaactaaaagattcagagaagaagaacttggaactactctcagaaatcgaacagctgataaaggacactgaagagcttagatctgaaaagggtatagagcaccaagactcacagcattctttcttggcatttttgaatacgcctaccgatgctctggatcaatttgaagattccttttcttcttcctcatcttcactgattgattttttggatgacactgatcccgttgagaacacatatgtatggaacccgagcgtcaagtttcacatccagtcacggtccacatctccttccacatctagtgaagctgagccagttaagactgtagactccactccactttcagttcacacaccaaccttaaggaaaaaaggatgtcctggttcaactggctttccacctaagcgcaagactcaccagttttttgtaaaatcttttactactcctaccaagtgtcatcagtgtacctccttgatggtgggtttaataagacagggctgttcatgtgaagtgtgtggattctcatgccatataacttgtgtaaacaaagctccaaccacttgtccagttcctcctgaacagacaaaaggtcccctgggtatagatcctcagaaaggaataggaacagcatatgaaggtcatgtcaggattcctaagccagctggagtgaagaaagggtggcagagagcactggctatagtgtgtgacttcaaactctttctgtacgatattgctgaaggaaaagcatctcagcccagtgttgtcattagtcaagtgattgacatgagggatgaagaattttctgtgagttcagtcttggcttctgatgttatccatgcaagtcggaaagatataccctgtatatttagggtcacagcttcccagctctcagcatctaataacaaatgttcaatcctgatgctagcagacactgagaatgagaagaataagtgggtgggagtgctgagtgaattgcacaagattttgaagaaaaacaaattcagagaccgctcagtctatgttcccaaagaggcttatgacagcactctacccctcattaaaacaacccaggcagccgcaatcatagatcatgaaagaattgctttgggaaacgaagaagggttatttgttgtacatgtcaccaaagatgaaattattagagttggtgacaataagaagattcatcagattgaactcattccaaatgatcagcttgttgctgtgatctcaggacgaaatcgtcatgtacgactttttcctatgtcagcattggatgggcgagagaccgatttttacaagctgtcagaaactaaagggtgtcaaaccgtaacttctggaaaggtgcgccatggagctctcacatgcctgtgtgtggctatgaaaaggcaggtcctctgttatgaactatttcagagcaagacccgtcacagaaaatttaaagaaattcaagtcccatataatgtccagtggatggcaatcttcagtgaacaactctgtgtgggattccagtcaggatttctaagataccccttgaatggagaaggaaatccatacagtatgctccattcaaatgaccatacactatcatttattgcacatcaaccaatggatgctatctgcgcagttgagatctccagtaaagaatatctgctgtgttttaacagcattgggatatacactgactgccagggccgaagatctagacaacaggaattgatgtggccagcaaatccttcctcttgttgttacaatgcaccatatctctcggtgtacagtgaaaatgcagttgatatctttgatgtgaactccatggaatggattcagactcttcctctcaaaaaggttcgacccttaaacaatgaaggatcattaaatcttttagggttggagaccattagattaatatatttcaaaaataagatggcag

SEQ ID NO: 115825 - DNA, 7355 bp, Homo sapiens
  Payload ID: 2600
  Gene Symbol: CDC42BPA
  Gene Name: CDC42 binding protein kinase alpha (DMPK-like)
  ENST ID: ENST00000448940
  CDS Start-End: 1-2953
gcagttagaagaagaggttaaagatctagcagacaagaaagaatcagttgcacattgggaagcccaaatcacagaaataattcagtgggtcagcgatgaaaaggatgcacgagggtatcttcaggccttagcttctaaaatgactgaagaattggaggcattaagaaattccagcttgggtacacgagcaacagatatgccctggaaaatgcgtcgttttgcgaaactggatatgtcagctagactggagttgcagtcggctctggatgcagaaataagagccaaacaggccatccaagaagagttgaataaagttaaagcatctaatatcataacagaatgtaaactaaaagattcagagaagaagaacttggaactactctcagaaatcgaacagctgataaaggacactgaagagcttagatctgaaaagggtatagagcaccaagactcacagcattctttcttggcatttttgaatacgcctaccgatgctctggatcaatttgaaactgtagactccactccactttcagttcacacaccaaccttaaggaaaaaaggatgtcctggttcaactggctttccacctaagcgcaagactcaccagttttttgtaaaatcttttactactcctaccaagtgtcatcagtgtacctccttgatggtgggtttaataagacagggctgttcatgtgaagtgtgtggattctcatgccatataacttgtgtaaacaaagctccaaccacttgtccagttcctcctgaacagacaaaaggtcccctgggtatagatcctcagaaaggaataggaacagcatatgaaggtcatgtcaggattcctaagccagctggagtgaagaaagggtggcagagagcactggctatagtgtgtgacttcaaactctttctgtacgatattgctgaaggaaaagcatctcagcccagtgttgtcattagtcaagtgattgacatgagggatgaagaattttctgtgagttcagtcttggcttctgatgttatccatgcaagtcggaaagatataccctgtatatttagggtcacagcttcccagctctcagcatctaataacaaatgttcaatcctgatgctagcagacactgagaatgagaagaataagtgggtgggagtgctgagtgaattgcacaagattttgaagaaaaacaaattcagagaccgctcagtctatgttcccaaagaggcttatgacagcactctacccctcattaaaacaacccaggcagccgcaatcatagatcatgaaagaattgctttgggaaacgaagaagggttatttgttgtacatgtcaccaaagatgaaattattagagttggtgacaataagaagattcatcagattgaactcattccaaatgatcagcttgttgctgtgatctcaggacgaaatcgtcatgtacgactttttcctatgtcagcattggatgggcgagagaccgatttttacaagctgtcagaaactaaagggtgtcaaaccgtaacttctggaaaggtgcgccatggagctctcacatgcctgtgtgtggctatgaaaaggcaggtcctctgttatgaactatttcagagcaagacccgtcacagaaaatttaaagaaattcaagtcccatataatgtccagtggatggcaatcttcagtgaacaactctgtgtgggattccagtcaggatttctaagataccccttgaatggagaaggaaatccatacagtatgctccattcaaatgaccatacactatcatttattgcacatcaaccaatggatgctatctgcgcagttgagatctccagtaaagaatatctgctgtgttttaacagcattgggatatacactgactgccagggccgaagatctagacaacaggaattgatgtggccagcaaatccttcctcttgttgttacaatgcaccatatctctcggtgtacagtgaaaatgcagttgatatctttgatgtgaactccatggaatggattcagactcttcctctcaaaaaggttcgacccttaaacaatgaaggatcattaaatcttttagggttggagaccattagattaatatatttcaaaaataagatggcagaaggggacgaactggtagtacctgaaacatcagataatagtcggaaacaaatggttagaaacattaacaataagcggcgttattccttcagagtcccagaagaggaaaggatgcagcagaggagggaaatgctacgagatccagaaatgagaaataaattaatttctaatccaactaattttaatcacatagcacacatgggtcctggagatggaatacagatcctgaaagatctgcccatgccaggtttcccttatccatcccctcatcatcactccggtctgatctcctctccgatcaactttgaacacatctatcacatgactgttaattctgctgaaaaatttctctctcctgattccataaaccctgaatattccccgtctctgcgctctgtccctggtacaccaagctttatgactctgaggaaccctcggcctcaggaaagtcggacagtattcagtggctcagtcagtattccatctatcaccaaatcccgccctgagccaggccgctccatgagtgctagcagtggcttgtcagcaaggtcatccgcacagaatggcagcgcattaaagagggaattctctggaggaagctacagtgccaagcggcagcccatgccctccccgtcagagggctctttgtcctctggaggcatggaccaaggaagtgatgccccagcgagggactttgacggagaggactctgactctccgaggcattccacagcttccaacagttccaacctaagcagccccccaagcccagcttcaccccgaaaaaccaagagcctctccctggagagcactgaccgcgggagctgggacccgtgagctgcctcagcactgggacctctcgctctccgctccctgccactcgcctcctctcactttcatctcttccctccacctcgcctgctcggcctgaaagccaccaggggctggcagcagtagcaggacagggattcaggagttctgacgacacgactctcagatccacgcccccagcctaacagcaacaacaaagacagactttccgtagcagcttagattaacgttgatttcattccatgcacttagagttgctttcagtaacattttacccctactcccaaaggtagcttaaatagacagattacacaaatgtaagtgataagaataagattagacagattttgctttcacagtagagtctcattatagtcctaaaatagctcatgggcttctccgcatccagaagggagaattggtccctggagtggctcactaagctcttaatcagcaaacgcagtgagtatcaacctgattgttgccaggaaatccttatgaattaaaacaatgcatattttactacagtacagagtttaaatgaatacataaatgtagaagtactgaatgtatatatttaaaaggagcctcttgtattcaacaaaagatggatgcatatataagagagatgatttaatttaaagaaatatgttgtttcttgtctgtaatgtaatgtaaagggtggaaaggcctcaagctcacatttgtagagagagagcgagagaaatcagagttccctttattgccctgtcctcaaactggtcataggctctagtcacctggggagctgtagaaaacacttgcagagccaggttttgctggtttggggcatgccctgggcaccagagctttaacatttgaagccacttcagcagcagcagcaaaaggcgaactcatctctacccaagatgtttcttttcctagtggtggaatttgaacacttctcactttttattgtattttatcttccgcagataaatgtagaaatacacgattctgtcacctctgatcccttccatctgaaaggttacaaggagtgttgtagcttctgaaggtgcagaaaacaatttctaaaaatgcttttattcctgggctaatcctgtccctccctaagtcacagcgaggtgtctgtcccagggctggagatgcttcccaaggaggagtctgttttgttgagagtgggcgtgggcttcttcacataagcctggggaaggaagaaaaaacggctttcattaccaaataatgtaaaacctcaaaagcaagggcttcaacagccttaaccaaatattattccccatagccagtggaaaatggatgtgacaaccccagtgcgcaggccagagtgagtgagcccagcacggcgctccgactggcttcctctctcaggtgctggattgtggggttagtggcatttccagctggattcctcctgttgtagttgccataaggaaatgagatgcagaatcagaaggatctatttctacagaatcatttcaccagttaagcacatgagtagagaaagagataaaaataaaagtatctcatgaaggaaagagattttgcctctcttttacttttcacctaagtttctctgagaaatagagacaggattctctctttaaaattcagtgaaaatgaagaaagttttcctgcagttgctaacctgagttgcagtgtttaaggccatcatttcactgctgctgtctgtgactccacgtctgtgtcactgaggtgacctgcgtgtcactgaggtggccaccatgctggcctgcggcatgtgcagggagctgaggctgtttccaggtgatgctgctgtgtggagaaggttctgagatgcagtgagggaagaaaggatcctgctggggattccattgtaagcacctataatcgggaattttcatgtaacagctttgacatttaaacattctgagtttggtgccagctcagatttgattatattttattttggatgggtgtaattcacagcacagttctaatctcccaaatctttctgctttttagaatgaagtataaaaatacttttctcacctgaataccaagggttggccctttagttggatcattgtcatatgacttggtagatccttgtcctcagcacctcacgtgagagaagggagtcagccagccggccccctgcttggtgctcgtgaccagctcgcaccccttctgtccacccttctctcctctcctccccactctccccaccctcctcactctccccaccctcctcactctccccaccctcccctcctctcctcctcactcttcccaccctccccatccccaccctccccatcctcctcttccctttccccttgccttctcctctctcccttctcttctcaggcagggaggaggccatcccaagccgagattaacaggacttgacataagccattagtttgtagctttgacaagtaattatgaatttttgttgcttataggtgcttattttgcaaaggatgcttttaagatcaaaataataaccctacctaaagtctagctccactgctatgggtcatactcttcagcctcccaacagggcagagagagagagctactgaggcttgtctaggttgccaggctaactgggcgacttgtccatattcaccccatggattgcaccatggcactctttgatttttccactgcaatggcaagtaatctcatcagtcataatagagcagtcccgaatgcgtgcagattctaaaagcagggctttaggagagaaacactgccagggggaatagttttggggagggttttcccaaaataacggtcatcctactgggtttatcccacccttaaatatgaagcctgttacctccagaagcttctgagaagaatgatgtgaaaagacagggagtgggttctaggcaaagaaaacataatgaccattcagaggagtcagtagcacagctcacagataaagtattttattactatctgaagttttcttttgttttcatgcaggacattttaaaaacgtatatggcagcagaaacctgtttctcaatagaaaaaatacattcagaggcatttctgggatagtctatctgtgttagtatttggtgctatctatgtccagccaagttatctaccctcaaattctgactaatcatgtttgtgctttgggtatttaaaattacatacatatatattctttttgccaaaaacaaaagtcttgcttcttgtcaaatgattgctaaagtagatcttacattttttgttattatgtatgtatttatacacatccccaacacacttagtgatttctgttatttcctagggagcacagctttaaggctatgagatacaactaaaaggagcccatctatttggttttccagccaattattgtactcacatttcaggggagaatctgaaattcctgtcatgtttacagcaacaatctatcattcctggctagctctcagcctctctctccttccataggttagaattatgtcattttgttacttagtggccacgtctatttctgagaaagactggttacatttatgtggcatctcaggtatcattaaggaaaagccagagcaggggtgagcagaggtcaaaaccacagacgcagcagggccatttgccgcctttggccgggatcacaaccactgcagtctcccagcaggtaggccttgccaagcctaaggctccccatccaatctagacagaggggcgctcagagcagactttgccgtagcccatgtctggtgagcacaacagggaatgaattgggcactccactcccccgtctctctggcccagccctgaactagatgagctgcatttcatggagcccattttaaaatctctttccttatgactttgttactcaagtccagagttctctgtgcacttctgctagataaggagtgtaagccctgccccccagcactggcagcacgctgggccctccccacacaggacaccgtgcagttccgggggaagctgactcaaatcaaccttgaaatctcatgaaaacaaaatgacttgtctttttatttgatagtgtaatatcattcattttataaattttttagggtttttctcgtaatattgtacagttttgcatggcctggtgtgatcattttttggttagaatataatgctgacaaatgtggatggaggggaagatactgctttagcctatcactccttattttattttgtttggttttatgccctcagtgtcttagggaactttttaagagatcctctgctaccaaacaatgatgtggattcttttgcacagaaatatttaaggtgggatggtaaaaaatgtcacaaaagactcctcaccaatactttatgttgatatcacttaatattaaccagactttgctgtattgcaataaaacagagaactgtt

SEQ ID NO: 115826 - DNA, 6758 bp, Homo sapiens
  Payload ID: 2601
  Gene Symbol: CDC42BPB
  Gene Name: CDC42 binding protein kinase beta (DMPK-like)
  Uniprot ID: Q9Y5S2
  ENST ID: ENST00000361246
  CDS Start-End: 290-5425
gggcggggctgagggcggcgggggcgggccgcccgagctgggagggcggcggcgccgaggggaggagagcggcccatggacccgcggggcccggcgccccagactctgcgccgtcgggacggagcccaagatgtcggcctaggccggggcgcgacgacgcggacggggcggcgaggaggcgccgctgctgccggggctcgcagccgccgagcccccgagggcgcgccctgacggactggccgagccggcggtgagaggccggcgcgtcgggagcgggccgcgcggcaccatgtcggccaaggtgcggctcaagaagctggagcagctgctcctggacgggccctggcgcaacgagagcgccctgagcgtggaaacgctgctcgacgtgctcgtctgcctgtacaccgagtgcagccactcggccctgcgccgcgacaagtacgtggccgagttcctcgagtgggctaaaccatttacacagctggtgaaagaaatgcagcttcatcgagaagactttgaaataattaaagtaattggaagaggtgcttttggtgaggttgctgttgtcaaaatgaagaatactgaacgaatttatgcaatgaaaatcctcaacaagtgggagatgctgaaaagagcagagaccgcgtgcttccgagaggagcgcgatgtgctggtgaacggcgactgccagtggatcaccgcgctgcactacgcctttcaggacgagaaccacctgtacttagtcatggattactatgtgggtggtgatttactgaccctgctcagcaaatttgaagacaagcttccggaagatatggcgaggttctacattggtgaaatggtgctggccattgactccatccatcagcttcattacgtgcacagagacattaaacctgacaatgtccttttggacgtgaatggtcatatccgcctggctgactttggatcatgtttgaagatgaatgatgatggcactgtgcagtcctccgtggccgtgggcacacctgactacatctcgccggagatcctgcaggcgatggaggacggcatgggcaaatacgggcctgagtgtgactggtggtctctgggtgtctgcatgtatgagatgctctatggagaaacgccgttttatgcggagtcactcgtggagacctatgggaagatcatgaaccatgaagagcgattccagttcccatcccatgtcacggatgtatctgaagaagcgaaggacctcatccagagactgatctgcagtagagaacgccggctggggcagaatggaatagaggatttcaaaaagcatgcgttttttgaaggtctaaattgggaaaatatacgaaacctagaagcaccttatattcctgatgtgagcagtccctctgacacatccaacttcgacgtggatgacgacgtgctgagaaacacggaaatattacctcctggttctcacacaggcttttctggattacatttgccattcattggttttacattcacaacggaaagctgtttttctgatcgaggctctctgaagagcataatgcagtccaacacattaaccaaagatgaggatgtgcagcgggacctggagcacagcctgcagatggaagcttacgagaggaggattcggaggctggaacaggagaagctggagctgagcaggaagctgcaagagtccacccagaccgtgcagtccctccacggctcatctcgggccctcagcaattcaaaccgagataaagaaatcaaaaagctaaatgaagaaatcgaacgcttgaagaataaaatagcagattcaaacaggctcgagcgacagcttgaggacacagtggcgcttcgccaagagcgtgaggactccacgcagcggctgcgggggctggagaagcagcaccgcgtggtccggcaggagaaggaggagctgcacaagcaactggttgaagcctcagagcggttgaaatcccaggccaaggaactcaaagatgcccatcagcagcgaaagctggccctgcaggagttctcggagctgaacgagcgcatggcagagctccgtgcccagaagcagaaggtgtcccggcagctgcgagacaaggaggaggagatggaggtggccacgcagaaggtggacgccatgcggcaggaaatgcggagagctgagaagctcaggaaagagctggaagctcagcttgatgatgctgttgctgaggcctccaaggagcgcaagcttcgtgagcacagcgagaacttctgcaagcaaatggaaagcgagctggaggccctcaaggtgaagcaaggaggccggggagcgggtgccaccttagagcaccagcaagagatttccaaaatcaaatccgagctggagaagaaagtcttattttatgaagaggaattggtcagacgtgaggcctcccatgtgctagaagtgaaaaatgtgaagaaggaggtgcatgattcagaaagccaccagctggccctgcagaaagaaatcttgatgttaaaagataagttagaaaagtcaaagcgagaacggcataacgagatggaggaggcagtaggtacaataaaagataaatacgaacgagaaagagcgatgctgtttgatgaaaacaagaagctaactgctgaaaatgaaaagctctgttcctttgtggataaactcacagctcaaaatagacagctggaggatgagctgcaggatctggcagccaagaaggagtcagtggcccactgggaagctcagattgcggaaatcattcagtgggtcagtgacgagaaagatgcccggggttaccttcaagctcttgcttccaagatgaccgaagagctcgaggctttgaggagttctagtctggggtcaagaacactggacccgctgtggaaggtgcgccgcagccagaagctggacatgtccgcgcggctggagctgcagtcggccctggaggcggagatccgggccaagcagcttgtccaggaggagctcaggaaggtcaaggacgccaacctcaccttggaaagcaaactaaaggattccgaagccaaaaacagagaattattagaagaaatggaaattttgaagaaaaagatggaagaaaaattcagagcagatactgggctcaaacttccagattttcaggattccatttttgagtatttcaacactgctcctcttgcacatgacctgacatttagaaccagctcagctagtgagcaagaaacacaagctccgaagccagaagcgtccccgtcgatgtctgtggctgcatcagagcagcaggaggacatggctcggcccccgcagaggccatccgctgtgccgttgcccaccacgcaggccctggctctggctggaccgaagccaaaagctcaccagttcagcatcaagtccttctccagccctactcagtgcagccactgcacctccctgatggttgggctgatccggcagggctacgcctgcgaggtgtgttcctttgcttgccacgtgtcctgcaaagacggtgccccccaggtgtgcccaatacctcccgagcagtccaagaggcctctgggcgtggacgtgcagcgaggcatcggaacagcctacaaaggccatgtcaaggtcccaaagcccacgggggtgaagaagggatggcagcgcgcatatgcagtcgtctgtgactgcaagctcttcctgtatgatctgcctgaaggaaaatccacccagcctggtgtcattgcgagccaagtcttggatctcagagatgacgagttttccgtgagctcagtcctggcctcagatgtcattcatgctacacgccgagatattccatgtatattcagggtgacggcctctctcttaggtgcaccttctaagaccagctcgctgctcattctgacagaaaatgagaatgaaaagaggaagtgggttgggattctagaaggactccagtccatccttcataaaaaccggctgaggaatcaggtcgtgcatgttcccttggaagcctacgacagctcgctgcctctcatcaaggccatcctgacagctgccatcgtggatgcagacaggattgcagtcggcctagaagaagggctctatgtcatagaggtcacccgagatgtgatcgtccgtgccgctgactgtaagaaggtacaccagatcgagcttgctcccagggagaagatcgtaatcctcctctgtggccggaaccaccatgtgcacctctatccgtggtcgtcccttgatggagcggaaggcagctttgacatcaagcttccggaaaccaaaggctgccagctcatggccacggccacactcaagaggaactctggcacctgcctgtttgtggccgtgaaacggctgatcctttgctatgagatccagagaacgaagccattccacagaaagttcaatgagattgtggctcccggcagcgtgcagtgcctggcggtgctcagggacaggctctgtgtgggctacccttctgggttctgcctgctgagcatccagggggacgggcagcctctaaacctggtaaatcccaatgacccctcgcttgcgttcctctcacaacagtcttttgatgccctttgtgctgtggagctcgaaagcgaggagtacctgctttgcttcagccacatgggactgtacgtggacccgcaaggccggagggcacgcgcgcaggagctcatgtggcctgcggctcctgtcgcctgtagttgcagccccacccacgtcacggtgtacagcgagtatggcgtggacgtctttgatgtgcgcaccatggagtgggtgcagaccatcggcctgcggaggataaggcccctgaactctgaaggcaccctcaacctcctcaactgcgagcctccacgcttgatctacttcaagagcaagttctcgggagcggttctcaacgtgccggacacctccgacaacagcaagaagcagatgctgcgcaccaggagcaaaaggcggttcgtcttcaaggtcccagaggaagagagactgcagcagaggcgagagatgcttagagacccagaattgagatccaaaatgatatccaacccaaccaacttcaaccacgtggcccacatgggcccaggcgacggcatgcaggtgctcatggacctgcctctgagtgctgtgcccccctcccaggaggaaaggccgggccccgctcccaccaacctggctcgccagcctccatccaggaacaagccctacatctcgtggccctcatcaggtggatcggagcctagcgtgactgtgcctctgagaagtatgtctgatccagaccaggactttgacaaagagcctgattcggactccaccaaacactcaactccatcgaatagctccaaccccagcggcccaccgagccccaactccccccacaggagccagctccccctcgaaggcctggagcagccggcctgtgacacctgaagccgccagctcgccacaggggccagggagctggagatggcctccagcgtcagtgccaagactgagcgggccctccagtgttgtccaaggaaatgtagaatcactttgtagatatggagatgaagaagacaaatctttattataatattgatcagttttatgccgcattgttcgtggcagtagaccacatctgttcgtctgcacagctgtgaggcgatgctgttccatctgcacatgaaggacccccatacagcctgtctcccacccctgacaacccgagagggcatatggggccctgccaacaccacttcctcagcagaaacccgtcatgacgcggctgcttcggaagcagacatctggggacacagcctcagtacccagtcttttccctagttcctgaaactttcctaggaccttaagagaatagtaggaggtcctatagcattcccagtgtcactagaattttgaagacaggaaagtggaggttagtctgtggcctttttttcatttagccattgcacagtcagctgcagaagtcctgctgaccacctagtcatggacaaaggcccaggaccagtgacaccctgcgtccctgtgtgcattaagttcattctgggtcgcagccatgaagtgtcaccagtatctactactgtgaagtcagctgtgctgttttccattcgcttccacggcttctgcctcctgccataaaaccagcgagtgtcgtggtgcaggcaggccctgtggcctgctgggctgagggaagtcagagccccagggcgccacgaagcagccactgggataccccaccccgccccgccctgcccgcccccccccccaccagtcctgcccccgcatggagcccccgtgattagtagcccgtatgatcacgtagacccacccaacacactcctgcacactggccccggcccacggcacagcaatcccctgcgcgtggatttcacctcaccctttgtaccagatgttgagtgaccagctctgtggccctgtgtcgtcagaggcttgtgattaactgtggcggcagacacagcttgtccacagcttgggccaggcttcccctgtcctcccaccggtcggctgcttggcaaggctgttcaggacgtgcacttccccaagtcggcactgagtggcccagcaccgcctagccctgccaccccactgccctcctgggccttctgctggatgggcacctggggggttctggtttttacttttttaatgtaagtctcagtctttgtaattaattattgaattgtgagaacatttttgaacaatttacctgtcaataaagcagaagacggcagttttaaagttc

SEQ ID NO: 115827 - DNA, 1999 bp, Homo sapiens
  Payload ID: 2601
  Gene Symbol: CDC42BPB
  Gene Name: CDC42 binding protein kinase beta (DMPK-like)
  ENST ID: ENST00000559043
  CDS Start-End: 1-1999
tggccctgcagaaagaaatcttgatgttaaaagataagttagaaaagtcaaagcgagaacggcataacgagatggaggaggcagtaggtacaataaaagataaatacgaacgagaaagagcgatgctgtttgatgaaaacaagaagctaactgctgaaaatgaaaagctctgttcctttgtggataaactcacagctcaaaatagacagctggaggatgagctgcaggatctggcagccaagaaggagtcagtggcccactgggaagctcagattgcggaaatcattcagtgggtcagtgacgagaaagatgcccggggttaccttcaagctcttgcttccaagatgaccgaagagctcgaggctttgaggagttctagtctggggtcaagaacactggacccgctgtggaaggtgcgccgcagccagaagctggacatgtccgcgcggctggagctgcagtcggccctggaggcggagatccgggccaagcagcttgtccaggaggagctcaggaaggtcaaggacgccaacctcaccttggaaagcaaactaaaggattccgaagccaaaaacagagaattattagaagaaatggaaattttgaagaaaaagatggaagaaaaattcagagcagatactgggctcaaacttccagattttcaggattccatttttgagtatttcaacactgctcctcttgcacatgacctgacatttagaaccagctcagctagtgagcaagaaacacaagctccgaagccagaagcgtccccgtcgatgtctgtggctgcatcagagcagcaggagccaaaagctcaccagttcagcatcaagtccttctccagccctactcagtgcagccactgcacctccctgatggttgggctgatccggcagggctacgcctgcgaggtgtgttcctttgcttgccacgtgtcctgcaaagacggtgccccccaggtgtgcccaatacctcccgagcagtccaagaggcctctgggcgtggacgtgcagcgaggcatcggaacagcctacaaaggccatgtcaaggtcccaaagcccacgggggtgaagaagggatggcagcgcgcatatgcagtcgtctgtgactgcaagctcttcctgtatgatctgcctgaaggaaaatccacccagcctggtgtcattgcgagccaagtcttggatctcagagatgacgagttttccgtgagctcagtcctggcctcagatgtcattcatgctacacgccgagatattccatgtatattcagggtgacggcctctctcttaggtgcaccttctaagaccagctcgctgctcattctgacagaaaatgagaatgaaaagaggaagtgggttgggattctagaaggactccagtccatccttcataaaaaccggctgaggaatcaggtcgtgcatgttcccttggaagcctacgacagctcgctgcctctcatcaaggccatcctgacagctgccatcgtggatgcagacaggattgcagtcggcctagaagaagggctctatgtcatagaggtcacccgagatgtgatcgtccgtgccgctgactgtaagaaggtacaccagatcgagcttgctcccagggagaagatcgtaatcctcctctgtggccggaaccaccatgtgcacctctatccgtggtcgtcccttgatggagcggaaggcagctttgacatcaagcttccggaaaccaaaggctgccagctcatggccacggccacactcaagaggaactctggcacctgcctgtttgtggccgtgaaacggctgatcctttgctatgagatccagagaacgaagccattccacagaaagttcaatgagattgtggctcccggcagcgtgcagtgcctggcggtgctcagggacaggctctgtgtgggctacccttctgggttctgcctgctgagcatccagggggacgggcagcctctaaacctggtaaatcccaatgacccctcgcttgcgttcct

SEQ ID NO: 115828 - DNA, 528 bp, Homo sapiens
  Payload ID: 2601
  Gene Symbol: CDC42BPB
  Gene Name: CDC42 binding protein kinase beta (DMPK-like)
  ENST ID: ENST00000558321
  CDS Start-End: 1-390
accgcgtgcttccgagaggagcgcgatgtgctggtgaacggcgactgccagtggatcaccgcgctgcactacgcctttcaggacgagaaccacctgtacttagtcatggattactatgtgggtggtgatttactgaccctgctcagcaaatttgaagacaagcttccggaagatatggcgaggttctacattggtgaaatggtgctggccattgactccatccatcagcttcattacgtgcacagagacattaaacctgacaatgtccttttggacgtgaatggtcatatccgcctggctgactttggatcatgtttgaagatgaatgatgatggcactgtaggtatttttgttggagattttccatttggttttgggtttggcatatagtcagaagggaagttttcaatttgaggtacaattaagaaaccaagtatattaattcagaaaatgaatccattttggagatagttgaaattttctgtttggggagttttgtttcccaaataaaaattaagttggaaagca

SEQ ID NO: 115829 - DNA, 5742 bp, Homo sapiens
  Payload ID: 2602
  Gene Symbol: CDC42BPG
  Gene Name: CDC42 binding protein kinase gamma (DMPK-like)
  Uniprot ID: Q6DT37
  ENST ID: ENST00000342711
  CDS Start-End: 1-4656
atggagcggcggctgcgcgcgctggagcagctggcgcggggcgaggccggcggctgcccggggctcgacggcctcctagatctgctgctggcgctgcaccacgagctcagcagcggccccctacggcgggagcgcagcgtggcgcagttcctgagctgggccagccccttcgtatcaaaggtgaaagaactgcgtctgcagagagatgactttgagatcttgaaggtgatcggccgaggagcctttggggaggtcaccgtggtgaggcagagggacactgggcagatttttgccatgaaaatgctgcacaagtgggagatgctgaagagggctgagacagcctgtttccgggaggagcgggatgtgctcgtgaaaggggacagccgttgggtgaccactctgcactatgccttccaagacgaggagtacctgtaccttgtgatggactactatgctggtggggacctcctgacgctgctgagccgcttcgaggaccgtctcccgcccgagctggcccagttctacctggctgagatggtgctggccatccactcgctgcaccagctgggttatgtccacagggatgtcaagccagacaacgtcctgctggatgtgaacgggcacattcgcctggctgacttcggctcctgcctgcgtctcaacaccaacggcatggtggattcatcagtggcagtagggacgccggactatatctcccctgagatcctgcaggccatggaggagggcaagggccactacggcccacagtgtgactggtggtcgcttggagtctgcgcctatgagctgctctttggggagacgcccttctatgctgagtccttggtggaaacctacggcaagatcatgaaccacgaggaccacctgcagttccccccggacgtgcctgacgtgccagccagcgcccaagacctgatccgccagctgctgtgtcgccaggaagagcggctaggccgtggtgggctggatgacttccggaaccatcctttcttcgaaggcgtggactgggagcggctggcgagcagcacggccccctatattcctgagctgcgggggcccatggacacctccaactttgatgtggatgacgacaccctcaaccatccagggaccctgccaccgccctcccacggggccttctccggccatcacctgccattcgtgggcttcacctacacctcaggcagtcacagtcctgagagcagctctgaggcttgggctgccctggagcggaagctccagtgtctggagcaggagaaggtggagctgagcaggaagcaccaagaggccctgcacgcccccacagaccatcgggagctggagcagctacggaaggaagtgcagactctgcgggacaggctgccagagatgctgagggacaaggcctcattgtcccagacggatgggcccccagctggtagcccaggtcaggacagtgacctacggcaggagcttgaccgacttcaccgggagctggccgagggtcgggcagggctgcaggctcaggagcaggagctctgcagggcccaggggcagcaggaggagctgcttcagaggctacaggaggcccaggagagagaggcggccacagctagccagacccgggccctgagctcccagctggaggaagcccgggctgcccagagggagctggaggcccaggtgtcctccctgagccggcaggtgacgcagctgcagggacagtgggagcaacgccttgaggagtcgtcccaggccaagaccatccacacagcctctgagaccaacgggatgggaccccctgagggtgggcctcaggaggcccaactgaggaaggaggtggccgccctgcgagagcagctggagcaggcccacagccacaggccgagtggtaaggaggaggctctgtgccagctgcaggaggaaaaccggaggctgagccgggagcaggagcggctagaagcagagctggcccaggagcaggagagcaagcagcggctggagggtgagcggcgggagacggagagcaactgggaggcccagctcgccgacatcctcagctgggtgaatgatgagaaggtctcaagaggctacctgcaggccctggccaccaagatggcagaggagctggagtccttgaggaacgtaggcacccagacgctccctgcccggccactggaccaccagtggaaggcgcggcgactgcagaagatggaggcctcggccaggctggagctgcagtcagcgctggaggccgagatccgcgccaagcagggcctgcaggagcggctgacacaggtgcaggaggcccagctgcaggctgagcgccgtctgcaggaggccgagaagcagagccaggccctgcaacaggagctcgccatgctgcgggaggagctgcgggcccgagggccagtggacaccaagccctcaaactccctgattcccttcctgtccttccggagctcagagaaggattctgccaaggaccctggcatctcaggagaggccacaaggcatggaggagagccagatctgaggccggagggccgacgcagcctgcgcatgggggctgtgttccccagagcacccactgccaacacagcctctacagaaggtcttcctgctaagcccggctcacacacgctgcgcccccggagcttcccatccccgaccaagtgtctccgctgcacctcgctgatgctgggcctgggccgccagggcctgggttgtgatgcctgcggctacttttgtcacacaacctgtgccccacaggccccaccctgccccgtgccccctgacctcctccgcacagccctgggagtacaccccgaaacaggcacaggcactgcctatgagggctttctgtcggtgccgcggccctcaggtgtccggcggggctggcagcgcgtgtttgctgccctgagtgactcacgcctgctgctgtttgacgcccctgacctgaggctcagcccgcccagtggggccctcctgcaggtcctagatctgagggacccccagttctcggctacccctgtcctggcctctgatgttatccatgcccaatccagggacctgccacgcatctttagggtgacaacctcccagctggcagtgccgcccaccacgtgcactgtgctgctgctggcagagagcgagggggagcgggaacgctggctgcaggtgctgggtgagctgcagcggctgctgctggacgcgcggccaagaccccggcccgtgtacacactcaaggaggcttacgacaacgggctgccgctgctgcctcacacgctctgcgctgccatcctcgaccaggatcgacttgcgcttggcaccgaggaggggctctttgtcatccatctgcgcagcaacgacatcttccaggtgggggagtgccggcgcgtgcagcagctgaccttgagccccagtgcaggcctgctggtcgtgctgtgtggccgcggccccagcgtgcgtctctttgccctggcggagctggagaacatagaggtagcaggtgccaagatccccgagtctcgaggctgccaggtgctggcagctggaagcatcctgcaggcccgcaccccggtgctctgtgtagccgtcaagcgccaggtgctctgctaccagctgggcccgggccctgggccctggcagcgccgcatccgtgagctgcaggcacctgccactgtgcagagcctggggctgctgggcgaccggctatgtgtgggcgccgccggtggctttgcactctacccgctgctcaacgaggctgcgccgttggcgctgggggccggtttggtgcctgaggagctgccaccatcccgcgggggcctgggtgaggcactgggtgccgtggagcttagcctcagcgagttcctgctactcttcaccactgctggcatctacgtggatggcgcaggccgcaagtctcgtggccacgagctgttgtggccagcagcgcccatgggctgggggtatgcggccccctacctgacagtgttcagcgagaactccatcgatgtgtttgacgtgaggagggcagaatgggtgcagaccgtgccgctcaagaaggtgcggcccctcaatccagagggctccctgttcctctacggcaccgagaaggtccgcctgacctacctcaggaaccagctggcagagaaggacgagttcgacatcccggacctcaccgacaacagccggcgccagctgttccgcaccaagagcaagcgccgcttctttttccgcgtgtcggaggagcagcagaagcagcagcgcagggagatgctgaaggacccttttgtgcgctccaagctcatctcgccgcctaccaacttcaaccacctagtacacgtgggccctgccaacgggcggcccggcgccagggacaagtccccggctcccgaagagaagggccgagttgcccgcggctccggcccacagcggccccacagcttctccgaggcgttgcggcgcccagcctccatgggcagcgaaggcctcggtggagacgcagaccccatgaagaggaaaccctggacatccctgtccagcgagtctgtgtcctgcccccagggatcgctgagccctgcaacctccctaatgcaggtctcagaacggccccgaagcctccccctatcccctgaattggagagctctccttgatgccctctgttagggcccaccccaatcccagggcagaaggacatgagggagcaaagagcttgaggaatgccatactccggctggtccgggacatggaaattcggactcagggaggacccgggctgggcaatgactgggagacttgcctgggttcccaggacttgggggtcctgactcccagccctcatcctgccttacccctctgttcccagccccagcctttctaagccattgggaatagaatggccccttttgttctggtgtccaggggtgattgtgccaaagctcttatttccagtgccaagcccccagaggcttgtaagagttgggatgagggatggagagggactgggtctctgggaacaggttggaggtcttatctgtggactgtctgactcccagctgaggccaagatggggcatgtccccgtctctgcttagcgtctgggtgagaaaaacaggctgtgatccagaagaagggaagatagagaaggagggaaaggatgtaggcgaaggaggtgagagacaggataggaggaaggaagtggaggaggaggtgataggaattggaaggaggtagaagccgtgcagaggaagaggggagagggacgaaggaggagcgatgaagaagaggagggagacaaaaagagggatggaggagagagggagtctggagaacaaagggtcctttctctggggaggggtgcagtgggcggggctgacactgtcagccaatcctcccatcggggaagagaatcctggacagggacaggatggggagggtatttataagggctttttggtgggagatgggtacccagtgggggccactggagggtctccgggcacactctggcccttcccagaaagggggtcgtttttctcgaatcttcaaccagttgtgtattggaaactagggcgcattttactattgatcacagtcattatattgttattatattactatttttattaaacctccccccactgaagtgtggggggcaaaataagtatttatctcctcaaatgccacattcccaggagggacagaccctgatgctctgtgaggcgcaagaaaccaataaag

SEQ ID NO: 115830 - DNA, 2181 bp, Homo sapiens
  Payload ID: 2603
  Gene Symbol: CDC42EP1
  Gene Name: CDC42 effector protein (Rho GTPase binding) 1
  Uniprot ID: Q00587
  ENST ID: ENST00000249014
  CDS Start-End: 421-1596
gatccagcccgcggagcccgcggccagggcggcgcagaccggcccagcgactctcccgggctgccagccgggacgcgcggccgccgccgctgcagacgacgagtccgccctcgtcccgcgcccccggggctcgcggagccaggtctccacctctgggcaggagagttgccgaccacctcgggggtgctttctctgcgcttgaacatctatagctgcttctgaggggctgggagccgggcccctgggagagacgagccatgaaccccccacagcctctgcatttggggacctcaccttaggagagtgccatttacagcttccgccagggcaaaggagctgagcagccatcccaagcccagcccacctccctcccccggcccctggtaggcatggactagcagctgtgagcagccagagctgatgcccggcccccaggggggcagaggcgccgccaccatgagcctgggcaagctctcgcctgtgggctgggtgtccagttcacagggaaagaggcggctgactgcagacatgatcagccacccactcggggacttccgccacaccatgcatgtgggccgtggcggggatgtcttcggggacacgtccttcctcagcaaccacggtggcagctccgggagcacccatcgctcaccccgcagcttcctggccaagaagctgcagctggtgcggagggtgggggcgcccccccggaggatggcatctccccctgcaccctccccggctccaccggccatctcccccatcatcaagaacgccatctccctgccccagctcaaccaggccgcctacgacagcctcgtggttggcaagctcagcttcgacagcagccccaccagctccacggacggccactccagctacggcctggactctgggttctgcaccatctcccgcctgccccgctcggaaaagccgcatgaccgagaccgggatggttccttcccctctgagcccgggcttcgccgctctgactctctcttgtccttccgcctggacctcgaccttgggccctcactcctcagcgagctgctaggggtcatgagcctcccagaagcccctgcagctgagactccagcccccgctgcaaaccccccagcccctactgcaaaccccacgggtcctgctgcaaaccccccagccactactgcaaaccccccagcgcctgctgcaaacccctcagcacctgccgcaacccccacgggtcctgctgcaaatcccccagcccctgccgcaagctccacaccccatggacactgtcccaatggggtaacagctgggttgggcccagtggctgaggtgaagtccagcccagtgggagggggtccccgaggacctgctggccctgccctcggcaggcactggggagcaggctgggatggcggccaccactacccagagatggatgcgcggcaggagcgggtggaggtgctgccccaagcccgggcctcctgggagagcctggacgaagagtggagggcgccccaggcaggcagcaggaccccagtgcccagcacagtgcaagcaaacacctttgaatttgcggatgctgaggaggatgatgaggtcaaggtgtgaggggctggggcacggtcccagggccccacctaggtgcagagccggcccctcacctaacagctggttcctaccagaccggagaggggagaagtcatgttgcccctaaacccctccccacctctgcaggacagacatgggagggaggacagggaaggccaggcttgctctgggacttttatgctcccagaggccctgccaaactgaccacctcccccgactgccactctggacctaatagctgttccttaggccccactccatgccacccccaccagctggaggacccagcctcacagtgtgtcctttgtgccagaccaagcggcccgtggggggtggggggcagggagtgtaccacacagggccattgtctcacctcccaaagggaccgcctgcccccagctcatcccagagcgtccctgctgcaaccctgacagccgtctcccaggccgcttccccaacatccccgccccagcctccctcttaccccagaaaggtcaggtatgacctcccggggaggaatcccacctgcctgtataccccagacttgcctctggggcctgattaaataaggctgttttgataaaa

SEQ ID NO: 115831 - DNA, 564 bp, Homo sapiens
  Payload ID: 2603
  Gene Symbol: CDC42EP1
  Gene Name: CDC42 effector protein (Rho GTPase binding) 1
  ENST ID: ENST00000434728
  CDS Start-End: 419-564
ttgaatatgctcacgcatggaggaggcagctggaaaaagccacttttgaccacaggatccttattccaggaagctccttgaaggtggatggttcagaggaacctctgctctggctgtttacccagcttcacaaagctttggtctccacctctgggcaggagagttgccgaccacctcgggggtgctttctctgcgcttgaacatctatagctgcttctgaggggctgggagccgggcccctgggagagacgagccatgaaccccccacagcctctgcatttggggacctcaccttaggagagtgccatttacagcttccgccagggcaaaggagctgagcagccatcccaagcccagcccacctccctcccccggcccctggtaggcatggactagcagctgtgagcagccagagctgatgcccggcccccaggggggcagaggcgccgccaccatgagcctgggcaagctctcgcctgtgggctgggtgtccagttcacagggaaagaggcggctgactgcagacatgatcagccacccactcggggacttccgccacaccat

SEQ ID NO: 115832 - DNA, 588 bp, Homo sapiens
  Payload ID: 2603
  Gene Symbol: CDC42EP1
  Gene Name: CDC42 effector protein (Rho GTPase binding) 1
  ENST ID: ENST00000415670
  CDS Start-End: 408-588
agtattgagatttctatgcttggaggtggcagcaatggttttaaaaaaggaagaaggctgagccgcagacataggtgttcttaaggatcattattgacttttatcagctgaggtcccaggtctgtgtaggtctccacctctgggcaggagagttgccgaccacctcgggggtgctttctctgcgcttgaacatctatagctgcttctgaggggctgggagccgggcccctgggagagacgagccatgaaccccccacagcctctgcatttggggacctcaccttaggagagtgccatttacagcttccgccagggcaaaggagctgagcagccatcccaagcccagcccacctccctcccccggcccctggtaggcatggactagcagctgtgagcagccagagctgatgcccggcccccaggggggcagaggcgccgccaccatgagcctgggcaagctctcgcctgtgggctgggtgtccagttcacagggaaagaggcggctgactgcagacatgatcagccacccactcggggacttccgccacaccatgcatgtgggccgtggcggggatgtcttcggggaca

SEQ ID NO: 115833 - DNA, 720 bp, Homo sapiens
  Payload ID: 2603
  Gene Symbol: CDC42EP1
  Gene Name: CDC42 effector protein (Rho GTPase binding) 1
  ENST ID: ENST00000430687
  CDS Start-End: 511-720
gcagaccggcccagcgactctcccgggctgccagccgggacgcgcggccgccgccgctgcagacgacgagtccgccctcgtcccgcgcccccggggctcgcggagccagacggaatgttgctcttgttgccgaggctggagtgccgtgatgtgatcttggctcactgcaacctctgcctccaaggttcaagtgattctcctgccacagcttcctgggtagctgggattacaggtctccacctctgggcaggagagttgccgaccacctcgggggtgctttctctgcgcttgaacatctatagctgcttctgaggggctgggagccgggcccctgggagagacgagccatgaaccccccacagcctctgcatttggggacctcaccttaggagagtgccatttacagcttccgccagggcaaaggagctgagcagccatcccaagcccagcccacctccctcccccggcccctggtaggcatggactagcagctgtgagcagccagagctgatgcccggcccccaggggggcagaggcgccgccaccatgagcctgggcaagctctcgcctgtgggctgggtgtccagttcacagggaaagaggcggctgactgcagacatgatcagccacccactcggggacttccgccacaccatgcatgtgggccgtggcggggatgtcttcggggacacgtccttcctcagcaaccacggtggcagc

SEQ ID NO: 115834 - DNA, 2023 bp, Homo sapiens
  Payload ID: 2604
  Gene Symbol: CDC42EP2
  Gene Name: CDC42 effector protein (Rho GTPase binding) 2
  Uniprot ID: O14613
  ENST ID: ENST00000279249
  CDS Start-End: 493-1125
attggctccgcgggccggggcggggctgcggggtccgcggtgcactctgtaagttcaccgccggtcgggtccggccgccgcgctgtccagctcctgagaccttgctgtccgccggtctgccgtctgcgcgcctcacgctcctcagccctggaccggggacaagtaaccctcggtgacaagaccaaagtgcactgctgcccacacagttcctacctttctggcttcaattcttcagaagagtttgccgtcctttggggagaacgtgatttttgttatctcagcccactgacttcattgatctctaatcttttttaattccttgggccaactttgttcgtgcccccacactgtagccagaagcccgttggcgagctctggcacctgcaaaccaccccgtggaacgagtgtttcctctggctgagggttggagaggaggtgtggtctcagcaggcggcccgtagcctcacagccaggcctggtggtgaggtcaccatgtccaccaaggtgcccatctatctgaagcgtggcagtcgcaagggcaagaaggagaagcttcgggacctgctgtcctcggacatgatcagcccaccgctgggggacttccgccacaccattcatattggcagtggcggcggcagtgacatgtttggcgacatctccttcctgcagggcaagttccacctcctgccggggaccatggtggaggggcctgaagaagatggcaccttcgacctccccttccagttcacccgcaccgccaccgtgtgtgggcgggagctcccggacggcccatcccctctgctcaagaacgccatctccctcccggttatcggtggaccccaggctctcaccctgcccacagcccaggctccacccaagccccctcgcctgcacctggagacccctcagccttccccacaggagggagggagtgtggacatctggaggattccagagactggctcccccaacagtggactgaccccggagtcaggggccgaggagcccttcctgtccaatgccagctccctgctgtccctgcacgtggacctggggccttccatcctggatgatgtcctgcagatcatggatcaggacctggacagcatgcagatccccacataggacacgaggctgcctaggctggggtcccaggtggggcccagccaggaggtggggtgtggacccggccctggcggcggagtcagggtcccaagatcccacctgtatggtcgctggccagtgattctccttctgagccgtgtttcccctctccctccctctccacgtgggcagggcaggccccatcgctttcctctgataaccacatggacacatcctgaagtcagcccaggcgccctgagcatcttggggcacctggaccccatcacaatactccttcttccttcaggtccctgggtgaaggctttgctgaaaccgaccccccttttcacgtcccttctgcctctgccccgttggatgccctgactgggggcaggggaagagacagggcacagctggccacagggctcagccactgagcaggctgttccgggcctttggctttgcatcctggacggggagtgtcctgtcagggaccagatgtgtcctgcctcatccctagctccaatcccttccccacgtgaccggggattctggttgcaataaaacatgctgctgctggtggcggagctccctgtccctttgccccaggtttcctcccggaggcagacagtctcccagagctgagggcttgcctctggagaccccagccccagagggctttgtggaggacaggccttgccctcaagaacgtcgtacctgacgctgagcctgtcatgagaatgcaacaggagcaaaccaagtgttgctgtgacattgattcagatgtttggcaagaggtggctgagcactggggtgggcttggcactgtgccaagcctggggccaatccctgcccagtcagctggggtctggtgggggacacccaagaataaaagaataaccacaaagtgtgcaaggga

SEQ ID NO: 115835 - DNA, 1279 bp, Homo sapiens
  Payload ID: 2604
  Gene Symbol: CDC42EP2
  Gene Name: CDC42 effector protein (Rho GTPase binding) 2
  Uniprot ID: O14613
  ENST ID: ENST00000533419
  CDS Start-End: 557-1189
cgagcgacaaattgcatgtttgtcagcatggcccccaggcctggcatggttgacacaggatgaatgcgtgacgggattccaagacctcagggtgcccatgcgtccccacccttcccccagctccttgcaagctgagctggatttccgccacgggagagtcattcctttgtttcctgttaagctccaggtgctctgggagggctcctcagccctggaccggggacaagtaaccctcggtgacaagaccaaagtgcactgctgcccacacagttcctacctttctggcttcaattcttcagaagagtttgccgtcctttggggagaacgtgatttttgttatctcagcccactgacttcattgatctctaatcttttttaattccttgggccaactttgttcgtgcccccacactgtagccagaagcccgttggcgagctctggcacctgcaaaccaccccgtggaacgagtgtttcctctggctgagggttggagaggaggtgtggtctcagcaggcggcccgtagcctcacagccaggcctggtggtgaggtcaccatgtccaccaaggtgcccatctatctgaagcgtggcagtcgcaagggcaagaaggagaagcttcgggacctgctgtcctcggacatgatcagcccaccgctgggggacttccgccacaccattcatattggcagtggcggcggcagtgacatgtttggcgacatctccttcctgcagggcaagttccacctcctgccggggaccatggtggaggggcctgaagaagatggcaccttcgacctccccttccagttcacccgcaccgccaccgtgtgtgggcgggagctcccggacggcccatcccctctgctcaagaacgccatctccctcccggttatcggtggaccccaggctctcaccctgcccacagcccaggctccacccaagccccctcgcctgcacctggagacccctcagccttccccacaggagggagggagtgtggacatctggaggattccagagactggctcccccaacagtggactgaccccggagtcaggggccgaggagcccttcctgtccaatgccagctccctgctgtccctgcacgtggacctggggccttccatcctggatgatgtcctgcagatcatggatcaggacctggacagcatgcagatccccacataggacacgaggctgcctaggctggggtcccaggtggggcccagccaggaggtggggtgtggacccggccctggcggcggagtcagggtccca

SEQ ID NO: 115836 - DNA, 5700 bp, Homo sapiens
  Payload ID: 2605
  Gene Symbol: CDC42EP3
  Gene Name: CDC42 effector protein (Rho GTPase binding) 3
  Uniprot ID: Q9UKI2
  ENST ID: ENST00000295324
  CDS Start-End: 1002-1766
ccggagcccgggctgagagggacctggggagctgcggcctggccggggcggcgcactcaggtggcctcgcttccctgcgggtcaccgcccgccactcgcacagctaggtcggcctgttgggatcgggagaggtgggcgcacgagttttagtgcgggagtccggggtgcgggcggagtcctattgtccccgtgcacccgggcggcagcacctccgggtccctctttaaaccgagcgtccggcgacctttctttgtgcttagggagtcgaaagcggcatcttctccgagagaagtcgcctactggggggtggcgctggggaggtaacaatgggcgcccattgtcctccgagggtccaacggtgacccccccccgcgcgcgcgcccggccaccggttggccccgggccagggcacaggtaccgcggctgggagggtcggccccgctgcccgcgccctccgccccgccccagtgagtccccgcgccgccggccccgccccgcgccgccccgccctccgcaggttcagtcctcgcgtccggccgccccgcgctcagtcgcgcgcaccttctctcgcggccgggggaccgcagcgcggggctagcccggagacccggccaccggcctggggcgccttcacgccgtctcggagcggataatgcggtgagcaggcaccacgccggcagactcggctggatctgcgcacagcggcagggattgcgtgcgcccgcgggaggcccggggcagcggctgggatcctcagcggcggccggtttgtcctggttgtggtcaagactggatgatgtaactggctctctaggaagcctcacttggccgtaacctcaggaaggttctctttgaccccatctcatttcgaagccacttctgaagccacttgagaaaaatgatgtgacagttcctatcaaaaaggattcagaaacatataccatctgtgaagaaagtggccctttctcccgcttgcaaaatagacattctcaaattccaaaatgccagccaagaccccaatttacctgaaagcagccaataacaagaaaggaaagaaatttaaactgagggacattctgtctcctgatatgatcagtcccccgcttggagactttcgccacaccatccacattggcaaagagggccagcacgatgtctttggagatatttcctttcttcaagggaactacgagcttttacctggaaaccaggagaaagcacacctgggccagttccctgggcataatgagttcttccgggccaacagcacctcggactctgtgttcacagaaacgccctccccggtgctcaaaaatgccatctccctcccgaccattggaggatcccaagctctcatgttgcccttattgtcaccagtgacatttaattccaaacaggagtccttcgggccagcaaagctgcccaggcttagctgcgagcccgtcatggaggaaaaagctcaggagaaaagcagtctgttggagaatgggacagtccaccagggagacacctcgtggggctccagcggttctgcatctcagtccagccaaggcagagacagccactcctccagcctgtccgaacagtaccccgactggccagccgaggacatgtttgaccatcccaccccatgcgagctcatcaagggaaagactaagtcagaggagtccctctctgaccttacaggttccctcctctccctgcagcttgatcttgggccctcacttttggatgaggtgctgaatgtaatggataaaaataagtaacaagatgccaacttttttcctttggggtaaaaggtacaaaaacaaactaaccacagttgaagagaagggcttccggagctgtatttgcagttttgtgttgggttttctaaaataatattcttacaaagtatttttttacctgttatgccctgtttgcaaaaacaatttagaaaaaaacaacaaagcaaaacctatcttggcaaaaaaaggaagtgagtcagagcccattttcaggaggcattggtgatgttcggctcacatattgtttgcagacacacaagaaatctggcttggccaggattggcactagctatgaagggctgagcgagtcacattaaggaacttcacggaactttatagcactccgacattttctgagcaagaggaagtcaaaatttatttaacacctaagcctttttgtagactcttttctatatattgcttaggctcaccatagcgaattctccagtgttaaaacttttctgttttcacatttgaactttatgggttttggggattttcttgtagttcttatatatccctatatattatatctatattgcaaaattttgactgtcagctacatgttggtaagacacaggcaaagtattactgtaactaagttatttttaaagttaaaatatatttttacgtgcctttggctttttattgcagagtctacattttatagattctacatcagatgttgtcacttatttccattgggattccattgtaagctgtgtatgtgcgtgtttggaaaagtgtattcatacttagtttttttttcttcatctgttatcatacttttaacagcaaccaataacggattgtaaagtgtaaaggcacaggttactcatgatgcttctgcagagactgtgggctacaccacatatgttatttggaaatataggtattttagtacagtacatacttgcattacataggtacttcaagcaacacaataaaaagtaaatgataaagtgaacttgcttgtttatagtaataaacaagaccataagagaataagtatagctagagaaattgcttctctgaaatgtacatgagcccttaaggtaagagatgatttccatctactctcattttgattacttccttatggtttgagaggctagaaactgagcctctctacttttggaaaaatgaacatgtgaggtcagatttttttttttttttttaagtcagcactgatgccaccctctcagtggtcatttctgagcatcttcctgacttgaacaccttctacagcaaactcttgcaagtccagtttcatccctgtaaggcaaatgtcttttcacgcagaaagtgccatatagacgagataaaggcagctaaaacgagggcagtagagagcacttacccgaccccaaggtgccagagatgccctgaggatggtggttaaggaaacaggagcaggaaatgtacacacagattcctgtccctttgccaactactccttccccatcaaagaaaaacacttgcacacagtaactaccagctccttctctcaaacttgtatttctcctggaaatgtatctcagaaatgacctcctctcccaaccacttcaacgattctttctttgggtttggggttcttgcagttctatcatctaaaataacctttggactgcaggtaaaatgcaattaggacaactaaccaagtagacgaaacaagttcccctaggcaggggtgtccaatattttagcttccctggaccgcattggaagaattttcttgggccacatgtaaaacacactaacactaaccatagttgatgagcttaaaaaaataaaaatagaaaattgcaaaaaaaaaaaaaaaaaaaaatctcagactgttttaagaaagtttaaaaatttgtgttggacttcatgcgggccacaggttggacaagcttgccctagggcattgtgtgctttccgtaacttctcagttgtatttcgttatccatgactctccagtgttttttctgttggaccacacccgtcacagttcacagttccaaagagaaatttcccagcctattctaaatcttgttaatgacgaagagtccaatgtatctcattatttgtagccaattttagactcttttcaatacctcccccccattttaattagtattgatcatattcagtctttcattttactcttcatctgtagcgtgacctcaaggtaaagatgaaactatttcatgaaaaggggaggagtatggctgtgcattagctctactccctctctggtaagtactggggagagaacagccctgccagtactgggtttgatagattctaaatattaatcacacatcctgcctacagttagccattttagtttctgggagttctttcatgtacattttcttccattaattgaattaggtataattgagatggcaataaatatgcccgtattagaaagaggaaacaaagctacatgcggcttatgattttgttgagtcacttctcccgaggcagcctttccaatgcctggtcccttcccctgagagcaggtggactgctggtggtggctttctttcctgcagagaggcactttagacccatacctgctgtgagctgaattgatgttctcatcctgtgaaccttctcccactttaacctaatttatctttacttgtttaaagataaggaaacccaagatgtactttatttgcaaactcaaagcaaatggcgagccacctgtgacccagtaaccagaaaagaaaccatgccatttgtataagtagagacacttcttgttgaggtaggcaaggctcttgtgagcgatttttttcccctagtgagacctaacaaaagacaagctatatcatttctgcctgaaattatctgcttgaaaagatcaaaatatcaggatacttagctcttcacaaatatgaagtcattatcacatttcactgagccagaaatcactgttaacagcacacacaaaagactacactggttgaacagcaaagagaaacccgggtctccagaatcacagtttagtccttctatattactgcaagtgacctgttttttctgaaggctccccgcaaatgaagtcctggaatggaaaaaatccataagtccataaattaacttgataaatattttagaacagacaaaagaaaatattgagtgatgtagttctaatcctcctaatatggaacctggcaagactgaatcattttactgtgaaatatataaacacaatagaatgagccaacatgatggtttctctccagtaagagtttttcttttggaaatgaggttaacctagccccaaatctagcaattctcataaaatccgattttagaattagcctcccagattaatctgaatgattgacttattttttcttaggcaagtcagtaagccacccactagacagccatatccagcaaaataagagaagtttccagatgccaaatgataagccaccatcaacccagcggggaagccttctggttggtttggctgtatgagattcaggaaggccagaatacccaaaattattcacacgacgttaacttattggtactggctaagcaatacatgtatttcctaaaggaggagatggtcttttggttgatttatggacacacttgtttcatctgactgtaaatatattgcatgctttattctgatggtgcactatttcatccagcaagcttttcatctgagaatgtttaatgttgaccttattcttagagcaagtagatctaaatatttttcagctgagttattagggagtcattattctgtggtacaatgctgcaaaaagcatcatgtggaagaatgggaactatgcttactttatgaagtgatgtataacacaatgaaatctgttttacaactactgtgctgcatttaattatcttccatttttgctgttaaaaaaaaaaaatccgttaa

SEQ ID NO: 115837 - DNA, 953 bp, Homo sapiens
  Payload ID: 2605
  Gene Symbol: CDC42EP3
  Gene Name: CDC42 effector protein (Rho GTPase binding) 3
  ENST ID: ENST00000453555
  CDS Start-End: 850-953
ccacaagcaaggctttgcctatgttttctcctggctccttctgcctcctgaccaaccctggtgcttccccgtgtggacccctgtgacatggcatgcccttcttgggagctgcagaaacgagtaatgtgagagcctgcaattgtaatcttcataaagtatatcacataccgttcaaaaacatcaagtggcatgttaaataagcttttggagaataagttgagcgtgacaccacaagaagaaaaacagaatccatgacttctcaaaacatgatcttgcttcagatgagaaagctctgtgcttagtttgctgtgagtacttctttgtgtccattgtggcctcctatctaacataaggattcctttccccaagtggtggaacagtgggtaggagagtctgttcatatcccaaaggtgtgccaaaaggatttatcaagaaggggatgacggaggttgctcttccaaaagcgtccagagtcactgagacctgacctgtgtattttgtatcctatccatgtcagcacttctccttgctgccaccgtgtgaagaaggacgtgtttgcttccccttccaccatgattgtaagtttcctgaggcctccccagccatgctgaactgtttgtcctggttgtggtcaagactggatgatgtaactggctctctaggaagcctcacttggccgtaacctcaggaaggttctctttgaccccatctcatttcgaagccacttctgaagccacttgagaaaaatgatgtgacagttcctatcaaaaaggattcagaaacatataccatctgtgaagaaagtggccctttctcccgcttgcaaaatagacattctcaaattccaaaatgccagccaagaccccaatttacctgaaagcagccaataacaagaaaggaaagaaatttaaactgagggacattctgtctcctgatatgatcagtcccccgct

SEQ ID NO: 115838 - DNA, 997 bp, Homo sapiens
  Payload ID: 2605
  Gene Symbol: CDC42EP3
  Gene Name: CDC42 effector protein (Rho GTPase binding) 3
  ENST ID: ENST00000457889
  CDS Start-End: 351-997
cgcgcccaccggagcccgggctgagagggacctggggagctgcggcctggccggggcggcgcactcaggtggcctcgcttccctgcgggtcaccgcccgccactcgcacagctaggtttgtcctggttgtggtcaagactggatgatgtaactggctctctaggaagcctcacttggccgtaacctcaggaaggttctctttgaccccatctcatttcgaagccacttctgaagccacttgagaaaaatgatgtgacagttcctatcaaaaaggattcagaaacatataccatctgtgaagaaagtggccctttctcccgcttgcaaaatagacattctcaaattccaaaatgccagccaagaccccaatttacctgaaagcagccaataacaagaaaggaaagaaatttaaactgagggacattctgtctcctgatatgatcagtcccccgcttggagactttcgccacaccatccacattggcaaagagggccagcacgatgtctttggagatatttcctttcttcaagggaactacgagcttttacctggaaaccaggagaaagcacacctgggccagttccctgggcataatgagttcttccgggccaacagcacctcggactctgtgttcacagaaacgccctccccggtgctcaaaaatgccatctccctcccgaccattggaggatcccaagctctcatgttgcccttattgtcaccagtgacatttaattccaaacaggagtccttcgggccagcaaagctgcccaggcttagctgcgagcccgtcatggaggaaaaagctcaggagaaaagcagtctgttggagaatgggacagtccaccagggagacacctcgtggggctccagcggttctgcatctcagtccagccaaggcagagacagccactcctccagcctgtccgaacagtaccccgactggccagccgaggacatgtttgaccatcccaccccatgcgagctcatcaaggg

SEQ ID NO: 115839 - DNA, 542 bp, Homo sapiens
  Payload ID: 2605
  Gene Symbol: CDC42EP3
  Gene Name: CDC42 effector protein (Rho GTPase binding) 3
  ENST ID: ENST00000422687
  CDS Start-End: 501-542
gcagatcatgggggctcccttcgaattctgcctactgcatggaggatatagccttatcagtaatgtttcagaagtgttcccaagtgaaggcccagcctgtaatagagattcacaatgttttctctttgaagtgaagcagttttgttcatttcctcccatctcagaatgacttcaaatcctgacatcctcgacagcccaatactttgccacaacctgattacaactctagctctcttatttactggctatatgttattgagaaaaggtttgtcctggttgtggtcaagactggatgatgtaactggctctctaggaagcctcacttggccgtaacctcaggaaggttctctttgaccccatctcatttcgaagccacttctgaagccacttgagaaaaatgatgtgacagttcctatcaaaaaggattcagaaacatataccatctgtgaagaaagtggccctttctcccgcttgcaaaatagacattctcaaattccaaaatgccagccaagaccccaatttacctgaaagcagccaataac

SEQ ID NO: 115840 - DNA, 5124 bp, Homo sapiens
  Payload ID: 2605
  Gene Symbol: CDC42EP3
  Gene Name: CDC42 effector protein (Rho GTPase binding) 3
  Uniprot ID: Q9UKI2
  ENST ID: ENST00000611976
  CDS Start-End: 419-1183
cgctggcggtggccgggtgaccggcgggcgcaggtgccaccgcggcctgaattttactctctcgggccggcagctgcgccacttgcgcctcgtcgcgcgtctggggcagccgccaccggcttgccccagctttaggcaaatccttttgaaagaccctgagggagaagaaacgcctccctctgggtttgtcctggttgtggtcaagactggatgatgtaactggctctctaggaagcctcacttggccgtaacctcaggaaggttctctttgaccccatctcatttcgaagccacttctgaagccacttgagaaaaatgatgtgacagttcctatcaaaaaggattcagaaacatataccatctgtgaagaaagtggccctttctcccgcttgcaaaatagacattctcaaattccaaaatgccagccaagaccccaatttacctgaaagcagccaataacaagaaaggaaagaaatttaaactgagggacattctgtctcctgatatgatcagtcccccgcttggagactttcgccacaccatccacattggcaaagagggccagcacgatgtctttggagatatttcctttcttcaagggaactacgagcttttacctggaaaccaggagaaagcacacctgggccagttccctgggcataatgagttcttccgggccaacagcacctcggactctgtgttcacagaaacgccctccccggtgctcaaaaatgccatctccctcccgaccattggaggatcccaagctctcatgttgcccttattgtcaccagtgacatttaattccaaacaggagtccttcgggccagcaaagctgcccaggcttagctgcgagcccgtcatggaggaaaaagctcaggagaaaagcagtctgttggagaatgggacagtccaccagggagacacctcgtggggctccagcggttctgcatctcagtccagccaaggcagagacagccactcctccagcctgtccgaacagtaccccgactggccagccgaggacatgtttgaccatcccaccccatgcgagctcatcaagggaaagactaagtcagaggagtccctctctgaccttacaggttccctcctctccctgcagcttgatcttgggccctcacttttggatgaggtgctgaatgtaatggataaaaataagtaacaagatgccaacttttttcctttggggtaaaaggtacaaaaacaaactaaccacagttgaagagaagggcttccggagctgtatttgcagttttgtgttgggttttctaaaataatattcttacaaagtatttttttacctgttatgccctgtttgcaaaaacaatttagaaaaaaacaacaaagcaaaacctatcttggcaaaaaaaggaagtgagtcagagcccattttcaggaggcattggtgatgttcggctcacatattgtttgcagacacacaagaaatctggcttggccaggattggcactagctatgaagggctgagcgagtcacattaaggaacttcacggaactttatagcactccgacattttctgagcaagaggaagtcaaaatttatttaacacctaagcctttttgtagactcttttctatatattgcttaggctcaccatagcgaattctccagtgttaaaacttttctgttttcacatttgaactttatgggttttggggattttcttgtagttcttatatatccctatatattatatctatattgcaaaattttgactgtcagctacatgttggtaagacacaggcaaagtattactgtaactaagttatttttaaagttaaaatatatttttacgtgcctttggctttttattgcagagtctacattttatagattctacatcagatgttgtcacttatttccattgggattccattgtaagctgtgtatgtgcgtgtttggaaaagtgtattcatacttagtttttttttcttcatctgttatcatacttttaacagcaaccaataacggattgtaaagtgtaaaggcacaggttactcatgatgcttctgcagagactgtgggctacaccacatatgttatttggaaatataggtattttagtacagtacatacttgcattacataggtacttcaagcaacacaataaaaagtaaatgataaagtgaacttgcttgtttatagtaataaacaagaccataagagaataagtatagctagagaaattgcttctctgaaatgtacatgagcccttaaggtaagagatgatttccatctactctcattttgattacttccttatggtttgagaggctagaaactgagcctctctacttttggaaaaatgaacatgtgaggtcagatttttttttttttttttaagtcagcactgatgccaccctctcagtggtcatttctgagcatcttcctgacttgaacaccttctacagcaaactcttgcaagtccagtttcatccctgtaaggcaaatgtcttttcacgcagaaagtgccatatagacgagataaaggcagctaaaacgagggcagtagagagcacttacccgaccccaaggtgccagagatgccctgaggatggtggttaaggaaacaggagcaggaaatgtacacacagattcctgtccctttgccaactactccttccccatcaaagaaaaacacttgcacacagtaactaccagctccttctctcaaacttgtatttctcctggaaatgtatctcagaaatgacctcctctcccaaccacttcaacgattctttctttgggtttggggttcttgcagttctatcatctaaaataacctttggactgcaggtaaaatgcaattaggacaactaaccaagtagacgaaacaagttcccctaggcaggggtgtccaatattttagcttccctggaccgcattggaagaattttcttgggccacatgtaaaacacactaacactaaccatagttgatgagcttaaaaaaataaaaatagaaaattgcaaaaaaaaaaaaaaaaaaaaatctcagactgttttaagaaagtttaaaaatttgtgttggacttcatgcgggccacaggttggacaagcttgccctagggcattgtgtgctttccgtaacttctcagttgtatttcgttatccatgactctccagtgttttttctgttggaccacacccgtcacagttcacagttccaaagagaaatttcccagcctattctaaatcttgttaatgacgaagagtccaatgtatctcattatttgtagccaattttagactcttttcaatacctcccccccattttaattagtattgatcatattcagtctttcattttactcttcatctgtagcgtgacctcaaggtaaagatgaaactatttcatgaaaaggggaggagtatggctgtgcattagctctactccctctctggtaagtactggggagagaacagccctgccagtactgggtttgatagattctaaatattaatcacacatcctgcctacagttagccattttagtttctgggagttctttcatgtacattttcttccattaattgaattaggtataattgagatggcaataaatatgcccgtattagaaagaggaaacaaagctacatgcggcttatgattttgttgagtcacttctcccgaggcagcctttccaatgcctggtcccttcccctgagagcaggtggactgctggtggtggctttctttcctgcagagaggcactttagacccatacctgctgtgagctgaattgatgttctcatcctgtgaaccttctcccactttaacctaatttatctttacttgtttaaagataaggaaacccaagatgtactttatttgcaaactcaaagcaaatggcgagccacctgtgacccagtaaccagaaaagaaaccatgccatttgtataagtagagacacttcttgttgaggtaggcaaggctcttgtgagcgatttttttcccctagtgagacctaacaaaagacaagctatatcatttctgcctgaaattatctgcttgaaaagatcaaaatatcaggatacttagctcttcacaaatatgaagtcattatcacatttcactgagccagaaatcactgttaacagcacacacaaaagactacactggttgaacagcaaagagaaacccgggtctccagaatcacagtttagtccttctatattactgcaagtgacctgttttttctgaaggctccccgcaaatgaagtcctggaatggaaaaaatccataagtccataaattaacttgataaatattttagaacagacaaaagaaaatattgagtgatgtagttctaatcctcctaatatggaacctggcaagactgaatcattttactgtgaaatatataaacacaatagaatgagccaacatgatggtttctctccagtaagagtttttcttttggaaatgaggttaacctagccccaaatctagcaattctcataaaatccgattttagaattagcctcccagattaatctgaatgattgacttattttttcttaggcaagtcagtaagccacccactagacagccatatccagcaaaataagagaagtttccagatgccaaatgataagccaccatcaacccagcggggaagccttctggttggtttggctgtatgagattcaggaaggccagaatacccaaaattattcacacgacgttaacttattggtactggctaagcaatacatgtatttcctaaaggaggagatggtcttttggttgatttatggacacacttgtttcatctgactgtaaatatattgcatgctttattctgatggtgcactatttcatccagcaagcttttcatctgagaatgtttaatgttgaccttattcttagagcaagtagatctaaatatttttcagctgagttattagggagtcattattctgtggtacaatgctgcaaaaagcatcatgtggaagaatgggaactatgcttactttatgaagtgatgtataacacaatgaaatctgttttacaactactgtgctgcatttaattatcttccatttttgctgttaaaaaaaaaaaatccgttaatgatgtc

SEQ ID NO: 115841 - DNA, 3272 bp, Homo sapiens
  Payload ID: 2606
  Gene Symbol: CDC42EP4
  Gene Name: CDC42 effector protein (Rho GTPase binding) 4
  Uniprot ID: Q9H3Q1
  ENST ID: ENST00000335793
  CDS Start-End: 396-1466
agtttgaaccgaggaggccgagcagtcgggcagaggttcccgacggccattggctgctgcggcgccgtgacatcagcgcagaggggtgcgcggggagggttgcgcggggcgggcgcgggcggagcctggaaggggagtgtcctggaggctcccagccctgaaagcccgagagccagagggaaacaaacgccggcgctgacaggggccgccagcccctccgccgcgcggagcccacgaaggggacagcgcagccggcccagagctcgggtctccggggaccgagccttatgatctcctcattgcgtccccctctgcccactggacttggacttcagatctgaccccagacctgccggctacctcgggagggcccacctccccgcccatccagcaagatgccaatcctcaagcaactggtgtccagctcggtgcactccaagcgccgttcccgagcggacctcacggccgagatgatcagcgccccgctgggcgacttccgccacaccatgcacgttggccgggccggagacgcctttggggacacctccttcctcaatagcaaggctggcgagcccgacggcgagtccttggacgaacagccctcttcttcatcttccaaacgcagtctcctgtccaggaagttccggggcagcaagcggtcacagtcggtgaccaggggggagcgggagcagcgtgacatgctgggctccctgcgggactcggccctgtttgtcaagaatgccatgtccctgccccagctcaatgagaaggaggccgcggagaagggcaccagtaagctgcccaagagcctgtcatccagccccgtgaagaaggccaatgacggggagggcggcgatgaggaggcgggcacggaggaggcagtgccccgtcggaatggggccgcgggtccacattcccctgaccccctcctcgatgagcaggcctttggggatctgacagatctgcctgtcgtgcccaaggccacgtacgggctgaagcatgcggagtccatcatgtccttccacatcgacctggggccctccatgctgggtgacgtcctcagcatcatggacaaggaggagtgggaccccgaggagggggagggtggttaccatggcgatgagggcgccgctggcaccatcacccaggctcccccgtacgccgtggcggcccctcccctggcaaggcaggaaggcaaggctggcccagacttgccctccctcccctcccatgctctggaggatgaggggtgggcagcagcggcccccagccccggctcagcccgcagcatgggcagccacaccacacgggacagcagctccctctccagctgcacctcaggcatcctggaggagcgcagccctgccttccgggggccggacagggcccgggctgctgtctcaagacagccagacaaggagttctccttcatggatgaggaggaggaggatgaaatccgtgtgtgaggcggacagtgggtggccaccgggagctcttggctgcatcttctccctgcccccaccccactatgacctttgaccctacggcgcaggggcagccaggacccttgattcagaccatggaccctggaccttgtagatgagggacactggcctggccctcgggtcttcggaggacgtagggggctggcatgggtgccgactggctgcctgacttcatcatgctccctgcacttaggctgcgtgggacaagggctgtgttgtcacagcaggaataggttttcctctgttggcctccctttcctccaccctggcctcaaatggatgccagatgccaaccccagttctggccacgtacagccagcgggtcagcccagaggcagcctcagctccagggctaaggactctcggctcccattttctctgctggcgtttctgctgtgcccagcagtggctgctggggaagcagctgcagcaggagggagacggtcttgcctctcagcccctccctgccccaccccagctcctgccctggaaatctggagccccttggagctgagctggacggggggccagctgcgagcatgtgcactaaacgcagccctttccaggggaagagaacaggatggagaatggaaggaaagccccccaggcttcgtgaattgcaagaagggacccttccaggatgacactaggaacagggctagggcactcgctcagtccctaggggcttgtttgttctttattattgtgtttaaatccttatagagcaatatcaggatggtgttaataggtctgcctcagaatgagaatcaatccttttagaaaacctttatactaagcctcctcttcaaaattcacagtggcgattagcggactggagtctggtggcgattagcggactggagtctggggacatccgtggcaaagacaccagctcaactttagtgcttcccaactttatttagaatgacatggggtgggtgtctggtgtgtgtgttttccctacgcacctcccatagctattaacaactgaggaaggccagtgcagaatatttttggagaacgattttttttttaaataatatatcattcctatggggggaaagccttttttttctttttggctgagttattccctccctcccctcaataccctcagtactgactacttccctttcttttctcaggcctccccccaccgacttttgaggccagggttggccagatttagcaaaaccaaaacagagtgctgagttaaacgcaaatttcaggtaaacaaaagataattttctagcattaatatgccccacgcaatatttggaacacttatgtgaaaaatgatttgtttttctgaaattcacgtttctctctgagtcctgtaactgtccccgaggggattgagcagaagctcgggtatgagccctgaggttgactgccggttatttttctgtcctgggaacagcctgacccacctccctgtctccatgtagccagtgaggggagggggagacacagaaccaaccacagccaggggcgtccccatggcgactgtggcccggcccctcctctcttgcctgactctcctctcttgcctgactctagacactaacttagttccaggttcggtgccctgttggtgctcctgtttccaatagcttaggtcccatggtgggggaggaacctcaggggctatgcagcccccgccagctgccctcgaatcccgtccaggccaattccagattctaaactgatttttttcatgatattgtcaaaacagtgaggaaacattaaaaaaaaagccctaaagca

SEQ ID NO: 115842 - DNA, 2879 bp, Homo sapiens
  Payload ID: 2606
  Gene Symbol: CDC42EP4
  Gene Name: CDC42 effector protein (Rho GTPase binding) 4
  Uniprot ID: Q9H3Q1
  ENST ID: ENST00000439510
  CDS Start-End: 214-1074
acaaacgccggcgctgacaggggccgccagcccctccgccgcgcggagcccacgaaggggacagcgcagccggcccagagctcgggtctccggggaccgagccttatgatctcctcattgcgtccccctctgcccactggacttggacttcagatctgaccccagacctgccggctacctcgggagggcccacctccccgcccatccagcaagatgccaatcctcaagcaactggtgtccagctcggtgcactccaagcgccgttcccgagcggacctcacggccgagatgatcagcgccccgctgggcgacttccgccacaccatgcacgttggccgggccggagacgcctttggggacacctccttcctcaatagcaaggccgcggagaagggcaccagtaagctgcccaagagcctgtcatccagccccgtgaagaaggccaatgacggggagggcggcgatgaggaggcgggcacggaggaggcagtgccccgtcggaatggggccgcgggtccacattcccctgaccccctcctcgatgagcaggcctttggggatctgacagatctgcctgtcgtgcccaaggccacgtacgggctgaagcatgcggagtccatcatgtccttccacatcgacctggggccctccatgctgggtgacgtcctcagcatcatggacaaggaggagtgggaccccgaggagggggagggtggttaccatggcgatgagggcgccgctggcaccatcacccaggctcccccgtacgccgtggcggcccctcccctggcaaggcaggaaggcaaggctggcccagacttgccctccctcccctcccatgctctggaggatgaggggtgggcagcagcggcccccagccccggctcagcccgcagcatgggcagccacaccacacgggacagcagctccctctccagctgcacctcaggcatcctggaggagcgcagccctgccttccgggggccggacagggcccgggctgctgtctcaagacagccagacaaggagttctccttcatggatgaggaggaggaggatgaaatccgtgtgtgaggcggacagtgggtggccaccgggagctcttggctgcatcttctccctgcccccaccccactatgacctttgaccctacggcgcaggggcagccaggacccttgattcagaccatggaccctggaccttgtagatgagggacactggcctggccctcgggtcttcggaggacgtagggggctggcatgggtgccgactggctgcctgacttcatcatgctccctgcacttaggctgcgtgggacaagggctgtgttgtcacagcaggaataggttttcctctgttggcctccctttcctccaccctggcctcaaatggatgccagatgccaaccccagttctggccacgtacagccagcgggtcagcccagaggcagcctcagctccagggctaaggactctcggctcccattttctctgctggcgtttctgctgtgcccagcagtggctgctggggaagcagctgcagcaggagggagacggtcttgcctctcagcccctccctgccccaccccagctcctgccctggaaatctggagccccttggagctgagctggacggggggccagctgcgagcatgtgcactaaacgcagccctttccaggggaagagaacaggatggagaatggaaggaaagccccccaggcttcgtgaattgcaagaagggacccttccaggatgacactaggaacagggctagggcactcgctcagtccctaggggcttgtttgttctttattattgtgtttaaatccttatagagcaatatcaggatggtgttaataggtctgcctcagaatgagaatcaatccttttagaaaacctttatactaagcctcctcttcaaaattcacagtggcgattagcggactggagtctggtggcgattagcggactggagtctggggacatccgtggcaaagacaccagctcaactttagtgcttcccaactttatttagaatgacatggggtgggtgtctggtgtgtgtgttttccctacgcacctcccatagctattaacaactgaggaaggccagtgcagaatatttttggagaacgattttttttttaaataatatatcattcctatggggggaaagccttttttttctttttggctgagttattccctccctcccctcaataccctcagtactgactacttccctttcttttctcaggcctccccccaccgacttttgaggccagggttggccagatttagcaaaaccaaaacagagtgctgagttaaacgcaaatttcaggtaaacaaaagataattttctagcattaatatgccccacgcaatatttggaacacttatgtgaaaaatgatttgtttttctgaaattcacgtttctctctgagtcctgtaactgtccccgaggggattgagcagaagctcgggtatgagccctgaggttgactgccggttatttttctgtcctgggaacagcctgacccacctccctgtctccatgtagccagtgaggggagggggagacacagaaccaaccacagccaggggcgtccccatggcgactgtggcccggcccctcctctcttgcctgactctcctctcttgcctgactctagacactaacttagttccaggttcggtgccctgttggtgctcctgtttccaatagcttaggtcccatggtgggggaggaacctcaggggctatgcagcccccgccagctgccctcgaatcccgtccaggccaattccagattctaaactgatttttttcatgatattgtcaaaacagtgaggaaacattaaaaaaaaagccctaaagc

SEQ ID NO: 115843 - DNA, 1022 bp, Homo sapiens
  Payload ID: 2606
  Gene Symbol: CDC42EP4
  Gene Name: CDC42 effector protein (Rho GTPase binding) 4
  ENST ID: ENST00000580315
  CDS Start-End: 641-1022
agaaccgaattctccgcctgtacgggcagaggcgtgtacacatctcgctctcgtacacacactgcagcacacgccacccaatgtcacccggccgggaagccagagggaaggagctgtctggaagggaatggccgaaggaacaaatggtcctcctttcccctactcccgccccgcgaacccttccctcccccgccaggctcccgccccgcccgctccctcggaagcccgggaggccgaggcgcctcctggcggggtgcggggggagggcagtcgagccacccgcccccttggagccggggagacggccgctcctgggctagtgcgccccgagctcagcgcgctcagcgggatcgcaggcgggagcggtcggttaatgatttaatcgcccgcttggggcgggtgcgcgcggatcggccgtccctggccccgccccctctccggagcgcccccagccggggttacaaaactgccccctgcccccggcgcgtcccccaggagccatcctgcccgcggggatcccgtcagccgccttatgatctcctcattgcgtccccctctgcccactggacttggacttcagatctgaccccagacctgccggctacctcgggagggcccacctccccgcccatccagcaagatgccaatcctcaagcaactggtgtccagctcggtgcactccaagcgccgttcccgagcggacctcacggccgagatgatcagcgccccgctgggcgacttccgccacaccatgcacgttggccgggccggagacgcctttggggacacctccttcctcaatagcaaggctggcgagcccgacggcgagtccttggacgaacagccctcttcttcatcttccaaacgcagtctcctgtccaggaagttccggggcagcaagcggtcacagtcggtgaccaggggggagcgggagcagcgtgacatgctgggctccctgcgggactcggccctgtttgtcaagaatgccatgtccctgccccagctcaatgagaaggaggccg

SEQ ID NO: 115844 - DNA, 580 bp, Homo sapiens
  Payload ID: 2606
  Gene Symbol: CDC42EP4
  Gene Name: CDC42 effector protein (Rho GTPase binding) 4
  ENST ID: ENST00000579611
  CDS Start-End: 362-580
agagggaaacaaacgccggcgctgacaggggccgccagcccctccgccgcgcggagcccacgaaggggacagcgcagccggcccagagctcgggtctccggggaccgagtttcagggaaagtgtgtccgaggctactggaactctaaccagatttgcaaaatcactcctctactctgaatgcctgcggatgaagaaacaggcagggttataccatggattgctggcttatttcacagcatttaactttgccttatgatctcctcattgcgtccccctctgcccactggacttggacttcagatctgaccccagacctgccggctacctcgggagggcccacctccccgcccatccagcaagatgccaatcctcaagcaactggtgtccagctcggtgcactccaagcgccgttcccgagcggacctcacggccgagatgatcagcgccccgctgggcgacttccgccacaccatgcacgttggccgggccggagacgcctttggggacacctccttcctcaatagcaaggctggcgagcccgacggcgagtccttggacgaacagccctcttcttcatct

SEQ ID NO: 115845 - DNA, 737 bp, Homo sapiens
  Payload ID: 2606
  Gene Symbol: CDC42EP4
  Gene Name: CDC42 effector protein (Rho GTPase binding) 4
  ENST ID: ENST00000581014
  CDS Start-End: 218-457
ggaaacaaacgccggcgctgacaggggccgccagcccctccgccgcgcggagcccacgaaggggacagcgcagccggcccagagctcgggtctccggggaccgagccttatgatctcctcattgcgtccccctctgcccactggacttggacttcagatctgaccccagacctgccggctacctcgggagggcccacctccccgcccatccagcaagatgccaatcctcaagcaactggtgtccagctcggtgcactccaagcgccgttcccgagcggacctcacggccgagatgatcagcgccccgctgggcgacttccgccacaccatgcaccagctccctctccagctgcacctcaggcatcctggaggagcgcagccctgccttccgggggccggacagggcccgggctgctgtctcaagacagccagacaaggagttctccttcatggatgaggaggaggaggatgaaatccgtgtgtgaggcggacagtgggtggccaccgggagctcttggctgcatcttctccctgcccccaccccactatgacctttgaccctacggcgcaggggcagccaggacccttgattcagaccatggaccctggaccttgtagatgagggacactggcctggccctcgggtcttcggaggacgtagggggctggcatgggtgccgactggctgcctgacttcatcatgctccctgcacttaggctgcgtgggacaagggctg

SEQ ID NO: 115846 - DNA, 240 bp, Homo sapiens
  Payload ID: 2606
  Gene Symbol: CDC42EP4
  Gene Name: CDC42 effector protein (Rho GTPase binding) 4
  ENST ID: ENST00000630622
  CDS Start-End: 1-240
atgccaatcctcaagcaactggtgtccagctcggtgcactccaagcgccgttcccgagcggacctcacggccgagatgatcagcgccccgctgggcgacttccgccacaccatgcaccagctccctctccagctgcacctcaggcatcctggaggagcgcagccctgccttccgggggccggacagggcccgggctgctgtctcaagacagccagacaaggagttctccttcatggatga

SEQ ID NO: 115847 - DNA, 864 bp, Homo sapiens
  Payload ID: 2607
  Gene Symbol: CDC42EP5
  Gene Name: CDC42 effector protein (Rho GTPase binding) 5
  Uniprot ID: Q6NZY7
  ENST ID: ENST00000301200
  CDS Start-End: 343-789
ctccgcccagaggggcctcagcttttccaccactgctttctagtcctttaactcctagaggcaaacttttgggggataagaaagcctgggaggggcctgtgccaaaaccctctctgcctggggactgggcggtgattccgcttctgcctgggctcctgccatggcccccgagaggggctgacactttagctcccggtgcaggtgagaacccgcccggaggaagaaggaaggcgcgggccggggattaggagacggaggcggactcggagccagggaaccaggggtccgggctagagctggagtcgtgagcgcgcgcccgccccgctctgggaggaccgcgagatgcccgtgctgaagcagctgggccccgcgcagcccaagaagcggcctgatcgcggcgccctgtccatctccgcgccgctcggcgacttccggcacacgctgcacgtggggcgcggcggcgacgccttcggggacacctcgttcctgagccgccacggcggcgggccgccccccgagccccgggcgccccccgcgggggccccgcgctccccgccgccgcccgccgtcccgcagtccgcagcgccctcgcctgccgacccgctgctgtccttccacctggatctggggccctccatgctggacgcggtgctgggcgtcatggacgcggcgcgcccggaggcggctgccgccaagcccgacgcggaaccccgccccgggacgcagcccccccaggcccgctgccgccccaacgcggacctcgagctgaacgacgtcatcggcctctaggttccctcattccccgcgcccttcccgcccggcaccccacttctgtatacataaacggccaaggtgtgtgcccgg

SEQ ID NO: 115848 - DNA, 864 bp, Homo sapiens; identical to SEQ ID NO: 115847
  Payload ID: 2607
  Gene Symbol: CDC42EP5
  Gene Name: CDC42 effector protein (Rho GTPase binding) 5
  Uniprot ID: Q6NZY7
  ENST ID: ENST00000619217
  CDS Start-End: 343-789

SEQ ID NO: 115849 - DNA, 211 bp, Homo sapiens
  Payload ID: 2607
  Gene Symbol: CDC42EP5
  Gene Name: CDC42 effector protein (Rho GTPase binding) 5
  ENST ID: ENST00000610368
  CDS Start-End: 160-211
tgacactttccttaccaggtgagaacccgcccggaggaagaaggaaggcgcgggccggggattaggagacggaggcggactcggagccagggaaccaggggtccgggctagagctggagtcgtgagcgcgcgcccgccccgctctgggaggaccgcgagatgcccgtgctgaagcagctgggccccgcgcagcccaagaagcggcctgatc

SEQ ID NO: 115850 - DNA, 861 bp, Homo sapiens
  Payload ID: 2607
  Gene Symbol: CDC42EP5
  Gene Name: CDC42 effector protein (Rho GTPase binding) 5
  Uniprot ID: Q6NZY7
  ENST ID: ENST00000617756
  CDS Start-End: 340-786
cgcccagaggggcctcagcttttccaccactgctttctagtcctttaactcctagaggcaaacttttgggggataagaaagcctgggaggggcctgtgccaaaaccctctctgcctggggactgggcggtgattccgcttctgcctgggctcctgccatggcccccgagaggggctgacactttagctcccggtgcaggtgagaacccgcccggaggaagaaggaaggcgcgggccggggattaggagacggaggcggactcggagccagggaaccaggggtccgggctagagctggagtcgtgagcgcgcgcccgccccgctctgggaggaccgcgagatgcccgtgctgaagcagctgggccccgcgcagcccaagaagcggcctgatcgcggcgccctgtccatctccgcgccgctcggcgacttccggcacacgctgcacgtggggcgcggcggcgacgccttcggggacacctcgttcctgagccgccacggcggcgggccgccccccgagccccgggcgccccccgcgggggccccgcgctccccgccgccgcccgccgtcccgcagtccgcagcgccctcgcctgccgacccgctgctgtccttccacctggatctggggccctccatgctggacgcggtgctgggcgtcatggacgcggcgcgcccggaggcggctgccgccaagcccgacgcggaaccccgccccgggacgcagcccccccaggcccgctgccgccccaacgcggacctcgagctgaacgacgtcatcggcctctaggttccctcattccccgcgcccttcccgcccggcaccccacttctgtatacataaacggccaaggtgtgtgcccgg

SEQ ID NO: 115851 - DNA, 211 bp, Homo sapiens; identical to SEQ ID NO: 115849
  Payload ID: 2607
  Gene Symbol: CDC42EP5
  Gene Name: CDC42 effector protein (Rho GTPase binding) 5
  ENST ID: ENST00000622855
  CDS Start-End: 160-211

SEQ ID NO: 115852 - DNA, 875 bp, Homo sapiens
  Payload ID: 2607
  Gene Symbol: CDC42EP5
  Gene Name: CDC42 effector protein (Rho GTPase binding) 5
  Uniprot ID: Q6NZY7
  ENST ID: ENST00000611094
  CDS Start-End: 354-800
ccgcccccacactccgcccagaggggcctcagcttttccaccactgctttctagtcctttaactcctagaggcaaacttttgggggataagaaagcctgggaggggcctgtgccaaaaccctctctgcctggggactgggcggtgattccgcttctgcctgggctcctgccatggcccccgagaggggctgacactttagctcccggtgcaggtgagaacccgcccggaggaagaaggaaggcgcgggccggggattaggagacggaggcggactcggagccagggaaccaggggtccgggctagagctggagtcgtgagcgcgcgcccgccccgctctgggaggaccgcgagatgcccgtgctgaagcagctgggccccgcgcagcccaagaagcggcctgatcgcggcgccctgtccatctccgcgccgctcggcgacttccggcacacgctgcacgtggggcgcggcggcgacgccttcggggacacctcgttcctgagccgccacggcggcgggccgccccccgagccccgggcgccccccgcgggggccccgcgctccccgccgccgcccgccgtcccgcagtccgcagcgccctcgcctgccgacccgctgctgtccttccacctggatctggggccctccatgctggacgcggtgctgggcgtcatggacgcggcgcgcccggaggcggctgccgccaagcccgacgcggaaccccgccccgggacgcagcccccccaggcccgctgccgccccaacgcggacctcgagctgaacgacgtcatcggcctctaggttccctcattccccgcgcccttcccgcccggcaccccacttctgtatacataaacggccaaggtgtgtgcccgg

SEQ ID NO: 115853 - DNA, 5413 bp, Homo sapiens
  Payload ID: 2608
  Gene Symbol: ARHGEF9
  Gene Name: Cdc42 guanine nucleotide exchange factor (GEF) 9
  Uniprot ID: O43307
  ENST ID: ENST00000253401
  CDS Start-End: 802-2352
gaagagggatagggccagcaaggcagggatcgaacgagtgtctggcagccgggagcccagcgaagagagcgagcaagcttaggaaaacgagcgaagtaaagggagtaggggagactgagactgaccggtagccaggcaggcggacggacgcacgcccggacagactgagcaggcgccggagaaccactcacaggttccccccgcctttccctttgaaagctaggattttgcctttcccgtggcgcccgagagagaatgctggactctgccgacttcagcgcaagctaagatttctcagctagggacaaacgatcagcccaatcctgagaaggggggaaccaagcaccccgtccccatccccctcccctcccccgactaaactcgggcgccaaacccagcccttctctaaccaccctacttcctcctctcctttctagcatggtggctgtatggacagtctgacagaacagagactgacatctcccaatctgccggccccccacctggaacactacagtgttctgcattgcaccatgaccctggatgtgcaaactgtagtcgtttttgccgtgattgtagtcctcctgcttgtcaatgtcatactcatgtttttcctgggaacgcgctgaatggagtccagccacctgagctgtcgcgaactctcgctttgatttcatcccgagagccaccgagaaaaaaaaaaaatcacagacagagacagggaaagagagagaaagaacaagctttcttactcaggggggaaaacgttttgagcttcaacatggcctcgctgtgatatgtatgacgttgctgatcactggagattccatcgttagtgctgaggcagtatgggatcacgtcaccatggccaaccgggagttggcatttaaagctggcgacgtcatcaaagtcttggatgcttccaacaaggattggtggtggggccagatcgacgatgaggagggatggtttcctgccagctttgtgaggctctgggtgaaccaggaggatgaggtggaggaggggcccagcgatgtgcagaacggacacctggaccccaattcagactgcctctgtctggggcggccactacagaaccgggaccagatgcgggccaatgtcatcaatgagataatgagcactgagcgtcactacatcaagcacctcaaggatatttgtgagggctatctgaagcagtgccggaagagaagggacatgttcagtgacgagcaactgaaggtaatctttgggaacattgaagatatctacagatttcagatgggctttgtgagagacctggagaaacagtataacaatgatgacccccacctcagcgagataggaccctgcttcctagagcaccaagatggattctggatatactctgagtattgtaacaaccacctggatgcttgcatggagctctccaaactgatgaaggacagccgctaccagcacttctttgaggcctgtcgcctcttgcagcagatgattgacattgctatcgatggtttccttttgactccagtgcagaagatctgcaagtatcccttacagttggctgagctcctaaagtatactgcccaagaccacagtgactacaggtatgtggcagctgctttggctgtcatgagaaatgtgactcagcagatcaacgaacgcaagcgacgtttagagaatattgacaagattgctcagtggcaggcttctgtcctagactgggagggcgaggacatcctagacaggagctcggagctgatctacactggggagatggcctggatctaccagccctacggccgcaaccagcagcgggtcttcttcctgtttgaccaccagatggtcctctgcaagaaggacctaatccggagagacatcctgtactacaaaggccgcattgacatggataaatatgaggtagttgacattgaggatggcagagatgatgacttcaatgtcagcatgaagaatgcctttaagcttcacaacaaggagactgaggagatacatctgttctttgccaagaagctggaggaaaaaatacgctggctcagggctttcagagaagagaggaaaatggtacaggaagatgaaaaaattggctttgaaatttctgaaaaccagaagaggcaggctgcaatgactgtgagaaaagtccctaagcaaaaaggtgtcaactctgcccgctcagttcctccttcctacccaccaccgcaggacccgttaaaccacggccagtacctggtccccgacggcatcgctcagtcgcaggtctttgagttcaccgaacccaagcgcagccagtcaccattctggcaaaacttcagcaggttaacccccttcaaaaaatgatacctacagggaggcagataattttaaaataaagtaaataaaattatatttatagatggaccttttttcggagaagcactgttgaaatttatacacacacacacacacagagacccttgagtacacatacacacacacacacacagacacacacacacacacacacacacacacacacacagagagataaggaacaaaagtgttttctgttgttttggggaagtgaaatatgtggttggtaggaagaggtaccaatgacttccaaacatgtgattccgtcttaaaagttttccatttttaccctgtcccccttccctttgctttcagaagttgacatttctattcattgcttttcttgttaagataatctctttactcccctgtgagtgattcactgccttgtcattattacgatagatgtgtttgtattgttttttttctgatgatactgatgttgatgaatttttaattttatttgatgtggtagagttgggaggtttcagggttttttcccctcttttactttccattgaggaagggaatgagctcctttctcctctccttcagccaatcattatcaaatgttccttcagccctgcagttgccccaaataaccttttttcagcatcctctgtcctcagtcatgccagtctggacatgctctgttgtgccctgtgacaaaactgctcagtattcctattgcttttactgtgttttaggtactgtgaagggatcaaaaaaccaaacagaagcaagggagtatcagactatgatgatgctggagtggacttctgttcagggaacattttgcattcaggctgtttcttctatcactggggtttcccatgttgcagcacttctgggtcgttgcaattttgcatctaggagttagtttgatcgagttattctcttttttcaagtcacttttgttataggtctccccctaggcctgtctctcccttagcccaaaagatctgaactggaagcagaggttgagattctgcctcccaggagagggatttacctgccccctagtaccagataggtttagggcagtgatctctacagcaatcagttcagtgtcctggttgtccctgctcccatttacagatgtttgggcagcattgatagaagtatggaggggttcaagacagagcccacctgatcaagatcatcagctaccttcaaattattgacctggacagggtccaagtctgatagtaaccttttacaagaaagaacagggatgggaatggaaagagatagccttgatccacagtattgtacctgcattttctaccaccctaaaattgtgtgagacttctcccattgttaacagattgcatggacaatcttccctggcttctttctttccctctctctttcttctttctcctgccatcctagcacaggaggatttttggtattgatatagttaaagctgttctggcactcaaagaaggccgtgtttccaacatcctctcatcccaggacatttggggcaagtgagttaggggcccaggggcaattttccctctgaataacgtgtctgaggcagggatgctaccctcaggctcgcttttggccagctttttgcttgggaaaatctaacttctttcacaaggaggcaggcttcctatggatgttggagtacctgtttttcctccacacatagcccttttcatggatagaccttgaacaacaaaaagggtataagggaataaggatgaactctgctgtgaagagcaagccactgtagtgaggaatgtggagactgggagtctgtcctaaaccccatgggagaagacttcatcatgacaggacttcagcttaccaagcagcagccatagctgtgtggaggcttcagcatagctagcatgtttactgctctatgcctcctgatccagaccaggcattgcccagcctgggaatcttttctttgtgggaatcaaattacaagctatttaagtttatattccatcacaaccaagtcagacttgtattataagtcaaggatgagcctgatctggggagagggccggggctcgggactggccaccactgttcagcacatgacctaactacgtaagcctctttggcaagggtcctggtgcccagcacccaggctaaaatatcctgtctggcagagtgttttggtagctatgcaggcctcccttcagtgtacctctttttccaacttctcactcctccttactaggcttggccttgacatgcttcttcgagggttggcagcacaccgggaggggatgcttggacaagtttctgggcctacatttcttgactaggccctctcatttcctccctccttggggcttctgcccagggctccaggatcagggatattacttctcaacccgcacttctcctctactgaacccactggcatcacctgatgccactaatttgtgaacaacaagaaatcatttccccattggttggagtattccctcagcctatagcatcaaagcagaccagtggccaacagccccaaggggagcccaattaaatacctgggttcagtatcctaacctgttatgtcctgacagcaatggtaaccccagtaattctgtaatgttgtaatttccgcatggccctgagctcccttttcctcaactcagtgaggccaggatttgctctccaaaaggctttgctagtgtgttcaatgggacctgctgtggggagtcctaagacagacatctaattattctctctttttccccccctctctatgtgtatatttctaatggatctataagaacagcaacaagagagttctaacaattctagtgtgaagccaaatagtgatcttttagtgctttggggatggggtgggctggggtggatggatgggcaacagtgactttgattacccttgctgctctgcatttgccagtttattcttttgtttcttttatctgactgactctgtcaaacaagtgtcaaagttgtgtgttaaaaaatgtttaacaaaaaaaatgttgtaatgacacaaagccttatgaaaatatttatggagttcaataaaagaagtaaaaagaca

SEQ ID NO: 115854 - DNA, 4644 bp, Homo sapiens
  Payload ID: 2608
  Gene Symbol: ARHGEF9
  Gene Name: Cdc42 guanine nucleotide exchange factor (GEF) 9
  ENST ID: ENST00000374870
  CDS Start-End: 778-2472
agggatcgaacgagtgtctggcagccgggagcccagcgaagagagcgagcaagcttaggaaaacgagcgaagtaaagggagtaggggagactgagactgaccggtagccaggcaggcggacggacgcacgcccggacagactgagcaggcgccggagaaccactcacaggttccccccgcctttccctttgaaagctaggattttgcctttcccgtggcgcccgagagagaatgctggactctgccgacttcagcgcaagctaagatttctcagctagggacaaacgatcagcccaatcctgagaaggggggaaccaagcaccccgtccccatccccctcccctcccccgactaaactcgggcgccaaacccagcccttctctaaccaccctacttcctcctctcctttctagcatggtggctgtatggacagtctgacagaacagagactgacatctcccaatctgccggccccccacctggaacactacagtgttctgcattgcaccatgaccctggatgtgcaaactgtagtcgtttttgccgtgattgtagtcctcctgcttgtcaatgtcatactcatgtttttcctgggaacgcgctgaatggagtccagccacctgagctgtcgcgaactctcgctttgatttcatcccgagagccaccgagaaaaaaaaaaaatcacagacagagacagggaaagagagagaaagaacaagctttcttactcaggggggaaaacgttttgagcttcaacatggcctcgctgtgatatgtatgacgttgctgatcactggagattccatcgttagtgctgaggcagtatgggatcacgtcaccatggccaaccgggagttggcatttaaagctggcgacgtcatcaaagtcttggatgcttccaacaaggattggtggtggggccagatcgacgatgaggagggatggtttcctgccagctttgtgaggctctgggtgaaccaggaggatgaggtggaggaggggcccagcgatgtgcagaacggacacctggaccccaattcagactgcctctgtctggggcggccactacagaaccgggaccagatgcgggccaatgtcatcaatgagataatgagcactgagcgtcactacatcaagcacctcaaggatatttgtgagggctatctgaagcagtgccggaagagaagggacatgttcagtgacgagcaactgaaggtaatctttgggaacattgaagatatctacagatttcagatgggctttgtgagagacctggagaaacagtataacaatgatgacccccacctcagcgagataggaccctgcttcctagagcaccaagatggattctggatatactctgagtattgtaacaaccacctggatgcttgcatggagctctccaaactgatgaaggacagccgctaccagcacttctttgaggcctgtcgcctcttgcagcagatgattgacattgctatcgatggtttccttttgactccagtgcagaagatctgcaagtatcccttacagttggctgagctcctaaagtatactgcccaagaccacagtgactacaggtatgtggcagctgctttggctgtcatgagaaatgtgactcagcagatcaacgaacgcaagcgacgtttagagaatattgacaagattgctcagtggcaggcttctgtcctagactgggagggcgaggacatcctagacaggagctcggagctgatctacactggggagatggcctggatctaccagccctacggccgcaaccagcagcgggtcttcttcctgtttgaccaccagatggtcctctgcaagaaggacctaatccggagagacatcctgtactacaaaggccgcattgacatggataaatatgaggtagttgacattgaggatggcagagatgatgacttcaatgtcagcatgaagaatgcctttaagcttcacaacaaggagactgaggagatacatctgttctttgccaagaagctggaggaaaaaatacgctggctcagggctttcagagaagagaggaaaatggtacaggaagatgaaaaaattggctttgaaatttctgaaaaccagaagaggcaggctgcaatgactgtgagaaaagtccctaagcaaaaaggtgtcaactctgcccgctcagttcctccttcctacccaccaccgcaggacccgttaaaccacggccagtacctggtccccgacggcatcgctcagtcgcaggtctttgagttcaccgaacccaagcgcagccagtcaccattctggcaaaacttcagcaggtactgtgaagggatcaaaaaaccaaacagaagcaagggagtatcagactatgatgatgctggagtggacttctgttcagggaacattttgcattcaggctgtttcttctatcactggggtttcccatgttgcagcacttctgggtcgttgcaattttgcatctaggagttagtttgatcgagttattctcttttttcaagtcacttttgttataggtctccccctaggcctgtctctcccttagcccaaaagatctgaactggaagcagaggttgagattctgcctcccaggagagggatttacctgccccctagtaccagataggtttagggcagtgatctctacagcaatcagttcagtgtcctggttgtccctgctcccatttacagatgtttgggcagcattgatagaagtatggaggggttcaagacagagcccacctgatcaagatcatcagctaccttcaaattattgacctggacagggtccaagtctgatagtaaccttttacaagaaagaacagggatgggaatggaaagagatagccttgatccacagtattgtacctgcattttctaccaccctaaaattgtgtgagacttctcccattgttaacagattgcatggacaatcttccctggcttctttctttccctctctctttcttctttctcctgccatcctagcacaggaggatttttggtattgatatagttaaagctgttctggcactcaaagaaggccgtgtttccaacatcctctcatcccaggacatttggggcaagtgagttaggggcccaggggcaattttccctctgaataacgtgtctgaggcagggatgctaccctcaggctcgcttttggccagctttttgcttgggaaaatctaacttctttcacaaggaggcaggcttcctatggatgttggagtacctgtttttcctccacacatagcccttttcatggatagaccttgaacaacaaaaagggtataagggaataaggatgaactctgctgtgaagagcaagccactgtagtgaggaatgtggagactgggagtctgtcctaaaccccatgggagaagacttcatcatgacaggacttcagcttaccaagcagcagccatagctgtgtggaggcttcagcatagctagcatgtttactgctctatgcctcctgatccagaccaggcattgcccagcctgggaatcttttctttgtgggaatcaaattacaagctatttaagtttatattccatcacaaccaagtcagacttgtattataagtcaaggatgagcctgatctggggagagggccggggctcgggactggccaccactgttcagcacatgacctaactacgtaagcctctttggcaagggtcctggtgcccagcacccaggctaaaatatcctgtctggcagagtgttttggtagctatgcaggcctcccttcagtgtacctctttttccaacttctcactcctccttactaggcttggccttgacatgcttcttcgagggttggcagcacaccgggaggggatgcttggacaagtttctgggcctacatttcttgactaggccctctcatttcctccctccttggggcttctgcccagggctccaggatcagggatattacttctcaacccgcacttctcctctactgaacccactggcatcacctgatgccactaatttgtgaacaacaagaaatcatttccccattggttggagtattccctcagcctatagcatcaaagcagaccagtggccaacagccccaaggggagcccaattaaatacctgggttcagtatcctaacctgttatgtcctgacagcaatggtaaccccagtaattctgtaatgttgtaatttccgcatggccctgagctcccttttcctcaactcagtgaggccaggatttgctctccaaaaggctttgctagtgtgttcaatgggacctgctgtggggagtcctaagacagacatctaattattctctctttttccccccctctctatgtgtatatttctaatggatctataagaacagcaacaagagagttctaacaattctagtgtgaagccaaatagtgatcttttagtgctttggggatggggtgggctggggtggatggatgggcaacagtgactttgattacccttgctgctctgcatttgccagtttattcttttgtttcttttatctgactgactctgtcaaacaagtgtcaaagttgtgtgttaaaaaatgtttaacaaaaaaaatgttgtaatgacacaaagccttatgaaaatatttatggagttcaataaaagaagtaaaaa

SEQ ID NO: 115855 - DNA, 2364 bp, Homo sapiens
  Payload ID: 2608
  Gene Symbol: ARHGEF9
  Gene Name: Cdc42 guanine nucleotide exchange factor (GEF) 9
  ENST ID: ENST00000374872
  CDS Start-End: 831-2318
gggggatggggagagaagagggatagggccagcaaggcagggatcgaacgagtgtctggcagccgggagcccagcgaagagagcgagcaagcttaggaaaacgagcgaacatggtggctgtatggacagtctgacagaacagagactgacatctcccaatctgccggccccccacctggaacactacagtgttctgcattgcaccatgaccctggatgtgcaaactgtagtcgtttttgccgtgattgtagtcctcctgcttgtcaatgtcatactcatgtttttcctgggaacgcgctgaatggagtccagccacctgagctgtcgcgaactctcgctttgatttcatcccgagagccaccgagaaaaaaaaaaaatcacagacagagacagggaaagagagagaaagaacaagctttcttactcaggggggaaaacgttttgagcttcaacatggcctcgctgtgatatgtggtagcaggccatccagtgaaatgtggagcaggcagtaggaaatatgggactggaggtgagcgagaactgatgtcatgagaaggatgattcatctgaagaactaagtggagagaacaaaaagcaaaggtccctattgacttttgaatgcggcagtcaagggtttaagtgggaagcccacttctcaattttcccaggtagtctgactgtgttgccagcaatgcttgagtgagttatcttcaggaaaaagttctcatttttttgagcagaaagcagtaaaagcatcctatcaagcacaaagaaggctgatcactggagattccatcgttagtgctgaggcagtatgggatcacgtcaccatggccaaccgggagttggcatttaaagctggcgacgtcatcaaagtcttggatgcttccaacaaggattggtggtggggccagatcgacgatgaggagggatggtttcctgccagctttgtgaggctctgggtgaaccaggaggatgaggtggaggaggggcccagcgatgtgcagaacggacacctggaccccaattcagactgcctctgtctggggcggccactacagaaccgggaccagatgcgggccaatgtcatcaatgagataatgagcactgagcgtcactacatcaagcacctcaaggatatttgtgagggctatctgaagcagtgccggaagagaagggacatgttcagtgacgagcaactgaaggtaatctttgggaacattgaagatatctacagatttcagatgggctttgtgagagacctggagaaacagtataacaatgatgacccccacctcagcgagataggaccctgcttcctagagcaccaagatggattctggatatactctgagtattgtaacaaccacctggatgcttgcatggagctctccaaactgatgaaggacagccgctaccagcacttctttgaggcctgtcgcctcttgcagcagatgattgacattgctatcgatggtttccttttgactccagtgcagaagatctgcaagtatcccttacagttggctgagctcctaaagtatactgcccaagaccacagtgactacaggtatgtggcagctgctttggctgtcatgagaaatgtgactcagcagatcaacgaacgcaagcgacgtttagagaatattgacaagattgctcagtggcaggcttctgtcctagactgggagggcgaggacatcctagacaggagctcggagctgatctacactggggagatggcctggatctaccagccctacggccgcaaccagcagcgggtcttcttcctgtttgaccaccagatggtcctctgcaagaaggacctaatccggagagacatcctgtactacaaaggccgcattgacatggataaatatgaggtagttgacattgaggatggcagagatgatgacttcaatgtcagcatgaagaatgcctttaagcttcacaacaaggagactgaggagatacatctgttctttgccaagaagctggaggaaaaaatacgctggctcagggctttcagagaagagaggaaaatggtacaggaagatgaaaaaattggctttgaaatttctgaaaaccagaagaggcaggctgcaatgactgtgagaaaagtccctaagcaaaaaggtgtcaactctgcccgctcagttcctccttcctacccaccaccgcaggacccgttaaaccacggccagtacctggtccccgacggcatcgctcagtcgcaggtctttgagttcaccgaacccaagcgcagccagtcaccattctggcaaaacttcagcaggttaacccccttcaaaaaatgatacctacagggaggcagataattttaaaataaagtaaataaaatta

SEQ ID NO: 115856 - DNA, 2217 bp, Homo sapiens
  Payload ID: 2608
  Gene Symbol: ARHGEF9
  Gene Name: Cdc42 guanine nucleotide exchange factor (GEF) 9
  ENST ID: ENST00000374878
  CDS Start-End: 402-1865
atctaactccagcgcagcgggaggcaggcagaggtagcagctgccttctcctgggcgggcggaggctattcgcccccatcctctccctgcaccccacccccacagttctcaagccttggtgggggacaaaagcagcccattaggacccccccacactcgcacctctccctgccaagacctctaggagcagcagggcggagagacagagcctgccggttggcatggaacaaactgactgaaggcgaggtccggggcggaggggattgggttgtagggctgtggaggaggggcggcggagggggcgctggggctctcgcttgcttcagcccagcccttctagtcagcccgcgacaactcgcgccagctacggggcctcagagaagccggacttcgcaagcaccatgcagtggataaggggcggatcgggaatgctgatcactggagattccatcgttagtgctgaggcagtatgggatcacgtcaccatggccaaccgggagttggcatttaaagctggcgacgtcatcaaagtcttggatgcttccaacaaggattggtggtggggccagatcgacgatgaggagggatggtttcctgccagctttgtgaggctctgggtgaaccaggaggatgaggtggaggaggggcccagcgatgtgcagaacggacacctggaccccaattcagactgcctctgtctggggcggccactacagaaccgggaccagatgcgggccaatgtcatcaatgagataatgagcactgagcgtcactacatcaagcacctcaaggatatttgtgagggctatctgaagcagtgccggaagagaagggacatgttcagtgacgagcaactgaaggtaatctttgggaacattgaagatatctacagatttcagatgggctttgtgagagacctggagaaacagtataacaatgatgacccccacctcagcgagataggaccctgcttcctagagcaccaagatggattctggatatactctgagtattgtaacaaccacctggatgcttgcatggagctctccaaactgatgaaggacagccgctaccagcacttctttgaggcctgtcgcctcttgcagcagatgattgacattgctatcgatggtttccttttgactccagtgcagaagatctgcaagtatcccttacagttggctgagctcctaaagtatactgcccaagaccacagtgactacaggtatgtggcagctgctttggctgtcatgagaaatgtgactcagcagatcaacgaacgcaagcgacgtttagagaatattgacaagattgctcagtggcaggcttctgtcctagactgggagggcgaggacatcctagacaggagctcggagctgatctacactggggagatggcctggatctaccagccctacggccgcaaccagcagcgggtcttcttcctgtttgaccaccagatggtcctctgcaagaaggacctaatccggagagacatcctgtactacaaaggccgcattgacatggataaatatgaggtagttgacattgaggatggcagagatgatgacttcaatgtcagcatgaagaatgcctttaagcttcacaacaaggagactgaggagatacatctgttctttgccaagaagctggaggaaaaaatacgctggctcagggctttcagagaagagaggaaaatggtacaggaagatgaaaaaattggctttgaaatttctgaaaaccagaagaggcaggctgcaatgactgtgagaaaactcccttttcctcaactcagtgaggccaggatttgctctccaaaaggctttgctagtgtgttcaatgggacctgctgtggggagtcctaagacagacatctaattattctctctttttccccccctctctatgtgtatatttctaatggatctataagaacagcaacaagagagttctaacaattctagtgtgaagccaaatagtgatcttttagtgctttggggatggggtgggctggggtggatggatgggcaacagtgactttgattacccttgctgctctgcatttgccagtttattcttttgtttcttttatctgactgactctgtcaaacaagtgtcaaagttgtgtgttaaaaaatgtttaacaaaaaaaatgttgtaatgacacaaagccttatgaaaatatttatggagttcaataaaagaagtaaaaagaca

SEQ ID NO: 115857 - DNA, 3758 bp, Homo sapiens
  Payload ID: 2608
  Gene Symbol: ARHGEF9
  Gene Name: Cdc42 guanine nucleotide exchange factor (GEF) 9
  ENST ID: ENST00000437457
  CDS Start-End: 380-1831
ggcaggcagaggtagcagctgccttctcctgggcgggcggaggctattcgcccccatcctctccctgcaccccacccccacagttctcaagccttggtgggggacaaaagcagcccattaggacccccccacactcgcacctctccctgccaagacctctaggagcagcagggcggagagacagagcctgccggttggcatggaacaaactgactgaaggcgaggtccggggcggaggggattgggttgtagggctgtggaggaggggcggcggagggggcgctggggctctcgcttgcttcagcccagcccttctagtcagcccgcgacaactcgcgccagctacggggcctcagagaagccggacttcgcaagcaccatgcagtggataaggggcggatcgggaatgctgatcactggagattccatcgttagtgctgaggcagtatgggatcacgtcaccatggccaaccgggagttggcatttaaagctggcgacgtcatcaaagtcttggatgcttccaacaaggattggtggtggggccagatcgacgatgaggagggatggtttcctgccagctttgtgaggctctgggtgaaccaggaggatgaggtggaggaggggcccagcgatgtgcagaacggacacctggaccccaattcagactgcctctgtctggggcggccactacagaaccgggaccagatgcgggccaatgtcatcaatgagataatgagcactgagcgtcactacatcaagcacctcaaggatatttgtgagggctatctgaagcagtgccggaagagaagggacatgttcagtgacgagcaactgaaggtaatctttgggaacattgaagatatctacagatttcagatgggctttgtgagagacctggagaaacagtataacaatgatgacccccacctcagcgagataggaccctgcttcctagagcaccaagatggattctggatatactctgagtattgtaacaaccacctggatgcttgcatggagctctccaaactgatgaaggacagccgctaccagcacttctttgaggcctgtcgcctcttgcagcagatgattgacattgctatcgatggtttccttttgactccagtgcagaagatctgcaagtatcccttacagttggctgagctcctaaagtatactgcccaagaccacagtgactacaggtatgtggcagctgctttggctgtcatgagaaatgtgactcagcagatcaacgaacgcaagcgacgtttagagaatattgacaagattgctcagtggcaggcttctgtcctagactgggagggcgaggacatcctagacaggagctcggagctgatctacactggggagatggcctggatctaccagccctacggccgcaaccagcagcgggtcttcttcctgtttgaccaccagatggtcctctgcaagaaggacctaatccggagagacatcctgtactacaaaggccgcattgacatggataaatatgaggtagttgacattgaggatggcagagatgatgacttcaatgtcagcatgaagaatgcctttaagcttcacaacaaggagactgaggagatacatctgttctttgccaagaagctggaggaaaaaatacgctggctcagggctttcagagaagagaggaaaatggtacaggaagatgaaaaaattggctttgaaatttctgaaaaccagaagaggcaggctgcaatgactgtgagaaaagtccctaagcaaaaaggggggactggagaaggcgaaatagagtttgttgggttctttgcaggaccaacccctgcataagggattctggtgtcttggaaagagctctgaactgagtagtcaaagaatgtgtcaactctgcccgctcagttcctccttcctacccaccaccgcaggacccgttaaaccacggccagtacctggtccccgacggcatcgctcagtcgcaggtctttgagttcaccgaacccaagcgcagccagtcaccattctggcaaaacttcagcaggttaacccccttcaaaaaatgatacctacagggaggcagataattttaaaataaagtaaataaaattatatttatagatggaccttttttcggagaagcactgttgaaatttatacacacacacacacacagagacccttgagtacacatacacacacacacacacagacacacacacacacacacacacacacacacacacagagagataaggaacaaaagtgttttctgttgttttggggaagtgaaatatgtggttggtaggaagaggtaccaatgacttccaaacatgtgattccgtcttaaaagttttccatttttaccctgtcccccttccctttgctttcagaagttgacatttctattcattgcttttcttgttaagataatctctttactcccctgtgagtgattcactgccttgtcattattacgatagatgtgtttgtattgttttttttctgatgatactgatgttgatgaatttttaattttatttgatgtggtagagttgggaggtttcagggttttttcccctcttttactttccattgaggaagggaatgagctcctttctcctctccttcagccaatcattatcaaatgttccttcagccctgcagttgccccaaataaccttttttcagcatcctctgtcctcagtcatgccagtctggacatgctctgttgtgccctgtgacaaaactgctcagtattcctattgcttttactgtgttttaggtactgtgaagggatcaaaaaaccaaacagaagcaagggagtatcagactatgatgatgctggagtggacttctgttcagggaacattttgcattcaggctgtttcttctatcactggggtttcccatgttgcagcacttctgggtcgttgcaattttgcatctaggagttagtttgatcgagttattctcttttttcaagtcacttttgttataggtctccccctaggcctgtctctcccttagcccaaaagatctgaactggaagcagaggttgagattctgcctcccaggagagggatttacctgccccctagtaccagataggtttagggcagtgatctctacagcaatcagttcagtgtcctggttgtccctgctcccatttacagatgtttgggcagcattgatagaagtatggaggggttcaagacagagcccacctgatcaagatcatcagctaccttcaaattattgacctggacagggtccaagtctgatagtaaccttttacaagaaagaacagggatgggaatggaaagagatagccttgatccacagtattgtacctgcattttctaccaccctaaaattgtgtgagacttctcccattgttaacagattgcatggacaatcttccctggcttctttctttccctctctctttcttctttctcctgccatcctagcacaggaggatttttggtattgatatagttaaagctgttctggcactcaaagaaggccgtgtttccaacatcctctcatcccaggacatttggggcaagtgagttaggggcccaggggcaattttccctctgaataacgtgtctgaggcagggatgctaccctcaggctcgcttttggccagctttttgcttgggaaaatctaacttctttcacaaggaggcaggcttcctatggatgttggagtacctgtttttcctccacacatagcccttttcatggatagaccttg

SEQ ID NO: 115858 - DNA, 582 bp, Homo sapiens
  Payload ID: 2608
  Gene Symbol: ARHGEF9
  Gene Name: Cdc42 guanine nucleotide exchange factor (GEF) 9
  ENST ID: ENST00000623417
  CDS Start-End: 251-582
agggtagccaggcagttgctggtagcaagtaaggagaaagcaccctgctgctaactcactggctgaatttagaggtgccttatgccatgattgtaagtttcctgagccaccgtccaccaagtcattcagaactctctgggtgaaccaggaggatgaggtggaggaggggcccagcgatgtgcagaacggacacctggaccccaattcagactgcctctgtctggggcggccactacagaaccgggaccagatgcgggccaatgtcatcaatgagataatgagcactgagcgtcactacatcaagcacctcaaggatatttgtgagggctatctgaagcagtgccggaagagaagggacatgttcagtgacgagcaactgaaggtaatctttgggaacattgaagatatctacagatttcagatgggctttgtgagagacctggagaaacagtataacaatgatgacccccacctcagcgagataggaccctgcttcctagagcaccaagatggattctggatatactctgagtattgtaacaaccacctggatgcttgcatggagctctccaaactgatgaa

SEQ ID NO: 115859 - DNA, 530 bp, Homo sapiens
  Payload ID: 2608
  Gene Symbol: ARHGEF9
  Gene Name: Cdc42 guanine nucleotide exchange factor (GEF) 9
  ENST ID: ENST00000466925
  CDS Start-End: 1-275
ctgtcatgagaaatgtgactcagcagatcaacgaacgcaagcgacgtttagagaatattgacaagattgctcagtggcaggcttctgtcctagactgggagggcgaggacatcctagacaggagctcggagctgatctacactggggagatggcctggatctaccagccctacggccgcaaccagcagcgggtcttcttcctgtttgaccaccagatggtcctctgcaagaaggctttgaaatttctgaaaaccagaagaggcaggctgcaatgactgtgagaaaagtccctaagcaaaaaggtgtcaactctgcccgctcagttcctccttcctacccaccaccgcaggacccgttaaaccacggccagtacctggtccccgacggcatcgctcagtcgcaggtctttgagttcaccgaacccaagcgcagccagtcaccattctggcaaaacttcagcaggttaacccccttcaaaaaatgatacctacagggaggcagataattttaaaataaagtaaataaaatta

SEQ ID NO: 115860 - DNA, 1888 bp, Homo sapiens
  Payload ID: 2608
  Gene Symbol: ARHGEF9
  Gene Name: Cdc42 guanine nucleotide exchange factor (GEF) 9
  ENST ID: ENST00000624210
  CDS Start-End: 213-1700
gagtgtctggcagccgggagcccagcgaagagagcgagcaagcttaggaaaacgagcgaagtaaagggagtaggggagactgagactgaccggtagccaggcaggcggacggacgcacgcccggacagactgagcaggcgccggagaaccactcacagctgatcactggagattccatcgttagtgctgaggcagtatgggatcacgtcaccatggccaaccgggagttggcatttaaagctggcgacgtcatcaaagtcttggatgcttccaacaaggattggtggtggggccagatcgacgatgaggagggatggtttcctgccagctttgtgaggctctgggtgaaccaggaggatgaggtggaggaggggcccagcgatgtgcagaacggacacctggaccccaattcagactgcctctgtctggggcggccactacagaaccgggaccagatgcgggccaatgtcatcaatgagataatgagcactgagcgtcactacatcaagcacctcaaggatatttgtgagggctatctgaagcagtgccggaagagaagggacatgttcagtgacgagcaactgaaggtaatctttgggaacattgaagatatctacagatttcagatgggctttgtgagagacctggagaaacagtataacaatgatgacccccacctcagcgagataggaccctgcttcctagagcaccaagatggattctggatatactctgagtattgtaacaaccacctggatgcttgcatggagctctccaaactgatgaaggacagccgctaccagcacttctttgaggcctgtcgcctcttgcagcagatgattgacattgctatcgatggtttccttttgactccagtgcagaagatctgcaagtatcccttacagttggctgagctcctaaagtatactgcccaagaccacagtgactacaggtatgtggcagctgctttggctgtcatgagaaatgtgactcagcagatcaacgaacgcaagcgacgtttagagaatattgacaagattgctcagtggcaggcttctgtcctagactgggagggcgaggacatcctagacaggagctcggagctgatctacactggggagatggcctggatctaccagccctacggccgcaaccagcagcgggtcttcttcctgtttgaccaccagatggtcctctgcaagaaggacctaatccggagagacatcctgtactacaaaggccgcattgacatggataaatatgaggtagttgacattgaggatggcagagatgatgacttcaatgtcagcatgaagaatgcctttaagcttcacaacaaggagactgaggagatacatctgttctttgccaagaagctggaggaaaaaatacgctggctcagggctttcagagaagagaggaaaatggtacaggaagatgaaaaaattggctttgaaatttctgaaaaccagaagaggcaggctgcaatgactgtgagaaaagtccctaagcaaaaaggtgtcaactctgcccgctcagttcctccttcctacccaccaccgcaggacccgttaaaccacggccagtacctggtccccgacggcatcgctcagtcgcaggtctttgagttcaccgaacccaagcgcagccagtcaccattctggcaaaacttcagcaggttaacccccttcaaaaaatgatacctacagggaggcagataattttaaaataaagtaaataaaattatatttatagatggaccttttttcggagaagcactgttgaaatttatacacacacacacacacagagacccttgagtacacatacacacacacacacacagacacacacacacacacacacacacacacacacacagagagat

SEQ ID NO: 115861 - DNA, 618 bp, Homo sapiens
  Payload ID: 2608
  Gene Symbol: ARHGEF9
  Gene Name: Cdc42 guanine nucleotide exchange factor (GEF) 9
  ENST ID: ENST00000625116
  CDS Start-End: 295-618
cccttctagtcagcccgcgacaactcgcgccagctacggggcctcagagaagccggacttcgcaagcaccatgcagtggataaggggcggatcgggaatgtacccagaatgctggaaaattgcaagctaactgtcctagtctgaagaatctataatcaagaaaggaaatctgaccagctctgggtgaaccaggaggatgaggtggaggaggggcccagcgatgtgcagaacggacacctggaccccaattcagactgcctctgtctggggcggccactacagaaccgggaccagatgcgggccaatgtcatcaatgagataatgagcactgagcgtcactacatcaagcacctcaaggatatttgtgagggctatctgaagcagtgccggaagagaagggacatgttcagtgacgagcaactgaaggtaatctttgggaacattgaagatatctacagatttcagatgggctttgtgagagacctggagaaacagtataacaatgatgacccccacctcagcgagataggaccctgcttcctagagcaccaagatggattctggatatactctgagtattgtaacaaccacctggatgcttgcatggagctctccaaa

SEQ ID NO: 115862 - DNA, 898 bp, Homo sapiens
  Payload ID: 2608
  Gene Symbol: ARHGEF9
  Gene Name: Cdc42 guanine nucleotide exchange factor (GEF) 9
  ENST ID: ENST00000624538
  CDS Start-End: 773-898
ggaaaacgagcgaagtaaagggagtaggggagactgagactgaccggtagccaggcaggcggacggacgcacgcccggacagactgagcaggcgccggagaaccactcacaggttccccccgcctttccctttgaaagctaggattttgcctttcccgtggcgcccgagagagaatgctggactctgccgacttcagcgcaagctaagatttctcagctagggacaaacgatcagcccaatcctgagaaggggggaaccaagcaccccgtccccatccccctcccctcccccgactaaactcgggcgccaaacccagcccttctctaaccaccctacttcctcctctcctttctagcatggtggctgtatggacagtctgacagaacagagactgacatctcccaatctgccggccccccacctggaacactacagtgttctgcattgcaccatgaccctggatgtgcaaactgtagtcgtttttgccgtgattgtagtcctcctgcttgtcaatgtcatactcatgtttttcctgggaacgcgctgaatggagtccagccacctgagctgtcgcgaactctcgctttgatttcatcccgagagccaccgagaaaaaaaaaaaatcacagacagagacagggaaagagagagaaagaacaagctttcttactcaggggggaaaacgttttgagcttcaacatggcctcgctgtgatatctgatcactggagattccatcgttagtgctgaggcagtatgggatcacgtcaccatggccaaccgggagttggcatttaaagctggcgacgtcatcaaagtcttggatgcttccaacaaggattggtggtggggccagatcgacgatgaggagggatggtttcctgccagctttgtgagg

SEQ ID NO: 115863 - DNA, 578 bp, Homo sapiens
  Payload ID: 2608
  Gene Symbol: ARHGEF9
  Gene Name: Cdc42 guanine nucleotide exchange factor (GEF) 9
  ENST ID: ENST00000624355
  CDS Start-End: 232-578
cccttctagtcagcccgcgacaactcgcgccagctacggggcctcagagaagccggacttcgcaagcaccatgcagtggataaggggcggatcgggaatgtacccagaatgctggaaaattgcaagctaactgtcctagtctgaagaatctataatcaagaaaggaaatctgaccagctgatcactggagattccatcgttagtgctgaggcagtatgggatcacgtcaccatggccaaccgggagttggcatttaaagctggcgacgtcatcaaagtcttggatgcttccaacaaggattggtggtggggccagatcgacgatgaggagggatggtttcctgccagctttgtgaggctctgggtgaaccaggaggatgaggtggaggaggggcccagcgatgtgcagaacggacacctggaccccaattcagactgcctctgtctggggcggccactacagaaccgggaccagatgcgggccaatgtcatcaatgagataatgagcactgagcgtcactacatcaagcacctcaaggatatttgtgagggctatctgaagcagtgccggaagagaag

SEQ ID NO: 115864 - DNA, 2143 bp, Homo sapiens
  Payload ID: 2608
  Gene Symbol: ARHGEF9
  Gene Name: Cdc42 guanine nucleotide exchange factor (GEF) 9
  Uniprot ID: O43307
  ENST ID: ENST00000623517
  CDS Start-End: 414-1805
acaataaacagcatctaactccagcgcagcgggaggcaggcagaggtagcagctgccttctcctgggcgggcggaggctattcgcccccatcctctccctgcaccccacccccacagttctcaagccttggtgggggacaaaagcagcccattaggacccccccacactcgcacctctccctgccaagacctctaggagcagcagggcggagagacagagcctgccggttggcatggaacaaactgactgaaggcgaggtccggggcggaggggattgggttgtagggctgtggaggaggggcggcggagggggcgctggggctctcgcttgcttcagcccagcccttctagtcagcccgcgacaactcgcgccagctacggggcctcagagaagccggacttcgcaagcaccatgcagtggataaggggcggatcgggaatgctctgggtgaaccaggaggatgaggtggaggaggggcccagcgatgtgcagaacggacacctggaccccaattcagactgcctctgtctggggcggccactacagaaccgggaccagatgcgggccaatgtcatcaatgagataatgagcactgagcgtcactacatcaagcacctcaaggatatttgtgagggctatctgaagcagtgccggaagagaagggacatgttcagtgacgagcaactgaaggtaatctttgggaacattgaagatatctacagatttcagatgggctttgtgagagacctggagaaacagtataacaatgatgacccccacctcagcgagataggaccctgcttcctagagcaccaagatggattctggatatactctgagtattgtaacaaccacctggatgcttgcatggagctctccaaactgatgaaggacagccgctaccagcacttctttgaggcctgtcgcctcttgcagcagatgattgacattgctatcgatggtttccttttgactccagtgcagaagatctgcaagtatcccttacagttggctgagctcctaaagtatactgcccaagaccacagtgactacaggtatgtggcagctgctttggctgtcatgagaaatgtgactcagcagatcaacgaacgcaagcgacgtttagagaatattgacaagattgctcagtggcaggcttctgtcctagactgggagggcgaggacatcctagacaggagctcggagctgatctacactggggagatggcctggatctaccagccctacggccgcaaccagcagcgggtcttcttcctgtttgaccaccagatggtcctctgcaagaaggacctaatccggagagacatcctgtactacaaaggccgcattgacatggataaatatgaggtagttgacattgaggatggcagagatgatgacttcaatgtcagcatgaagaatgcctttaagcttcacaacaaggagactgaggagatacatctgttctttgccaagaagctggaggaaaaaatacgctggctcagggctttcagagaagagaggaaaatggtacaggaagatgaaaaaattggctttgaaatttctgaaaaccagaagaggcaggctgcaatgactgtgagaaaagtccctaagcaaaaaggtgtcaactctgcccgctcagttcctccttcctacccaccaccgcaggacccgttaaaccacggccagtacctggtccccgacggcatcgctcagtcgcaggtctttgagttcaccgaacccaagcgcagccagtcaccattctggcaaaacttcagcaggttaacccccttcaaaaaatgatacctacagggaggcagataattttaaaataaagtaaataaaattatatttatagatggaccttttttcggagaagcactgttgaaatttatacacacacacacacacagagacccttgagtacacatacacacacacacacacagacacacacacacacacacacacacacacacacacagagagataaggaacaaaagtgttttctgttgttttggggaagtgaaatatgtggttggtaggaagaggtaccaatgacttccaaacatgtgattccgtcttaaaagttttccatttttaccctgtcccccttccctttgctttcagaagttgacatt

SEQ ID NO: 115865 - DNA, 584 bp, Homo sapiens
  Payload ID: 2608
  Gene Symbol: ARHGEF9
  Gene Name: Cdc42 guanine nucleotide exchange factor (GEF) 9
  ENST ID: ENST00000623566
  CDS Start-End: 183-584
cggtctggggagagcgagcttgcttgggagccttgaggctctgattggcggtcgcggctagcacgccagcgcaagtcccgcccctgggcagcgaacgtgctactgcggcatctgttattggtcggcggctgatcactggagattccatcgttagtgctgaggcagtatgggatcacgtcaccatggccaaccgggagttggcatttaaagctggcgacgtcatcaaagtcttggatgcttccaacaaggattggtggtggggccagatcgacgatgaggagggatggtttcctgccagctttgtgaggctctgggtgaaccaggaggatgaggtggaggaggggcccagcgatgtgcagaacggacacctggaccccaattcagactgcctctgtctggggcggccactacagaaccgggaccagatgcgggccaatgtcatcaatgagataatgagcactgagcgtcactacatcaagcacctcaaggatatttgtgagggctatctgaagcagtgccggaagagaagggacatgttcagtgacgagcaactgaaggtaatctttgggaacattgaagatatc

SEQ ID NO: 115866 - DNA, 2154 bp, Homo sapiens
  Payload ID: 2608
  Gene Symbol: ARHGEF9
  Gene Name: Cdc42 guanine nucleotide exchange factor (GEF) 9
  Uniprot ID: O43307
  ENST ID: ENST00000624843
  CDS Start-End: 867-2111
gggagcccagcgaagagagcgagcaagcttaggaaaacgagcgaagtaaagggagtaggggagactgagactgaccggtagccaggcaggcggacggacgcacgcccggacagactgagcaggcgccggagaaccactcacaggttccccccgcctttccctttgaaagctaggattttgcctttcccgtggcgcccgagagagaatgctggactctgccgacttcagcgcaagctaagatttctcagctagggacaaacgatcagcccaatcctgagaaggggggaaccaagcaccccgtccccatccccctcccctcccccgactaaactcgggcgccaaacccagcccttctctaaccaccctacttcctcctctcctttctagcatggtggctgtatggacagtctgacagaacagagactgacatctcccaatctgccggccccccacctggaacactacagtgttctgcattgcaccatgaccctggatgtgcaaactgtagtcgtttttgccgtgattgtagtcctcctgcttgtcaatgtcatactcatgtttttcctgggaacgcgctgaatggagtccagccacctgagctgtcgcgaactctcgctttgatttcatcccgagagccaccgagaaaaaaaaaaaatcacagacagagacagggaaagagagagaaagaacaagctttcttactcaggggggaaaacgttttgagcttcaacatggcctcgctgtgatatctctgggtgaaccaggaggatgaggtggaggaggggcccagcgatgtgcagaacggacacctggaccccaattcagactgcctctgtctggggcggccactacagaaccgggaccagatgcgggccaatgtcatcaatgagataatgagcactgagcgtcactacatcaagcacctcaaggatatttgtgagggctatctgaagcagtgccggaagagaagggacatgttcagtgacgagcaactgaaggtaatctttgggaacattgaagatatctacagatttcagatgggctttgtgagagacctggagaaacagtataacaatgatgacccccacctcagcgagataggaccctgcttcctagagcaccaagatggattctggatatactctgagtattgtaacaaccacctggatgcttgcatggagctctccaaactgatgaaggacagccgctaccagcacttctttgaggcctgtcgcctcttgcagcagatgattgacattgctatcgatggtttccttttgactccagtgcagaagatctgcaagtatcccttacagttggctgagctcctaaagtatactgcccaagaccacagtgactacaggtatgtggcagctgctttggctgtcatgagaaatgtgactcagcagatcaacgaacgcaagcgacgtttagagaatattgacaagattgctcagtggcaggcttctgtcctagactgggagggcgaggacatcctagacaggagctcggagctgatctacactggggagatggcctggatctaccagccctacggccgcaaccagcagcgggtcttcttcctgtttgaccaccagatggtcctctgcaagaaggacctaatccggagagacatcctgtactacaaaggccgcattgacatggataaatatgaggtagttgacattgaggatggcagagatgatgacttcaatgtcagcatgaagaatgcctttaagcttcacaacaaggagactgaggagatacatctgttctttgccaagaagctggaggaaaaaatacgctggctcagggctttcagagaagagaggaaaatggtacaggaagatgaaaaaattggctttgaaatttctgaaaaccagaagaggcaggctgcaatgactgtgagaaaagtccctaagcaaaaaggtgtcaactctgcccgctcagttcctccttcctacccaccaccgcaggacccgttaaaccacggccagtacctggtccccgacggcatcgctcagtcgcaggtctttgagttcaccgaacccaagcgcagccagtcaccattctggcaaaacttcagcaggttaacccccttcaaaaaatgatacctacagggaggcagataattttaaaataaagtaaataaaa

SEQ ID NO: 115867 - DNA, 2556 bp, Homo sapiens
  Payload ID: 2608
  Gene Symbol: ARHGEF9
  Gene Name: Cdc42 guanine nucleotide exchange factor (GEF) 9
  ENST ID: ENST00000495564
  CDS Start-End: 588-998
agcctatgggctgagcgggggatggggagagaagagggatagggccagcaaggcagggatcgaacgagtgtctggcagccgggagcccagcgaagagagcgagcaagcttaggaaaacgagcgaagtaaagggagtaggggagactgagactgaccggtagccaggcaggcggacggacgcacgcccggacagactgagcaggcgccggagaaccactcacagcatggtggctgtatggacagtctgacagaacagagactgacatctcccaatctgccggccccccacctggaacactacagtgttctgcattgcaccatgaccctggatgtgcaaactgtagtcgtttttgccgtgattgtagtcctcctgcttgtcaatgtcatactcatgtttttcctgggaacgcgctgaatggagtccagccacctgagctgtcgcgaactctcgctttgatttcatcccgagagccaccgagaaaaaaaaaaaatcacagacagagacagggaaagagagagaaagaacaagctttcttactcaggggggaaaacgttttgagcttcaacatggcctcgctgtgatatgtatgacgttgctgatcactggagattccatcgttagtgctgaggcagtatgggatcacgtcaccatggccaaccgggagttggcatttaaagctggcgacgtcatcaaagtcttggatgcttccaacaaggattggtggtggggccagatcgacgatgaggagggatggtttcctgccagctttgtgaggctctgggtgaaccaggaggatgaggtggaggaggggcccagcgatgtgcagaacggacacctggaccccaattcagactgcctctgtctggggcggccactacagaaccgggaccagatgcgggccaatgtcatcaatgagataatgagcactgagcgtcactacatcaagcacctcaaggatatttgtgagaaagtagggggtgatatgatcctgctttaaggagtttccaatccagccaacccaatcaaaccttttgttgacaatttgctggttccttatttttcaacaattattggtgctgaagaaagggtttcctatctcaaagagaggaagaaggaaataaaagaaaaccaccaatttgaacattctgcttctaacttacctttgatcatcaccagcatgggaagaactaattagcatttagttgacaaataactgagcagcaactatatgccagggctatctgaagcagtgccggaagagaagggacatgttcagtgacgagcaactgaaggtaatctttgggaacattgaagatatctacagatttcagatgggctttgtgagagacctggagaaacagtataacaatgatgacccccacctcagcgagataggaccctgcttcctagagcaccaagatggattctggatatactctgagtattgtaacaaccacctggatgcttgcatggagctctccaaactgatgaaggacagccgctaccagcacttctttgaggcctgtcgcctcttgcagcagatgattgacattgctatcgatggtttccttttgactccagtgcagaagatctgcaagtatcccttacagttggctgagctcctaaagtatactgcccaagaccacagtgactacaggtatgtggcagctgctttggctgtcatgagaaatgtgactcagcagatcaacgaacgcaagcgacgtttagagaatattgacaagattgctcagtggcaggcttctgtcctagactgggaggacctaatccggagagacatcctgtactacaaaggccgcattgacatggataaatatgaggtagttgacattgaggatggcagagatgatgacttcaatgtcagcatgaagaatgcctttaagcttcacaacaaggagactgaggagatacatctgttctttgccaagaagctggaggaaaaaatacgctggctcagggctttcagagaagagaggaaaatggtacaggaagatgaaaaaattggctttgaaatttctgaaaaccagaagaggcaggctgcaatgactgtgagaaaagtccctaagcaaaaaggtgtcaactctgcccgctcagttcctccttcctacccaccaccgcaggacccgttaaaccacggccagtacctggtccccgacggcatcgctcagtcgcaggtctttgagttcaccgaacccaagcgcagccagtcaccattctggcaaaacttcagcaggttaacccccttcaaaaaatgatacctacagggaggcagataattttaaaataaagtaaataaaattatatttatagatggaccttttttcggagaagcactgttgaaatttatacacacacacacacacagagacccttgagtacacatacacacacacacacacagacacacacacacacacacacacacacacacacacagagagataaggaacaaaagtgttttctgttgttttggggaagtgaaatatgtggttggtaggaagaggtaccaatgacttccaaacatgtgattccgtctt

SEQ ID NO: 115868 - DNA, 3045 bp, Homo sapiens
  Payload ID: 2609
  Gene Symbol: CDC42SE1
  Gene Name: CDC42 small effector 1
  Uniprot ID: Q9NRR8
  ENST ID: ENST00000357235
  CDS Start-End: 435-674
aatcgcgtcgccgccgcttccgccctcagccggccccacctctgccggctcgtactcggctcccccacctcgccgcagagctagcccgggaagcccacactggcggccacggagcagagtccctcacccccaccagctgtagctgaacgtctggatggtggagaagagcagggttccgagtctgaggaagacataaccttgtgcctgcctgcccacctctctctctggtcctgttcatctctcaggctctgagacactgaccttcactgctcagttaaaggttccagggattccactttgtctggacccatccagctgagtgaacccagggtggtggtgtatctggggagagtgaggagtgggttgtccaaacaccagggaaagagccctttggggcctcagacagcggagtgaagctggaaccatcagggaacatgagtgaattttggcacaaactgggctgctgtgtggtagagaaaccccagccgaagaagaagagaagacggattgaccggaccatgattggggaaccaatgaattttgttcacctgactcacattggctcaggggagatgggggccggagatggacttgccatgacaggtgcagttcaggagcagatgagatccaagggaaaccgagataggccatggagcaattctaggggcttatagctccaataatggaatggttctgccatcttgaaacccccattctgtttccagcccagaagaaatgctgcccctaccagatccctccttgaaccagtgatctaaggacccctcttttccctatctgcctaacagtgcctcacaaggcttgggggctggactccctctactccctctggccatagcccctcctggagatggggtcaaggcagcaggactgatcaagtgactactggttagccagaggagctcagctgaagccctggaaaccctcaggtctgagataggagttctctaggaacctggaatgagttcctgtctcctgaatgatggtctgggtgccacctgtttttaaactcttaaacctggaactccttaaatggggtaggtgggtgagattatcaaagctgaagctggctttgctgagaagctccctacctccctgcccttctcctccttcctgctggaatgaactaaagcagatgtcaagcaggggctggtgggggtgcctactcccttttccactctatctttagatttcaaaccttaggcttacagcccctcaatatctctctgctaacaccagtgtctctttctagttaggcctctaatcttctgtttctgtttaccagcttcccagcaactttccttttttaaaatattaaaaatttaattcaggttctcttaattatcctcatcctgctgttgcctccgcccttaactctatccctattaggaaccttgtttcccaccgaataagagttaaggtaagaggtagctcttcacctgatgacattccatttaagttttggggcatctttcctgccctctgccaacctccctgctggcccaggtgagaggaggaagaggggtctggaaagaaacccagaatgcggcagaactaggagtaagtccatctcaaggtggacttctgatcattgaggatggtgagataaataggttgaaaacaatcatctgtgagtttaggagtcttaagatcctcacagcacgggagcagggagaggctctagaacaaggtttcacaaccgagatgcctttgacattttgggctgaagtgttctttgtaaggaaaacctgtttcctattttgtgcattacaggatatttagcagcaaccctggcccactctagttatgacaaccaaaaatgtctctatacattgccagatttctcctagggggcaaaatcgcctccatttgagaaccacaactctaaagtcaagatatttttctctgaagtgatttctgcttggcacgctaccctcatcatcttactcatcttaagcccgagccatggatcaactaggagcccatataaatgaggctcagtagggctgcacataatctccaaacaattctttattcagtgttttgcttgtgtttgcatgttgctatgatggacaggtccccctcctccattcttgccctctggagaagtggttcctgcagtgtagagatatgaacagggtatggtaggattggggaaaggggagagagaagcagtagatacactccttatcctccccaaattttaagctctatttctgtgccctagtcctagacacacattagactcagggagttttgtctgaagaccaggtcccactgccccctggctgaagagtctgctttaaatgggaaaacaacgtaggagcaggggtttttaggcactttcagtattctcaggtgttcttcgttctggcccttccagggtaattaggaaggcagaacaagacagatgagctcctgcctgctctgagacaagaagggtggggtctcattagctttgcaacaggaaacatcctgttttatggtagtggggtcaggaatgtaggaactggtatccattctgccaattccaccacccattcagtttgcttatccctacagaacagtgactgaggttctttttttttttttttttttttttttttcaaatttccatgtattttctgccatttttcagggtctaagattggtcatacattcccaatttactctcagttccagtcaagctggttgctctgaaagtaacccagcttgttgctctaaaatacctcagtagcctgagtgttatactagagatctaaagggttaacaggatagggtggaaaggttagagactcctagaaatctctggtcaccgtgatcttcggcctcattctaatacctgttctttggacagtctttttcctttggtgctctcttgcctttagctaccttctctaatatgtatgctaccatcactaataaagtgatgggaatgggtttgagagtcgtaatttatattaaaaagttgttggacttttaaatacattttttcaaataaaaaattaagcaaaatagttgcacagt

SEQ ID NO: 115869 - DNA, 3181 bp, Homo sapiens
  Payload ID: 2609
  Gene Symbol: CDC42SE1
  Gene Name: CDC42 small effector 1
  Uniprot ID: Q9NRR8
  ENST ID: ENST00000540998
  CDS Start-End: 571-810
aatcgcgtcgccgccgcttccgccctcagccggccccacctctgccggctcgtactcggctcccccacctcgccgcagagctagcccgggaagcccacactggcggccacggagcagagtccctcacccccaccagctgtagctgaacgtctggatggtggagaagagcagatgatctgtactggacacacgtggagatatggccatgccacgcatgtgcaaacagaggtgtacacacaggagtgcagtgatacaggacacagataaacagaatgtacacagccttcaggaaggatctcaaggtcagggttccgagtctgaggaagacataaccttgtgcctgcctgcccacctctctctctggtcctgttcatctctcaggctctgagacactgaccttcactgctcagttaaaggttccagggattccactttgtctggacccatccagctgagtgaacccagggtggtggtgtatctggggagagtgaggagtgggttgtccaaacaccagggaaagagccctttggggcctcagacagcggagtgaagctggaaccatcagggaacatgagtgaattttggcacaaactgggctgctgtgtggtagagaaaccccagccgaagaagaagagaagacggattgaccggaccatgattggggaaccaatgaattttgttcacctgactcacattggctcaggggagatgggggccggagatggacttgccatgacaggtgcagttcaggagcagatgagatccaagggaaaccgagataggccatggagcaattctaggggcttatagctccaataatggaatggttctgccatcttgaaacccccattctgtttccagcccagaagaaatgctgcccctaccagatccctccttgaaccagtgatctaaggacccctcttttccctatctgcctaacagtgcctcacaaggcttgggggctggactccctctactccctctggccatagcccctcctggagatggggtcaaggcagcaggactgatcaagtgactactggttagccagaggagctcagctgaagccctggaaaccctcaggtctgagataggagttctctaggaacctggaatgagttcctgtctcctgaatgatggtctgggtgccacctgtttttaaactcttaaacctggaactccttaaatggggtaggtgggtgagattatcaaagctgaagctggctttgctgagaagctccctacctccctgcccttctcctccttcctgctggaatgaactaaagcagatgtcaagcaggggctggtgggggtgcctactcccttttccactctatctttagatttcaaaccttaggcttacagcccctcaatatctctctgctaacaccagtgtctctttctagttaggcctctaatcttctgtttctgtttaccagcttcccagcaactttccttttttaaaatattaaaaatttaattcaggttctcttaattatcctcatcctgctgttgcctccgcccttaactctatccctattaggaaccttgtttcccaccgaataagagttaaggtaagaggtagctcttcacctgatgacattccatttaagttttggggcatctttcctgccctctgccaacctccctgctggcccaggtgagaggaggaagaggggtctggaaagaaacccagaatgcggcagaactaggagtaagtccatctcaaggtggacttctgatcattgaggatggtgagataaataggttgaaaacaatcatctgtgagtttaggagtcttaagatcctcacagcacgggagcagggagaggctctagaacaaggtttcacaaccgagatgcctttgacattttgggctgaagtgttctttgtaaggaaaacctgtttcctattttgtgcattacaggatatttagcagcaaccctggcccactctagttatgacaaccaaaaatgtctctatacattgccagatttctcctagggggcaaaatcgcctccatttgagaaccacaactctaaagtcaagatatttttctctgaagtgatttctgcttggcacgctaccctcatcatcttactcatcttaagcccgagccatggatcaactaggagcccatataaatgaggctcagtagggctgcacataatctccaaacaattctttattcagtgttttgcttgtgtttgcatgttgctatgatggacaggtccccctcctccattcttgccctctggagaagtggttcctgcagtgtagagatatgaacagggtatggtaggattggggaaaggggagagagaagcagtagatacactccttatcctccccaaattttaagctctatttctgtgccctagtcctagacacacattagactcagggagttttgtctgaagaccaggtcccactgccccctggctgaagagtctgctttaaatgggaaaacaacgtaggagcaggggtttttaggcactttcagtattctcaggtgttcttcgttctggcccttccagggtaattaggaaggcagaacaagacagatgagctcctgcctgctctgagacaagaagggtggggtctcattagctttgcaacaggaaacatcctgttttatggtagtggggtcaggaatgtaggaactggtatccattctgccaattccaccacccattcagtttgcttatccctacagaacagtgactgaggttctttttttttttttttttttttttttttcaaatttccatgtattttctgccatttttcagggtctaagattggtcatacattcccaatttactctcagttccagtcaagctggttgctctgaaagtaacccagcttgttgctctaaaatacctcagtagcctgagtgttatactagagatctaaagggttaacaggatagggtggaaaggttagagactcctagaaatctctggtcaccgtgatcttcggcctcattctaatacctgttctttggacagtctttttcctttggtgctctcttgcctttagctaccttctctaatatgtatgctaccatcactaataaagtgatgggaatgggtttgagagtcgtaatttatattaaaaagttgttggacttttaaatacattttttcaaataaaaaattaagcaaaatagttgcacagt

SEQ ID NO: 115870 - DNA, 3498 bp, Homo sapiens
  Payload ID: 2609
  Gene Symbol: CDC42SE1
  Gene Name: CDC42 small effector 1
  Uniprot ID: Q9NRR8
  ENST ID: ENST00000439374
  CDS Start-End: 886-1125
cctggctttgtgcattgggttctggtgcctgatggacacatttttccagttacaggccgaatggtctcaatgtagctgaagaactgtgcccactgatcagtattacgtattgcaaatgcaggaggtggctgtatctgacagacccaggccttccagctccgacagatccagttctgggatgggcatcctccagaaaagaaaggaactgtactggctactcacagggtccctcatagcttcctagaaagaaaccacttgtcagtcttcatgctacagcaacttctttgtggcccatggcctttccttgcttagatactccacatactgttctccccgcaggggcggcggccttgaggggctgcagaggcaccctcccacgtcccgcgcagtgcagtgcctccgcagtccagaggggagcagtgcgccgggctccgagccggacgggtttcgtaatcgcgtcgccgccgcttccgccctcagccggccccacctctgccggctcgtactcggctcccccacctcgccgcagagctagcccgggaagcccacactggcggccacggagcagagtccctcacccccaccagctgtagctgaacgtctggatggtggagaagagcagggttccgagtctgaggaagacataaccttgtgcctgcctgcccacctctctctctggtcctgttcatctctcaggctctgagacactgaccttcactgctcagttaaaggttccagggattccactttgtctggacccatccagctgagtgaacccagggtggtggtgtatctggggagagtgaggagtgggttgtccaaacaccagggaaagagccctttggggcctcagacagcggagtgaagctggaaccatcagggaacatgagtgaattttggcacaaactgggctgctgtgtggtagagaaaccccagccgaagaagaagagaagacggattgaccggaccatgattggggaaccaatgaattttgttcacctgactcacattggctcaggggagatgggggccggagatggacttgccatgacaggtgcagttcaggagcagatgagatccaagggaaaccgagataggccatggagcaattctaggggcttatagctccaataatggaatggttctgccatcttgaaacccccattctgtttccagcccagaagaaatgctgcccctaccagatccctccttgaaccagtgatctaaggacccctcttttccctatctgcctaacagtgcctcacaaggcttgggggctggactccctctactccctctggccatagcccctcctggagatggggtcaaggcagcaggactgatcaagtgactactggttagccagaggagctcagctgaagccctggaaaccctcaggtctgagataggagttctctaggaacctggaatgagttcctgtctcctgaatgatggtctgggtgccacctgtttttaaactcttaaacctggaactccttaaatggggtaggtgggtgagattatcaaagctgaagctggctttgctgagaagctccctacctccctgcccttctcctccttcctgctggaatgaactaaagcagatgtcaagcaggggctggtgggggtgcctactcccttttccactctatctttagatttcaaaccttaggcttacagcccctcaatatctctctgctaacaccagtgtctctttctagttaggcctctaatcttctgtttctgtttaccagcttcccagcaactttccttttttaaaatattaaaaatttaattcaggttctcttaattatcctcatcctgctgttgcctccgcccttaactctatccctattaggaaccttgtttcccaccgaataagagttaaggtaagaggtagctcttcacctgatgacattccatttaagttttggggcatctttcctgccctctgccaacctccctgctggcccaggtgagaggaggaagaggggtctggaaagaaacccagaatgcggcagaactaggagtaagtccatctcaaggtggacttctgatcattgaggatggtgagataaataggttgaaaacaatcatctgtgagtttaggagtcttaagatcctcacagcacgggagcagggagaggctctagaacaaggtttcacaaccgagatgcctttgacattttgggctgaagtgttctttgtaaggaaaacctgtttcctattttgtgcattacaggatatttagcagcaaccctggcccactctagttatgacaaccaaaaatgtctctatacattgccagatttctcctagggggcaaaatcgcctccatttgagaaccacaactctaaagtcaagatatttttctctgaagtgatttctgcttggcacgctaccctcatcatcttactcatcttaagcccgagccatggatcaactaggagcccatataaatgaggctcagtagggctgcacataatctccaaacaattctttattcagtgttttgcttgtgtttgcatgttgctatgatggacaggtccccctcctccattcttgccctctggagaagtggttcctgcagtgtagagatatgaacagggtatggtaggattggggaaaggggagagagaagcagtagatacactccttatcctccccaaattttaagctctatttctgtgccctagtcctagacacacattagactcagggagttttgtctgaagaccaggtcccactgccccctggctgaagagtctgctttaaatgggaaaacaacgtaggagcaggggtttttaggcactttcagtattctcaggtgttcttcgttctggcccttccagggtaattaggaaggcagaacaagacagatgagctcctgcctgctctgagacaagaagggtggggtctcattagctttgcaacaggaaacatcctgttttatggtagtggggtcaggaatgtaggaactggtatccattctgccaattccaccacccattcagtttgcttatccctacagaacagtgactgaggttctttttttttttttttttttttttttttcaaatttccatgtattttctgccatttttcagggtctaagattggtcatacattcccaatttactctcagttccagtcaagctggttgctctgaaagtaacccagcttgttgctctaaaatacctcagtagcctgagtgttatactagagatctaaagggttaacaggatagggtggaaaggttagagactcctagaaatctctggtcaccgtgatcttcggcctcattctaatacctgttctttggacagtctttttcctttggtgctctcttgcctttagctaccttctctaatatgtatgctaccatcactaataaagtgatgggaatgggtttgagagtcgtaatttatattaaaaagttgttggacttttaaatacattttttcaaataaaaaattaagcaaaatagttgcacagtaa

SEQ ID NO: 115871 - DNA, 3591 bp, Homo sapiens
  Payload ID: 2610
  Gene Symbol: CDC42SE2
  Gene Name: CDC42 small effector 2
  Uniprot ID: Q9NRR3
  ENST ID: ENST00000360515
  CDS Start-End: 547-801
gagcgcagctgcaggcgttggggcggcaggagccgcggagccggcgctgagaggggctgcggccggagcgggcggctgagacaaaggcgacgatagggccagatttgagtgtgtgaatttttgagtgaaacctggaacccaaatgagaagaaatctgcaaggaataactactgacagtgaatctgcggtcatctgtatgcataatatggaatgttcttaacccagaagtagctgaatgtgttactccattgctgaggagtgactatctgttatagtccctgggtcaagacaacaatttttataccttcgtcgtggttcagaaaggagtctctgtagaaccagaagcaaagaaaggaaacaatccaaatttttctttattaaatcgactgtgtaagatacttgacttccaggaacaaaaacacggtgaaataataaaatttcatcttggcatcactggacatcatcgtattgaggagcgtatttttggaacttcccgagttgagatttggaaccttcattggtgctcatttactgtggactgtaagcatgagtgaattctggttgtgtttcaactgctgtattgcagaacagcctcagcctaaaaggcgacggcggattgacagaagtatgattggagagcccacaaactttgtgcatacagctcatgttggatcaggagacctgttcagtggaatgaattcagttagctccattcagaaccaaatgcagtccaagggaggttatggaggtggaatgcctgccaatgtccagatgcagctcgtggatacgaaggcgggatagccctggtcctttctccaaagtgtgatggcaccttgtccaccctgtcgtgattattccagtgagatgttactgttctgctctgaagaagatactgtcagacgaatcctgcatttccttcagctggcatgcatgcctttggactcatggacagagttctttggattgtcactgaattttcaatgtttaatcagtatggatctgatcttcgcatgatcttttttgtgaatgctaacaccattttgcagttttttttttctattttaaacatttttcttttcactgccgaccccctgccttacgattttattggaaagcaaggacctgctattatttgttaatttgccatcatttatgtatattttggaaggtatgagacccacaagcacaatgatcatttttatttgtttgtttgtttgaaacttcagcagaatagatatctgcatgctttatgaagttgttgcttcggtaagagcccatgggatgccagaaattaacatttctttgctgccatgggctgatgatgctgctattagataaagtttagctgtggcaccaagtcacatcattttcatagaaaaagattacttgtagcttattttagaagtatgaccttttggtctgtttgattgattgattagaattgcaataaaagaaaagcttgcattcataaggcattcattctgttgtaaatgttcaatatatttattttgagagcaaggacctgtggttgtaaacaggtgtggttacaggtgtggttatgtatctgagtgttgcggtcatactctcctccagtccaatcctgagcatcttcatcttattaattagctgttcgtttctttgtgcactcattcttttatttttacttctttttaatgttatggtatccagttgtttccagtagcagtttcttgaacttctggcctgtactactaactgcagacctccagagtcactggcctttctgtgctctacatattattttaggggccacatcagttgccaagagcaacatacataccgacctggctgaattattgccagtgaaaacaacctgtacgaagcctttgctcaggttctaaaatatgtttgtccttgcacgaattttgtatatttcaaatatttctgtaaaggtttcttcttttctgttagagtgtggtgttaagccagagtcagtggtttgtgttctcattaaaatgtttgtttaaatcctatgtccaattcaagcctatctaactacatttggtaggattaacatttcatataacaaatggggcttaattaaaaactttaacttggaataaaggaacagggatcactttatcttctgccttcatttaccttagtccaagattcttgcaaaacaggcaactgaacaaacattaggtttatgtaggtaaaatgtgaaagcatttctcctccactttttaaaatttaatttacccagtacagcggggcaccagattacttgatctttgtattttgcagttttgagcctttgtgtcaatcccaagcacagagaggatctgccaaggaaaaacatttgcatcttcggagtagacattttgcagtttgtttaataacaacttctaaagtaagttgaattcatccattgtcactgattcaccaagtggatgttgcattgtggaatttgcctgagtactgttgtcattctgctcagccaggcacggtcagtttcttggccagggacattgctatgtgctgtgtgcaagctctttagaagagagattggattttcttggcattatcagcactcatgctatttagtctacttctattttgactgactctttaaattagtacaatttttctacttgtcatataactcctggaacaatagtacgggaagccgtgatccttttccctgactcatgattttagtctttttccaaatcgctgttttttttttttttttttttttttttgctgctccaacgaccagcatgtgttggagcagatctccatggtaagccaaaagtggacttgtcagcctataactactctgcagctgccactaactctacaggcacagtaactacactttatacaggagcacatgccaaagtgcctgggaggtgccaataaaatcaagaaataagaaaactacaaaaaaagatacggtattaaccttggacataattttttttagggaggcagctttcccacttttataaagggggttgtaaatctcaagaggtcatttgttccccatagcagcatatctcatttttaaattgaagcgaattaaataggattttactactcaacattcattatactgttaatctttgctgaaatatatgctaacaaatgttaagcaagggaaactgaagacttagtcatgtggattgttagcagtgatctgcattctgtaaaagaggtactttcccatgatgtaggcatgaagtggtgccagtaagcgtagagcggaaatgttgactttagttaacattgggtttagcatttccagtgcagcattatcagtgggcctttaaaaatacttcgtaagtacattagctttcactttgttgttaaattatagcagactcattatagagaacaagtttgccttgattttgtttaaaatgacttctgctaagcacccagaagataaaattgacatatttttataatataagcatactttttttgtacattgtgttcattcttgaataaaatgagttctgtgttggcttgtagatactaaaaagaaagtattgattttgattcaataaatgttttctttcaatcctggttggcctttcctttaaa

SEQ ID NO: 115872 - DNA, 3485 bp, Homo sapiens
  Payload ID: 2610
  Gene Symbol: CDC42SE2
  Gene Name: CDC42 small effector 2
  Uniprot ID: Q9NRR3
  ENST ID: ENST00000395246
  CDS Start-End: 444-698
gctccgcccaacccgcgcgcgagcctgggcggggagggggagccaggaagctgcgagcgcgctggggagcgcagctgcaggcgttggggcggcaggagccgcggagccggcgctgagaggggctgcggccggagcgggcggctgagacaaaggcgacgactatctgttatagtccctgggtcaagacaacaatttttataccttcgtcgtggttcagaaaggagtctctgtagaaccagaagcaaagaaaggaaacaatccaaatttttctttattaaatcgactgtgtaagatacttgacttccaggaacaaaaacacggtgaaataataaaatttcatcttggcatcactggacatcatcgtattgaggagcgtatttttggaacttcccgagttgagatttggaaccttcattggtgctcatttactgtggactgtaagcatgagtgaattctggttgtgtttcaactgctgtattgcagaacagcctcagcctaaaaggcgacggcggattgacagaagtatgattggagagcccacaaactttgtgcatacagctcatgttggatcaggagacctgttcagtggaatgaattcagttagctccattcagaaccaaatgcagtccaagggaggttatggaggtggaatgcctgccaatgtccagatgcagctcgtggatacgaaggcgggatagccctggtcctttctccaaagtgtgatggcaccttgtccaccctgtcgtgattattccagtgagatgttactgttctgctctgaagaagatactgtcagacgaatcctgcatttccttcagctggcatgcatgcctttggactcatggacagagttctttggattgtcactgaattttcaatgtttaatcagtatggatctgatcttcgcatgatcttttttgtgaatgctaacaccattttgcagttttttttttctattttaaacatttttcttttcactgccgaccccctgccttacgattttattggaaagcaaggacctgctattatttgttaatttgccatcatttatgtatattttggaaggtatgagacccacaagcacaatgatcatttttatttgtttgtttgtttgaaacttcagcagaatagatatctgcatgctttatgaagttgttgcttcggtaagagcccatgggatgccagaaattaacatttctttgctgccatgggctgatgatgctgctattagataaagtttagctgtggcaccaagtcacatcattttcatagaaaaagattacttgtagcttattttagaagtatgaccttttggtctgtttgattgattgattagaattgcaataaaagaaaagcttgcattcataaggcattcattctgttgtaaatgttcaatatatttattttgagagcaaggacctgtggttgtaaacaggtgtggttacaggtgtggttatgtatctgagtgttgcggtcatactctcctccagtccaatcctgagcatcttcatcttattaattagctgttcgtttctttgtgcactcattcttttatttttacttctttttaatgttatggtatccagttgtttccagtagcagtttcttgaacttctggcctgtactactaactgcagacctccagagtcactggcctttctgtgctctacatattattttaggggccacatcagttgccaagagcaacatacataccgacctggctgaattattgccagtgaaaacaacctgtacgaagcctttgctcaggttctaaaatatgtttgtccttgcacgaattttgtatatttcaaatatttctgtaaaggtttcttcttttctgttagagtgtggtgttaagccagagtcagtggtttgtgttctcattaaaatgtttgtttaaatcctatgtccaattcaagcctatctaactacatttggtaggattaacatttcatataacaaatggggcttaattaaaaactttaacttggaataaaggaacagggatcactttatcttctgccttcatttaccttagtccaagattcttgcaaaacaggcaactgaacaaacattaggtttatgtaggtaaaatgtgaaagcatttctcctccactttttaaaatttaatttacccagtacagcggggcaccagattacttgatctttgtattttgcagttttgagcctttgtgtcaatcccaagcacagagaggatctgccaaggaaaaacatttgcatcttcggagtagacattttgcagtttgtttaataacaacttctaaagtaagttgaattcatccattgtcactgattcaccaagtggatgttgcattgtggaatttgcctgagtactgttgtcattctgctcagccaggcacggtcagtttcttggccagggacattgctatgtgctgtgtgcaagctctttagaagagagattggattttcttggcattatcagcactcatgctatttagtctacttctattttgactgactctttaaattagtacaatttttctacttgtcatataactcctggaacaatagtacgggaagccgtgatccttttccctgactcatgattttagtctttttccaaatcgctgttttttttttttttttttttttttttgctgctccaacgaccagcatgtgttggagcagatctccatggtaagccaaaagtggacttgtcagcctataactactctgcagctgccactaactctacaggcacagtaactacactttatacaggagcacatgccaaagtgcctgggaggtgccaataaaatcaagaaataagaaaactacaaaaaaagatacggtattaaccttggacataattttttttagggaggcagctttcccacttttataaagggggttgtaaatctcaagaggtcatttgttccccatagcagcatatctcatttttaaattgaagcgaattaaataggattttactactcaacattcattatactgttaatctttgctgaaatatatgctaacaaatgttaagcaagggaaactgaagacttagtcatgtggattgttagcagtgatctgcattctgtaaaagaggtactttcccatgatgtaggcatgaagtggtgccagtaagcgtagagcggaaatgttgactttagttaacattgggtttagcatttccagtgcagcattatcagtgggcctttaaaaatacttcgtaagtacattagctttcactttgttgttaaattatagcagactcattatagagaacaagtttgccttgattttgtttaaaatgacttctgctaagcacccagaagataaaattgacatatttttataatataagcatactttttttgtacattgtgttcattcttgaataaaatgagttctgtgttggcttgtagatactaaaaagaaagtattgattttgattcaataaatgttttctttcaatcctggttggcctttccttt

SEQ ID NO: 115873 - DNA, 277 bp, Homo sapiens
  Payload ID: 2610
  Gene Symbol: CDC42SE2
  Gene Name: CDC42 small effector 2
  ENST ID: ENST00000502582
  CDS Start-End: 1-165
catgttggatcaggagacctgttcagtggaatgaattcaccctcaaggacgttttgttctgaagactctcatattcagctctgggaaataattatttctctgattatcccttcaacttttgaagattaccagatttctcaacagcaatactgtggtctggaataaaagggggcacttccctcagactttggagaagacattattttgaactagaattctgtctacagccatactctcaatgaagtaagatggcagaataaagatgattacactagca

SEQ ID NO: 115874 - DNA, 2025 bp, Homo sapiens
  Payload ID: 2610
  Gene Symbol: CDC42SE2
  Gene Name: CDC42 small effector 2
  ENST ID: ENST00000503291
  CDS Start-End: 646-819
cgctggggagcgcagctgcaggcgttggggcggcaggagccgcggagccggcgctgagaggggctgcggccggagcgggcggctgagacaaaggcgacgatagggccagatttgagtgtgtgaatttttgagtgaaacctggaacccaaatgagaagaaatctgcaaggaataactactgacagtgaatctgcggtcatctgtatgcataatatggaatgttcttaacccagaagtagctgaatgtgttactccattgctgaggagtgactatctgttatagtccctgggtcaagacaacaatttttataccttcgtcgtggttcagaaaggagtctctgtagaaccagaagcaaagaaaggaaacaatccaaatttttctttattaaatcgactgtgtaagatacttgacttccaggaacaaaaacacggtgaaataataaaatttcatcttggcatcactggacatcatcgtattgaggagcgtatttttggaacttcccgagttgagatttggaaccttcattggtgctcatttactgtggactgtaagcatgagtgaattctggttgtgtttcaactgctgtattgcagaacagcctcagcctgtaagtatgaaaaaaggcgacggcggattgacagaagtatgattggagagcccacaaactttgtgcatacagctcatgttggatcaggagacctgttcagtggaatgaattcagttagctccattcagaaccaaatgcagtccaagggaggttatggaggtggaatgcctgccaatgtccagatgcagctcgtggatacgaaggcgggatagccctggtcctttctccaaagtgtgatggcaccttgtccaccctgtcgtgattattccagtgagatgttactgttctgctctgaagaagatactgtcagacgaatcctgcatttccttcagctggcatgcatgcctttggactcatggacagagttctttggattgtcactgaattttcaatgtttaatcagtatggatctgatcttcgcatgatcttttttgtgaatgctaacaccattttgcagttttttttttctattttaaacatttttcttttcactgccgaccccctgccttacgattttattggaaagcaaggacctgctattatttgttaatttgccatcatttatgtatattttggaaggtatgagacccacaagcacaatgatcatttttatttgtttgtttgtttgaaacttcagcagaatagatatctgcatgctttatgaagttgttgcttcggtaagagcccatgggatgccagaaattaacatttctttgctgccatgggctgatgatgctgctattagataaagtttagctgtggcaccaagtcacatcattttcatagaaaaagattacttgtagcttattttagaagtatgaccttttggtctgtttgattgattgattagaattgcaataaaagaaaagcttgcattcataaggcattcattctgttgtaaatgttcaatatatttattttgagagcaaggacctgtggttgtaaacaggtgtggttacaggtgtggttatgtatctgagtgttgcggtcatactctcctccagtccaatcctgagcatcttcatcttattaattagctgttcgtttctttgtgcactcattcttttatttttacttctttttaatgttatggtatccagttgtttccagtagcagtttcttgaacttctggcctgtactactaactgcagacctccagagtcactggcctttctgtgctctacatattattttaggggccacatcagttgccaagagcaacatacataccgacctggctgaattattgccagtgaaaacaacctgtacgaagcctttgctcaggttctaaaatatgtttgtccttgcacgaattttgtatatttcaaatatttctgtaaaggtttcttcttttctgttagagtgtggtgttaagccagagtcagtggtttgtgttctcattaaaatgtttgtttaaa

SEQ ID NO: 115875 - DNA, 4352 bp, Homo sapiens
  Payload ID: 2610
  Gene Symbol: CDC42SE2
  Gene Name: CDC42 small effector 2
  Uniprot ID: Q9NRR3
  ENST ID: ENST00000505065
  CDS Start-End: 522-776
gcaggagccgcggagccggcgctgagaggggctgcggccggagcgggcggctgagacaaaggcgacgatagggccagatttgagtgtgtgaatttttgagtgaaacctggaacccaaatgagaagaaatctgcaaggaataactactgacagtgaatctgcggtcatctgtatgcataatatggaatgttcttaacccagaagtagctgaatgtgttactccattgctgaggagtgactatctgttatagtccctgggtcaagacaacaatttttataccttcgtcgtggttcagaaaggagtctctgtagaaccagaagcaaagaaaggaaacaatccaaatttttctttattaaatcgactgtgtaagatacttgacttccaggaacaaaaacacggtgaaataataaaatttcatcttggcatcactggacatcatcgtattgaggagcgtatttttggaacttcccgagttgagatttggaaccttcattggtgctcatttactgtggactgtaagcatgagtgaattctggttgtgtttcaactgctgtattgcagaacagcctcagcctaaaaggcgacggcggattgacagaagtatgattggagagcccacaaactttgtgcatacagctcatgttggatcaggagacctgttcagtggaatgaattcagttagctccattcagaaccaaatgcagtccaagggaggttatggaggtggaatgcctgccaatgtccagatgcagctcgtggatacgaaggcgggatagccctggtcctttctccagtgagtactcagagctggggtctggacctgacggccagacatggccaggccaataatagtaaatatatgtatatatatataattttttaatggtgaacttattgggaaaggcaaaattactcagctaagtgtagtttctgcacttggaatgtaagttttaggttcttttccttattaagaactttaaatactttaaaacatctggttggggaggattctgatgacaagatgcttcttatgtgtcctttaaacaagagtgaaatcattattttgagtattgaggccgagcatggtggctcacacctgtaatcccagcactttgggaggcctaggtgggctgatcacctgaggccaggaattggagactagcctggccaacatggtgaaaccccatctctactaaaaatacaaaaattagctgggcatggtggcgcatgcctgtaatcgcagctactcaggaggctgaggcacgagaattgcttgaacctgggaggcaggggttgcagtcagctgagaatgcgccactgcgctccagcctgggtgacagagcaagaccctgtctcaaaaaagtactgatactaaagataatctcttgggtagtaattttacagttaagacttcattgtttataaacttttcaaattaattaaaaagactactttgaaaaaggataaaccctgaaaatgtagaaataatttcaagtttttttttgttttatagggttattgtgaatttctatattttctctgtccactattctgtaatttttttttgtcctgtgattgcttttattttgaattacaaaaaagaagtgtgatggcaccttgtccaccctgtcgtgattattccagtgagatgttactgttctgctctgaagaagatactgtcagacgaatcctgcatttccttcagctggcatgcatgcctttggactcatggacagagttctttggattgtcactgaattttcaatgtttaatcagtatggatctgatcttcgcatgatcttttttgtgaatgctaacaccattttgcagttttttttttctattttaaacatttttcttttcactgccgaccccctgccttacgattttattggaaagcaaggacctgctattatttgttaatttgccatcatttatgtatattttggaaggtatgagacccacaagcacaatgatcatttttatttgtttgtttgtttgaaacttcagcagaatagatatctgcatgctttatgaagttgttgcttcggtaagagcccatgggatgccagaaattaacatttctttgctgccatgggctgatgatgctgctattagataaagtttagctgtggcaccaagtcacatcattttcatagaaaaagattacttgtagcttattttagaagtatgaccttttggtctgtttgattgattgattagaattgcaataaaagaaaagcttgcattcataaggcattcattctgttgtaaatgttcaatatatttattttgagagcaaggacctgtggttgtaaacaggtgtggttacaggtgtggttatgtatctgagtgttgcggtcatactctcctccagtccaatcctgagcatcttcatcttattaattagctgttcgtttctttgtgcactcattcttttatttttacttctttttaatgttatggtatccagttgtttccagtagcagtttcttgaacttctggcctgtactactaactgcagacctccagagtcactggcctttctgtgctctacatattattttaggggccacatcagttgccaagagcaacatacataccgacctggctgaattattgccagtgaaaacaacctgtacgaagcctttgctcaggttctaaaatatgtttgtccttgcacgaattttgtatatttcaaatatttctgtaaaggtttcttcttttctgttagagtgtggtgttaagccagagtcagtggtttgtgttctcattaaaatgtttgtttaaatcctatgtccaattcaagcctatctaactacatttggtaggattaacatttcatataacaaatggggcttaattaaaaactttaacttggaataaaggaacagggatcactttatcttctgccttcatttaccttagtccaagattcttgcaaaacaggcaactgaacaaacattaggtttatgtaggtaaaatgtgaaagcatttctcctccactttttaaaatttaatttacccagtacagcggggcaccagattacttgatctttgtattttgcagttttgagcctttgtgtcaatcccaagcacagagaggatctgccaaggaaaaacatttgcatcttcggagtagacattttgcagtttgtttaataacaacttctaaagtaagttgaattcatccattgtcactgattcaccaagtggatgttgcattgtggaatttgcctgagtactgttgtcattctgctcagccaggcacggtcagtttcttggccagggacattgctatgtgctgtgtgcaagctctttagaagagagattggattttcttggcattatcagcactcatgctatttagtctacttctattttgactgactctttaaattagtacaatttttctacttgtcatataactcctggaacaatagtacgggaagccgtgatccttttccctgactcatgattttagtctttttccaaatcgctgttttttttttttttttttttttttttgctgctccaacgaccagcatgtgttggagcagatctccatggtaagccaaaagtggacttgtcagcctataactactctgcagctgccactaactctacaggcacagtaactacactttatacaggagcacatgccaaagtgcctgggaggtgccaataaaatcaagaaataagaaaactacaaaaaaagatacggtattaaccttggacataattttttttagggaggcagctttcccacttttataaagggggttgtaaatctcaagaggtcatttgttccccatagcagcatatctcatttttaaattgaagcgaattaaataggattttactactcaacattcattatactgttaatctttgctgaaatatatgctaacaaatgttaagcaagggaaactgaagacttagtcatgtggattgttagcagtgatctgcattctgtaaaagaggtactttcccatgatgtaggcatgaagtggtgccagtaagcgtagagcggaaatgttgactttagttaacattgggtttagcatttccagtgcagcattatcagtgggcctttaaaaatacttcgtaagtacattagctttcactttgttgttaaattatagcagactcattatagagaacaagtttgccttgattttgtttaaaatgacttctgctaagcacccagaagataaaattgacatatttttataatataagcatactttttttgtacattgtgttcattcttgaataaaatgagttctgtgttggcttgtagatactaaaaagaaagtattgattttgattcaataaatgttttctttcaa

SEQ ID NO: 115876 - DNA, 1888 bp, Homo sapiens
  Payload ID: 2611
  Gene Symbol: CLK1
  Gene Name: CDC-like kinase 1
  Uniprot ID: P49759
  ENST ID: ENST00000321356
  CDS Start-End: 137-1591
gtgttttcgagacgagtctcgacgcagcagctgtcagctccattttgttgttggtgcgcgacgcagtcagctgcgtgattcccgtgattgcgttacaagctttgtctccttcgacttggagtctttgtccaggacgatgagacactcaaagagaacttactgtcctgattgggatgacaaggattgggattatggaaaatggaggagcagcagcagtcataaaagaaggaagagatcacatagcagtgcccaggagaacaagcgctgcaaatacaatcactctaaaatgtgtgatagccattatttggaaagcaggtctataaatgagaaagattatcatagtcgacgctacattgatgagtacagaaatgactacactcaaggatgtgaacctggacatcgccaaagagaccatgaaagccggtatcagaaccatagtagcaagtcttctggtagaagtggaagaagtagttataaaagcaaacacaggattcaccacagtacttcacatcgtcgttcacatgggaagagtcaccgaaggaaaagaaccaggagtgtagaggatgatgaggagggtcacctgatctgtcagagtggagacgtactaagtgcaagatatgaaattgttgatactttaggtgaaggagcttttggaaaagttgtggagtgcatcgatcataaagcgggaggtagacatgtagcagtaaaaatagttaaaaatgtggatagatactgtgaagctgctcgctcagaaatacaagttctggaacatctgaatacaacagaccccaacagtactttccgctgtgtccagatgttggaatggtttgagcatcatggtcacatttgcattgtttttgaactattgggacttagtacttacgacttcattaaagaaaatggttttctaccatttcgactggatcatatcagaaagatggcatatcagatatgcaagtctgtgaattttttgcacagtaataagttgactcacacagacttaaagcctgaaaacatcttatttgtgcagtctgactacacagaggcgtataatcccaaaataaaacgtgatgaacgcaccttaataaatccagatattaaagttgtagactttggtagtgcaacatatgatgacgaacatcacagtacattggtatctacaagacattatagagcacctgaagttattttagccctagggtggtcccaaccatgtgatgtctggagcataggatgcattcttattgaatactatcttgggtttaccgtatttccaacacacgatagtaaggagcatttagcaatgatggaaaggattcttggacctctaccaaaacatatgatacagaaaaccaggaaacgtaaatattttcaccacgatcgattagactgggatgaacacagttctgccggcagatatgtttcaagacgctgtaaacctctgaaggaatttatgctttctcaagatgttgaacatgagcgtctctttgacctcattcagaaaatgttggagtatgatccagccaaaagaattactctcagagaagccttaaagcatcctttctttgaccttctgaagaaaagtatatagatctgtaattggacagctctctcgaagagatcttacagactgtatcagtctaatttttaaattttaagttattttgtacagctttgtaaattcttaacatttttatattgccatgtttattttgtttgggtaatttggttcattaagtacatagctaaggtaatgaacatctttttcagtaattgtaaagtgatttattcagaataaattttttgtgcttatgaagttgatatgtatctgaacagtttgttctaagtaccatttttcttcctacttctattaaagaatggacataga

SEQ ID NO: 115877 - DNA, 1192 bp, Homo sapiens
  Payload ID: 2611
  Gene Symbol: CLK1
  Gene Name: CDC-like kinase 1
  ENST ID: ENST00000409769
  CDS Start-End: 61-984
tacagtttgaagacagtaatacctggaattgagcatcatgtctgtcattcttaaatttgcatgcatctttctaacaggggaggtagacatgtagcagtaaaaatagttaaaaatgtggatagatactgtgaagctgctcgctcagaaatacaagttctggaacatctgaatacaacagaccccaacagtactttccgctgtgtccagatgttggaatggtttgagcatcatggtcacatttgcattgtttttgaactattgggacttagtacttacgacttcattaaagaaaatggttttctaccatttcgactggatcatatcagaaagatggcatatcagatatgcaagtctgtgaattttttgcacagtaataagttgactcacacagacttaaagcctgaaaacatcttatttgtgcagtctgactacacagaggcgtataatcccaaaataaaacgtgatgaacgcaccttaataaatccagatattaaagttgtagactttggtagtgcaacatatgatgacgaacatcacagtacattggtatctacaagacattatagagcacctgaagttattttagccctagggtggtcccaaccatgtgatgtctggagcataggatgcattcttattgaatactatcttgggtttaccgtatttccaacacacgatagtaaggagcatttagcaatgatggaaaggattcttggacctctaccaaaacatatgatacagaaaaccaggaaacgtaaatattttcaccacgatcgattagactgggatgaacacagttctgccggcagatatgtttcaagacgctgtaaacctctgaaggaatttatgctttctcaagatgttgaacatgagcgtctctttgacctcattcagaaaatgttggagtatgatccagccaaaagaattactctcagagaagccttaaagcatcctttctttgaccttctgaagaaaagtatatagatctgtaattggacagctctctcgaagagatcttacagactgtatcagtctaatttttaaattttaagttattttgtacagctttgtaaattcttaacatttttatattgccatgtttattttgtttgggtaatttggttcattaagtacatagctaaggtaatgaacatctttttcagtaattgtaaagtgatttattcagaataaa

SEQ ID NO: 115878 - DNA, 1664 bp, Homo sapiens
  Payload ID: 2611
  Gene Symbol: CLK1
  Gene Name: CDC-like kinase 1
  ENST ID: ENST00000409403
  CDS Start-End: 100-1167
ctccattttgttgttggtgcgcgacgcagtcagctgcgtgattcccgtgattgcgttacaagctttgtctccttcgacttggagtctttgtccaggacgatgagacactcaaagagaacttactgtcctgattgggatgacaaggattgggattatggaaaatggaggagcagcagcagtcataaaagaaggaagagatcacatagcagtgcccaggagaacaagcgctgcaaatacaatcactctaaaatgtgtgatagccattatttggaaagcaggtctataaatgagaaagattatcatagtcgacgctacattgatgagtacagaaatgactacactcaaggatgtgaacctggacatcgccaaagagaccatgaaagccggtatcagaaccatagtagcaagtcttctggtagaagtggaagaagtagttataaaagcaaacacaggattcaccacagtacttcacatcgtcgttcacatgggaagagtcaccgaaggaaaagaaccaggagtgtagaggatgatgaggagggtcacctgatctgtcagagtggagacgtactaagtgcaagatatgaaattgttgatactttaggtgaaggagcttttggaaaagttgtggagtgcatcgatcataaagcgggaggtagacatgtagcagtaaaaatagttaaaaatgtggatagatactgtgaagctgctcgctcagaaatacaagttctggaacatctgaatacaacagaccccaacagtactttccgctgtgtccagatgttggaatggtttgagcatcatggtcacatttgcattgtttttgaactattgggacttagtacttacgacttcattaaagaaaatggttttctaccatttcgactggatcatatcagaaagatggcatatcagatatgcaagtctgtgaattttttgcacagtaataagttgactcacacagacttaaagcctgaaaacatcttatttgtgcagtctgactacacagaggcgtataatcccaaaataaaacgtgatgaacgcaccttaataaatccagatattaaagttgtagactttggtagtgcaacatatgatgacgaacatcacagtacattggtatctacaagacattatagagcacctgaagttattttagacacacgatagtaaggagcatttagcaatgatggaaaggattcttggacctctaccaaaacatatgatacagaaaaccaggaaacgtaaatattttcaccacgatcgattagactgggatgaacacagttctgccggcagatatgtttcaagacgctgtaaacctctgaaggaatttatgctttctcaagatgttgaacatgagcgtctctttgacctcattcagaaaatgttggagtatgatccagccaaaagaattactctcagagaagccttaaagcatcctttctttgaccttctgaagaaaagtatatagatctgtaattggacagctctctcgaagagatcttacagactgtatcagtctaatttttaaattttaagttattttgtacagctttgtaaattcttaacatttttatattgccatgtttattttgtttgggtaatttggttcattaagtacatagctaaggtaatgaacatctttttcagtaattgtaaagtga

SEQ ID NO: 115879 - DNA, 2026 bp, Homo sapiens
  Payload ID: 2611
  Gene Symbol: CLK1
  Gene Name: CDC-like kinase 1
  Uniprot ID: P49759
  ENST ID: ENST00000434813
  CDS Start-End: 336-1916
aagacgcaggagggagcggactaggtgacagggccgttcctgtgagcctcgcgggcgcctggcgatgcccccttttcctgcttgtttgctgcccgccgtccccggcgcgacgactgcctgctcccttcactcccaggctgcacagtggcggcgcgcccctctttcctgcgcggccgagcctgtcgccgccggatccggcctgcgggggtagttacggtgtttgctaggccggccgccctcttggagcttctgccctccgctgaggaagcggcgccgcctgacgcgggacggtcgggcgggcgccatgttgtgaaccgcctcggcggagctgtaagatggcggctgggcggaggccggcttcggccctgtggccggaaaggcgaggctccccgttgaggggggatttgctggggttccagaatgtgcgtgagccaagcagctgtggggaaacgttgtctggaatgagacactcaaagagaacttactgtcctgattgggatgacaaggattgggattatggaaaatggaggagcagcagcagtcataaaagaaggaagagatcacatagcagtgcccaggagaacaagcgctgcaaatacaatcactctaaaatgtgtgatagccattatttggaaagcaggtctataaatgagaaagattatcatagtcgacgctacattgatgagtacagaaatgactacactcaaggatgtgaacctggacatcgccaaagagaccatgaaagccggtatcagaaccatagtagcaagtcttctggtagaagtggaagaagtagttataaaagcaaacacaggattcaccacagtacttcacatcgtcgttcacatgggaagagtcaccgaaggaaaagaaccaggagtgtagaggatgatgaggagggtcacctgatctgtcagagtggagacgtactaagtgcaagatatgaaattgttgatactttaggtgaaggagcttttggaaaagttgtggagtgcatcgatcataaagcgggaggtagacatgtagcagtaaaaatagttaaaaatgtggatagatactgtgaagctgctcgctcagaaatacaagttctggaacatctgaatacaacagaccccaacagtactttccgctgtgtccagatgttggaatggtttgagcatcatggtcacatttgcattgtttttgaactattgggacttagtacttacgacttcattaaagaaaatggttttctaccatttcgactggatcatatcagaaagatggcatatcagatatgcaagtctgtgaattttttgcacagtaataagttgactcacacagacttaaagcctgaaaacatcttatttgtgcagtctgactacacagaggcgtataatcccaaaataaaacgtgatgaacgcaccttaataaatccagatattaaagttgtagactttggtagtgcaacatatgatgacgaacatcacagtacattggtatctacaagacattatagagcacctgaagttattttagccctagggtggtcccaaccatgtgatgtctggagcataggatgcattcttattgaatactatcttgggtttaccgtatttccaacacacgatagtaaggagcatttagcaatgatggaaaggattcttggacctctaccaaaacatatgatacagaaaaccaggaaacgtaaatattttcaccacgatcgattagactgggatgaacacagttctgccggcagatatgtttcaagacgctgtaaacctctgaaggaatttatgctttctcaagatgttgaacatgagcgtctctttgacctcattcagaaaatgttggagtatgatccagccaaaagaattactctcagagaagccttaaagcatcctttctttgaccttctgaagaaaagtatatagatctgtaattggacagctctctcgaagagatcttacagactgtatcagtctaatttttaaattttaagttattttgtacagctttgtaaattcttaacatttttatattg

SEQ ID NO: 115880 - DNA, 1682 bp, Homo sapiens
  Payload ID: 2611
  Gene Symbol: CLK1
  Gene Name: CDC-like kinase 1
  Uniprot ID: P49759
  ENST ID: ENST00000432425
  CDS Start-End: 94-504
tttgttgttggtgcgcgacgcagtcagctgcgtgattcccgtgattgcgttacaagctttgtctccttcgacttggagtctttgtccaggacgatgagacactcaaagagaacttactgtcctgattgggatgacaaggattgggattatggaaaatggaggagcagcagcagtcataaaagaaggaagagatcacatagcagtgcccaggagaacaagcgctgcaaatacaatcactctaaaatgtgtgatagccattatttggaaagcaggtctataaatgagaaagattatcatagtcgacgctacattgatgagtacagaaatgactacactcaaggatgtgaacctggacatcgccaaagagaccatgaaagccggtatcagaaccatagtagcaagtcttctggtagaagtggaagaagtagttataaaagcaaacacaggattcaccacagtacttcacatcgtcgttcacatgggatgaaattgttgatactttaggtgaaggagcttttggaaaagttgtggagtgcatcgatcataaagcgggaggtagacatgtagcagtaaaaatagttaaaaatgtggatagatactgtgaagctgctcgctcagaaatacaagttctggaacatctgaatacaacagaccccaacagtactttccgctgtgtccagatgttggaatggtttgagcatcatggtcacatttgcattgtttttgaactattgggacttagtacttacgacttcattaaagaaaatggttttctaccatttcgactggatcatatcagaaagatggcatatcagatatgcaagtctgtgaattttttgcacagtaataagttgactcacacagacttaaagcctgaaaacatcttatttgtgcagtctgactacacagaggcgtataatcccaaaataaaacgtgatgaacgcaccttaataaatccagatattaaagttgtagactttggtagtgcaacatatgatgacgaacatcacagtacattggtatctacaagacattatagagcacctgaagttattttagccctagggtggtcccaaccatgtgatgtctggagcataggatgcattcttattgaatactatcttgggtttaccgtatttccaacacacgatagtaaggagcatttagcaatgatggaaaggattcttggacctctaccaaaacatatgatacagaaaaccaggaaacgtaaatattttcaccacgatcgattagactgggatgaacacagttctgccggcagatatgtttcaagacgctgtaaacctctgaaggaatttatgctttctcaagatgttgaacatgagcgtctctttgacctcattcagaaaatgttggagtatgatccagccaaaagaattactctcagagaagccttaaagcatcctttctttgaccttctgaagaaaagtatatagatctgtaattggacagctctctcgaagagatcttacagactgtatcagtctaatttttaaattttaagttattttgtacagctttgtaaattcttaacatttttatattgccatgtttattttgtttgggtaatttggttcattaagtacatagctaaggtaatgaacatctttttcagtaattgtaaagtgatttattcagaataaattttttgtgcttatgaa

SEQ ID NO: 115881 - DNA, 1843 bp, Homo sapiens
  Payload ID: 2611
  Gene Symbol: CLK1
  Gene Name: CDC-like kinase 1
  ENST ID: ENST00000621181
  CDS Start-End: 182-1546
gtgcatgacccgccccgcggcggagacgcgctcgctgcgtcatcagtgttttcgagacgagtctcgacgcagcagctgtcagctccattttgttgttggtgcgcgacgcagtcagctgcgtgattcccgtgattgcgttacaagctttgtctccttcgacttggagtctttgtccaggacgatgagacactcaaagagaacttactgtcctgattgggatgacaaggattgggattatggaaaatggaggagcagcagcagtcataaaagaaggaagagatcacatagcagtgcccaggagaacaagcgctgcaaatacaatcactctaaaatgtgtgatagccattatttggaaagcaggtctataaatgagaaagattatcatagtcgacgctacattgatgagtacagaaatgactacactcaaggatgtgaacctggacatcgccaaagagaccatgaaagccggtatcagaaccatagtagcaagtcttctggtagaagtggaagaagtagttataaaagcaaacacaggattcaccacagtacttcacatcgtcgttcacatggggatgaaattgttgatactttaggtgaaggagcttttggaaaagttgtggagtgcatcgatcataaagcgggaggtagacatgtagcagtaaaaatagttaaaaatgtggatagatactgtgaagctgctcgctcagaaatacaagttctggaacatctgaatacaacagaccccaacagtactttccgctgtgtccagatgttggaatggtttgagcatcatggtcacatttgcattgtttttgaactattgggacttagtacttacgacttcattaaagaaaatggttttctaccatttcgactggatcatatcagaaagatggcatatcagatatgcaagtctgtgaattttttgcacagtaataagttgactcacacagacttaaagcctgaaaacatcttatttgtgcagtctgactacacagaggcgtataatcccaaaataaaacgtgatgaacgcaccttaataaatccagatattaaagttgtagactttggtagtgcaacatatgatgacgaacatcacagtacattggtatctacaagacattatagagcacctgaagttattttagccctagggtggtcccaaccatgtgatgtctggagcataggatgcattcttattgaatactatcttgggtttaccgtatttccaacacacgatagtaaggagcatttagcaatgatggaaaggattcttggacctctaccaaaacatatgatacagaaaaccaggaaacgtaaatattttcaccacgatcgattagactgggatgaacacagttctgccggcagatatgtttcaagacgctgtaaacctctgaaggaatttatgctttctcaagatgttgaacatgagcgtctctttgacctcattcagaaaatgttggagtatgatccagccaaaagaattactctcagagaagccttaaagcatcctttctttgaccttctgaagaaaagtatatagatctgtaattggacagctctctcgaagagatcttacagactgtatcagtctaatttttaaattttaagttattttgtacagctttgtaaattcttaacatttttatattgccatgtttattttgtttgggtaatttggttcattaagtacatagctaaggtaatgaacatctttttcagtaattgtaaagtgatttattcagaataaattttttgtgcttatgaagttgatatgtatctgaacagtttgttctaagtaccatttttcttcctacttctattaaagaatggacataga

SEQ ID NO: 115882 - DNA, 2120 bp, Homo sapiens
  Payload ID: 2612
  Gene Symbol: CLK2
  Gene Name: CDC-like kinase 2
  ENST ID: ENST00000355560
  CDS Start-End: 283-1776
cggcggcggcggagcggagaggccagagccggagaccgagctgggatcgggccccgggcgggggcggtgcgagcggcgccaagcagatcttaggggcggggacggagccggggcgggcgggactgaagcggagcccgggaacggggcgggaggtcccagggtcccgggttgggggggtggagcagcatttcgtcgccgcgggggtgccgggactccggccgcagtgtcgccgccatcacggacttcctgtgggacaagcgcacgggcctcgccgccagaacgatgccgcatcctcgaaggtaccactcctcagagcgaggcagccgggggagttaccgtgaacactatcggagccgaaagcataagcgacgaagaagtcgctcctggtcaagtagtagtgaccggacacgacggcgtcggcgagaggacagctaccatgtccgttctcgaagttatgatgatcgttcgtccgaccggagggtgtatgaccggcgatactgtggcagctacagacgcaacgattatagccgggatcggggagatgcctactatgacacagactatcggcattcctatgaatatcagcgggagaacagcagttaccgcagccagcgcagcagccggaggaagcacagacggcggaggaggcgcagccggacatttagccgctcatcttcgcacagcagccggagagccaagagtgtagaggacgacgctgagggccacctcatctaccacgtcggggactggctacaagagcgatatgaaatcgttagcaccttaggagaggggaccttcggccgagttgtacaatgtgttgaccatcgcaggggtggggctcgagttgccctgaagatcattaagaatgtggagaagtacaaggaagcagctcgacttgagatcaacgtgctagagaaaatcaatgagaaagaccctgacaacaagaacctctgtgtccagatgtttgactggtttgactaccatggccacatgtgtatctcctttgagcttctgggccttagcaccttcgatttcctcaaagacaacaactacctgccctaccccatccaccaagtgcgccacatggccttccagctgtgccaggctgtcaagttcctccatgataacaagctgacacatacagacctcaagcctgaaaatattctgtttgtgaattcagactatgagctcacctacaacctagagaagaagcgagatgagcgcagtgtgaagagcacagctgtgcgggtggtagactttggcagtgccacctttgaccatgagcaccatagcaccattgtctccactcgccattaccgagcaccagaagtcatccttgagttgggctggtcacagccttgtgatgtgtggagtataggctgcatcatctttgaatactatgtgggattcaccctcttccagacccatgacaacagagagcatctagccatgatggaaaggatcttgggtcctatcccttcccggatgatccgaaagacaagaaagcagaaatatttttaccggggtcgcctggattgggatgagaacacatcagctgggcgctatgttcgtgagaactgcaaaccgctgcggcggtatctgacctcagaggcagaggaacaccaccagctcttcgatctgattgaaagcatgctagagtatgaaccagctaagcggctgaccttgggtgaagcccttcagcatcctttcttcgcccgccttcgggctgagccgcccaacaagttgtgggactccagtcgggatatcagtcggtgacgatcaggccctgggcccccctgcatcttttatagcagtgggtgtccagtccaggacactggtgcttttttatacaagagaacgagccagagttcactccttcctcctggctctctatatacctgtgaatatgtgaaatagtgtaaatatgaaagaacttgtacctatcacttcaacccctgccttgtacataatactattccatccacacagtttccaccctcacctgccccctcatacggagttggatgggggccgagtgaggtaaccaggtggcatctaccccatgttttataaggaattttgtacagtctttgtgaaataaaataacgtgcttcatttga

SEQ ID NO: 115883 - DNA, 1934 bp, Homo sapiens
  Payload ID: 2612
  Gene Symbol: CLK2
  Gene Name: CDC-like kinase 2
  Uniprot ID: P49760
  ENST ID: ENST00000361168
  CDS Start-End: 88-1584
ccgcgggggtgccgggactccggccgcagtgtcgccgccatcacggacttcctgtgggacaagcgcacgggcctcgccgccagaacgatgccgcatcctcgaaggtaccactcctcagagcgaggcagccgggggagttaccgtgaacactatcggagccgaaagcataagcgacgaagaagtcgctcctggtcaagtagtagtgaccggacacgacggcgtcggcgagaggacagctaccatgtccgttctcgaagcagttatgatgatcgttcgtccgaccggagggtgtatgaccggcgatactgtggcagctacagacgcaacgattatagccgggatcggggagatgcctactatgacacagactatcggcattcctatgaatatcagcgggagaacagcagttaccgcagccagcgcagcagccggaggaagcacagacggcggaggaggcgcagccggacatttagccgctcatcttcgcacagcagccggagagccaagagtgtagaggacgacgctgagggccacctcatctaccacgtcggggactggctacaagagcgatatgaaatcgttagcaccttaggagaggggaccttcggccgagttgtacaatgtgttgaccatcgcaggggtggggctcgagttgccctgaagatcattaagaatgtggagaagtacaaggaagcagctcgacttgagatcaacgtgctagagaaaatcaatgagaaagaccctgacaacaagaacctctgtgtccagatgtttgactggtttgactaccatggccacatgtgtatctcctttgagcttctgggccttagcaccttcgatttcctcaaagacaacaactacctgccctaccccatccaccaagtgcgccacatggccttccagctgtgccaggctgtcaagttcctccatgataacaagctgacacatacagacctcaagcctgaaaatattctgtttgtgaattcagactatgagctcacctacaacctagagaagaagcgagatgagcgcagtgtgaagagcacagctgtgcgggtggtagactttggcagtgccacctttgaccatgagcaccatagcaccattgtctccactcgccattaccgagcaccagaagtcatccttgagttgggctggtcacagccttgtgatgtgtggagtataggctgcatcatctttgaatactatgtgggattcaccctcttccagacccatgacaacagagagcatctagccatgatggaaaggatcttgggtcctatcccttcccggatgatccgaaagacaagaaagcagaaatatttttaccggggtcgcctggattgggatgagaacacatcagctgggcgctatgttcgtgagaactgcaaaccgctgcggcggtatctgacctcagaggcagaggaacaccaccagctcttcgatctgattgaaagcatgctagagtatgaaccagctaagcggctgaccttgggtgaagcccttcagcatcctttcttcgcccgccttcgggctgagccgcccaacaagttgtgggactccagtcgggatatcagtcggtgacgatcaggccctgggcccccctgcatcttttatagcagtgggtgtccagtccaggacactggtgcttttttatacaagagaacgagccagagttcactccttcctcctggctctctatatacctgtgaatatgtgaaatagtgtaaatatgaaagaacttgtacctatcacttcaacccctgccttgtacataatactattccatccacacagtttccaccctcacctgccccctcatacggagttggatgggggccgagtgaggtaaccaggtggcatctaccccatgttttataaggaattttgtacagtctttgtgaaataaaataacgtgcttcatttgaccccca

SEQ ID NO: 115884 - DNA, 2166 bp, Homo sapiens
  Payload ID: 2612
  Gene Symbol: CLK2
  Gene Name: CDC-like kinase 2
  Uniprot ID: P49760
  ENST ID: ENST00000368361
  CDS Start-End: 317-1816
ggacgtcggtccgtgcgtacgtgctcgctcacggcggcggcggcggagcggagaggccagagccggagaccgagctgggatcgggccccgggcgggggcggtgcgagcggcgccaagcagatcttaggggcggggacggagccggggcgggcgggactgaagcggagcccgggaacggggcgggaggtcccagggtcccgggttgggggggtggagcagcatttcgtcgccgcgggggtgccgggactccggccgcagtgtcgccgccatcacggacttcctgtgggacaagcgcacgggcctcgccgccagaacgatgccgcatcctcgaaggtaccactcctcagagcgaggcagccgggggagttaccgtgaacactatcggagccgaaagcataagcgacgaagaagtcgctcctggtcaagtagtagtgaccggacacgacggcgtcggcgagaggacagctaccatgtccgttctcgaagcagttatgatgatcgttcgtccgaccggagggtgtatgaccggcgatactgtggcagctacagacgcaacgattatagccgggatcggggagatgcctactatgacacagactatcggcattcctatgaatatcagcgggagaacagcagttaccgcagccagcgcagcagccggaggaagcacagacggcggaggaggcgcagccggacatttagccgctcatcttcgcagcacagcagccggagagccaagagtgtagaggacgacgctgagggccacctcatctaccacgtcggggactggctacaagagcgatatgaaatcgttagcaccttaggagaggggaccttcggccgagttgtacaatgtgttgaccatcgcaggggtggggctcgagttgccctgaagatcattaagaatgtggagaagtacaaggaagcagctcgacttgagatcaacgtgctagagaaaatcaatgagaaagaccctgacaacaagaacctctgtgtccagatgtttgactggtttgactaccatggccacatgtgtatctcctttgagcttctgggccttagcaccttcgatttcctcaaagacaacaactacctgccctaccccatccaccaagtgcgccacatggccttccagctgtgccaggctgtcaagttcctccatgataacaagctgacacatacagacctcaagcctgaaaatattctgtttgtgaattcagactatgagctcacctacaacctagagaagaagcgagatgagcgcagtgtgaagagcacagctgtgcgggtggtagactttggcagtgccacctttgaccatgagcaccatagcaccattgtctccactcgccattaccgagcaccagaagtcatccttgagttgggctggtcacagccttgtgatgtgtggagtataggctgcatcatctttgaatactatgtgggattcaccctcttccagacccatgacaacagagagcatctagccatgatggaaaggatcttgggtcctatcccttcccggatgatccgaaagacaagaaagcagaaatatttttaccggggtcgcctggattgggatgagaacacatcagctgggcgctatgttcgtgagaactgcaaaccgctgcggcggtatctgacctcagaggcagaggaacaccaccagctcttcgatctgattgaaagcatgctagagtatgaaccagctaagcggctgaccttgggtgaagcccttcagcatcctttcttcgcccgccttcgggctgagccgcccaacaagttgtgggactccagtcgggatatcagtcggtgacgatcaggccctgggcccccctgcatcttttatagcagtgggtgtccagtccaggacactggtgcttttttatacaagagaacgagccagagttcactccttcctcctggctctctatatacctgtgaatatgtgaaatagtgtaaatatgaaagaacttgtacctatcacttcaacccctgccttgtacataatactattccatccacacagtttccaccctcacctgccccctcatacggagttggatgggggccgagtgaggtaaccaggtggcatctaccccatgttttataaggaattttgtacagtctttgtgaaataaaataacgtgcttcatttgaccccca

SEQ ID NO: 115885 - DNA, 2120 bp, Homo sapiens; identical to SEQ ID NO: 115882
  Payload ID: 2612
  Gene Symbol: CLK2
  Gene Name: CDC-like kinase 2
  ENST ID: ENST00000576584
  CDS Start-End: 283-1776

SEQ ID NO: 115886 - DNA, 1934 bp, Homo sapiens; identical to SEQ ID NO: 115883
  Payload ID: 2612
  Gene Symbol: CLK2
  Gene Name: CDC-like kinase 2
  Uniprot ID: P49760
  ENST ID: ENST00000572269
  CDS Start-End: 88-1584

SEQ ID NO: 115887 - DNA, 2166 bp, Homo sapiens; identical to SEQ ID NO: 115884
  Payload ID: 2612
  Gene Symbol: CLK2
  Gene Name: CDC-like kinase 2
  Uniprot ID: P49760
  ENST ID: ENST00000574445
  CDS Start-End: 317-1816

SEQ ID NO: 115888 - DNA, 1846 bp, Homo sapiens
  Payload ID: 2613
  Gene Symbol: CLK3
  Gene Name: CDC-like kinase 3
  Uniprot ID: P49761
  ENST ID: ENST00000345005
  CDS Start-End: 56-1528
ggggcactggtacctccaggacctggagtgtactggaagaaatggtgcagtccagatgcatcactgtaagcgataccgctcccctgaaccagacccgtacctgagctaccgatggaagaggaggaggtcctacagtcgggaacatgaagggagactgcgatacccgtcccgaagggagcctcccccacgaagatctcggtccagaagccatgaccgcctgccctaccagaggaggtaccgggagcgccgtgacagcgatacataccggtgtgaagagcggagcccatcctttggagaggactactatggaccttcacgttctcgtcatcgtcggcgatcgcgggagagggggccataccggacccgcaagcatgcccaccactgccacaaacgccgcaccaggtcttgtagcagcgcctcctcgagaagccaacagagcagtaagcgcagcagccggagtgtggaagatgacaaggagggtcacctggtgtgccggatcggcgattggctccaagagcgatatgagattgtggggaacctgggtgaaggcacctttggcaaggtggtggagtgcttggaccatgccagagggaagtctcaggttgccctgaagatcatccgcaacgtgggcaagtaccgggaggctgcccggctagaaatcaacgtgctcaaaaaaatcaaggagaaggacaaagaaaacaagttcctgtgtgtcttgatgtctgactggttcaacttccacggtcacatgtgcatcgcctttgagctcctgggcaagaacacctttgagttcctgaaggagaataacttccagccttaccccctaccacatgtccggcacatggcctaccagctctgccacgcccttagatttctgcatgagaatcagctgacccatacagacttgaaaccagagaacatcctgtttgtgaattctgagtttgaaaccctctacaatgagcacaagagctgtgaggagaagtcagtgaagaacaccagcatccgagtggctgactttggcagtgccacatttgaccatgagcaccacaccaccattgtggccacccgtcactatcgcccgcctgaggtgatccttgagctgggctgggcacagccctgtgacgtctggagcattggctgcattctctttgagtactaccggggcttcacactcttccagacccacgaaaaccgagagcacctggtgatgatggagaagatcctagggcccatcccatcacacatgatccaccgtaccaggaagcagaaatatttctacaaagggggcctagtttgggatgagaacagctctgacggccggtatgtgaaggagaactgcaaacctctgaagagttacatgctccaagactccctggagcacgtgcagctgtttgacctgatgaggaggatgttagaatttgaccctgcccagcgcatcacactggccgaggccctgctgcaccccttctttgctggcctgacccctgaggagcggtccttccacaccagccgcaacccaagcagatgacaggcacaggccaccgcatgaggagatggagggcgggactgggccgcccagccccttgactccagcctcgaccgccaggccccaggccagagccacccaatgaacagtgcaatgtgaaggaaggcaggagcctgcaggggagcagacttggtgcccagctgccagaaagcacagatttgacccaagctatttatatgttataaagttataataaagtgtttcttactgtttgtaacccctggtaccagtgtgtccatctccaggctccttgccttccccttacctgaccttattaataaagtctttcttagcagttca

SEQ ID NO: 115889 - DNA, 2621 bp, Homo sapiens
  Payload ID: 2613
  Gene Symbol: CLK3
  Gene Name: CDC-like kinase 3
  Uniprot ID: P49761
  ENST ID: ENST00000395066
  CDS Start-End: 462-2378
agttttctcatctggaaagtggggcctcgtaatcctgtccgacccggcgcgggacagtaggtgtcagggattttggtgaccccacgctcgaggcctctgcaaaagggggctgtccagtggcccagagacgcagccggcggggcttttgtctagcgggggagtcttaactgagaggccacgcaggccggcaggaagccgctccacaggagggggctcaaggagaggggatctcctccctccagactccggccccgccagagtagctctagggtatcttcccagaaactgccccgcacgcactggcgagctgggagcgccaccacggctttcaaaaaacccgcacacaccaagataataatgtgtcgttcgctcgtttcgcgcaagcggagtcgcgtccgccttcccgagctccggcacacagacctcaggccgctctcgcgctctccggggccccgagaacaatgcccgtcctctccgcgcgcaggagggagttggcggaccacgcggggtcggggcgacggagcgggcccagccccacggccaggtcggggccccacctctcggctctgagagcccagccggcccgggccgcgcacctgtcaggtcgggggacctacgtgcgccgcgacacggcgggaggcgggccgggccaggctcgtcccctcggccctcccggaactagtctcctaggccgcggcgcccgccggagcggagagggctggtgccccggagccttcgagtcgggggctagagcggccaggcctccgagccgggtcgagccgaggctggcgacggctgcgtcacgcgagggggcggggctgccacgggcggaggtcgcagccggaagcggaagaggcgctcggagcggggagtggggcctagctgcagccggagcctgggagacgatgcatcactgtaagcgataccgctcccctgaaccagacccgtacctgagctaccgatggaagaggaggaggtcctacagtcgggaacatgaagggagactgcgatacccgtcccgaagggagcctcccccacgaagatctcggtccagaagccatgaccgcctgccctaccagaggaggtaccgggagcgccgtgacagcgatacataccggtgtgaagagcggagcccatcctttggagaggactactatggaccttcacgttctcgtcatcgtcggcgatcgcgggagagggggccataccggacccgcaagcatgcccaccactgccacaaacgccgcaccaggtcttgtagcagcgcctcctcgagaagccaacagagcagtaagcgcagcagccggagtgtggaagatgacaaggagggtcacctggtgtgccggatcggcgattggctccaagagcgatatgagattgtggggaacctgggtgaaggcacctttggcaaggtggtggagtgcttggaccatgccagagggaagtctcaggttgccctgaagatcatccgcaacgtgggcaagtaccgggaggctgcccggctagaaatcaacgtgctcaaaaaaatcaaggagaaggacaaagaaaacaagttcctgtgtgtcttgatgtctgactggttcaacttccacggtcacatgtgcatcgcctttgagctcctgggcaagaacacctttgagttcctgaaggagaataacttccagccttaccccctaccacatgtccggcacatggcctaccagctctgccacgcccttagatttctgcatgagaatcagctgacccatacagacttgaaaccagagaacatcctgtttgtgaattctgagtttgaaaccctctacaatgagcacaagagctgtgaggagaagtcagtgaagaacaccagcatccgagtggctgactttggcagtgccacatttgaccatgagcaccacaccaccattgtggccacccgtcactatcgcccgcctgaggtgatccttgagctgggctgggcacagccctgtgacgtctggagcattggctgcattctctttgagtactaccggggcttcacactcttccagacccacgaaaaccgagagcacctggtgatgatggagaagatcctagggcccatcccatcacacatgatccaccgtaccaggaagcagaaatatttctacaaagggggcctagtttgggatgagaacagctctgacggccggtatgtgaaggagaactgcaaacctctgaagagttacatgctccaagactccctggagcacgtgcagctgtttgacctgatgaggaggatgttagaatttgaccctgcccagcgcatcacactggccgaggccctgctgcaccccttctttgctggcctgacccctgaggagcggtccttccacaccagccgcaacccaagcagatgacaggcacaggccaccgcatgaggagatggagggcgggactgggccgcccagccccttgactccagcctcgaccgccaggccccaggccagagccacccaatgaacagtgcaatgtgaaggaaggcaggagcctgcaggggagcagacttggtgcccagctgccagaaagcacagatttgacccaagctatttatatgttataaagttataataaagtgtttcttactgtttgtaacccctggt

SEQ ID NO: 115890 - DNA, 1749 bp, Homo sapiens
  Payload ID: 2613
  Gene Symbol: CLK3
  Gene Name: CDC-like kinase 3
  Uniprot ID: P49761
  ENST ID: ENST00000483723
  CDS Start-End: 56-514
ggggcactggtacctccaggacctggagtgtactggaagaaatggtgcagtccagatgcatcactgtaagcgataccgctcccctgaaccagacccgtacctgagctaccgatggaagaggaggaggtcctacagtcgggaacatgaagggagactgcgatacccgtcccgaagggagcctcccccacgaagatctcggtccagaagccatgaccgcctgccctaccagaggaggtaccgggagcgccgtgacagcgatacataccggtgtgaagagcggagcccatcctttggagaggactactatggaccttcacgttctcgtcatcgtcggcgatcgcgggagagggggccataccggacccgcaagcatgcccaccactgccacaaacgccgcaccaggtcttgtagcagcgcctcctcgatgagattgtggggaacctgggtgaaggcacctttggcaaggtggtggagtgcttggaccatgccagagggaagtctcaggttgccctgaagatcatccgcaacgtgggcaagtaccgggaggctgcccggctagaaatcaacgtgctcaaaaaaatcaaggagaaggacaaagaaaacaagttcctgtgtgtcttgatgtctgactggttcaacttccacggtcacatgtgcatcgcctttgagctcctgggcaagaacacctttgagttcctgaaggagaataacttccagccttaccccctaccacatgtccggcacatggcctaccagctctgccacgcccttagatttctgcatgagaatcagctgacccatacagacttgaaaccagagaacatcctgtttgtgaattctgagtttgaaaccctctacaatgagcacaagagctgtgaggagaagtcagtgaagaacaccagcatccgagtggctgactttggcagtgccacatttgaccatgagcaccacaccaccattgtggccacccgtcactatcgcccgcctgaggtgatccttgagctgggctgggcacagccctgtgacgtctggagcattggctgcattctctttgagtactaccggggcttcacactcttccagacccacgaaaaccgagagcacctggtgatgatggagaagatcctagggcccatcccatcacacatgatccaccgtaccaggaagcagaaatatttctacaaagggggcctagtttgggatgagaacagctctgacggccggtatgtgaaggagaactgcaaacctctgaagagttacatgctccaagactccctggagcacgtgcagctgtttgacctgatgaggaggatgttagaatttgaccctgcccagcgcatcacactggccgaggccctgctgcaccccttctttgctggcctgacccctgaggagcggtccttccacaccagccgcaacccaagcagatgacaggcacaggccaccgcatgaggagatggagggcgggactgggccgcccagccccttgactccagcctcgaccgccaggccccaggccagagccacccaatgaacagtgcaatgtgaaggaaggcaggagcctgcaggggagcagacttggtgcccagctgccagaaagcacagatttgacccaagctatttatatgttataaagttataataaagtgtttcttactgtttgtaacccctggtaccagtgtgtccatctccaggctccttgccttccccttacctgaccttattaataaagtctttcttagcagttca

SEQ ID NO: 115891 - DNA, 929 bp, Homo sapiens
  Payload ID: 2613
  Gene Symbol: CLK3
  Gene Name: CDC-like kinase 3
  ENST ID: ENST00000564468
  CDS Start-End: 1-178
cgcctttgagctcctgggcaagaacacctttgagttcctgaaggagaataacttccagccttaccccctaccacatgtccggcacatggcctaccagctctgccacgcccttagatggccctgcaaattatgtagctggtgcagggaagagggaaccacctcgaggctgttgctgtagctctgctgagagacagttctgcatgagaatcagctgacccatacagacttgaaaccagagaacatcctgtttgtgaattctgagtttgaaaccctctacaatgagcacaagagctgtgaggagaagtcagtgaagaacaccagcatccgagtggctgactttggcagtgccacatttgaccatgagcaccacaccaccattgtggccacccgtcactatcgcccgcctgaggtgatccttgagctgggctgggcacagccctgtgacgtctggagcattggctgcattctctttgagtactaccggggcttcacactcttccagacccacgaaaaccgagagcacctggtgatgatggagaagatcctagggcccatcccatcacacatgatccaccgtaccaggaagcagaaatatttctacaaagggggcctagtttgggatgagaacagctctgacggccggtatgtgaaggagaactgcaaacctctgaagagttacatgctccaagactccctggagcacgtgcagctgtttgacctgatgaggaggatgttagaatttgaccctgcccagcgcatcacactggccgaggccctgctgcaccccttctttgctggcctgacccctgaggagcggtccttccacaccagccgcaacccaagcagatgacaggcacaggccaccgcatgaggagatggagggcgggactgggccgcccagccccttgactccagcctcgaccgccagg

SEQ ID NO: 115892 - DNA, 646 bp, Homo sapiens
  Payload ID: 2613
  Gene Symbol: CLK3
  Gene Name: CDC-like kinase 3
  ENST ID: ENST00000566926
  CDS Start-End: 1-582
gagcacaagagctgtgaggagaagtcagtgaagaacaccagcatccgagtggctgactttggcagtgccacatttgaccatgagcaccacaccaccattgtggccacccgtcactatcgcccgcctgaggtgatccttgagctgggctgggcacagccctgtgacgtctggagcattggctgcattctctttgagtactaccggggcttcacactcttccagacccacgaaaaccgagagcacctggtgatgatggagaagatcctagggcccatcccatcacacatgatccaccgtaccaggaagcagaaatatttctacaaagggggcctagtttgggatgagaacagctctgacggccggtatgtgaaggagaactgcaaacctctgaaggtcagtttctggctacccccagctgaactcatgccaaggagagaccccaggcactgggcagacatacagcagagacaggccaggccgctaaaggctgcctccttgatccagctctatgggaggcggcacccaagactgctgggtgctggcaatggggcttcttgcaaactgccccagaggggcccttagccctaccccttccccatagggtggctatgaatgtaattggggaacaccagaagagccagatgtc

SEQ ID NO: 115893 - DNA, 918 bp, Homo sapiens
  Payload ID: 2613
  Gene Symbol: CLK3
  Gene Name: CDC-like kinase 3
  ENST ID: ENST00000568139
  CDS Start-End: 1-918
agcggaagaggcgctcggagcggggagtggggcctagctgcagccggagcctgggagacgatgcatcactgtaagcgataccgctcccctgaaccagacccgtacctgagctaccgatggaagaggaggaggtcctacagtcgggaacatgaagggagactgcgatacccgtcccgaagggagcctcccccacgaagatctcggtccagaagcaaggacccagctgaccagcgtccccatcccccttttggcagccatgaccgcctgccctaccagaggaggtaccgggagcgccgtgacagcgatacataccggtgtgaagagcggagcccatcctttggagaggactactatggaccttcacgttctcgtcatcgtcggcgatcgcgggagagggggccataccggacccgcaagcatgcccaccactgccacaaacgccgcaccaggtcttgtagcagcgcctcctcgagaagccaacagagcagtaagcgcagcagccggagtgtggaagatgacaaggagggtcacctggtgtgccggatcggcgattggctccaagagcgatatgagattgtggggaacctgggtgaaggcacctttggcaaggtggtggagtgcttggaccatgccagagggaagtctcaggttgccctgaagatcatccgcaacgtgggcaagtaccgggaggctgcccggctagaaatcaacgtgctcaaaaaaatcaaggagaaggacaaagaaaacaagttcctgtgtgtcttgatgtctgactggttcaacttccacggtcacatgtgcatcgcctttgagctcctgggcaagaacacctttgagttcctgaaggagaataacttccagccttaccccctaccacatgtccggcacatggcctaccagctctgccacgcccttaga

SEQ ID NO: 115894 - DNA, 544 bp, Homo sapiens
  Payload ID: 2613
  Gene Symbol: CLK3
  Gene Name: CDC-like kinase 3
  ENST ID: ENST00000562670
  CDS Start-End: 109-544
aaacagaacaatgggcctcttcaggagcaaccgggaagccccagcagccccatggctggaggtggctggctgtgtgtttagcagggctctctgttcctcgtggcctagatgcatcactgtaagcgataccgctcccctgaaccagacccgtacctgagctaccgatggaagaggaggaggtcctacagtcgggaacatgaagggagactgcgatacccgtcccgaagggagcctcccccacgaagatctcggtccagaagccatgaccgcctgccctaccagaggaggtaccgggagcgccgtgacagcgatacataccggtgtgaagagcggagcccatcctttggagaggactactatggaccttcacgttctcgtcatcgtcggcgatcgcgggagagggggccataccggacccgcaagcatgcccaccactgccacaaacgccgcaccaggtcttgtagcagcgcctcctcgatgagattgtggggaacctgggtgaaggcacctttggcaaggtggtggagtgcttggaccatgccag

SEQ ID NO: 115895 - DNA, 860 bp, Homo sapiens
  Payload ID: 2613
  Gene Symbol: CLK3
  Gene Name: CDC-like kinase 3
  ENST ID: ENST00000563842
  CDS Start-End: 291-860
aggactgtctcgttccccactgggcatctgaattctagctgtcctttcctgacagggcctggcagttgagcctcagcaggtttccttctctgctggctccctgcagatggcctcctggggtgaggttgggggtgggaggcacagagcagggactgttaaaaccttctttggacacttaagaagggttcctggcattttgtggtcactgataaacactgtggcaggtagaaatcaacgtgctcaaaaaaatcaaggagaaggacaaagaaaacaagttcctgtgtgtcttgatgtctgactggttcaacttccacggtcacatgtgcatcgcctttgagctcctgggcaagaacacctttgagttcctgaaggagaataacttccagccttaccccctaccacatgtccggcacatggcctaccagctctgccacgcccttagatttctgcatgagaatcagctgacccatacagacttgaaaccagagaacatcctgtttgtgaattctgagtttgaaaccctctacaatgagcacaagagctgtgaggagaagtcagtgaagaacaccagcatccgagtggctgactttggcagtgccacatttgaccatgagcaccacaccaccattgtggccacccgtcactatcgcccgcctgaggtgatccttgagctgggctgggcacagccctgtgacgtctggagcattggctgcattctctttgagtactaccggggcttcacactcttccagacccacgaaaaccgagagcacctggtgatgatggagaagatcctagggcccatcccatcacacatgatccaccgtaccaggaagcagaaatatttctacaaagggggc

SEQ ID NO: 115896 - DNA, 833 bp, Homo sapiens
  Payload ID: 2613
  Gene Symbol: CLK3
  Gene Name: CDC-like kinase 3
  ENST ID: ENST00000569063
  CDS Start-End: 1-522
ggaagcggaagaggcgctcggagcggggagtggggcctagctgcagccggagcctgggagacgatgcatcactgtaagcgataccgctcccctgaaccagacccgtacctgagctaccgatggaagaggaggaggtcctacagtcgggaacatgaagggagactgcgatacccgtcccgaagggagcctcccccacgaagatctcggtccagaagccatgaccgcctgccctaccagaggaggtaccgggagcgccgtgacagcgatacataccggtgtgaagagcggagcccatcctttggagaggactactatggaccttcacgttctcgtcatcgtcggcgatcgcgggagagggggccataccggacccgcaagcatgcccaccactgccacaaacgccgcaccaggtcttgtagcagcgcctcctcgatgagattgtggggaacctgggtgaaggcacctttggcaaggtggtggagtgcttggaccatgccagagggaagtctcaggttgccctgaagatcatccgcaacgtgggcaagtaccgggaggctgcccggctagaaatcaacgtgctcaaaaaaatcaaggagaaggacaaagaaaacaagttcctgtgtgtcttgatgtctgactggttcaacttccacggtcacatgtgcatcgcctttgagctcctgggcaagaacacctttgagttcctgaaggagaataacttccagccttaccccctaccacatgtccggcacatggcctaccagctctgccacgcccttagatttctgcatgagaatcagctgacccatacagacttgaaaccagagaacatc

SEQ ID NO: 115897 - DNA, 572 bp, Homo sapiens
  Payload ID: 2613
  Gene Symbol: CLK3
  Gene Name: CDC-like kinase 3
  ENST ID: ENST00000562389
  CDS Start-End: 222-572
gatggtccgccccgactgcgggtttctagccctcgcgtggcgtggggacaattaggcgccacgccctgtcgcttcactgcgcgacgctcgcgaggccggggacgccactcccagaccgggcgggacgcgcacgctcacagtgaggtctcaaaagatccccacctcagttttctcatctggaaagtggggcctcgtaatcctgtccgacccggcgcgggacaatgcatcactgtaagcgataccgctcccctgaaccagacccgtacctgagctaccgatggaagaggaggaggtcctacagtcgggaacatgaagggagactgcgatacccgtcccgaagggagcctcccccacgaagatctcggtccagaagccatgaccgcctgccctaccagaggaggtaccgggagcgccgtgacagcgatacataccggtgtgaagagcggagcccatcctttggagaggactactatggaccttcacgttctcgtcatcgtcggcgatcgcgggagagggggccataccggacccgcaagcatgcccaccactgccacaaacgccgcaccaggtct

SEQ ID NO: 115898 - DNA, 10498 bp, Homo sapiens
  Payload ID: 2613
  Gene Symbol: CLK3
  Gene Name: CDC-like kinase 3
  ENST ID: ENST00000563418
  CDS Start-End: 1-211
tcttccacagacccacgaaaaccgagagcacctggtgatgatggagaagatcctagggcccatcccatcacacatgatccaccgtaccaggaagcagaaatatttctacaaagggggcctagtttgggatgagaacagctctgacggccggtatgtgaaggagaactgcaaacctctgaagaatataagctccacagaagaatggatttaaaaaaatctgttgccatatccctagcatcaggaagagtgcctgttcaacgaatatttgtggaatggaccaatgggtccccagctcttcatgtgagtagttggagagggagaagcataaggggatgggaagtagtatattactgttctaagactccttagaggcgaagcaccatccttacacacgtagtgcctttccacctgtcgccactgggtggcatgacgagaccatcaaactgctaaggagggaggaggccttcagcccagccctgcctaagtgctcacctttgaggctagacacttgttggccttgggtcttgctgaagagcgacagctcattggtgatagattccaacatcttgacaaaattgggcaggaaaaggatgacctggacatcatggttggctaggtgccttccacagctgataccctgagcccccttcacatgaggtccacacagtagagccactgtaggcctctggtgaacatttttgggattcaacctggaaaagaaggtgaagaagcagtatcagctacatacttgccaatcccttgcaccctataccagacaattgcctgtagcacctattggtctcagatctcttacccactgctcaccaagtcccaggctccagagggggacaaaatccactgcaggccaggtctatagggtggcactcctgttgtcccaaaccccaacctcacatcattgctgggtcctcccactaagtggttcacccagatcttgctccacacaacactgttgccacaacaccgctttgctgacccatgaacacttaatagttcctctgcagccttgtctgctcttcttccccaacgtgtctgcttcactccagcagggctggtctcatcctctcctgcacttgtaaggctctttcctgcttatgctcaaactacatcccctgcccagaaagcctttcactttccaaactctgaaccgccttttcttggagatccagttcaagacttacctctgctgggattactctggctcatgcctttacctctcctcaactcctaataagctcacagcaagtaccatagctctccattctcctcagtcagttgccaatggttctctttactgagcttagtagcttactgaagttaatgaaagcaatgctgcaggcattaacagtatctatttcataggatgctgtgcagattatcggatgcccagcacttagcagtgcctaacacaaagaaggtaaggtactcagtcagtgctgaccatggcggaggcagcaggccaagggttacctggcctcctaggctagcagctgccttggatgaagttgtcacttccagttttctgctattcaaagctgagactcctctagactcagagaagccacaaataaggagataaagaggattagccccagagctgtgcccaactcataggcagcacagttggctcacggggcagcaatgtagggaggagatggacggcaaggccataggtccctgcctagtggcagagcaatgatagtcacttaccggtttcccaaagggaggaagatgacaagatgttgtcaagctaagaggagcttcataactgcccccattcccaaacacattttggagaatttaacaatctactctatattccagacaccaaaccattcgccttcccatttctgcatttagaggaaatatgatgagaattgctcccttcagaggatgctgcagagttgtggaatctgactcactttgttctctaaaagggttcttcctctcagggagaacctctcccacccccaatcaaaagaagcagagcatggcattcacacacccagcggcaaggtgtagagtatatgggcactggaaatggacctatgtggattagaggcctggctggactgtgtaccagcagtatcatgtgggcaagtccctcagctctctgagccacagtgtgcttatccaaaaacacagggctattatttagctttgaggtgaagttatgaggaccacattaaattatgttgtgaaagcactgtggaacactgcatggcacctgacatacattaaacttcaagattactaaccacgggtctgatttctcaacatcagcaactgctacaaaggacaggagatggacctttggatagttcagacactaagagaaaagactggcacaaggacagccagccccaagaagctggctagagaggagtgtgatttggtaaggacattcagctcctgctccaaaactaatgtttctgggaagccacttaatggtctcaaagtgcccccaacagtggctctgggaggaggtgcaggagacaccagacacacgggcctgatgctctttcagagggcacctcacactaccccctcctgtaggcatttccctggctcttccctggcacaggagagcccaaggatctaacagctaggaagcaggcctaaatcaaagaaaaaggaaaaactaacactccaacccccaactcaaataggatgagggaggtggaaatcttacatctggcttggagtaagcctgcttgaattaagatcacttcagaatcaggagatgccttccatccaaacacattatcaggcccagagaatgaaaataggctggagtgaggagctacaggatttatctgcaatatcagttttctggcaagcactcccaaacaccatggctggaagcacaagccaaggaccaggttccattttgcaaatagggaaggggccctgtgggaagcaacatcctatcatgtgaggctttggatctgtgagtgctgctcagggaaaggaggctttccttgccccagtgaacccagatctgccctgctctttggaagtggcctccccactccagacaccactctcccacaaggttgcctacatcctcctctttaccgaaaaatccaacaggcacttgtcaactctaattttgattgatctctcagcactaccattgccggccgttccttttttcttcaaagactatttccttggttcttacacgctaccctcttggtttcttacctctcctgccttcttcttcatccttctaactgtgccttacatgccgacgttccccagaatcccaccctaggccctttctgttcacaccttctccttatatgatctcatctactcttacaccatctacaagctgacaactcctaaatctctagcatcagctaagacccttttctgaacttcagatcttttttttttttttttttttttttgagatggagtcttgctcttgttgcccaggctggagtgcagtggtgtgatctcagctcactgcaacctcctcctcccagattcaagcatttctcttgcctcagcctcctgagtagctgggactacaggcacctgccaccatgcctggctaatttttatatttttagtagagacagggtttcgccatgttggccaggctggttttgacctcctgacctcaagtgatctgcccgccttggcctcccgaagtatagggattacaggtgtgagtcactgcgcctggcctaagtttcagatccttatagctaagagactatttggatatctcacaggtattccaaactcaacacatccaaaacaaaacccaccatctctcccaaacctgctcttcttcccatgtttcctatcacagtgaatgtaaccaccatccaatcagatgtccaggctagaaaacttgaagttcactgatttctgacattatactttccattacctctaaaatccattcaattaccttgccctgctgaatttaccttaaaaacaacaacaacaacaacaacaacaacaacacccatctgtccacttctctttctaagagacaaaaaaaaaaaaaagagacagacaaagtctcactacgttgcccaggctggcctcgaactcctgggctcaagcagtcctcccactgcagcctctggagtaactgggattataggcatgcctcaccaaacctggtttgtccacttttctgatccctgcttccctagttgggccaccatcacttgggccctggctcagttttctaagttttgcagttttctacctgatctcactgccttcagtcttgcctccattgaattgactgtcctcattgtagctaaaaatcatctttttaaaacacaagactaactatgtcatagctctactgaaatgtcttcagcagctccctaccactcagctgtactgaggccctactttccagccacatagtgacttacggattgccaacaaccatgtgccatggtctctcgattctctctgcccttggcacatgctactccctgtacttagaataccttcttcttggccaggtgcaatggctcacacctgtaatcccagcactttgggaggcagaggcacgcagattacctgaggccaagagtttgggaccagcctggacaacatggcgaaaccctgtctctaccagaaacacaaaaaattagctgtgcatggtggcacatgcctgcagtctcagctacttcatgaggctgaggtgggagaattgctcaagctcaggaggtggaagttgcagtgagctgagattgtgccactgtgctccagcctgggtgacagagtgagaacctgtctcaaaaaaaaaaaaaaaaagaatgccttcttctttcttgcttgcccctgttaatcaccacttgttcgtcagggctcagcttggatgccactgctccagaagggtgactggtttctccagcctggggcaataatatggcttactggagaattttgtttcctctactacagcactatactttctagagacctcattgggctactagaggaaaggcacagtattttattcttcgtgtccccggtgtctagcagaaggtctggcacctggtatcagtctgtctacaaataaaataaggcactgcccttgatatatgagcataaggggcaggtgggaaggtgccaaactccagctcccctactcagttgtcagtgtggttctggaagctctcaggtatggagactgatttgcatcccagccacgtaaagtaaatgatgagtgccaaaggccaggtctccgaaggttcctagaaggaaggcttctgatagttagcaggagtctcaggcccgatggctgctatcaggagagagtcaaaaggcagcttgccagaagaataatgaggacatctaggagatgggtctgaggaggggcaaagaaacctcacagcatccaggaaagtgacttcagagagacactcccatcagatgagcagaaactgcctaatgaactcgtatgtgtgtatgggaggcactgtggtggtggccaggcagagcatccttactccacattgagtccctgccagtttatagacatttacctgttaggtcctccgaggagggtcagtgccatctgactggcacacacacctgtcatctccagtctccgctcaagggtcagcccatgcttctcagccacggacaacagctttttatgcagctcataggaaatacttgggacaaccaggccagagtctgcagttcaaaaggagaagagaaagggaaagtgactacagaaaccaagtccaaaccgggtatactctatccaagattctgcaaatgccaacattttaccatggatcacccctggcccatcctcttcatcttccgggactaaggcacgctctgcagctctgcagagctcaagtagtgactggtgaaccaagtaacaacttgttccaggtcaccacagagtggggacaaacttaagctcccttagcaatttagctttagaccacaaaggccaaatctaccaggatatatttagtgctatcgagaccagcacacagcctgtaacagcaacctatcaggcacatgagaagagaacatgattttcccaaagtgggggaaatgccatcttgggcagcggggcttcctcacaagcaggccccttgtccttcctgagaagtggaacagacactagctaaccctaatggccctctggtccctgctgttctcctcaactgtagggcaggaggacttgttccatctgcttccctcttcctcttccttctctcttctatttaccccttcctttttgattaagaaacttagctagcaaagttgttttctcaaataatttatcattttctccccatctgagttgggtgtaacccagtactcacgaaacagggaagcagtacaagttaagtaagctatggctggctttaaaaaagggtaacttttataaaagttggggagaattagtcactgaaagtacactgtggaaaatacttggtttttcaaggctcaaagccaacatctacagcagctggtgtatgtgaagaagtctatagtattattatatgcaccagtgtcaacataccaggaaagaaacagcaaacccaaaaatttggatctgcaatggacagctcttaccttgacaaccaaggtattgctccctccaagaagccaatgccatcttacaaatgccaaagccactgggctaaccagcagaccctttcccaaagagccccacttggcttcaccggccagtggaccaaccaacgcagattccaatcagcaagccactgtgggactgcacgtcactcactttgtccagctagatcaggtacctttttagatcctgtgtcctcaattatactggactgtcaactgcctgaggtaaggaaattaatcttttacttcttcagccttcgccttctcaacttgttccagctacacttatcaacggagttgagttcttatcaggtcctcagacatataaatgatgcaaacctagtgccatttctggtctggcctaactctaaggtagaagagttagggaataaaagttaataaaagttttcagtacatttatctccttccattgttccagagccttgtctagaaaaatctgttttcttcactggtcctgtcgggagaaatctcttgaggttatctatcaggtccagtcctacctgcatattcctaaagccacagagaatgaggctatagcttcatgttttaacaacaggaaaccaagcacaaagactgaaactataggacccaggtctgtatcctctcagggaaggcagaataacaatgtcatgtaatgatgatgataaaaaaggtctaacgtatcaaataaacactaacactatcctgttggctaactgagcccctctacctgcccaagtcctattcctgggctggggagaggcaacaaacagtgccattaggagcactgagtctctcctcccacctctttctgaaatgtcagtcattggtatctcaggtgccagtgctggaggctgcagactgaccttgcatgtcaacagctgattaaaacagccatttttatggcctgcttcagacacgcacatattatcagaactaattaggctgaacaattttcaaaagtcctaagccacgaacaactcaaacctgtcagacaagtcatgcacctgactacttcaaacaccctctttacctgcagagtcacgcaaggcagagctttcactcgtctatgcatttcttcacctatttatcaggactctttctgttagatttgaaatgggtcagggcagtgagtcttgggcctgctactccacaaatcaagcattctttctaggtctggctcttgtgctacgtgtacaggcaggcagcccctcccctgccccctcattctgagggctctctgggagcaggcagaagcattttctgctagctgtgccctcacagtccttaagagtacaaaacttaatggtacaggagaggagacatcaccccccaccggctggctagatgctgctgctggaagctgtgagtctcttaccacctcctcactgatctttgttgggggaaggggcactgttggtgaatcagcatatttttgcagcctagagaaagacaaagccaagagcctttctgctcagagtctggcagttatggggtctagaactctactctgactgttcctctgaaaggaacgtacaaacaccacaaaatgttccttttaaacatttatacacgtaagtccaacaagttggactggcttatcagaaacagaccaagggaataaaataaattccaaaggaaaggaaccaagaacatagcgtgtaaattgcaaacaacaacactgccactgccaaagcctgaacatgggccaagtctaattatgtttgagttggaaggtagatctttattgttcgggaatcaaggcagtaaaatcagttggtagggtttctttgagcattaatatgtattttacagctgctggtgaaacaagaaagggagagataattataaccagatcgtgacaagcagagaacttcttaggatctgattgaccttagggtatcaaggaagacaacaagtacactcagtacaggccaggaaagaaaactcctccttgcacacctgatttccactgcatgaggctgaggctgtctcttcggaccatgggacgcagtggtccagcagtgcccgtgccggctgcagtctgccccttgtcaggtcatcactttggcactgctcattccagcacacagcatttcaggcctttccctcccttatggacacatatatgcgtccccactccccctgacacagacacccttcagtagtaccatgtccaaggttcctctctccttcagacctgcccagtctttctgttgtgtaacaaagatcccacaacaaagtgttatctcagatctaactcaatcctctcactgattggccctttaattggaaaggctgcatgtgtcccaagtcttatcaataaggagcacagctcatttacaggcatgggatttctccaggactatgacttctgattctcttctgtggcagtcaacaaaactgagtgctgatgtcacactggttcctttagggatataaatccactggtaaatttataccccctgaccagcaatgtacagagtccctggagatctacactaaagctaccacaaactggtagtaatgcaatttagtgtcaagtgttctctgaaggaaggatttgttataagaaacctaactacacattcacgatactctttattatgacccacaagacctgctgtgatctggcctgtctacctcactacctttacctggtacccaacatgtaccccagaccccttggccaccttctggttcctaaattctccaagttccttctggcctcaagagacagttcgcttcacatgctttctccatcccaacactttattctctcttctggggctctattctctcttccaatgctacccctacacagcgggctcctcatctgtcaggtgtcagcacgctgcttacttcccttcattgcattcaatacatctgactccactcttaagtggtagttgaacaatgagaacacatggacacagggaggggaacatcacacaccggggcctgtcagggtgtgggggagggatagcattaggagaaatacctaatgtagatgacgggttgttgggtgcagcaaaccaccatggcacgtgtgtatacctatgtaacaaacctgcacattctgcacatgtatctcagaacttaaagtgtacatatatatatatatatatataaataaatctgactccccacctcttcccttccccacttacaactagaccagccccatgtccacagtggacctcattccttcatactaaagctccactggaacaagctttgaactttaagaggcaaagaactgctcaacaaaaacctactaattatgaagggaaaaattatctttacgaggaagaaatctggtggtcaacaccttaccaagtggtcaaacagccccagtgatgggacaaggggatacaatgtactccctgatgtgacgtactccctgatgtgacgtactccctgatgtgacgccttgagaaagacacagccctaccaaaatcctagaaaacatgtttaacatgaatcagatcaaaaggaaacaaacaatacatcaaaactaagacattctgcaaatcaattggcctagattcttcactaatatcagtatcacaaaggacaacaaaagttgtaggaactgttctagtttaaaggaaacagaagagatatgacagctgaatgtaatgtgcaatggatgattaaaaatacagctataaaggatattactgggataattgggaagttttgcatacggagtatattagatagtatttttgtaataatttaaattttgctgagagcaatcttgtagtgtggttgtgtagagcaatatatatcacactgaatttatgtgctgtggaagtatttagggatgaaatctaatgatgagtacaactaaatctcaaatggttca

SEQ ID NO: 115899 - DNA, 526 bp, Homo sapiens
  Payload ID: 2613
  Gene Symbol: CLK3
  Gene Name: CDC-like kinase 3
  ENST ID: ENST00000563297
  CDS Start-End: 470-526
aagaggcgctcggagcggggagtggggcctagctgcagccggagcctgggagacgccatgaccgcctgccctaccagaggaggtaccgggagcgccgtgacagcgatacataccggtgtgaagagcggagcccatcctttggagaggactactatggaccttcacgttctcgtcatcgtcggcgatcgcgggagagggggccataccggacccgcaagcatgcccaccactgccacaaacgccgcaccaggtcttgtagcagcgcctcctcgatgagattgtggggaacctgggtgaaggcacctttggcaaggtggtggagtgcttggaccatgccagagggaagtctcaggttgccctgaagatcatccgcaacgtgggcaagtaccgggaggctgcccggctagaaatcaacgtgctcaaaaaaatcaaggagaaggacaaagaaaacaagttcctgtgtgtcttgatgtctgactggttcaacttccacggtcacatgtgcatcgcctttgagctcctgggc

SEQ ID NO: 115900 - DNA, 732 bp, Homo sapiens
  Payload ID: 2613
  Gene Symbol: CLK3
  Gene Name: CDC-like kinase 3
  ENST ID: ENST00000566126
  CDS Start-End: 59-732
ggagacggtaagtgtgggctggggtccgcggcggcgacagcggcggcggcggccggggatgcatcactgtaagcgataccgctcccctgaaccagacccgtacctgagctaccgatggaagaggaggaggtcctacagtcgggaacatgaagggagactgcgatacccgtcccgaagggagcctcccccacgaagatctcggtccagaagccatgaccgcctgccctaccagaggaggtaccgggagcgccgtgacagcgatacataccggtgtgaagagcggagcccatcctttggagaggactactatggaccttcacgttctcgtcatcgtcggcgatcgcgggagagggggccataccggacccgcaagcatgcccaccactgccacaaacgccgcaccaggtcttgtagcagcgcctcctcgagaagccaacagagcagtaagcgcagcagccggagtgtggaagatgacaaggagggtcacctggtgtgccggatcggcgattggctccaagagcgatatgagattgtggggaacctgggtgaaggcacctttggcaaggtggtggagtgcttggaccatgccagagggaagtctcaggttgccctgaagatcatccgcaacgtgggcaagtaccgggaggctgcccggctagaaatcaacgtgctcaaaaaaatcaaggagaaggacaaagaaaacaagttcctgtgtgtcttgatgtctgactg

SEQ ID NO: 115901 - DNA, 481 bp, Homo sapiens
  Payload ID: 2613
  Gene Symbol: CLK3
  Gene Name: CDC-like kinase 3
  ENST ID: ENST00000568488
  CDS Start-End: 1-481
ggagcggggagtggggcctagctgcagccggagcctgggagacgatgcatcactgtaagcgataccgctcccctgaaccagacccgtacctgagctaccgatggaagaggaggaggtcctacagtcgggaacatgaagggagactgcgatacccgtcccgaagggagcctcccccacgaagatctcggtccagaagccatgaccgcctgccctaccagaggaggtaccgggagcgccgtgacagcgatacataccggtgtgaagagcggagcccatcctttggagaggactactatggaccttcacgttctcgtcatcgtcggcgatcgcgggagagggggccataccggacccgcaagcatgcccaccactgccacaaacgccgcaccaggtcttgtagcagcgcctcctcgagggaagtctcaggttgccctgaagatcatccgcaacgtgggcaagtaccgggaggctgcccggctag

SEQ ID NO: 115902 - DNA, 805 bp, Homo sapiens
  Payload ID: 2613
  Gene Symbol: CLK3
  Gene Name: CDC-like kinase 3
  ENST ID: ENST00000564096
  CDS Start-End: 89-805
tcaggagcaaccgggaagccccagcagccccatggctggaggtggctggctgtgtgtttagcagggctctctgttcctcgtggcctagatgcatcactgtaagcgataccgctcccctgaaccagacccgtacctgagctaccgatggaagaggaggaggtcctacagtcgggaacatgaagggagactgcgatacccgtcccgaagggagcctcccccacgaagatctcggtccagaagccatgaccgcctgccctaccagaggaggtaccgggagcgccgtgacagcgatacataccggtgtgaagagcggagcccatcctttggagaggactactatggaccttcacgttctcgtcatcgtcggcgatcgcgggagagggggccataccggacccgcaagcatgcccaccactgccacaaacgccgcaccaggtcttgtagcagcgcctcctcgagaagccaacagagcagtaagcgcagcagccggagtgtggaagatgacaaggagggtcacctggtgtgccggatcggcgattggctccaagagcgatatgagattgtggggaacctgggtgaaggcacctttggcaaggtggtggagtgcttggaccatgccagagggaagtctcaggttgccctgaagatcatccgcaacgtgggcaagtaccgggaggctgcccggctagaaatcaacgtgctcaaaaaaatcaaggagaaggacaaagaaaacaagttcctgtgtgtcttgatgtctgactggttcaacttccacggtcacatgtgcatcgcctttgagctcctg

SEQ ID NO: 115903 - DNA, 2568 bp, Homo sapiens
  Payload ID: 2614
  Gene Symbol: CLK4
  Gene Name: CDC-like kinase 4
  Uniprot ID: Q9HAZ1
  ENST ID: ENST00000316308
  CDS Start-End: 170-1615
ctgtcacgcaggcgcgttcgcgcggcgtaggtggtgctagaggcgactcgggggattctagggcgacggcgctgccgccattttgtggggtgtttgtcgcagcggccgaggagggaagacggcagtttggcgacatttctcggccgaagggccatttgcttttgcggagatgcggcattccaaaagaactcactgtcctgattgggatagcagagaaagctggggacatgaaagctatcgtggaagtcacaagcggaagaggagatctcatagtagcacacaagagaacaggcattgtaaaccacatcaccagtttaaagaatctgattgtcattatttagaagcaaggtccttgaatgagcgagattatcgggaccggagatacgttgacgaatacaggaatgactactgtgaaggatatgttcctagacattatcacagagacattgaaagcgggtatcgaatccactgcagtaaatcttcagtccgcagcaggagaagcagtcctaaaaggaagcgcaatagacactgttcaagtcatcagtcacgttcgaagagccaccgaaggaaaagatccaggagtatagaggatgatgaggagggtcacctgatctgtcaaagtggagacgttctaagagcaagatatgaaatcgtggacactttgggtgaaggagcctttggcaaagttgtagagtgcattgatcatggcatggatggcatgcatgtagcagtgaaaatcgtaaaaaatgtaggccgttaccgtgaagcagctcgttcagaaatccaagtattagagcacttaaatagtactgatcccaatagtgtcttccgatgtgtccagatgctagaatggtttgatcatcatggtcatgtttgtattgtgtttgaactactgggacttagtacttacgatttcattaaagaaaacagctttctgccatttcaaattgaccacatcaggcagatggcgtatcagatctgccagtcaataaattttttacatcataataaattaacccatacagatctgaagcctgaaaatattttgtttgtgaagtctgactatgtagtcaaatataattctaaaatgaaacgtgatgaacgcacactgaaaaacacagatatcaaagttgttgactttggaagtgcaacgtatgatgatgaacatcacagtactttggtgtctacccggcactacagagctcccgaggtcattttggctttaggttggtctcagccttgtgatgtttggagcataggttgcattcttattgaatattaccttggtttcacagtctttcagactcatgatagtaaagagcacctggcaatgatggaacgaatattaggacccataccacaacacatgattcagaaaacaagaaaacgcaagtattttcaccataaccagctagattgggatgaacacagttctgctggtagatatgttaggagacgctgcaaaccgttgaaggaatttatgctttgtcatgatgaagaacatgagaaactgtttgacctggttcgaagaatgttagaatatgatccaactcaaagaattaccttggatgaagcattgcagcatcctttctttgacttattaaaaaagaaatgaaatgggaatcagtggtcttactatatacttctctagaagagattacttaagactgtgtcagtcaactaaacattctaatatttttgtaaacattaaattattttgtacagttaagtgtaaatattgtatgttttgtatcaatagcataattaacttgttaagcaagtatggtcttgataatgcattagaaaaattaaaattaatttttctttttgaaattaccatttttaaatacctttgaaatatcctttgtgtccagtgataaatgtgattgatcttgccttttgtacatggaggtcacctctgaagtgattttttttgagtaaaaggaaatcttgactactttatattcttaaaggaatattctttatatacttcaaatttagaacttaactttaaaagtttttcttctgtaattgttgaacgggtgattattattaactctagataagcaggtactagaaaccaaaactcagaaaatgtttactgttagaattctattaaattttaagtgttgtattctttttcattgggtgatgtcagggtgataaccagacattcatggaaaggcatgcagtttgtccattgtgacagtttgtttaataaaaccacatacacactttatttaagattaaaatctaactggaaagtcagcttggaaaatggacatttccaagtatgtttggtgagtcacagatataaaaatagaaattctgatgagaggtttcagtttttaataccaagtccttaggagtcttaacattggccagcatctgtttatcaaatgacataaatacgtaaacctataagaattaagtttattaattaggcaatttatgtctgtgataattcttacgggagaaagaggatttgattggaaagcagtttgggaagaaagtgctgctgaaatttccagaatttaattgattggttacataaactttttgacttca

SEQ ID NO: 115904 - DNA, 2780 bp, Homo sapiens
  Payload ID: 2614
  Gene Symbol: CLK4
  Gene Name: CDC-like kinase 4
  ENST ID: ENST00000521621
  CDS Start-End: 85-246
tggggtgtttgtcgcagcggccgaggagggaagacggcagtttggcgacatttctcggccgaagggccatttgcttttgcggagatgcggcattccaaaagaactcactgtcctgattgggatagcagagaaagctggggacatgaaagctatcgtggaagtcacaagcggaagaggagatctcatagtagcacacaagagaacaggcattgtaaaccacatcaccagtttaaagaatctgattgatgttccattgggactgtttaccagattgctttctaaattagccagctggggttactttaaaaaacagacctgtgtggatataaaaacgaatgcccttaccctcatccgtcttggctatttgaaaggctatagtgaaatattcactgggcattcagtggatattttaaaaaattaaatcagtctgttcatcctgtctaccctgtccatagcctgtgtaattctgtagactttgtttatataatctctcagccttggtcattggccattatctattgaagagactctcatccttttagtttgtcctcatggtgttcactccatgttttgttactctatacgttgtttatggcttagcagctctaattccatgcagtattccagctaaagattgttagtgctagttttttctaatagaaggattttggacttttatgggaaggatgcccttaagagtatggtcacgtctagcttattgtattggtgatctctccctgacagttccaagccaactgatcagatatctgacctagactacccacagtcttacccaaatatcctgagttgtttctccaataaatacaacttaaagctgatgctagggaaagagaaccgggtttctgtatctccccagcctggatttgatgctagccctattgggtagtagttgtaaagatgcttctatttctgcctaaaccagccccctgggaaaaagaatgacagcatattctggggaaaggaaaggggttggtgagggcaatctagtcaacatccgtcactccattgcttgttaggcttattttagccgatgtgtctgactgggcaggtgtcccctctctccctcagtgctccatgtgcatccctcttgaagcttcgcactctgttgaagaggacactcatcccagtcattatttagaagcaaggtccttgaatgagcgagattatcgggaccggagatacgttgacgaatacaggaatgactactgtgaaggatatgttcctagacattatcacagagacattgaaagcgggtatcgaatccactgcagtaaatcttcagtccgcagcaggagaagcagtcctaaaaggaagcgcaatagacactgttcaagtcatcagtcacgttcgaagagccaccgaaggaaaagatccaggagtatagaggatgatgaggagggtcacctgatctgtcaaagtggagacgttctaagagcaagatatgaaatcgtggacactttgggtgaaggagcctttggcaaagttgtagagtgcattgatcatggcatggatggcatgcatgtagcagtgaaaatcgtaaaaaatgtaggccgttaccgtgaagcagctcgttcagaaatccaagtattagagcacttaaatagtactgatcccaatagtgtcttccgatgtgtccagatgctagaatggtttgatcatcatggtcatgtttgtattgtgtttgaactactgggacttagtacttacgatttcattaaagaaaacagctttctgccatttcaaattgaccacatcaggcagatggcgtatcagatctgccagtcaataaattttttacatcataataaattaacccatacagatctgaagcctgaaaatattttgtttgtgaagtctgactatgtagtcaaatataattctaaaatgaaacgtgatgaacgcacactgaaaaacacagatatcaaagttgttgactttggaagtgcaacgtatgatgatgaacatcacagtactttggtgtctacccggcactacagagctcccgaggtcattttggctttaggttggtctcagccttgtgatgtttggagcataggttgcattcttattgaatattaccttggtttcacagtctttcagactcatgatagtaaagagcacctggcaatgatggaacgaatattaggacccataccacaacacatgattcagaaaacaagaaaacgcaagtattttcaccataaccagctagattgggatgaacacagttctgctggtagatatgttaggagacgctgcaaaccgttgaaggaatttatgctttgtcatgatgaagaacatgagaaactgtttgacctggttcgaagaatgttagaatatgatccaactcaaagaattaccttggatgaagcattgcagcatcctttctttgacttattaaaaaagaaatgaaatgggaatcagtggtcttactatatacttctctagaagagattacttaagactgtgtcagtcaactaaacattctaatatttttgtaaacattaaattattttgtacagttaagtgtaaatattgtatgttttgtatcaatagcataattaacttgttaagcaagtatggtcttgataatgcattagaaaaattaaaattaatttttctttttgaaattaccatttttaaatacctttgaaatatcctttgtgtccagtgataaatgtgattgatcttgccttttgtacatggaggtcacctctgaagtgattttttttgagtaaaaggaaatcttgactacttta

SEQ ID NO: 115905 - DNA, 1955 bp, Homo sapiens
  Payload ID: 2614
  Gene Symbol: CLK4
  Gene Name: CDC-like kinase 4
  ENST ID: ENST00000522136
  CDS Start-End: 111-542
agggcgacggcgctgccgccattttgtggggtgtttgtcgcagcggccgaggagggaagacggcagtttggcgacatttctcggccgaagggccatttgcttttgcggagatgcggcattccaaaagaactcactgtcctgattgggatagcagagaaagctggggacatgaaagctatcgtggaagtcacaagcggaagaggagatctcatagtagcacacaagagaacaggcattgtaaaccacatcaccagtttaaagaatctgattgtcattatttagaagcaaggtccttgaatgagcgagattatcgggaccggagatacgttgacgaatacaggaatgactactgtgaaggatatgttcctagacattatcacagagacattgaaagcgggtatcgaatccactgcagtaaatcttcagtccgcagcaggagaagcagtcctaaaaggaagcgcaatagacactgttcaagtcatcagtcacgttcgatgaaatcgtggacactttgggtgaaggagcctttggcaaagttgtagagtgcattgatcatggcatggatggcatgcatgtagcagtgaaaatcgtaaaaaatgtaggccgttaccgtgaagcagctcgttcagaaatccaagtattagagcacttaaatagtactgatcccaatagtgtcttccgatgtgtccagatgctagaatggtttgatcatcatggtcatgtttgtattgtgtttgaactactgggacttagtacttacgatttcattaaagaaaacagctttctgccatttcaaattgaccacatcaggcagatggcgtatcagatctgccagtcaataaattttttacatcataataaattaacccatacagatctgaagcctgaaaatattttgtttgtgaagtctgactatgtagtcaaatataattctaaaatgaaacgtgatgaacgcacactgaaaaacacagatatcaaagttgttgactttggaagtgcaacgtatgatgatgaacatcacagtactttggtgtctacccggcactacagagctcccgaggtcattttggctttaggttggtctcagccttgtgatgtttggagcataggttgcattcttattgaatattaccttggtttcacagtctttcagaagtttgccaacctctgctctagaagcataccattccagctactcatgatagtaaagagcacctggcaatgatggaacgaatattaggacccataccacaacacatgattcagaaaacaagaaaacgcaagtattttcaccataaccagctagattgggatgaacacagttctgctggtagatatgttaggagacgctgcaaaccgttgaaggaatttatgctttgtcatgatgaagaacatgagaaactgtttgacctggttcgaagaatgttagaatatgatccaactcaaagaattaccttggatgaagcattgcagcatcctttctttgacttattaaaaaagaaatgaaatgggaatcagtggtcttactatatacttctctagaagagattacttaagactgtgtcagtcaactaaacattctaatatttttgtaaacattaaattattttgtacagttaagtgtaaatattgtatgttttgtatcaatagcataattaacttgttaagcaagtatggtcttgataatgcattagaaaaattaaaattaatttttctttttgaaattaccatttttaaatacctttgaaatatcctttgtgtccagtgataaatgtgattgatcttgccttttgtacatggaggtcacctctgaagtgattttttttgagtaaaaggaaatcttgactactttatattcttaaaggaatattctttatatacttcaaatttagaacttaactttaaaagtttttcttctgtaattgttgaacgggtgattattattaactctagat

SEQ ID NO: 115906 - DNA, 1249 bp, Homo sapiens
  Payload ID: 2614
  Gene Symbol: CLK4
  Gene Name: CDC-like kinase 4
  ENST ID: ENST00000522556
  CDS Start-End: 168-437
gtcacgcaggcgcgttcgcgcggcgtaggtggtgctagaggcgactcgggggattctagggcgacggcgctgccgccattttgtggggtgtttgtcgcagcggccgaggagggaagacggcagtttggcgacatttctcggccgaagggccatttgcttttgcggagatgcggcattccaaaagaactcactgtcctgattgggatagcagagaaagctggggacatgaaagctatcgtggaagtcacaagcggaagaggagatctcatagtagcacacaagagaacaggcattgtaaaccacatcaccagtttaaagaatctgattggacctgtgtggatataaaaacgaatgcccttaccctcatccgtcttggctatttgaaaggctatagtgaaatattcactgggcattcagtggatattttaaaaaattaaatcagtctgttcatcctgtctaccctgtccatagcctgtgtaattctgtagactttgtttatataatctctcagccttggtcattggccattatctattgaagagactctcatccttttagtttgtcctcatggtgttcactccatgttttgttactctatacgttgtttatggcttagcagctctaattccatgcagtattccagctaaagattgttagtgctagttttttctaatagaaggattttggacttttatgggaaggatgcccttaagagtatggtcacgtctagcttattgtattggtgatctctccctgacagttccaagccaactgatcagatatctgacctagactacccacagtcttacccaaatatcctgagttgtttctccaataaatacaacttaaagctgatgctagggaaagagaaccgggtttctgtatctccccagcctggatttgatgctagccctattgggtagtagttgtaaagatgcttctatttctgcctaaaccagccccctgggaaaaagaatgacagcatattctggggaaaggaaaggggttggtgagggcaatctagtcaacatccgtcactccattgcttgttaggcttattttagccgatgtgtctgactgggcaggtgtcccctctctccctcagtgctccatgtgcatccctcttgaagcttcgcactctgttgaagaggacactcatcccagtcattatttagaagcaaggtccttgaatgagcgagattatcgggaccggagatacgttgacgaatacaggaatgactactgtgaa

SEQ ID NO: 115907 - DNA, 1690 bp, Homo sapiens
  Payload ID: 2614
  Gene Symbol: CLK4
  Gene Name: CDC-like kinase 4
  ENST ID: ENST00000520957
  CDS Start-End: 86-250
gtggggtgtttgtcgcagcggccgaggagggaagacggcagtttggcgacatttctcggccgaagggccatttgcttttgcggagatgcggcattccaaaagaactcactgtcctgattgggatagcagagaaagctggggacatgaaagctatcgtggaagtcacaagcggaagaggagatctcatagtagcacacaagagaacaggcattgtaaaccacatcaccagtttaaagaatctgattggtaaattaactcttgaactactagcattttagctctaatagttttaaatgatttgtcatttgcttatatagctttcatctgtcaaattgttttataattcagtcaacaaatattcgtttagaaaatatttgagtacttattttagataggcgctgaggctacagctgtaaataaaacaaagttcttatccttatgtatgtctgtctgcctgggagtggtaggagacagttgatcagtaagtgaatgtgaaatgtattaaataacatggtgagtcccaactgccagtaacgtgattagggagatgacacacaaaaagttaagtaatagtgatagaatgcccaatgagtacctttaacttgtatgtaggagggagatgggtatgttgtagtgctcattgtttcagaaataaggtagggttttataggggaggagttattccaacagagaaaagcagcatgtattattagtcacttataccatgtcgtacaggttatatttgtagatgaggccaagggatatgtttgggatttttagaagctggctttatttaagaactattcttttgcataggtagtagctagtaatttgggaaatggcctcaataaaaacttgcaacagcatgtgtgctgttttattgtattcttaccagtgtacaatttggaggtaatatatttatatagaattaaaggaatcttaaagttctaaatgattaaagaaaggctaggtaagttttcactctttcattaatttccctttttcgtttgttttgttggttctgttttctcgttttgtgcagatgttccattgggactgtttaccagattgctttctaaattagccagctggggttactttaaaaaacagtatgtaatttctttccttctccacgttaacagacttgttctgccaaacagcttatttgtagtcagtgcagacaaatcatgcttcatacgcattgttatataaggggaagggggaaggtttatgacaggatttcagagaccagagataattaataattaatgtacagtacactaaaaaaaaccatctgtaccccactattaataaatacaaaaaaccctaaggcttaacgtcatagtactggttattcataggataattatacgttgtatatatagaaaggaagtgatatgagtgatgaacagttcatttgtgctcatagttaactacgtaaacatgatactgagtccagttaaccaccaggccagtgcctgctttgatatttgtaccagatgtgtttggtggtcagcgtttaccatgatccagaatattctaatttttgaaggtcaaaaactttgagtgtttttataaaataacaaaaaactgaaaaatgcagaaaagtataaagatggtaatctctgtaggaaattagtccccattatttagctgtaaaattataattaaaaaaaaaatctttgtttct

SEQ ID NO: 115908 - DNA, 1206 bp, Homo sapiens
  Payload ID: 2614
  Gene Symbol: CLK4
  Gene Name: CDC-like kinase 4
  ENST ID: ENST00000611575
  CDS Start-End: 57-1178
ggaagacggcagtttggcgacatttctcggccgaagggccatttgcttttgcggagatgcggcattccaaaagaactcactgtcctgattgggatagcagagaaagctggggacatgaaagctatcgtggaagtcacaagcggaagaggagatctcatagtagcacacaagagaacaggcattgtaaaccacatcaccagtttaaagaatctgattgtcattatttagaagcaaggtccttgaatgagcgagattatcgggaccggagatacgttgacgaatacaggaatgactactgtgaaggatatgttcctagacattatcacagagacattgaaagcgggtatcgaatccactgcagtaaatcttcagtccgcagcaggagaagcagtcctaaaaggaagcgcaatagacactgttcaagtcatcagtcacgttcgaagagccaccgaaggaaaagatccaggagtatagaggatgatgaggagggtcacctgatctgtcaaagtggagacgttctaagagcaagatatgaaatcgtggacactttgggtgaaggagcctttggcaaagttgtagagtgcattgatcatggcatggatggcatgcatgtagcagtgaaaatcgtaaaaaatgtaggccgttaccgtgaagcagctcgttcagaaatccaagtattagagcacttaaatagtactgatcccaatagtgtcttccgatgtgtccagatgctagaatggtttgatcatcatggtcatgtttgtattgtgtttgaactactgggacttagtacttacgatttcattaaagaaaacagctttctgccatttcaaattgaccacatcaggcagatggcgtatcagatctgccagtcaataaattttttacatcataataaattaacccatacagatctgaagcctgaaaatattttgtttgtgaagtctgactatgtagtcaaatataattctaaaatgaaacgtgatgaacacagttctgctggtagatatgttaggagacgctgcaaaccgttgaaggaatttatgctttgtcatgatgaagaacatgagaaactgtttgacctggttcgaagaatgttagaatatgatccaactcaaagaattaccttggatgaagcattgcagcatcctttctttgacttattaaaaaagaaatgaaatgggaatcagtggtcttactatatac

SEQ ID NO: 115909 - DNA, 2182 bp, Homo sapiens
  Payload ID: 2614
  Gene Symbol: CLK4
  Gene Name: CDC-like kinase 4
  ENST ID: ENST00000611733
  CDS Start-End: 109-1230
ggcgacggcgctgccgccattttgtggggtgtttgtcgcagcggccgaggagggaagacggcagtttggcgacatttctcggccgaagggccatttgcttttgcggagatgcggcattccaaaagaactcactgtcctgattgggatagcagagaaagctggggacatgaaagctatcgtggaagtcacaagcggaagaggagatctcatagtagcacacaagagaacaggcattgtaaaccacatcaccagtttaaagaatctgattgtcattatttagaagcaaggtccttgaatgagcgagattatcgggaccggagatacgttgacgaatacaggaatgactactgtgaaggatatgttcctagacattatcacagagacattgaaagcgggtatcgaatccactgcagtaaatcttcagtccgcagcaggagaagcagtcctaaaaggaagcgcaatagacactgttcaagtcatcagtcacgttcgaagagccaccgaaggaaaagatccaggagtatagaggatgatgaggagggtcacctgatctgtcaaagtggagacgttctaagagcaagatatgaaatcgtggacactttgggtgaaggagcctttggcaaagttgtagagtgcattgatcatggcatggatggcatgcatgtagcagtgaaaatcgtaaaaaatgtaggccgttaccgtgaagcagctcgttcagaaatccaagtattagagcacttaaatagtactgatcccaatagtgtcttccgatgtgtccagatgctagaatggtttgatcatcatggtcatgtttgtattgtgtttgaactactgggacttagtacttacgatttcattaaagaaaacagctttctgccatttcaaattgaccacatcaggcagatggcgtatcagatctgccagtcaataaattttttacatcataataaattaacccatacagatctgaagcctgaaaatattttgtttgtgaagtctgactatgtagtcaaatataattctaaaatgaaaacggatgaacacagttctgctggtagatatgttaggagacgctgcaaaccgttgaaggaatttatgctttgtcatgatgaagaacatgagaaactgtttgacctggttcgaagaatgttagaatatgatccaactcaaagaattaccttggatgaagcattgcagcatcctttctttgacttattaaaaaagaaatgaaatgggaatcagtggtcttactatatacttctctagaagagattacttaagactgtgtcagtcaactaaacattctaatatttttgtaaacattaaattattttgtacagttaagtgtaaatattgtatgttttgtatcaatagcataattaacttgttaagcaagtatggtcttgataatgcattagaaaaattaaaattaatttttctttttgaaattaccatttttaaatacctttgaaatatcctttgtgtccagtgataaatgtgattgatcttgccttttgtacatggaggtcacctctgaagtgattttttttgagtaaaaggaaatcttgactactttatattcttaaaggaatattctttatatacttcaaatttagaacttaactttaaaagtttttcttctgtaattgttgaacgggtgattattattaactctagataagcaggtactagaaaccaaaactcagaaaatgtttactgttagaattctattaaattttaagtgttgtattctttttcattgggtgatgtcagggtgataaccagacattcatggaaaggcatgcagtttgtccattgtgacagtttgtttaataaaaccacatacacactttatttaagattaaaatctaactggaaagtcagcttggaaaatggacatttccaagtatgtttggtgagtcacagatataaaaatagaaattctgatgagaggtttcagtttttaataccaagtccttaggagtcttaacattggccagcatctgtttatcaaatgacataaatacgtaaacctataagaattaagtttattaattaggcaatttatgtctgtgataattcttacgggagaaagaggatttgattggaaagcagtttgggaagaaagtgctgctgaaatttccagaatttaattgattggttacataaactttttgacttc

SEQ ID NO: 115910 - DNA, 2479 bp, Homo sapiens
  Payload ID: 2615
  Gene Symbol: CISD1
  Gene Name: CDGSH iron sulfur domain 1
  Uniprot ID: Q9NZ45
  ENST ID: ENST00000333926
  CDS Start-End: 217-543
ggagtccagacttccttatggccaggacagctccacgcatgctcagcacctaccagggtcgagctcacacacgtgcctacgacccgccgcggcgcctgcgcggtagcatcgcggagtcggtgctttagtacgccgctggcacctttactctcgccggccgcgcgaacccgtttgagctcggtatcctagtgcacacgccttgcaagcgacggcgccatgagtctgacttccagttccagcgtacgagttgaatggatcgcagcagttaccattgctgctgggacagctgcaattggttatctagcttacaaaagattttatgttaaagatcatcgaaataaagctatgataaaccttcacatccagaaagacaaccccaagatagtacatgcttttgacatggaggatttgggagataaagctgtgtactgccgttgttggaggtccaaaaagttcccattctgtgatggggctcacacaaaacataacgaagagactggagacaatgtgggccctctgatcatcaagaaaaaagaaacttaaatggacacttttgatgctgcaaatcagcttgtcgtgaagttacctgattgtttaattagaatgactaccacctctgtctgattcaccttcgctggattctaaatgtggtatattgcaaactgcagctttcacatttatggcatttgtcttgttgaaacatcgtggtgcacatttgtttaaacaaaaaaaaaaaaaaaaaggaaaaaccaacctgcatggcctgtgggttattttggtcttgtaaggatccatttctttaaaatactgacatatagagttgtaccttatatagaatatagttgtatcttgaagtcaacatattaaattattctcaaaattatgtatttgcagattgtacttgtaagtttcaaagaaaaattaccatcttttcatattgacctggaaactaaataggatgtgattcagctacattaatttcttaatacaatctaggaaagacctgttgtagccttgattttcttgacattggtaatgacactgagaaaatatggcttctgtttttcaccgttttcaatcaaaatgattgataaatgttattctgtttaatttcataagtcaggtcaataataaaggggtggtaacttcctcatatttatcttcacagatatttaatgaagatggatccattaaaggagccaatagtgaaaatttagttaaaggtgatattagatttaaattagtcatgaagaatgtcttaaaatctaatgttccagaattctggcccaaggaatggtaagcacttgaactgaggattttgaaggaattggaacatataatgtcaagtcttttgatcactaagccacatatcctgacagaaatagtagtcacaagattagatcaaaggcgtgggaagatttttttttttcccactctagctaatcaagcacatggcttttaaattgtatgatctttttcttaaaagcaaaaatttgaagacaagtgtttgtttatgtaatattcttcaaagactccgagcagaaacattgcattcattgttgattcagaaaaaagaaaatataaaaactgaaaataattagcaataaaagatttaagacaaatagttcataaatatttttaaagagattaggtttttgaatttcataggttagaaggaaaatcatggcaaaatttacagaaaattgggcaaacaattgaaattgataaagcaggtaaacatcatcatttattttagtatacatgaattctcagtagtagtcaatcacaaatttctacttgctaaaatccatttaccttgacaggaatcaaacctgacagcagcatatcctatgtaatatatgatcatggctatttttaaatatgtagttttgtgtattactgtagataaaagttggtaacaaaattgtacagtggttttaagaagcccatgtaactaacttggacatgtctttaagtcacatattcatcataaaatctaaaatcctacaaactgattctattagattcttagggtaaattttttctttgcccacctccttctttttaagataagtatgcatgtcagcaaaacagagcaatcatgcttttaaagatgaactgttttaaagaaaaataaatgcatcaactcccagtgtttctgataaagggacatccttctaacttaacagactattctttatcttgaatttgaaattatattgttagtcatgcatttttgtaatgtcagggggaacctggtaccagttctcaaaactataggattatatgagtgtgtgtatacatatggcaaaattataaatgaccaccttactgtgaaatatagatcttgagcattttgaaaggccaaaataattaggtaaatgtattttcaaggtcatgttaaaatgtttacatgcttttgaactagcattcatttatgattaaaacccttttcaggttatttgacctaaaaaccaaa

SEQ ID NO: 115911 - DNA, 2327 bp, Homo sapiens
  Payload ID: 2616
  Gene Symbol: CISD2
  Gene Name: CDGSH iron sulfur domain 2
  Uniprot ID: Q8N5K1
  ENST ID: ENST00000273986
  CDS Start-End: 108-515
aggccgaggccgccagtgcccgccggccgcttccgctcccggcgcaggcgcggcagcttggccagagcggagggggctcgggagaggagtggacgccgctggccaggatggtgctggagagcgtggcccgtatcgtgaaggtgcagctccctgcatatctgaagcggctcccagtccctgaaagcattaccgggttcgctaggctcacagtttcagaatggcttcggttattgcctttccttggtgtactcgcacttcttggctaccttgcagttcgtccattcctcccgaagaagaaacaacagaaggatagcttgattaatcttaaaatacaaaaggaaaatccgaaagtagtgaatgaaataaacattgaagatttgtgtcttactaaagcagcttattgtaggtgttggcgttctaaaacgtttcctgcctgcgatggttcacataataaacacaatgaattgacaggagataatgtgggtccactaatactgaagaagaaagaagtataataataataacaatattttctcattctttgtgtatagaaaattttaaaatggtggtcttaattattactactggttgaacaattatttcttccaatttattttcttcctgcactactgtttgtatttgatcctttgtctattcagtcacttaattagaaattaaattgtcaagcctcttattctgacttcaaagaattaatgtatcttccaacaataaaatcacttctgattttaatctaggaaaacctaaattgtggctatggatccaaagctgtttgtttctttgaatatcaatattttcaacaggatcttgtatttaaaattcccacctacattgttaaatatgttattttttcatatctcttttggttttgataatctgaagtgtttttttctcgttttggccttccaaactgcatttggttaggtgaattaagaaaaatattgccatcaagaattacttgtgttttcacagagatagactctttgctttatagagattgttgtgtatttaatatgaatatcccagctttagaaaagaagtaaactggatacaaaaagttccattgaggaacagttatttacagtataaaagatttgtttactttacaaaaggcttgtgtctgtgtgtgtgtgtgtgtgtgtgtgtgtgtattttaaactgactcagtgacagctggggtggaatggcaagaacacttacaaccaaactcatgggctgctgcaatttgaagataattggtaataaacataagacattaattcatattaaaatagttcagtgttcaaaattgtgtttatgtggatatttttctctttttaacactataaaccattaaaatacagtcatcccttgtatacgctagggactggttccagggccacacatataccaaaatctgcccatactcaagtcccacagaaagtcttgcagaacccatatgtagaaaagttggccctccagttgaccctccgtacacatgagtttcacatcccatgcacaaatgctgatctgtgtgacctcacctgcatttgattgaaaaaagtatgcgcgtaattgtacccacccagttcaaacccgtgtgtaagggtcaactgtacaaaaaagtttgtgaaataaacgtactggagaatctttaaaatttttgtgctttttaatcctactattatgaatctttttagtttcatcttacattactactctcataatagctatccttagccaggtgccatggcacaggcctgtagtcccaactgctgggaagattgaggtgggaggatggctgcagtacaagagcccaggagttcaaggccaggctgggcaacctagtgctccgcctctgctgggctctgtagggaatcctttctgttgtaaaagagttaccatttaactcccttcactgagtgcgtttctgagaccttgctaggcactctggaaactgcttagttgagaaaagacaaatacaaaagcttttctttagtctatttaagatacagtttattcagttcactttgctttctttttataagaatgtacaagaggcagacagaggtaatccttctagaaataaaactaattgttattgggcacttgtatgtaccagacactacactaagcatggtacttgggtttttaatttattacatgtaatgtcagtaggttcaattatatgatcgtaacatcttcatgaccagcagcatgtattttagagttagaaatgtagtctggtttttgagaagttttacaaggtgtatgtccaaaattgttctttcctcacatgtcagtgggggataaatacagcattgctctca

SEQ ID NO: 115912 - DNA, 808 bp, Homo sapiens
  Payload ID: 2616
  Gene Symbol: CISD2
  Gene Name: CDGSH iron sulfur domain 2
  ENST ID: ENST00000503643
  CDS Start-End: 45-482
gcagctgcctggggaacgcctgtgaggcagtctccgggtgcttgatgccccagggtcttttgtcctcggagttgtctccggtgtcattccgtggcaagataccaggtttttgcagagaaggtgctgagttgggaacaggccagtctctttcatctcctgtcctgctcatcgctctcttttcagaatggcttcggttattgcctttccttggtgtactcgcacttcttggctaccttgcagttcgtccattcctcccgaagaagaaacaacagaaggatagcttgattaatcttaaaatacaaaaggaaaatccgaaagtagtgaatgaaataaacattgaagatttgtgtcttactaaagcagcttattgtaggtgttggcgttctaaaacgtttcctgcctgcgatggttcacataataaacacaatgaattgacaggagataatgtgggtccactaatactgaagaagaaagaagtataataataataacaatattttctcattctttgtgtatagaaaattttaaaatggtggtcttaattattactactggttgaacaattatttcttccaatttattttcttcctgcactactgtttgtatttgatcctttgtctattcagtcacttaattagaaattaaattgtcaagcctcttattctgacttcaaagaattaatgtatcttccaacaataaaatcacttctgattttaatctaggaaaacctaaattgtggctatggatccaaagctgtttgtttctttgaatatcaatattttcaacaggatcttgtatttaaaattcc

SEQ ID NO: 115913 - DNA, 471 bp, Homo sapiens
  Payload ID: 2616
  Gene Symbol: CISD2
  Gene Name: CDGSH iron sulfur domain 2
  ENST ID: ENST00000574446
  CDS Start-End: 32-175
ctcgggagaggagtggacgccgctggccaggatggtgctggagagcgtggcccgtatcgtgaaggtgcagctccctgcatatctgaagcggctcccagtccctgaaagcattaccgggttcgctaggctcacagagtcttgctcttgtcacccaggctggagtgcaatggcatgatctcggctcactgcaacccctgcctcctgaattcaagcgattctcctgcctcagcctcccagtttcagaatggcttcggttattgcctttccttggtgtactcgcacttcttggctaccttgcagttcgtccattcctcccgaagaagaaacaacagaaggatagcttgattaatcttaaaatacaaaaggaaaatccgaaagtagtgaatgaaataaacattgaagatttgtgtcttactaaagcagcttattgtaggtgttggcgttctaaaacgtttcctgcctgcgatggtt

SEQ ID NO: 115914 - DNA, 2074 bp, Homo sapiens
  Payload ID: 2617
  Gene Symbol: CISD3
  Gene Name: CDGSH iron sulfur domain 3
  Uniprot ID: P0C7P0
  ENST ID: ENST00000613478
  CDS Start-End: 125-508
ctggcctccgccctcgcagaacgccgcggcgtcttccggggcctggcgggccggggaccgagggggcggggaggtgacccggcgggggcggagccagcgggcgggcgcggcgcgggaggcgaccatgcgcggcgcgggggcgatcctgcggccggcggcgcgtggtgcccgggacctgaacccgcggcgggacatctcctcctggctggcccagtggttccctagaaccccagccaggtccgtggtggccctgaagacccccatcaaggtggagctggtggcagggaaaacctacaggtggtgtgtgtgtggccgcagcaagaagcagcccttctgtgacggctcccacttcttccaacgcactggcctatctccactcaagttcaaggcccaagagacccgcatggtggcactctgtacctgcaaggccactcagaggcccccgtactgcgatggcacccacaggagtgagcgcgtgcagaaggcagaagtgggctccccactctgagggggctgctgctgtccagccacaggtggccttggctccaggcctctgacaggcacccccttctgtgggaaaggaaacaggtgctgagcccaagagactctggtacccactgctggctcatgaaggaagaattattccttataacctaaaagtctccagtctggggcaggcgggagtgggccctggttcaatgtttgctgatggggaagatggcaaaaacaagcctgcccaaccagactggtagtcctgcagtcactgctatgaggcccacgtgctgcctcctgctccagattttaacctctctgtgggctgggggcacctgaccagccacaggagagggcagttcagattcattctgtatggggtccccaagccaggctaaacccagagatgagaggcacccttcccttcttccctccaccccaaagaactacaggctccagaaagtatgcagcatttattacaaagccaagagatacagatgtcccagggcaaaggagggtacagtcacaggacctcagacacaggacaaggtgcaaacacagacaagcccatcagggggctcccaaccccacacacctacgctatgatggaatctcgagtctcgactcccgactcctctcagatctatgcacacttgaggaaatctcggtgggcagcgacctgccagggtctgtccctaaggaggtggtccgctgacctctcaaggggtgggggtggggtcagagcttacaggtttctgtcttcttgtgcttttagatgcagttgctctgtcctgaccaggtgaccgggcctcagctgggggtggaggggcaattggaaggctgtttgcctctggcaaagtctgggatctgtgcttgtgtgaggttaacccacccccacttccactctaggccccaggtgagactccaccaccagtcctgctagtgagggttccccggtgagggtaaggttggtgggggtgcagcgcttcacaatgctaaagccttagccctcctccaagagctgagacctctcagggcctgaatcttcttttccacaagataaatgatgcaaaggccacacacacaggaaaaaaaaaaaaagaggcagaactatctattctttgcacaaagtttccactgcaagaggaggaggtgatgcaggtgccacctccaccctgcacttgctcctcagaaccagggataaactgcatttgtaaaaggcactgttcttagcaatttctggacattcaacaacgtggggggcggccactggtcagaggcaggacagcagccaagatggggagagaaacggggagagaaagaaacgattctaactgactcctatatgcagccagttggaatcatgcctaaagctttgggtctgaaggggcccccaacacaccacctgccttgggaaacagcgaggatggtgcagagctttattgagactccagtggcccatccagttcatctccaggcacccccaaaaacagcaaattacacaagaccccccccaaaaaaaatgaacaccattttccacacatacacacacacataaagtttgtttcctgtggcatttaaa

SEQ ID NO: 115915 - DNA, 2074 bp, Homo sapiens; identical to SEQ ID NO: 115914
  Payload ID: 2617
  Gene Symbol: CISD3
  Gene Name: CDGSH iron sulfur domain 3
  Uniprot ID: P0C7P0
  ENST ID: ENST00000620783
  CDS Start-End: 125-508

SEQ ID NO: 115916 - DNA, 11311 bp, Homo sapiens
  Payload ID: 2618
  Gene Symbol: CACUL1
  Gene Name: CDK2-associated, cullin domain 1
  Uniprot ID: Q86Y37
  ENST ID: ENST00000369151
  CDS Start-End: 485-1594
gaggccgggcagggggcggggccggcgaatgcccgtcccgacccgtcgcgcctcccctgttagctccctgccagccgaggcggggcgaacctctgccctgttgcgtgggagtgactcacagctcccgccccttttggctccgctttctcgcggccagtccctcgcaccacgtgccctcctggccgcgcccccagctgccctttccaactgcctgttggaagccgctgtaaaacgtcgtgaggagcgccgctgctttacggctgcctctcccagactagagccccggagcgcccaccgccgtcagccgcgtcttcaagctagtcggccccgcggagagcgagagaccctgcgcaccgcagccctctccgctgcgcccattcctgccgccggcgatgtaactcggggaggcagcggtgcccgctggcccggggttgagacaggcggcaggtgcctgtgaggcgggcgggtgccgggggccagcaggatggaggaaagcatggaagaggaggaggggggcagctacgaggcgatgatggacgaccagaaccacaacaactgggaggctgcggtggacggcttccggcagcccctgccacctccgccgcccccctcgtcgatcccggcccctgcccgagagcctccgggggggcagctgctggcggtgcccgcggtctccgtggacaggaaaggccccaaggaggggctcccgatggggccgcagccaccgccggaggctaatggggtgatcatgatgttgaagagctgcgacgcggccgccgccgtggccaaggcggcccccgcccccaccgccagctccaccatcaacatcaacacctccacctccaagttcttaatgaatgttataactattgaagattataagagcacatactggccaaaattggatggtgccatagatcaacttttaactcagagtcctggtgactatatccccatatcctatgaacagatatacagttgtgtgtataaatgtgtatgccagcagcactcggaacagatgtatagtgatctgattaaaaagataactaatcacttagagagagtctcaaaggagctgcaggccagccctccagatctctatattgaaagatttaatatagctcttggacaatatatgggagcattgcagagcattgtgcctcttttcatatatatgaataagttttacatcgaaaccaagcttaacagagacttaaaagatgaccttataaagctgtttacggaacatgttgcagaaaagcacatttacagcctaatgcctttacttttagaagcccagtcaacaccatttcaggtcacaccttcaactatggcaaatattgtgaaaggcctgtataccctcagaccagagtgggttcagatggctccaactctattttctaaatttattccaaacattctccctccggcggtggaatctgaactttctgaatatgctgctcaagatcagaaatttcaaagagaacttatacagaatggttttacaaggggtgaccagtcccggaagagagctggggatgagttggcttataatagctcgtcagcatgtgcaagttccagggggtacagatagtgaatgtattgaatatgctttccttcctgaaaagaggacacactggagctgcagagactgtattcagagcacagtgggggctgcacacactcaggagctctgtcacaaagctgttcatggaagaggatgttggacttcttacttggtttgtaattttaaaacaaaaactaaaaaaaaaaaaaacgttgctgctagacttgggggtgattttgaaatgggacaatcttttaatgagtttatctacagattctgtgaggaaaaagcatctcagaaagtgaccatttctaagtgaaatctgacagccaaaatcagcagcttcctccaaaaatataagagcagaagaattttttttttaagcacttgttttgttcatttgtggacttggcattttggtgtattggtttcacatgtcaggatctcttttgctttaaaaccaagcagatcattacagtacagtatttttcacccacaaccaaaacaaccccttttaaaagagttggtctttgtttagcattagaaagtcttgttaaaggaaaatgctaactctgcttttgctagaactttcccccatcagttcacaactttcttctactctgtgccttgagctttgtgcactttgcaactgtgtgaccatgttgtcaaactcctcctggagaagtgtatggtatctaaactcacccaccaagatggcaggtgtggccctgtagcaggatgctaattaagtgggaaaatagaaaccttttgcacatgggtcggattttcccctggttcaccagagcatattcatattaatgttggggaccaactctcctagagcatttccattccctgtgccacttaacacgatgtctgtcaccagctgctatagtattggcagtactctagtttagggatgggcggtactttagcacggaagcttcccttagtattattgagagctacttcctgcgatgctctaggaagcagatacagttattaagtccaaatacacagtggtgtggggttcctgatcacttcattttaaatgaatgagataattacttaaaaaaagtctgtcatttgaacattatatttgagtgtgatagggaagaagtagcactgctgtcctaaggctcccttccagctgtggcaaagctatatttctgtttctccacatccacagtgctttttagtccatcataaaagtttctgaagcttattctagctgttgttgaaagcccaagaaaaatagatgtggcaagagaaaaatacttttcttctcaattttgcttgaatcttaattgagcataggcttctctactaggcaacatcagactaatagtatttacctcttcagagaacttgaggggaaaagaaacatcccagggatgctgtcgcatgtctgctctgcaggttcttcatacagctgcctctgccaattcagtttattttttggggggagtggtgtgggtgggagagttagaagtgggatattgggagcaagtaagtcacccaataattgaagtccttgatttgtaaaactgttatacagagaagtaaagataaaggttgtcagatttattttttaaagtacttaaccagagttcgtggattttgtggactttaattggactcaattcactctgtgagcatcctggattgcatcgatgaacactgaattactgtaagaacatagacaggctctcactatgacctggacagtttaagttgctacactggtaacattctagtatcaaggagaattccattcatcatgacattcacattttacttttctcaatggaatgcttgcttcaggcttaccaatcacacctagaactgaagtctgagtgagtggtattaataatttttctgaaaggaataaaattggaatgtttctaaatgtggagaaattcttcagtatcctaataatatacccaaatgctttttctgggagagagcattcttttacaaaagaactttccctataaaagcatcacagtataatgtgaattggcattaaaatctttggatgcttttgcattattaagttcatggagaaatatattctttttactatgtatgtattaataaaaagtgggcaaagtaaagtttgcaaaatttagtttctctaaatttttgcacagtgactgcagctggctatgggtcagctcttaatacaacaaaaccttgactggaagtcactatagaaaggttgtacatagtctcccagtctacatgtcctggctgttaatcatcttggccccttgaggcacatcacagtttgaaggacctgtttaagttgaaatagactttgcttatttattgggattctaaaaaattctgagtgagtttgcagtatgagaggaaataagatttcctcctccttcctctcattttatattgactgtttgccagaaactgttttcttctgttttcttatattttgtttttgagatggagtctcactctctcacccaggctggagtgcagtggtgcaatctcagctcactgcaacctctgcctcctgggttcaagtgattctcctgcctcggcctcctgagtagctggaattacaggcacgtgccactacgcccggctactttttgtattttgtttttagtagagacggggtttcaccatgttggtcaggctggtcttgaactcctgacctcaagtgatccacccacctcggcctcccaaagtgctgggattataggtgtgagccactgcacctggccttttttttttttttttttgtattcttgccagtacagtatatggtttttctaccccaattacatactgggttttgtaccacatcactaaaggcccaaatcattgaagatacaaaaccgtacatgcaggctggttgtctggttagtcaatggctgatttgcttcaactgtctagtatgtatgtgcagcctgaaactggctccttaaaaggaaagccgggtcagtcatcttgaaaaaatgacatgtaaaagtaaatcgataattgttttgagagacggtacatgttttaaaggttggccttaagcttcagtaacattgtcattttgtgaccttttgttgtcacacctgtaccctaacctgacaggaattaactactgtttttttgtggggcagaaagcaaaacctggtgttgtgacttttatcctaatggttcttaggcaaggttagtgagaagaaacacaaacccagatgcatgcattgtgcattattttgtagacaagctactttttcttctgtccctttaacaaatttgcagcaattaccctccctttggggtctagagtgaaagctaatttgtgggtagatgagattgcagaagaatggatgtccatggctgtgaacactgcacactgcacatccatctccagtgctcacactgtgcagctaccactccctggctgcgtgccatgctgtcgggttgcagatttgcacacataaattcctcaggaagagtttgcatgagcatcacctcgcaatattctgtactgaccaaacaagggatttgaacgtttttcagcacaaaaggataacttccgagtggtggtctgtacgcatactagcaaaggtaatggtgatctagcaaacaaaattggtttctgcagttagaagtgagcaggagcacttgtattatagtatttaaataatcctggttaatctctttttaagccgagtaacccctccagattttgcctttttattattgaggctggctttattttcttctactttttttcccgttttatagcagttaattatttttgtgattattatgcaagaagcattgcccttgagttaaactgttattgtttcataagcagctattaaaataactgagcattgttttatgaacatacactaatctgagatactgaaaagctttgcaactaaaaagcaaaacaacctacattagtcatctagccattgtttggatgttttgagttgattttttatggtgcctcttttagcttggaatattacgtttactttaatccaagtctaggccttttaaagggtccttaaaattaaagttcagaatgtgaatccctttgacatctattacaggtttataggacctttttggttgtgattactgttttcaatacgattgtataaatgaagttaactttgtcagaagttaaaatggaggtcataggagttcctggagaaatggctctcctgtttctttcattaccccactgaagttcaccccagtttctggccacaagaatatgagaaaggaaccctgttgttttccaagggaaatcattcctctctgtccccactgttgattaactaaagtcctggacaccttccttcctccactggccaagacccaccttgacccaccttgaacctcttttcagagccgagtggcatgaatatgtgtactgtttctgcttctgttgatggagtggctgtgggagaattaaaggaaatgctaatttgagcttcattcataggggaacctactatatattgcatccctgctggttggaaattatcttcatctctggactgcattgtttagaaaaatgttaatggcttacaattctgagaactttattgtgtggctctggggttaagaattctgtggtttgaaaaaaaataaatattttgtattgattctcacgtcatttcaatgttgtgactatgtactaaatgcactaagactgggtattctcttagaagagtgcgttttgttaaacagatggcagttcactctcattagttctatttgtcaatattacagccacacacttcaggataacttactcaaatgtgaagtcatgggaagctatggctagtaacaggaatgcttatgaaaaatttggagggcaagcacgagcaagaggcttttgccactcactagcacagccagagcaaggatgaagcaatgaagtcttgttcctagtggtgcttgtatgtcagaagccatagtgagctcagcacagggcgttctgcacatcatctctttaatccaagaaaaacaaaatggcggatgaaactcctattgacctgggatacaaagccactgactttggctcttgatcttttggtgggttctgaatcactccttctgtattagggcatatactttcactctaaaacattgtggtaaatgaaataaatcttgtacagatgtcgttggccttgttatgttatgttataaatcctgtacagatgtccttggccttaatacctggttcactggaactttgttataatatagaatatttgattttgcttatagcatattaatattgcctcctacatgacagccacactgagcacacatctgttaccacagttacttagcctgcagggtgagtgttgatcttgacttctgcaaccagtgctaaaaaacagtgtgtaacaatatacatatggtcatatctattctatattcatatatagtatggatacggatatcagtatatttgtagtttttgttttttaaacactgtacagtttcttctgtggacctttaatcaacttttggacttaggttgtttttttctttgcatttattggtactatgcttttttataaccctttgtgttttcttgctatgaaattagtgtcatcccctaggttatttgtaaccttactttaaggttttagtttctcttgctatctctgtagaggtgtcctttcctacagtattgtcagaatgccagttctcatcccttccatttttttgacctcagctctgttgtgatgttatctactttttggttatcacatgtggcagaattcagtgactctgacaatttccattttcactcccctgccccacagttaagtagggtgtcatttaaactctttcccttttagcaggtttgttttttactaagtacaaaccttttctactagaaccagctctgtgtgtgtgtgtgtatatgtgtgaattttatttcttcgattggcctgtttctcaattatctaaaattctaaaataccttgaatatcaaaaagcatgatagtagaatgaatatcacacatattaatagaacctgagagcaactagcttaactagctgtagtcttgagtaggttttttttttaatctgttttcctttattaagccctctccctccctaaattgttaagccagaagggcataacaattcaaaactttctagtaatgtacctacatgtctaatagtatacctcaaaatatgtaaagaaaaagtggctcacacctgtaatcccaacactgagaggctgaggtgggaagattgcttgaagccaggatttgagaccagcctgggtaacacagaaccccatctctacaaaaaaattttttaaattagggccgagcatggtggctcacgcctgtaatcccagccctttgggaggctgaggtgggcgtatcatttgaggtcaggagttcaagaccagcctggccaacatggtgaaattccatctctactgaaaatacaaaaattagctgggcgtgggggtacacgactgtaatcccagctactcgggaggctgaggcaggaaaatcgcctgaacccaggaggcagaggtttcagtgaaccaagattgcactattgtactccagcctgggcgacaagagtgaaactatctcaagcaaaaaacaaaaaaagttgggcctggcacagtggctcttgcctgtaatgtcaatactttgggaggctgaggcaggtggatcacttgaggccaggagctcgagaccagcctggctaacatggtgaaaccctgtctctacaaaaaataaaaaataaaaataaattaaaaaaaaattaggcatggtggcatacacctgtaatcccagctgcttgggtggctcaggcacaagaacttgaacccaggaagtggaggttacagtgggctaaggtcacaccactggactctggcctgagcaacagagcgagactctgtctcaaaaaaacacaaaaaaagttgggcgtggtggtacctgcttttagtcctagttatttggaggctaaggtgtgaggcaggaggattgcttgagcccaggagtttgaggctgcattgagctatgatgataccactgcatttcagctaggataacagagtgagaccctgtcgagaaaaatatttaaaaagttaaaagaaaactacaaaaaggaaaaatgaacacactacaaagagaaataggtcagtctaccaacataatgggcattttcaacatacccctctcagtaattaatagatcttgcagagactaaattatgaagattattaaggacatagaagatttaaatagtacagctaatcaatttgatctgacagatacataacacacacatacataaaacacattgtacccttcagtaggaaaataagtttttgcaaaccaagtctaacagtgtattcaaaatgtaacaaatgatgaccaaaatggattggtctcaggaatacaagattggctttttaatgtaattaagaaatgctgtttataataggacaagaaaaagtacctaagaataaattttaaaatgagaaaatgataaaaaaaaaacttaatggacctaaataagtgtagagaatataagggataacactcaatattatctaaatctcaactttttctccaaattgcaattccaaaaaaattcccaatgattttcactgtggaacctgacaatttgattcgtcgatataaatggaagagcaaagggccaaggatatccaagacctttctgaatggattgtgaggggaactagcactacaagattctaacacttactgccaaaggtagtgattaaaacaatgactttggagtagggaagaatttcatcaacaagatagaaaatgcagactatcagtagataagtaatttggctaccattgattgtaagtacttattaccaaacatgctgtagagtgaaaagagaagccaaatctggaataagatacaaatattcataatataactgctaaagagcacctgaatgcaaatcagcaatgaaaacaactcaggagagacggaccccaaacactagcaggcatttcacagaagaaacagaaatggcccataaatgtgaaaagatgttcagcctcattagtcgtcaggtaatgcacattaaaagcatagataccatttccttgctgacaacttggcagaaattatgagaagtctgaaaataacaatctgagagtttatgacaacaaaccttcacctgttgttggcgtgtaaatctgcacttctactttggagaacagtattatctaatgaaattgagcataggcacctcttaatagcccactatttatacttagaaaaactcatgtgcatgtgtaccaagaaacgtatacagggatgtttataacagcattatgtgtaataattaaaaggaatgaaggagggagccaaatgcccatctagcatacagtgaataaatgaagtgtatgctgtggaattctctagagtggtcaaggcatcataccactgcgggcttcaacatggatgcatctcagaaatcattgagtgaagtcagaatagagccagcatgggtacctttatgtaaagttcaaaatcagaaaaaactaagtatattgtttagggactcagacacaagtagtaaagctataaaggaaagacagttattaacattcaggaacatagtttcctcaggagagggtggtggaggggaatgagaacagaggggagaacggggacttggaagcacttcataatatgaacgtttggaccattctaaacatgccagttctctgagttaatgtatattcagtgtaaagccaattcagataaccaacagtatttatataatctaaaaaactcatggaagtataaacagatgaaaataggaaaatccccattgaaagtgaagaaaatggaaggaacttgctgtaccaaaaaaaatcactttctaagtgcaattaaattaaaagacttatgccagggtaaacagataagtcaatggaaggtaatttagaaaatagaaaactcaaatttagaatttagagtacactaaaggcggctttttgaaatcatgctgtccatggtcaattattttatgaaaggtgctggtataattagagaacattaaactgattcctatcataccattcaccaagagaaattccagattgtgaactaaaaaagaaaaaaatgttgtaaaaactagaaagtagtattttttcttgggattggagaagttttttctaagaatacaagcaatgaaaccgaaaaccctattaaactcactcacctgcctttaatgccgtagtgtgcacaccccagtgtgtgtgtgtgtgtgtgtgtgtgtgtgtgtgtacatagacatatatattttaaaatgtttaaatttgaacatatgttaccaatacatataaagcaaaagtagaaaatcaaaaagatgaagtaaaaatgttttaaaatattgtttgtggtatttgtggttaataaacctttgctctttctaaaaaaatgttcttttagagagagtcatgattaaaaatgcttgtcatttttgaaactcctagttttaacactttataaaaacaacttaatgttcttaaggtaagtttattttcatgcttggttttaatgactattgtagctgaataagtcacttcattaattaagatctgtggatccaaatatggctgtgcttactgaaaatatttttgagttccatccaccaattttgcaaaagtgtgttgttgaaatttttataataaattttcatcttttccaatgtca

SEQ ID NO: 115917 - DNA, 3217 bp, Homo sapiens
  Payload ID: 2618
  Gene Symbol: CACUL1
  Gene Name: CDK2-associated, cullin domain 1
  Uniprot ID: Q86Y37
  ENST ID: ENST00000493518
  CDS Start-End: 488-1399
cgtgaggccgggcagggggcggggccggcgaatgcccgtcccgacccgtcgcgcctcccctgttagctccctgccagccgaggcggggcgaacctctgccctgttgcgtgggagtgactcacagctcccgccccttttggctccgctttctcgcggccagtccctcgcaccacgtgccctcctggccgcgcccccagctgccctttccaactgcctgttggaagccgctgtaaaacgtcgtgaggagcgccgctgctttacggctgcctctcccagactagagccccggagcgcccaccgccgtcagccgcgtcttcaagctagtcggccccgcggagagcgagagaccctgcgcaccgcagccctctccgctgcgcccattcctgccgccggcgatgtaactcggggaggcagcggtgcccgctggcccggggttgagacaggcggcaggtgcctgtgaggcgggcgggtgccgggggccagcaggatggaggaaagcatggaagaggaggaggggggcagctacgaggcgatgatggacgaccagaaccacaacaactgggaggctgcggtggacggcttccggcagcccctgccacctccgccgcccccctcgtcgatcccggcccctgcccgagagcctccgggggggcagctgctggcggtgcccgcggtctccgtggacaggaaaggccccaaggaggggctcccgatggggccgcagccaccgccggaggctaatggggtgatcatgatgttgaagagctgcgacgcggccgccgccgtggccaaggcggcccccgcccccaccgccagctccaccatcaacatcaacacctccacctccaagttcttaatgaatgttataactattgaagattataagagcacatactggccaaaattggatggtgccatagatcaacttttaactcagagtcctggtgactatatccccatatcctatgaacagatatacagttgtgtgtataaatgtgtatgccagcagcactcggaacagatgtatagtgatctgattaaaaagataactaatcacttagagagagtctcaaaggagctgcaggccagccctccagatctctatattgaaagatttaatatagctcttggacaatatatgggagcattgcagagcattgtgcctcttttcatatatatgaataagttttacatcgaaaccaagcttaacagagacttaaaagatgaccttataaagctgtttacggaacatgttgcagaaaagcacatttacagcctaatgcctttacttttagaagcccagtcaacaccatttcaggtcacaccttcaactatggcaaatattgtgaaaggcctgtataccctcagaccagtttctcagaattttacagcagtgtgatgaagatggctcctgaaatagtagtgggttcagatggctccaactctattttctaaatttattccaaacattctccctccggcggtggaatctgaactttctgaatatgctgctcaagatcagaaatttcaaagagaacttatacagaatggttttacaaggggtgaccagtcccggaagagagctggggatgagttggcttataatagctcgtcagcatgtgcaagttccagggggtacagatagtgaatgtattgaatatgctttccttcctgaaaagaggacacactggagctgcagagactgtattcagagcacagtgggggctgcacacactcaggagctctgtcacaaagctgttcatggaagaggatgttggacttcttacttggtttgtaattttaaaacaaaaactaaaaaaaaaaaaaacgttgctgctagacttgggggtgattttgaaatgggacaatcttttaatgagtttatctacagattctgtgaggaaaaagcatctcagaaagtgaccatttctaagtgaaatctgacagccaaaatcagcagcttcctccaaaaatataagagcagaagaattttttttttaagcacttgttttgttcatttgtggacttggcattttggtgtattggtttcacatgtcaggatctcttttgctttaaaaccaagcagatcattacagtacagtatttttcacccacaaccaaaacaaccccttttaaaagagttggtctttgtttagcattagaaagtcttgttaaaggaaaatgctaactctgcttttgctagaactttcccccatcagttcacaactttcttctactctgtgccttgagctttgtgcactttgcaactgtgtgaccatgttgtcaaactcctcctggagaagtgtatggtatctaaactcacccaccaagatggcaggtgtggccctgtagcaggatgctaattaagtgggaaaatagaaaccttttgcacatgggtcggattttcccctggttcaccagagcatattcatattaatgttggggaccaactctcctagagcatttccattccctgtgccacttaacacgatgtctgtcaccagctgctatagtattggcagtactctagtttagggatgggcggtactttagcacggaagcttcccttagtattattgagagctacttcctgcgatgctctaggaagcagatacagttattaagtccaaatacacagtggtgtggggttcctgatcacttcattttaaatgaatgagataattacttaaaaaaagtctgtcatttgaacattatatttgagtgtgatagggaagaagtagcactgctgtcctaaggctcccttccagctgtggcaaagctatatttctgtttctccacatccacagtgctttttagtccatcataaaagtttctgaagcttattctagctgttgttgaaagcccaagaaaaatagatgtggcaagagaaaaatacttttcttctcaattttgcttgaatcttaattgagcataggcttctctactaggcaacatcagactaatagtatttacctcttcagagaacttgaggggaaaagaaacatcccagggatgctgtcgcatgtctgctctgcaggttcttcatacagctgcctctgccaattcagtttattttttggggggagtggtgtgggtgggagagttagaagtgggatattgggagcaagtaagtcacccaataattgaagtccttgatttgtaaaactgttatacagagaagtaaagataaaggttgtcagatttattttttaaagta

SEQ ID NO: 115918 - DNA, 5002 bp, Homo sapiens
  Payload ID: 2619
  Gene Symbol: CABLES1
  Gene Name: Cdk5 and Abl enzyme substrate 1
  Uniprot ID: Q8TDN4
  ENST ID: ENST00000256925
  CDS Start-End: 1-1902
atggcggcggcggcggcggccgccaccacggccgcctgcagcagcggcagcgccggcaccgacgccgcgggcgccagcggattgcagcagccgccgccgcagccccagcctcagcccgcggccgccgcgccggcccagccgccgcccgaacccccccggaagccgcgcatggacccgcggcgccgccaggctgccctctccttcctcaccaacatctcgctggacggccggctgccgccgcaggacgcggagtggggcggtggcgaggagggcggcgcggccaagccgggcgccggcggcgcctgcggcgcgaggactcggttcagcttgctcgccgctgccgagcggggcggctgcatcgcgctcgccgcgccgggcacgccggctgcggggttagccgctgggtccggcccctgcctcccacagccctcgtcgctgccgcccttgattcctggcggccatgcgaccgtgtccggccccggggtggcgcgggggttcgcgagtcccctgggcgccggccgggcgtcgggggagcagtggcagccgccccggccggcgcctctcgccgcctgtgcccaactgcagctgctcgacgggtccggggccgccgggcaggaggagttggaggaggacgatgcctttatcagcgtgcaggtgccggcggccgcctttttgggctccgggacccccgggagtgggagcggcagtcggggacgcctcaactcgttcactcagggaatcctgcccatcgccttctccaggccgacttcgcagaactactgctccctggagcagccaggccagggcggcagcaccagcgccttcgagcagctgcagaggtcccgacggcgcctcatctcccagagatcttccttggagaccctggaagatattgaggagaacgcccctctccggagatgtcgaactctctcaggttcacccagaccaaagaattttaagaagattcattttatcaagaacatgcggcaacacgataccaggaatggcagaatagtccttatcagtggcagaagatccttctgtagtatattttcagtgctgccgtatcgcgacagtacccaagtcggggacttgaagttggacggaggaagacaatcaactggtgcagtgagtttgaaagagatcattggtctggaaggtgtggagctgggtgctgatgggaagactgtttcctatacccaatttctgttacccacaaatgcctttggagcccggagaaataccatagactccacctcctctttctcccagttccgtaacctgagccaccgcagcctctccataggccgggcaagcggcacccaggggagcctcgacacaggtagtgacctgggagactttatggactatgacccaaatctcttggatgacccccagtggccttgtggcaaacacaaacgcgttctgatcttcccttcctacatgacaacagtgattgactacgtgaagccctcggatctcaagaaggacatgaacgagaccttcaaggagaagtttcctcacattaagctgacactcagcaaaattaggagtctgaaacgagagatgcggaagcttgcgcaggaggactgtggccttgaggagcccacggtggccatggccttcgtctactttgaaaagctcgccctcaaggggaaactcaacaaacagaaccggaagctgtgtgctggggcatgtgtgctgttagcagccaaaattggaagtgacctcaaaaaacacgaagtcaagcatttaattgacaaactggaagagaagttccggctgaacaggcgagaactgattgcctttgaattcccggtgttagtggccttggaattcgccctccacttgcccgagcacgaagtcatgccccactacagacggctggtccagagttcctagcactggccccgaggacagccaagggccatttcttctcagcttggtggagcagcacttacttactactggaaatgaaaaaaagtagaactcagaataccagacttttcttcctctcgacatagtttggggagaagcagtactagaaactttccaaggagtcttgggtgtgtagccaagaggagccatgagctatggactcctcaagcacgggaagaggaggtgtgtgctgagaacagagaggccctgccctctgtccactagcgagaatccctagctgccccagcccagtctttctccccggcattcacaaactttgcaagcgtggtccagggccttctccagatctgttccaacttggagtgtgaagggcttgagcatacgggggaagagagtctgcagaagttgggggaaaacttttaaaagataccctcattgtgtcaaagagtgtgccaatctatttttgtatcagcattggaagtgcactttcccctggggcgtgtgggtgtgtgaatgtgcaagtgtctgagagatactgcatcagccctagacccccagagccagtcccgccctttacagagcagcccttagcctggggccatgggtcaggctgaccttcaacaattatttctagatgatttctggataagaattgctctctcggtaccagacagtttgacatcctccacccttagaaaatgactgacattgttttgttactgctcctacccaccaaggggataaagaaggcgagttctgagtgttggatgagtcagtcgcgtggaaggacgtggagcgtggcgctctgtaacttcctgccgtctgccaccccgccacgtgtatttaaccctcgcactttctccactgtggagatggctggggcggcgccccacagtgtgtattcctgtcctctatgttagagtgcatcagaagcacatttactgtgctatctatatcgctatataaaagtgttttataaaaacccagaataggagcacgacgcatgattggtgtttgaggcgtttgccagctgggacaaactgcgtttggagctgtggttaagctgactaaggaggcggtggctctttcttaacattcccacgtgcccagggctgttcatgcaagattttaatggtgacttgtcctggcttactgggacagtctgtatgaggcatgtcaccacactgtcgcctcatagctgcaagagagaggcaccagctgaagttcccctgactgaagagagcctgtggccatgtaaaaagagaattaaactcttgttgctttttgtatacctgtatgcgtttgtgtagacgtgtgtctcaccagtcacctttgccctgcattgctgatccccttgcgcacactgattctagtgaggtcacagattcggagcttcacacaccagcccagagaaagggcgatggaaccgaaccgagggtctgcagctttcgttagcagagctgtcagattcttgacagtcttggaggatggagaaattcaagcagcagctggtgagggccaaaacagaatacttggcttcttcagaatcttagattgcactgagtttagtcctaaatattttgctaacaaatttccttggccagaatcagttgtaagacagtgatttgggtggtggggggagggaggagggagaggatatgattaatgtggtctctttggctgatcgaaagctagatcaactggtacttagggcacttgctgtttataaagcaaaattgagaaaatattcaaggtgcctccatcgcctgaactacaaaatgcccttggccttcctcacatggggtctgtcaccttgcatctctgataagccatccaccttcctggtcagtgcctacagggggagagcctttctgagaagcaggtcctgtggtatctgagaatggtctagagagctccccactgcccatctgcccccgaatttcctgccaagctctggggagtggggtggggggagggacgtccgatggatgacaggccgccagcccagacgtggggagagaagcctgagtcctttcctgtgtgataaaatcaggctaatttacttggatttggggtgatttgtttggtttttagcatttatgaggtgagcccatgaagttagtggtccattactttttaaagatgcattttcattttaaactgtctcctggcctgtggatttgtggaatggacagttttgtgggttttaatttatttgtgaggagtcggggctgagaaggcattttatcaggaggtctccttttgcacgtccatgacatgagcttttcggaggcaaaggaagtggaggagggtgagagatgcaggtcactgccagaggcacctctgtgacacggaacattccagacacgtcgcagccttgggcttcggcgaggaggaagtctgagcctgtgaagcgagaaggccaggcagtagactggctctgaggttttgccctttgacctcctccacagagggcagcttcagccccttgtaagccctgccccctctcaggactgccctgaggcctctccagtcctccccacactcagagatctgtggggaagctccgcccagccacactccttgggataatactagccggttctgcctgattccttttcccccggagccagcctagggggcccgggactcctctagtgagccttgactgttaggtaagagacaggaagcagacaagccaagaggttgctgcagctgcccccaggaggaaacgggcagcagggagtgtggcccagcccccactgtacccctccaggggcccgagcccttgccagcccaatgacaccttgaagtcaccacttttcctttcttgcccgctaataaaacctatttaaacaggaaattcataccaaatgcaaatgggttttgttttccttggcattttgttgttccgatcacagatttccctgccagggtgtctgtggttatcagctgcaggctcagcttggggcggccgcttcacacaagccactctgtaccacgtgccctaccttagtgacgggagtaaggagcttccttcccctccatgtcattccttcctgttcccttcattccccaacagcaaataaaactgttgaatgct

SEQ ID NO: 115919 - DNA, 1544 bp, Homo sapiens
  Payload ID: 2619
  Gene Symbol: CABLES1
  Gene Name: Cdk5 and Abl enzyme substrate 1
  Uniprot ID: Q8TDN4
  ENST ID: ENST00000400473
  CDS Start-End: 244-1164
gtgcttatgagataaacgacagggtaactgtccacattggtcccagtttatgagggagaagagatcataatctacaaaaatttgcaaggtgaccaggggaaaagagtacggcgcctcatctcccagagatcttccttggagaccctggaagatattgaggagaacgcccctctccggagatgtcgaactctctcaggttcacccagaccaaagaattttaagaagattcattttatcaagaacatgcggcaacacgataccaggaatggcagaatagtccttatcagtggcagaagatccttctgtagtatattttcagtgctgccgtatcgcgacagtacccaagtcggggacttgaagttggacggaggaagacaatcaactggtgcagtgagtttgaaagagatcattggtctggaaggtgtggagctgggtgctgatgggaagactgtttcctatacccaatttctgttacccacaaatgcctttggagcccggagaaataccatagactccacctcctctttctcccagttccgtaacctgagccaccgcagcctctccataggccgggcaagcggcacccaggggagcctcgacacaggtagtgacctgggagactttatggactatgacccaaatctcttggatgacccccagtggccttgtggcaaacacaaacgcgttctgatcttcccttcctacatgacaacagtgattgactacgtgaagccctcggatctcaagaaggacatgaacgagaccttcaaggagaagtttcctcacattaagctgacactcagcaaaattaggagtctgaaacgagagatgcggaagcttgcgcaggaggactgtggccttgaggagcccacggtggccatggccttcgtctactttgaaaagctcgccctcaaggggaaactcaacaaacagaaccggaagctgtgtgctggggcatgtgtgctgttagcagccaaaattggaagtgacctcaaaaaacacgaagtcaagcatttaattgacaaactggaagagaagttccggctgaacaggcgagaactgattgcctttgaattcccggtgttagtggccttggaattcgccctccacttgcccgagcacgaagtcatgccccactacagacggctggtccagagttcctagcactggccccgaggacagccaagggccatttcttctcagcttggtggagcagcacttacttactactggaaatgaaaaaaagtagaactcagaataccagacttttcttcctctcgacatagtttggggagaagcagtactagaaactttccaaggagtcttgggtgtgtagccaagaggagccatgagctatggactcctcaagcacgggaagaggaggtgtgtgctgagaacagagaggccctgccctctgtccactagcgagaatccctagctgccccagcccagtctttctccccggcattcacaaactttgcaagcgtggtccagggccttctccagatctgttccaacttggagtgtgaagggcttgagcatac

SEQ ID NO: 115920 - DNA, 2471 bp, Homo sapiens
  Payload ID: 2619
  Gene Symbol: CABLES1
  Gene Name: Cdk5 and Abl enzyme substrate 1
  Uniprot ID: Q8TDN4
  ENST ID: ENST00000420687
  CDS Start-End: 79-1185
ggccatttttcttcctggtgtttgaatgactcataaaatgagtttggagtggtctgaagcctctgcctccttccttgaatgctttctaagaggggctgccatgcaagaatatatgctgattttcccatacggcgcctcatctcccagagatcttccttggagaccctggaagatattgaggagaacgcccctctccggagatgtcgaactctctcaggttcacccagaccaaagaattttaagaagattcattttatcaagaacatgcggcaacacgataccaggaatggcagaatagtccttatcagtggcagaagatccttctgtagtatattttcagtgctgccgtatcgcgacagtacccaagtcggggacttgaagttggacggaggaagacaatcaactggtgcagtgagtttgaaagagatcattggtctggaaggtgtggagctgggtgctgatgggaagactgtttcctatacccaatttctgttacccacaaatgcctttggagcccggagaaataccatagactccacctcctctttctcccagttccgtaacctgagccaccgcagcctctccataggccgggcaagcggcacccaggggagcctcgacacaggtagtgacctgggagactttatggactatgacccaaatctcttggatgacccccagtggccttgtggcaaacacaaacgcgttctgatcttcccttcctacatgacaacagtgattgactacgtgaagccctcggatctcaagaaggacatgaacgagaccttcaaggagaagtttcctcacattaagctgacactcagcaaaattaggagtctgaaacgagagatgcggaagcttgcgcaggaggactgtggccttgaggagcccacggtggccatggccttcgtctactttgaaaagctcgccctcaaggggaaactcaacaaacagaaccggaagctgtgtgctggggcatgtgtgctgttagcagccaaaattggaagtgacctcaaaaaacacgaagtcaagcatttaattgacaaactggaagagaagttccggctgaacaggcgagaactgattgcctttgaattcccggtgttagtggccttggaattcgccctccacttgcccgagcacgaagtcatgccccactacagacggctggtccagagttcctagcactggccccgaggacagccaagggccatttcttctcagcttggtggagcagcacttacttactactggaaatgaaaaaaagtagaactcagaataccagacttttcttcctctcgacatagtttggggagaagcagtactagaaactttccaaggagtcttgggtgtgtagccaagaggagccatgagctatggactcctcaagcacgggaagaggaggtgtgtgctgagaacagagaggccctgccctctgtccactagcgagaatccctagctgccccagcccagtctttctccccggcattcacaaactttgcaagcgtggtccagggccttctccagatctgttccaacttggagtgtgaagggcttgagcatacgggggaagagagtctgcagaagttgggggaaaacttttaaaagataccctcattgtgtcaaagagtgtgccaatctatttttgtatcagcattggaagtgcactttcccctggggcgtgtgggtgtgtgaatgtgcaagtgtctgagagatactgcatcagccctagacccccagagccagtcccgccctttacagagcagcccttagcctggggccatgggtcaggctgaccttcaacaattatttctagatgatttctggataagaattgctctctcggtaccagacagtttgacatcctccacccttagaaaatgactgacattgttttgttactgctcctacccaccaaggggataaagaaggcgagttctgagtgttggatgagtcagtcgcgtggaaggacgtggagcgtggcgctctgtaacttcctgccgtctgccaccccgccacgtgtatttaaccctcgcactttctccactgtggagatggctggggcggcgccccacagtgtgtattcctgtcctctatgttagagtgcatcagaagcacatttactgtgctatctatatcgctatataaaagtgttttataaaaacccagaataggagcacgacgcatgattggtgtttgaggcgtttgccagctgggacaaactgcgtttggagctgtggttaagctgactaaggaggcggtggctctttcttaacattcccacgtgcccagggctgttcatgcaagattttaatggtgacttgtcctggcttactgggacagtctgtatgaggcatgtcaccacactgtcgcctcatagctgcaagagagaggcaccagctgaagttcccctgactgaagagagcctgtggccatgtaaaaagagaattaaactcttgttgctttttgta

SEQ ID NO: 115921 - DNA, 343 bp, Homo sapiens
  Payload ID: 2619
  Gene Symbol: CABLES1
  Gene Name: Cdk5 and Abl enzyme substrate 1
  ENST ID: ENST00000580153
  CDS Start-End: 315-343
acctataaatacggacacccggccccggagcccgcgagccagcggccaggcgaccggcgggcggccagccagcgagccgaactagccgagctaggccgacttcgcagaactactgctccctggagcagccaggccagggcggcagcaccagcgccttcgagcagctgcagaggtcccgacggcgcctcatctcccagagatcttccttggagaccctggaagatattgaggagaacgcccctctccggagatgtcgaactctctcaggttcacccagaccaaagaattttaagaagattcattttatcaagaacatgcggcaacacgataccaggaatggcag

SEQ ID NO: 115922 - DNA, 2074 bp, Homo sapiens
  Payload ID: 2619
  Gene Symbol: CABLES1
  Gene Name: Cdk5 and Abl enzyme substrate 1
  ENST ID: ENST00000579963
  CDS Start-End: 225-341
gtgcttatgagataaacgacagggtaactgtccacattggtcccagtttatgagggagaagagatcataatctacaaaaatttgcaagacggcgcctcatctcccagagatcttccttggagaccctggaagatattgaggagaacgcccctctccggagatgtcgaactctctcaggttcacccagaccaaagaattttaagaagattcattttatcaagaacatgcggcaacacgataccaggaatggcagaatagtccttatcagtggcagaagatccttctgtagtatattttcagtgctgccgtatcgcgacagtacccaagtcggacaacagtgattgactacgtgaagccctcggatctcaagaaggacatgaacgagaccttcaaggagaagtttcctcacattaagctgacactcagcaaaattaggagtctgaaacgagagatgcggaagcttgcgcaggaggactgtggccttgaggagcccacggtggccatggccttcgtctactttgaaaagctcgccctcaaggggaaactcaacaaacagaaccggaagctgtgtgctggggcatgtgtgctgttagcagccaaaattggaagtgacctcaaaaaacacgaagtcaagcatttaattgacaaactggaagagaagttccggctgaacaggcgagaactgattgcctttgaattcccggtgttagtggccttggaattcgccctccacttgcccgagcacgaagtcatgccccactacagacggctggtccagagttcctagcactggccccgaggacagccaagggccatttcttctcagcttggtggagcagcacttacttactactggaaatgaaaaaaagtagaactcagaataccagacttttcttcctctcgacatagtttggggagaagcagtactagaaactttccaaggagtcttgggtgtgtagccaagaggagccatgagctatggactcctcaagcacgggaagaggaggtgtgtgctgagaacagagaggccctgccctctgtccactagcgagaatccctagctgccccagcccagtctttctccccggcattcacaaactttgcaagcgtggtccagggccttctccagatctgttccaacttggagtgtgaagggcttgagcatacgggggaagagagtctgcagaagttgggggaaaacttttaaaagataccctcattgtgtcaaagagtgtgccaatctatttttgtatcagcattggaagtgcactttcccctggggcgtgtgggtgtgtgaatgtgcaagtgtctgagagatactgcatcagccctagacccccagagccagtcccgccctttacagagcagcccttagcctggggccatgggtcaggctgaccttcaacaattatttctagatgatttctggataagaattgctctctcggtaccagacagtttgacatcctccacccttagaaaatgactgacattgttttgttactgctcctacccaccaaggggataaagaaggcgagttctgagtgttggatgagtcagtcgcgtggaaggacgtggagcgtggcgctctgtaacttcctgccgtctgccaccccgccacgtgtatttaaccctcgcactttctccactgtggagatggctggggcggcgccccacagtgtgtattcctgtcctctatgttagagtgcatcagaagcacatttactgtgctatctatatcgctatataaaagtgttttataaaaacccagaataggagcacgacgcatgattggtgtttgaggcgtttgccagctgggacaaactgcgtttggagctgtggttaagctgactaaggaggcggtggctctttcttaacattcccacgtgcccagggctgttcatgcaagattttaatggtgacttgtcctggcttactgggacagtctgtatgaggcatgtcaccacactgtcgcctcatagctgcaagagagaggcaccagctgaagttcccctgactgaagagagcctgtggccatgtaaaaagagaattaaactcttgttgctttttgtat

SEQ ID NO: 115923 - DNA, 604 bp, Homo sapiens
  Payload ID: 2619
  Gene Symbol: CABLES1
  Gene Name: Cdk5 and Abl enzyme substrate 1
  ENST ID: ENST00000582882
  CDS Start-End: 1-491
cggccgcctttttgggctccgggacccccgggagtgggagcggcagtcggggacgcctcaactcgttcactcagggaatcctgcccatcgccttctccaggccgacttcgcagaactactgctccctggagcagccaggccagggcggcagcaccagcgccttcgagcagctgcagaggtcccgacggcgcctcatctcccagagatcttccttggagaccctggaagatattgaggagaacgcccctctccggagatgtcgaactctctcaggttcacccagaccaaagaattttaagaagattcattttatcaagaacatgcggcaacacgataccaggaatggcagaatagtccttatcagtggcagaagatccttctgtagtatattttcagtgctgccgtatcgcgacagtacccaagtcgggtatgtatatgcatgcatgctttgtagttctctgggtgaaaagatctcacaccaatgtacataatgtggccatcctttccattttcaagaagttgccttgctttgatactgcaaattcagtatttgtacactggaatgataaaaagatgttccactttcttttcagccagaaagctt

SEQ ID NO: 115924 - DNA, 3785 bp, Homo sapiens
  Payload ID: 2620
  Gene Symbol: CABLES2
  Gene Name: Cdk5 and Abl enzyme substrate 2
  Uniprot ID: Q9BTV7
  ENST ID: ENST00000279101
  CDS Start-End: 10-1446
agtctgaggatggccgcggccgcggccggtggagccccgggcccggcccccggccccgccgggcccccgccacccgccgcgccgacctcggccgctcgggccccgccgcaggcgctgcggaggcgcggggactcgcggcgccgccaggccgcgcttttcttcctcaacaacatctccctggacgggcggcccccgagcctgggcccgggcggagagaagcccccgccgccgcccgccgaggcccgcgaaccgccagcgccgccgccgccggagccccccaccgggctgcccgccaggacccccgcgccccagggcctgctcagccccacgcaggtgcccaccggcctcggcctggatgggcagcgccagaggaagcgagtcacgtcccagcgctgctccctggagtttctggaagatgccgtgggatgcgctccagcacagagaaccaaacacacatctggatcaccgagacataaaggcctgaagaagacccacttcatcaagaacatgaggcagtacgacaccaggaacagcaggatcgtgctcatctgtgccaagcggtccctgtgcgcggccttctcggtcctgccctatggggaaggcctgcggatcagtgacctgagggtggacagccagaagcagaggcacccgtccggcggcgtctctgtgtcttccgagatggtctttgagctagaaggtgtggagctaggagcagacgggaaggtcgtgtcttatgcgaagttcctgtatcccaccaacgccctggtcacacacaagagtgacagccatggcctgctgcccacacctcggcccagtgtcccccggactctgccagggtcaagacataaacctgcccccaccaagtcggcaccagccagcacagaactagggagtgacgtgggggacaccctggagtacaaccccaacctcctggatgacccgcagtggccctgcggcaagcacaaacgtgtcctcatctttgcgtcgtacatgaccacagtgatagaatacgtgaagccctcagacctcaaaaaggacatgaacgagaccttcagggagaagttcccccatgtcaaactgacgctgagcaaaatcaggagcttaaagcgggagatgcggagcctgtcggaggagtgcagcctggagcccgtgacggtggccatggcctacgtgtactttgagaagctggtcctgcagggcaagctcagcaaacagaaccgcaagctgtgcgctggcgcctgcgtgctgctggctgccaagatcagcagtgacctgcgcaagagcggcgtgacgcagctcatcgataagttagaagaaaggtttcgattcaacaggcgcgacctgatagggtttgagttcacagtgctcgtggccttggagctggccctgtatcttcccgagaaccaagtgttacctcattacaggcgcctcacccagcagttctagcagaggccccacagaaggctcagggcaccgaggtgcacttgccggcctgggaggtgtcccactgaagccccgcgcctcctcctgccagcacccccagcacctgctagcaggaggcacctggcctccgctggtgcagctttcctttttgcctctttgccatttccttggaaagagacgtcgctttcatccccaagtgcaccgtccctccgaggggatttctgagaattctcctgcatttttacataaactaaatgtgaggtttgttactggtatttttttcacgtgcctgagaccagcctggtaccaggaccttttgttcacagcgtgcagcagcgagccggctgcagtgtgtctcccctggcctcgccttctgcaaaccaccgcagccaccacagcgtcagggtggagatctgggtttctagacctcactgaacacactggaatggctgagtttaacttatttaggcattcatcttggagatgtggtttttcgggttccccagcagcatctcccgacaccaactgtgccgctggctccctgccacctgaagccgagctcctccagagctttctccgcccacctcactgcatcccaagtggagcttttggtgtccagttaggccagcgggagcagtctcctgatttattttgatctcattcttggactcttggacctctctgttcttcaagcatcgtgtcactgtgaaatcctaacgcccctgtgtcctacagaccgacggcacaacagacagctgcccatcccatgccatgctctaccctctgcctctcaccaggagacactctgggcctccaggacaattgctgcttgccggctcttatttttctaagcaatattgtgatggagaaaaataacatatttattgggatttggttttttgggtcttttttttttaagggaacaaaaaatggttaaatgaggtctgctgaagttgacttgaaaacacacttgaccctcaggcaggagggcactgaccacaccccacacaacctcaaagggtcagtgcgtcagtgccttttcttctgaggcaggaaacaggtgccatcttggccacctcggccagggcagcccaccatgctaaaaggaccccaaatggtggtcgttgtcccttctgtgcaggccagcagggccccatctctagtttttccacgtctgtctgaagttcttgcaacaaattctgcatggtccagcgctccagctagctgcctcatcaaaaacactgaataaccaaggactgctgagtttttcttcatggggggtcagctggtctcaaaactggccactgcctcagccaccaagctttttcctaccactaccttataaacctgcctggccctggaggggctctgggacgactttgtctctagcccattaatacaatacatcctatgctttctgtgcagactggtgcttccgcagaaaggagatgccaattctgctatcacagaactccaccagcaactccacccgaccccagcagtggtgcaggacagctgccagcacccacctggccctcctccttttccacagccactcactggggccaccaaaacccagagatggcaggtgtgtgggacagactggaggatgaggacaaaccaaagcctttgttctttcttattgtggagcgtccccttccatcaagcagcctgccctcaagccaaggatcatcccctggaacccagtatgcacccagaggggactcagcttcaaagctgctccaccatgctgggtcccaggcagctttcctctgaaaagcaacctctcctgccacccagatcccatctcaagagctcgcccatgttacgagcatgtaaaggactgacttcctagtaactgttgcagtttacaacctgccctccagggacacgtctccatggtttttcctacacatgaatgcgagaaatggctgataagcacagtaatttaagattgcgtattcatgtagtgagatttagtcattaaccaacccggtctttgtgatgtgtgaagccttcccttcagttatgtcccatttttatgatgccaaaagctgccactgtgtggtattcgaggattattgcaacaaagccagtagttaaaccaaactacagtctcagcctgtcattctctagaacacatccaggtgtcggagctaaggtgttcagctcggctgtgactatacagaaccaggcctggcgttgcttccgcaccggtagcagttgtggatgtcagtgtgcataagcaagtatcagacctcagaatgtttgagttattttgtcttagatatctgtttttaaatggataatgtatttgtcctttaaacctcagttttgcaata

SEQ ID NO: 115925 - DNA, 775 bp, Homo sapiens
  Payload ID: 2620
  Gene Symbol: CABLES2
  Gene Name: Cdk5 and Abl enzyme substrate 2
  ENST ID: ENST00000453274
  CDS Start-End: 1-775
gacaccaggaacagcaggatcgtgctcatctgtgccaagcggtccctgtgcgcggccttctcggtcctgccctatggggaaggcctgcggatcaggtcgtgtcttatgcgaagttcctgtatcccaccaacgccctggtcacacacaagagtgacagccatggcctgctgcccacacctcggcccagtgtcccccggactctgccagggtcaagacataaacctgcccccaccaagtcggcaccagccagcacagaactagggagtgacgtgggggacaccctggagtacaaccccaacctcctggatgacccgcagtggccctgcggcaagcacaaacgtgtcctcatctttgcgtcgtacatgaccacagtgatagaatacgtgaagccctcagacctcaaaaaggacatgaacgagaccttcagggagaagttcccccatgtcaaactgacgctgagcaaaatcaggagcttaaagcgggagatgcggagcctgtcggaggagtgcagcctggagcccgtgacggtggccatggcctacgtgtactttgagaagctggtcctgcagggcaagctcagcaaacagaaccgcaagctgtgcgctggcgcctgcgtgctgctggctgccaagatcagcagtgacctgcgcaagagcggcgtgacgcagctcatcgataagttagaagaaaggtttcgattcaacaggcgcgacctgatagggtttgagttcacagtgctcgtggccttggagctggccctgtatcttcccgagaa

SEQ ID NO: 115926 - DNA, 2122 bp, Homo sapiens
  Payload ID: 2621
  Gene Symbol: CDK5RAP1
  Gene Name: CDK5 regulatory subunit associated protein 1
  Uniprot ID: Q96SZ6
  ENST ID: ENST00000346416
  CDS Start-End: 155-1918
agcatgacccggcctgaagtagcggcggaacggaagtcgcttgtgtatgaacgcagcggcggacctgtgaggggatccgacttgccggcagaacttacgctgcgggaccccgggcactgttgctgctgcgggagactgtgggctgtttagtgccatgcaccctttacagtgtgtcctccaagtgcagaggtctctggggtggggaccattggcctctgtgtcttggctgtcgctgaggatgtgcagggcacacagcagtctctctagtaccatgtgtcccagtccagagaggcaggaggatggagctcggaaggatttcagctccaggctggctgctggaccgacttttcaacattttttaaaaagtgcctcagctcctcaggagaagctgtcttcagaagtggaagacccacctccctatctcatgatggatgaacttcttggaaggcagagaaaagtctacctcgagacctatggctgccagatgaatgtgaatgacacagagatagcctggtccatcttacagaagagtggctacctgcggaccagtaacctccaagaggcagatgtgattctccttgtcacatgctctatcagggagaaggctgagcagaccatctggaaccgtttacatcagcttaaagccttgaagacaaggcggccccgctcccgggttcctctgaggattggaattctaggctgcatggctgagaggttgaaggaggagattctcaacagagagaaaatggtagatattttggctggtcctgatgcctaccgggaccttccccggctgctggctgttgctgagtcgggccagcaagctgccaacgtgctgctctctctggacgagacctatgctgatgtcatgccagtccagacaagcgccagtgccacgtctgcctttgtgtcaatcatgcgaggctgtgacaacatgtgtagctactgcattgttcctttcacccggggcagggagaggagtcggcctattgcctccattctagaggaagtgaagaagctttctgagcaggggctgaaagaagtgacacttcttggtcagaatgttaatagttttcgggacaattcggaggtccagttcaacagtgcagtgcctaccaatctcagtcgtggctttaccaccaactataaaaccaagcaaggaggacttcgttttgctcatcttctggatcaggtctccagagtagatcctgaaatgaggatccgttttacctctccccaccccaaggattttcctgatgaggttctgcagctgattcatgagagagataacatctgtaaacagatccacctgccagcccagagtggaagcagccgtgtgttggaggccatgcggaggggatattcaagagaagcttatgtggagttagttcaccatattagagaatctattccaggtgtgagcctcagcagcgatttcattgctggcttttgtggtgagacggaggaagatcacgtccagacagtctctttgctccgggaagttcagtacaacatgggcttcctctttgcctacagcatgagacagaagacacgggcatatcataggctgaaggatgatgtcccggaagaggtaaaattaaggcgtttggaggaactcatcactatcttccgagaagaagcaacaaaagccaatcagacctctgtgggctgtacccagttggtgctagtggaagggctcagtaaacgctctgccactgacctgtgtggcaggaatgatggaaaccttaaggtgatcttccctgatgcagagatggaggatgtcaataaccctgggctcagggtcagagcccagcctggggactatgtgctggtgaagatcacctcagccagttctcagacacttaggggacatgttctctgcaggaccactctgagggactcttctgcatattgctgacctgagaggatggcctcagagctgacttgggcaatcctccccaacaggaaggggagacattgcctgccactgaggaaacaggtcatgaaggtggagataagctgcaaggggcgaagcaactttatgtcagtggaaaacgtgtctctttaaagctgctatgtgaacagcttttacagtcattaaatttacctaaactaaggttaa

SEQ ID NO: 115927 - DNA, 1891 bp, Homo sapiens
  Payload ID: 2621
  Gene Symbol: CDK5RAP1
  Gene Name: CDK5 regulatory subunit associated protein 1
  Uniprot ID: Q96SZ6
  ENST ID: ENST00000339269
  CDS Start-End: 155-1687
agcatgacccggcctgaagtagcggcggaacggaagtcgcttgtgtatgaacgcagcggcggacctgtgaggggatccgacttgccggcagaacttacgctgcgggaccccgggcactgttgctgctgcgggagactgtgggctgtttagtgccatgcaccctttacagtgtgtcctccaagtgcagaggtctctggggtggggaccattggcctctgtgtcttggctgtcgctgaggatgtgcagggcacacagcagtctctctagtaccatgtgtcccagtccagagaggcaggaggatggagctcggaaggatttcagctccaggctggctgctggaccgacttttcaacattttttaaaaagtgcctcagctcctcaggagaagctgtcttcagaagtggaagacccacctccctatctcatgatggatgaacttcttggaaggcagagaaaagtctacctcgagacctatggctgccagatgaatgtgaatgacacagagatagcctggtccatcttacagaagagtggctacctgcggaccagtaacctccaagaggcagatgtgattctccttgtcacatgctctatcagggagaaggctgagcagaccatctggaaccgtttacatcagcttaaagccttgaagacaaggcggccccgctcccgggttcctctgaggattggaattctaggctgcatggctgagaggttgaaggaggagattctcaacagagagaaaatggtagatattttggctggtcctgatgcctaccgggaccttccccggctgctggctgttgctgagtcgggccagcaagctgccaacgtgctgctctctctggacgagacctatgctgatgtcatgccagtccagacaagcgccagtgccacgtctgcctttgtgtcaatcatgcgaggctgtgacaacatgtgtagctactgcattgttcctttcacccggggcagggagaggagtcggcctattgcctccattctagaggaagtgaagaagctttctgagcaggttctgcagctgattcatgagagagataacatctgtaaacagatccacctgccagcccagagtggaagcagccgtgtgttggaggccatgcggaggggatattcaagagaagcttatgtggagttagttcaccatattagagaatctattccaggtgtgagcctcagcagcgatttcattgctggcttttgtggtgagacggaggaagatcacgtccagacagtctctttgctccgggaagttcagtacaacatgggcttcctctttgcctacagcatgagacagaagacacgggcatatcataggctgaaggatgatgtcccggaagaggtaaaattaaggcgtttggaggaactcatcactatcttccgagaagaagcaacaaaagccaatcagacctctgtgggctgtacccagttggtgctagtggaagggctcagtaaacgctctgccactgacctgtgtggcaggaatgatggaaaccttaaggtgatcttccctgatgcagagatggaggatgtcaataaccctgggctcagggtcagagcccagcctggggactatgtgctggtgaagatcacctcagccagttctcagacacttaggggacatgttctctgcaggaccactctgagggactcttctgcatattgctgacctgagaggatggcctcagagctgacttgggcaatcctccccaacaggaaggggagacattgcctgccactgaggaaacaggtcatgaaggtggagataagctgcaaggggcgaagcaactttatgtcagtggaaaacgtgtctctttaaagctgctatgtgaacagcttttacagtcattaaatttacctaaactaaggttaa

SEQ ID NO: 115928 - DNA, 2164 bp, Homo sapiens
  Payload ID: 2621
  Gene Symbol: CDK5RAP1
  Gene Name: CDK5 regulatory subunit associated protein 1
  Uniprot ID: Q96SZ6
  ENST ID: ENST00000357886
  CDS Start-End: 155-1960
agcatgacccggcctgaagtagcggcggaacggaagtcgcttgtgtatgaacgcagcggcggacctgtgaggggatccgacttgccggcagaacttacgctgcgggaccccgggcactgttgctgctgcgggagactgtgggctgtttagtgccatgcaccctttacagtgtgtcctccaagtgcagaggtctctggggtggggaccattggcctctgtgtcttggctgtcgctgaggatgtgcagggcacacagcagtctctctagtaccatgtgtcccagtccagagaggcaggaggatggagctcggaaggatttcagctccaggctggctgctggaccgacttttcaacattttttaaaaagtgcctcagctcctcaggagaagctgtcttcagaagtggaagacccacctccctatctcatgatggatgaacttcttggaaggcagagaaaagtctacctcgagacctatggctgccagatgaatgtgaatgacacagagatagcctggtccatcttacagaagagtggctacctgcggaccagtaacctccaagaggcagatgtgattctccttgtcacatgctctatcagggagaaggctgagcagaccatctggaaccgtttacatcagcttaaagccttgaagacaaggcggccccgctcccgggttcctctgaggattggaattctaggctgcatggctgagaggttgaaggaggagattctcaacagagagaaaatggtagatattttggctggtcctgatgcctaccgggaccttccccggctgctggctgttgctgagtcgggccagcaagctgccaacgtgctgctctctctggacgagacctatgctgatgtcatgccagtccagacaagcgccagtgccacgtctgcctttgtgtcaatcatgcgaggctgtgacaacatgtgtagctactgcattgttcctttcacccggggcagggagaggagtcggcctattgcctccattctagaggaagtgaagaagctttctgagcaggtgttcctcccacctcggcctcccaaagtgttgggattacaggggctgaaagaagtgacacttcttggtcagaatgttaatagttttcgggacaattcggaggtccagttcaacagtgcagtgcctaccaatctcagtcgtggctttaccaccaactataaaaccaagcaaggaggacttcgttttgctcatcttctggatcaggtctccagagtagatcctgaaatgaggatccgttttacctctccccaccccaaggattttcctgatgaggttctgcagctgattcatgagagagataacatctgtaaacagatccacctgccagcccagagtggaagcagccgtgtgttggaggccatgcggaggggatattcaagagaagcttatgtggagttagttcaccatattagagaatctattccaggtgtgagcctcagcagcgatttcattgctggcttttgtggtgagacggaggaagatcacgtccagacagtctctttgctccgggaagttcagtacaacatgggcttcctctttgcctacagcatgagacagaagacacgggcatatcataggctgaaggatgatgtcccggaagaggtaaaattaaggcgtttggaggaactcatcactatcttccgagaagaagcaacaaaagccaatcagacctctgtgggctgtacccagttggtgctagtggaagggctcagtaaacgctctgccactgacctgtgtggcaggaatgatggaaaccttaaggtgatcttccctgatgcagagatggaggatgtcaataaccctgggctcagggtcagagcccagcctggggactatgtgctggtgaagatcacctcagccagttctcagacacttaggggacatgttctctgcaggaccactctgagggactcttctgcatattgctgacctgagaggatggcctcagagctgacttgggcaatcctccccaacaggaaggggagacattgcctgccactgaggaaacaggtcatgaaggtggagataagctgcaaggggcgaagcaactttatgtcagtggaaaacgtgtctctttaaagctgctatgtgaacagcttttacagtcattaaatttacctaaactaaggttaa

SEQ ID NO: 115929 - DNA, 974 bp, Homo sapiens
  Payload ID: 2621
  Gene Symbol: CDK5RAP1
  Gene Name: CDK5 regulatory subunit associated protein 1
  ENST ID: ENST00000427097
  CDS Start-End: 1-770
gctgcatggctgagaggttgaaggaggagattctcaacagagagaaaatggtagatattttggctggtcctgatgcctaccgggaccttccccggctgctggctgttgctgagtcgggccagcaagctgccaacgtgctgctctctctggacgagacctatgctgatgtcatgccagtccagacaagcgccagtgccacgtctgcctttgtatattcaagagaagcttatgtggagttagttcaccatattagagaatctattccaggtgtgagcctcagcagcgatttcattgctggcttttgtggtgagacggaggaagatcacgtccagacagtctctttgctccgggaagttcagtacaacatgggcttcctctttgcctacagcatgagacagaagacacgggcatatcataggctgaaggatgatgtcccggaagaggtaaaattaaggcgtttggaggaactcatcactatcttccgagaagaagcaacaaaagccaatcagacctctgtgggctgtacccagttggtgctagtggaagggctcagtaaacgctctgccactgacctgtgtggcaggaatgatggaaaccttaaggtgatcttccctgatgcagagatggaggatgtcaataaccctgggctcagggtcagagcccagcctggggactatgtgctggtgaagatcacctcagccagttctcagacacttaggggacatgttctctgcaggaccactctgagggactcttctgcatattgctgacctgagaggatggcctcagagctgacttgggcaatcctccccaacaggaaggggagacattgcctgccactgaggaaacaggtcatgaaggtggagataagctgcaaggggcgaagcaactttatgtcagtggaaaacgtgtctctttaaagctgctatgtgaacagcttttacagtcattaaatttacctaaactaaggttaa

SEQ ID NO: 115930 - DNA, 1930 bp, Homo sapiens
  Payload ID: 2621
  Gene Symbol: CDK5RAP1
  Gene Name: CDK5 regulatory subunit associated protein 1
  Uniprot ID: Q96SZ6
  ENST ID: ENST00000473997
  CDS Start-End: 233-1726
gtatgaacgcagcggcggacctgtgaggggatccgacttgccggcagaacttacgctgcgggaccccgggcactgttgctgctgcgggagtccagagaggcaggaggatggagctcggaaggatttcagctccaggctggctgctggaccgacttttcaacattttttaaaaagtgcctcagctcctcaggagaagctgtcttcagaagtggaagacccacctccctatctcatgatggatgaacttcttggaaggcagagaaaagtctacctcgagacctatggctgccagatgaatgtgaatgacacagagatagcctggtccatcttacagaagagtggctacctgcggaccagtaacctccaagaggcagatgtgattctccttgtcacatgctctatcagggagaaggctgagcagaccatctggaaccgtttacatcagcttaaagccttgaagacaaggcggccccgctcccgggttcctctgaggattggaattctaggctgcatggctgagaggttgaaggaggagattctcaacagagagaaaatggtagatattttggctggtcctgatgcctaccgggaccttccccggctgctggctgttgctgagtcgggccagcaagctgccaacgtgctgctctctctggacgagacctatgctgatgtcatgccagtccagacaagcgccagtgccacgtctgcctttgtgtcaatcatgcgaggctgtgacaacatgtgtagctactgcattgttcctttcacccggggcagggagaggagtcggcctattgcctccattctagaggaagtgaagaagctttctgagcaggggctgaaagaagtgacacttcttggtcagaatgttaatagttttcgggacaattcggaggtccagttcaacagtgcagtgcctaccaatctcagtcgtggctttaccaccaactataaaaccaagcaaggaggacttcgttttgctcatcttctggatcaggtctccagagtagatcctgaaatgaggatccgttttacctctccccaccccaaggattttcctgatgaggttctgcagctgattcatgagagagataacatctgtaaacagatccacctgccagcccagagtggaagcagccgtgtgttggaggccatgcggaggggatattcaagagaagcttatgtggagttagttcaccatattagagaatctattccaggtgtgagcctcagcagcgatttcattgctggcttttgtggtgagacggaggaagatcacgtccagacagtctctttgctccgggaagttcagtacaacatgggcttcctctttgcctacagcatgagacagaagacacgggcatatcataggctgaaggatgatgtcccggaagaggtaaaattaaggcgtttggaggaactcatcactatcttccgagaagaagcaacaaaagccaatcagacctctgtgggctgtacccagttggtgctagtggaagggctcagtaaacgctctgccactgacctgtgtggcaggaatgatggaaaccttaaggtgatcttccctgatgcagagatggaggatgtcaataaccctgggctcagggtcagagcccagcctggggactatgtgctggtgaagatcacctcagccagttctcagacacttaggggacatgttctctgcaggaccactctgagggactcttctgcatattgctgacctgagaggatggcctcagagctgacttgggcaatcctccccaacaggaaggggagacattgcctgccactgaggaaacaggtcatgaaggtggagataagctgcaaggggcgaagcaactttatgtcagtggaaaacgtgtctctttaaagctgctatgtgaacagcttttacagtcattaaatttacctaaactaaggttaa

SEQ ID NO: 115931 - DNA, 3272 bp, Homo sapiens
  Payload ID: 2622
  Gene Symbol: CDKAL1
  Gene Name: CDK5 regulatory subunit associated protein 1-like 1
  Uniprot ID: Q5VV42
  ENST ID: ENST00000274695
  CDS Start-End: 168-1907
aaataaacgtggcgggacgtatgtgtcatggcgctctccatctaaagtctgtgcagcttccggagagtggcgggttgattttctcactttggactggtttttacttcccgacttctggactcatctttcaagaggactttagactaattgcagataattaagagaatatgccttctgcatcctgtgatacactactggatgacatcgaagatatcgtgtctcaggaagattcaaaaccacaagataggcattttgtaagaaaggatgttgtcccgaaggtacgaaggcgaaatacccaaaaatatttgcaagaggaagaaaacagtccaccaagtgacagcactattccaggcatacagaaaatttggatacgaacatggggttgttctcataataattcagatggagaatatatggctggacagctagctgcttatggctataaaattacagaaaatgcatccgatgcagatttatggctcctgaacagttgcactgtaaaaaacccagctgaagaccactttagaaactcaattaaaaaagctcaagaggagaacaagaaaatcgtactggctggatgcgttcctcaagcccagcctcgccaggactaccttaagggactgagtatcattggggttcagcagatagatcgtgtggtagaagttgtggaggagacaattaaaggtcactctgtgagactgctgggtcagaaaaaggataatggaaggcggcttgggggagcacgattggatttgccgaagattaggaagaatccactgatagaaatcatttccatcaataccgggtgtctcaatgcttgtacctactgcaaaactaaacacgccagaggaaatttggccagttatccaattgatgaactagtagatagagccaaacaatcttttcaagagggtgtttgtgagatatggttgaccagtgaagacacgggggcttatggcagagatattggcaccaatctccccacactcctgtggaaactggttgaagtgattcctgagggagcaatgctgaggcttggcatgacaaatccgccctatattttagagcatctggaggaaatggcaaaaatccttaatcaccccagagtctacgcttttctgcacataccagtccagtctgcctccgacagcgtactcatggaaatgaaaagagaatactgtgtggctgacttcaaaagagtagtggattttctgaaagagaaagttcctggaataactattgctacagatattatctgtggttttcctggagaaacagatcaggattttcaagaaacagtgaaacttgttgaagagtacaaattcccaagcctgtttattaaccaattttacccaagaccaggaactcctgctgcaaaaatggaacaagttccagcacaagtgaaaaagcaaaggacaaaagatctttctcgggtgtttcattcttacagtccatatgatcacaagattggtgaaagacaacaagtgttagtaacagaagaatcttttgattccaagttttatgttgcacacaatcaattctatgagcaggttttagtgccaaagaaccctgcgttcatggggaagatggttgaagtggacatctatgaatcaggcaaacattttatgaaagggcagccagtatctgatgccaaagtgtacacgccctccatcagcaaaccgctagcaaagggagaagtctcgggtttgacaaaggacttcagaaatgggcttgggaaccagctgagttcaggatcccacacctctgctgcatctcagtgtgactcagcgagttccagaatggtgctgcccatgccaaggctacatcaagactgtgcgctgaggatgtccgtgggcttggctctgctgggtcttctttttgctttttttgtcaaggtctataattagaatacaactaatggaaacatctataaagaagaatacatttctaattaaaatcttcaatgaacaggaaagcgacatctccattctccaagggcaataatttgtactggtcatgctgcctccttctcagccactcttcttaatgaggctccccctgtctcacattgagttgggcccattggttatttgacctaaaacctaatcaccgctaccatagcacatccttcaaattaaactgcttttggtttacttttagcaagaaatgcaagcggttgcatttttttctgtttgtttcaatctctaatctttaagtcagaacctaattgtacagtggctctggccatcttttcctcatgtggaagaattttctatctttaataaactttttctttgttttttttttccagatggagtttcgctcttgtcccccaggctggagtggtgcagtggcacgatctcaggtcactgcaacctctgcctcctgggttcaaacgattctcctgcctcagcctcccaagtagctgggattacaggcatgcgccaccaagcccagacaatttttttgtgttttcagtagagacggagtttcaccatgttggccaggctagtctcgaactcctgacctcaagtgatccgcccgcctcggcctcccaaagtgctaggattacaggcgtgagccactgcgcccggcctctttaataaatatttttaagtgcatcttccccttcaggctttgtttggagtcccagtgctacaaacattgtatttttcacagcagatgtgttcctgaaaagtgtatagaaacctgttctgggaacctgaatgcttttggaatgcacggggagagtctgccagctaaaggactcctggcaacattctgtgaaatatgaaactggaaaactggatttgtcgaaaactaattgtgcccattttctcacatttttgatccattggggttttttttttgtttttgtttttttttttttttgagtcaaggtctcactctgtcaccctggctggagtgcaatggcactatcttggctcactgcagccttgacctcctggactcaagcagtcctcctacctcagcctccctaatagccaggggctacaggcatataccaccatgcccaactaattttttaattttttgtagagatgagtgtcactatgttgcccaggcttgcctggaactcctagcctcaagcagtcttcttgcctcagcctcccaaagtgctgggattacaggcgtgagccactccacccagcccagattaaatgtttttatttctacctgccatcattggtctttactaagtgaagtgacttctttctttaacaataaatagaattggtatactaagcaaa

SEQ ID NO: 115932 - DNA, 3115 bp, Homo sapiens
  Payload ID: 2622
  Gene Symbol: CDKAL1
  Gene Name: CDK5 regulatory subunit associated protein 1-like 1
  Uniprot ID: Q5VV42
  ENST ID: ENST00000378610
  CDS Start-End: 11-1750
ggtagagaatatgccttctgcatcctgtgatacactactggatgacatcgaagatatcgtgtctcaggaagattcaaaaccacaagataggcattttgtaagaaaggatgttgtcccgaaggtacgaaggcgaaatacccaaaaatatttgcaagaggaagaaaacagtccaccaagtgacagcactattccaggcatacagaaaatttggatacgaacatggggttgttctcataataattcagatggagaatatatggctggacagctagctgcttatggctataaaattacagaaaatgcatccgatgcagatttatggctcctgaacagttgcactgtaaaaaacccagctgaagaccactttagaaactcaattaaaaaagctcaagaggagaacaagaaaatcgtactggctggatgcgttcctcaagcccagcctcgccaggactaccttaagggactgagtatcattggggttcagcagatagatcgtgtggtagaagttgtggaggagacaattaaaggtcactctgtgagactgctgggtcagaaaaaggataatggaaggcggcttgggggagcacgattggatttgccgaagattaggaagaatccactgatagaaatcatttccatcaataccgggtgtctcaatgcttgtacctactgcaaaactaaacacgccagaggaaatttggccagttatccaattgatgaactagtagatagagccaaacaatcttttcaagagggtgtttgtgagatatggttgaccagtgaagacacgggggcttatggcagagatattggcaccaatctccccacactcctgtggaaactggttgaagtgattcctgagggagcaatgctgaggcttggcatgacaaatccgccctatattttagagcatctggaggaaatggcaaaaatccttaatcaccccagagtctacgcttttctgcacataccagtccagtctgcctccgacagcgtactcatggaaatgaaaagagaatactgtgtggctgacttcaaaagagtagtggattttctgaaagagaaagttcctggaataactattgctacagatattatctgtggttttcctggagaaacagatcaggattttcaagaaacagtgaaacttgttgaagagtacaaattcccaagcctgtttattaaccaattttacccaagaccaggaactcctgctgcaaaaatggaacaagttccagcacaagtgaaaaagcaaaggacaaaagatctttctcgggtgtttcattcttacagtccatatgatcacaagattggtgaaagacaacaagtgttagtaacagaagaatcttttgattccaagttttatgttgcacacaatcaattctatgagcaggttttagtgccaaagaaccctgcgttcatggggaagatggttgaagtggacatctatgaatcaggcaaacattttatgaaagggcagccagtatctgatgccaaagtgtacacgccctccatcagcaaaccgctagcaaagggagaagtctcgggtttgacaaaggacttcagaaatgggcttgggaaccagctgagttcaggatcccacacctctgctgcatctcagtgtgactcagcgagttccagaatggtgctgcccatgccaaggctacatcaagactgtgcgctgaggatgtccgtgggcttggctctgctgggtcttctttttgctttttttgtcaaggtctataattagaatacaactaatggaaacatctataaagaagaatacatttctaattaaaatcttcaatgaacaggaaagcgacatctccattctccaagggcaataatttgtactggtcatgctgcctccttctcagccactcttcttaatgaggctccccctgtctcacattgagttgggcccattggttatttgacctaaaacctaatcaccgctaccatagcacatccttcaaattaaactgcttttggtttacttttagcaagaaatgcaagcggttgcatttttttctgtttgtttcaatctctaatctttaagtcagaacctaattgtacagtggctctggccatcttttcctcatgtggaagaattttctatctttaataaactttttctttgttttttttttccagatggagtttcgctcttgtcccccaggctggagtggtgcagtggcacgatctcaggtcactgcaacctctgcctcctgggttcaaacgattctcctgcctcagcctcccaagtagctgggattacaggcatgcgccaccaagcccagacaatttttttgtgttttcagtagagacggagtttcaccatgttggccaggctagtctcgaactcctgacctcaagtgatccgcccgcctcggcctcccaaagtgctaggattacaggcgtgagccactgcgcccggcctctttaataaatatttttaagtgcatcttccccttcaggctttgtttggagtcccagtgctacaaacattgtatttttcacagcagatgtgttcctgaaaagtgtatagaaacctgttctgggaacctgaatgcttttggaatgcacggggagagtctgccagctaaaggactcctggcaacattctgtgaaatatgaaactggaaaactggatttgtcgaaaactaattgtgcccattttctcacatttttgatccattggggttttttttttgtttttgtttttttttttttttgagtcaaggtctcactctgtcaccctggctggagtgcaatggcactatcttggctcactgcagccttgacctcctggactcaagcagtcctcctacctcagcctccctaatagccaggggctacaggcatataccaccatgcccaactaattttttaattttttgtagagatgagtgtcactatgttgcccaggcttgcctggaactcctagcctcaagcagtcttcttgcctcagcctcccaaagtgctgggattacaggcgtgagccactccacccagcccagattaaatgtttttatttctacctgccatcattggtctttactaagtgaagtgacttctttctttaacaataaatagaattggtatactaagcaaa

SEQ ID NO: 115933 - DNA, 1673 bp, Homo sapiens
  Payload ID: 2622
  Gene Symbol: CDKAL1
  Gene Name: CDK5 regulatory subunit associated protein 1-like 1
  Uniprot ID: Q5VV42
  ENST ID: ENST00000613575
  CDS Start-End: 257-550
gtcatggcgctctccatctaaagtctgtgcagcttccggagagtggcgggttgattttctcactttggactggtttttacttcccgacttctggtggttggttactcgcactatgcagacgtgttgcggtgctgaatacaacatttattactaaagccagacactggatcaccgtcacggcagatgtcagcacacctgttgtaatcaactcatctttcaagaggactttagactaattgcagataattaagagaatatgccttctgcatcctgtgatacactactggatgacatcgaagatatcgtgtctcaggaagattcaaaaccacaagataggcattttgtaagaaaggatgttgtcccgaaggtacgaaggcgaaatacccaaaaatatttgcaagaggaagaaaacagtccaccaagtgacagcactattccaggcatacagaaaatttggatacgaacatggggttgttctcataataattcagatggagaatatatggctggacagctagctgcttatggctataaaattacaggtgaatgaaatttgggaatcctatacttggaattctggaatggctagcctgggccaggaaaaatcactttgtaatctaagaaggaattgagttaagaagatttgttcatcacaccacatttccatgttgttgaggaaaatagattggcagtggtgacaaggtcaaggatgtgttgttcgaagttgtagaagataagcagcaatttaaaggcgttacaatacatttttaagagtggaaattgcattgaagagtggaagaaaagtcgacataagagaattagggcatgttgtttgcccaggctggtcttgaactcctgagctcaaccaatccacctgcctcggcctcccaaagtgctgggattacaggcgtgagccaccgtggctggcccttaatatgttttaaaaggatgtttaatactcttcattactgtgttatgcaatagttgcatgatgatttttctgatctctacattctattttttttctttttaaaatggagcacagaagtacttagtttctgatgtttttccatcttggcccagtaatttcctttttttttgttattttatgaagcacaaaactaaatatttttgaaccaagagactactgtgtggtattaattttgattttgtactaaattcatgttatttacacaaatcaaatagtgtcaaccttaaaatttttttaagcaatatttttcttatgtttgagagttaacatgtatggttgattagaatcttcaccttctaaagggattaaggaaaaacctcgttcactgttgtgaattctaaaatgttttggttccaagtcctagtttttcttaccctggtattatgtccaaaatgaatgcccactaaaagttagtaactctcatggcaattaaagtattttgataatgtttataagttcttgttctcaattttgccactagtaaagatgtgggagaagttaatctttttttgttgtctttcttgtgaacttaaagatcatttttcatcctgttcaacctttggcctgaccttttcaggtcactaaatgtctggtttgcacttcttgtagcatgtgagaaataatacttcaaaattcaagtgtaattgtattaatttttgtgaataaactgctatggagtgct

SEQ ID NO: 115934 - DNA, 6228 bp, Homo sapiens
  Payload ID: 2623
  Gene Symbol: CDK5RAP2
  Gene Name: CDK5 regulatory subunit associated protein 2
  Uniprot ID: Q96SN8
  ENST ID: ENST00000349780
  CDS Start-End: 181-5862
ggaagaagcgccgggaaagatggcggcgtctgtggtttgaattccagcggcgccgccagagtctgaacaagagctggggtggagggggcggggacctggggagcccggcgggtcgctatcgcggggggtactagtggcgccgccgccacagacaccaacgctgtcgccacctctgtagccatgatggacttggtgttggaagaggacgtcaccgtccctgggacgctcagcggctgcagtggccttgttcccagtgtaccagatgacctggatggcatcaaccccaatgctgggttgggaaatggtctgctcccaaatgtgtcagaagaaacagtgtctcccaccagagcacggaacatgaaggactttgaaaatcaaatcactgaattgaagaaagaaaactttaacctaaagctccgcatctatttccttgaggaaagaatgcaacaggaatttcatggccccactgaacatatctacaaaactaacattgagctcaaggtggaagtagaaagtctgaagcgggaactccaggagagagagcagctgctcatcaaagcctccaaagcagttgagagcttagctgaagcaggtggctctgaaatccagcgggtgaaagaagatgctcgaaagaaggtgcagcaggtggaagatctcctaactaaaagaatactccttttggaaaaggatgtgacagccgcccaggcagaactggaaaaggcctttgcagggacagagacggagaaggctcttcggttgcgtttggaaagcaagctttcagagatgaagaagatgcacgagggggacttggcgatggctctggtcctggatgagaaagacagactgattgaggagttgaagctgtctttgaagagcaaagaagctttaattcagtgccttaaagaggagaaatctcagatggcatgtcctgatgagaatgtgtcatctggagagctccgaggactttgtgctgctccaagggaagaaaaggagagagaaactgaggctgcacaaatggagcatcagaaggagagaaacagctttgaagagaggatccaggcacttgaagaggacctgagagagaaggaaagagaaattgctacagagaagaaaaatagtctaaagagggataaagccattcagggtttaaccatggcattaaaatcaaaggaaaaaaaggttgaagaacttaactctgaaattgaaaagctcagtgctgcctttgctaaagccagagaggccctacagaaagcacagacccaggaatttcaggggtctgaagactatgagactgctctatcaggaaaggaagccctttcggctgcgctgcgctcacaaaacctcaccaagagtacagagaaccacagactgcgtagaagcattaagaagatcacccaggagctgagtgacttgcagcaggagagggagagactggagaaggacctggaggaagcccatcgagagaagagcaaaggagactgcaccatccgtgatcttagaaatgaagttgaaaaattacgcaatgaagtgaatgaaagagagaaagcaatggaaaatcgttacaagagtcttctgagtgaaagcaataaaaaattgcacaatcaagagcaagtgatcaaacatctaacagaaagtaccaatcagaaggacgtgttgcttcagaaattcaatgaaaaagatttggaagtaatacagcagaactgctatttaatggctgcagaggatcttgagctcaggagtgaaggcttaataacagaaaagtgctcttctcaacagccaccaggcagcaaaaccatcttctctaaggaaaagaaacaatcatcagactatgaagagctgattcaggtcttaaagaaagagcaggacatctatacccatctggtcaaatctctgcaggaatcagacagtatcaacaacctgcaggctgagttaaacaagatttttgccctgcggaagcaactggagcaggatgtgctttcatatcagaatttgcggaagaccttggaggagcagatcagcgaaattcggaggcgggaagaagaatcattttcactttatagtgatcaaacatcttatctaagtatttgccttgaagaaaacaatcggtttcaagtggaacatttttctcaagaagaacttaagaaaaaggtcagtgaccttatacagctagtgaaggagctgtatacagacaaccagcacctgaagaaaaccatttttgatctctcctgcatgggtttccagggaaatgggtttccagatagacttgcgtctacagaacaaacagagcttctggctagcaaggaggacgaggacacgatcaaaattggggaggatgacgagattaatttcctgagtgaccagcatttgcagcagagtaatgagattatgaaagacctttccaaaggaggctgcaaaaatggatacttaaggcacacggagtctaagatttcagattgtgatggggcccacgcacctggctgcctagaagaaggtgcattcataaacctgcttgcccctttgttcaatgagaaggccacattattactggaatccaggccagaccttctgaaagtggtacgggaactgcttctgggacaactattcttgacagagcaggaagtttctggagaacaccttgatggtaaaactgagaagacacctaagcaaaaaggtgaacttgtacattttgtccaaaccaactcattttccaagccacatgatgaactgaagttgtcttgtgaggcccagctagtaaaggcaggcgaagtgcccaaggtaggactgaaagatgcctcagtgcagactgtggccacggagggcgacctgctgagattcaagcatgaagcaacaagagaggcttgggaagagaaaccgatcaacactgcactcagcgcagagcatcggccagagaacctgcacggggtgcctgggtggcaggctgccctcctttccctccctggtattaccaacagagaggctaagaagtcccgcttgccaatcctaataaaaccatcccggtcattaggaaatatgtatcgtctccctgccacccaggaggtggtgacgcagctgcagagccagatcttggagctgcagggggagctgaaggagtttaaaacttgtaataagcaacttcaccaaaagttaattctggctgaagcagtgatggaggggaggccaacgcccgacaaaacgttgctgaatgctcagccccctgtgggagcagcctaccaggacagcccaggagagcagaaaggaattaaaaccacatcttctgtctggagagacaaggaaatggacagtgatcagcaaagaagctacgagattgactctgagatttgcccacctgatgaccttgccagcttgccatcatgcaaagaaaatcctgaagatgttctgagcccaacttcagtagctacttacctgagttccaagagtcagccttctgctaaagtcagtgtgatggggactgatcagtcagagagcattaatacctcaaatgagacagaatacttaaaacagaaaatccatgacttggaaactgagctggaaggctaccagaatttcatatttcagcttcaaaagcactcccagtgcagtgaggccataattacagttttgtgtgggacagaaggggcccaggatggcttgagcaagcccaagaatggttctgatggggaagaaatgaccttttcaagtttgcaccaagtgcgatacgtgaaacacgtgaaaatcctcggtccgctggccccagagatgattgacagcagggtgctggagaacctcaaacagcagctggaggaacaggaatacaagctgcagaaggagcagaatttgaacatgcaacttttcagtgagatccataatctgcagaataagttcagagatctctcacctcccagatacgattcattagttcagtcccaagccagggagctctcccttcaacggcagcagattaaggatggccatggcatctgtgtcatctcccgtcaacacatgaacaccatgattaaggcatttgaggagttgctgcaggccagtgatgtggattactgtgtggccgagggtttccaggaacagctgaatcaatgtgctgagctgctggagaaattggaaaagctatttctcaacggaaaatcagttggagtggaaatgaacacccagaatgaactgatggagaggattgaggaagacaacttaacctaccaacatcttctgcctgaatctcctgagccttcagcctctcatgcgctctctgattatgaaacatctgaaaagtccttcttctcacgagaccagaagcaagataatgagacagagaagacttcagttatggtgaacagtttttctcaagacttactaatggaacacatacaggaaattcgaactttgagaaagcgtttagaagaatctattaaaacaaatgagaagctacggaaacagttggaacggcaaggatctgaatttgttcaaggttctacaagcatttttgcttctggttcagagcttcatagttctctaacatcagaaattcatttcttgaggaagcagaaccaggccctcaatgcaatgctcattaaaggatccagagataaacagaaggagaatgacaaattacgagagtccctctccaggaagaccgtgagcctggagcaccttcagcgggagtatgccagcgtgaaggaagaaaatgaaaggctgcagaaagaaggcagcgagaaggagagacacaaccagcagctgatccaggaggtccgctgcagcggccaggagctgagcagggtgcaggaggaggtgaagttgaggcagcagctgctctcacagaatgacaagctattgcagtctctccgagtggagctgaaggcgtatgagaagctggatgaagagcacaggagactgagagaggcgtcgggagaaggctggaaggggcaggatcctttcagggacctgcacagcctcctgatggagatccaggctctgcgcttgcaactagaaaggagcatcgaaaccagcagcactctgcagagcaggctcaaggaacagctggcaaggggggcagagaaggcacaggaaggagccctcactctggctgtccaagccgtgtccatccctgaggtgccccttcagcctgacaaacacgatggtgacaaatatcccatggaaagtgataattcatttgatctgtttgattcctcccaggcagtgacaccaaaatcagtttcagagactcctccactctctgggaatgacacggactccctctcctgcgacagtggcagttcggcaactagcactccgtgtgtgtcccgcctggtcactggccaccacctgtgggccagcaagaatggccgccatgtcctgggcctgattgaggactatgaggccctgctcaaacagatcagccagggacagaggctccttgctgaaatggacattcaaacccaagaggctcccagctccacaagtcaagagctgggaacaaagggtccacacccagcaccactgagcaagtttgtgagcagtgtgagcacggccaagctgaccctggaagaggcctacaggcggctgaagcttctctggagagtctcactccccgaggatggccagtgcccccttcactgtgagcagattggagaaatgaaggcagaggtcaccaaactacataaaaaattgtttgaacaagaaaagaagttgcaaaacaccatgaagcttttgcagctgagcaagcgccaggaaaaagtcatctttgatcaattggtcgtaacccacaaaatccttcggaaggccagaggaaacctggagcttaggcctgggggagcccatccaggaacatgcagtcccagcagaccaggctcctgagaagaactttcagccaataaagcttgtgcttcccccaccgagctcacgctgtctctttgttccaagtgtggttcctatttattgaggaagaaagagctgtctggccaaaggaaatctattttttcccttcatgttttctctctgaaagttggcttgagagttgttgtcagaaaggtgcaggtgctccacaaacgggtggtaaaaaggcctcgagctcttggatgttgtatttcagatcaggggcaggcaccggagttgaggctgtgcgccttggtgggcttcacgtcttcccctggatttgcttagtactcagccagtgccacagtttgaagattctcattaaatgattcatttcatttcaccttg

SEQ ID NO: 115935 - DNA, 5985 bp, Homo sapiens
  Payload ID: 2623
  Gene Symbol: CDK5RAP2
  Gene Name: CDK5 regulatory subunit associated protein 2
  Uniprot ID: Q96SN8
  ENST ID: ENST00000360190
  CDS Start-End: 181-5625
ggaagaagcgccgggaaagatggcggcgtctgtggtttgaattccagcggcgccgccagagtctgaacaagagctggggtggagggggcggggacctggggagcccggcgggtcgctatcgcggggggtactagtggcgccgccgccacagacaccaacgctgtcgccacctctgtagccatgatggacttggtgttggaagaggacgtcaccgtccctgggacgctcagcggctgcagtggccttgttcccagtgtaccagatgacctggatggcatcaaccccaatgctgggttgggaaatggtctgctcccaaatgtgtcagaagaaacagtgtctcccaccagagcacggaacatgaaggactttgaaaatcaaatcactgaattgaagaaagaaaactttaacctaaagctccgcatctatttccttgaggaaagaatgcaacaggaatttcatggccccactgaacatatctacaaaactaacattgagctcaaggtggaagtagaaagtctgaagcgggaactccaggagagagagcagctgctcatcaaagcctccaaagcagttgagagcttagctgaagcaggtggctctgaaatccagcgggtgaaagaagatgctcgaaagaaggtgcagcaggtggaagatctcctaactaaaagaatactccttttggaaaaggatgtgacagccgcccaggcagaactggaaaaggcctttgcagggacagagacggagaaggctcttcggttgcgtttggaaagcaagctttcagagatgaagaagatgcacgagggggacttggcgatggctctggtcctggatgagaaagacagactgattgaggagttgaagctgtctttgaagagcaaagaagctttaattcagtgccttaaagaggagaaatctcagatggcatgtcctgatgagaatgtgtcatctggagagctccgaggactttgtgctgctccaagggaagaaaaggagagagaaactgaggctgcacaaatggagcatcagaaggagagaaacagctttgaagagaggatccaggcacttgaagaggacctgagagagaaggaaagagaaattgctacagagaagaaaaatagtctaaagagggataaagccattcagggtttaaccatggcattaaaatcaaaggaaaaaaaggttgaagaacttaactctgaaattgaaaagctcagtgctgcctttgctaaagccagagaggccctacagaaagcacagacccaggaatttcaggggtctgaagactatgagactgctctatcaggaaaggaagccctttcggctgcgctgcgctcacaaaacctcaccaagagtacagagaaccacagactgcgtagaagcattaagaagatcacccaggagctgagtgacttgcagcaggagagggagagactggagaaggacctggaggaagcccatcgagagaagagcaaaggagactgcaccatccgtgatcttagaaatgaagttgaaaaattacgcaatgaagtgaatgaaagagagaaagcaatggaaaatcgttacaagagtcttctgagtgaaagcaataaaaaattgcacaatcaagagcaagtgatcaaacatctaacagaaagtaccaatcagaaggacgtgttgcttcagaaattcaatgaaaaagatttggaagtaatacagcagaactgctatttaatggctgcagaggatcttgagctcaggagtgaaggcttaataacagaaaagtgctcttctcaacagccaccaggcagcaaaaccatcttctctaaggaaaagaaacaatcatcagactatgaagagctgattcaggtcttaaagaaagagcaggacatctatacccatctggtcaaatctctgcaggaatcagacagtatcaacaacctgcaggctgagttaaacaagatttttgccctgcggaagcaactggagcaggatgtgctttcatatcagaatttgcggaagaccttggaggagcagatcagcgaaattcggaggcgggaagaagaatcattttcactttatagtgatcaaacatcttatctaagtatttgccttgaagaaaacaatcggtttcaagtggaacatttttctcaagaagaacttaagaaaaaggtcagtgaccttatacagctagtgaaggagctgtatacagacaaccagcacctgaagaaaaccatttttgatctctcctgcatgggtttccagggaaatgggtttccagatagacttgcgtctacagaacaaacagagcttctggctagcaaggaggacgaggacacgatcaaaattggggaggatgacgagattaatttcctgagtgaccagcatttgcagcagagtaatgagattatgaaagacctttccaaaggaggctgcaaaaatggatacttaaggcacacggagtctaagatttcagattgtgatggggcccacgcacctggctgcctagaagaaggtgcattcataaacctgcttgcccctttgttcaatgagaaggccacattattactggaatccaggccagaccttctgaaagtggtacgggaactgcttctgggacaactattcttgacagagcaggaagtttctggagaacaccttgatggtaaaactgagaagacacctaagcaaaaaggtgaacttgtacattttgtccaaaccaactcattttccaagccacatgatgaactgaagttgtcttgtgaggcccagctagtaaaggcaggcgaagtgcccaaggtaggactgaaagatgcctcagtgcagactgtggccacggagggcgacctgctgagattcaagcatgaagcaacaagagaggcttgggaagagaaaccgatcaacactgcactcagcgcagagcatcggccagagaacctgcacggggtgcctgggtggcaggctgccctcctttccctccctggtattaccaacagagaggctaagaagtcccgcttgccaatcctaataaaaccatcccggtcattaggaaatatgtatcgtctccctgccacccaggaggtggtgacgcagctgcagagccagatcttggagctgcagggggagctgaaggagtttaaaacttgtaataagcaacttcaccaaaagttaattctggctgaagcagtgatggaggggaggccaacgcccgacaaaacgttgctgaatgctcagccccctgtgggagcagcctaccaggacagcccaggagagcagaaaggaattaaaaccacatcttctgtctggagagacaaggaaatggacagtgatcagcaaagaagctacgagattgactctgagatttgcccacctgatgaccttgccagcttgccatcatgcaaagaaaatcctgaagatgttctgagcccaacttcagtagctacttacctgagttccaagagtcagccttctgctaaagtcagtgtgatggggactgatcagtcagagagcattaatacctcaaatgagacagaatacttaaaacagaaaatccatgacttggaaactgagctggaaggctaccagaatttcatatttcagcttcaaaagcactcccagtgcagtgaggccataattacagttttgtgtgggacagaaggggcccaggatggcttgagcaagcccaagaatggttctgatggggaagaaatgaccttttcaagtttgcaccaagtgcgatacgtgaaacacgtgaaaatcctcggtccgctggccccagagatgattgacagcagggtgctggagaacctcaaacagcagctggaggaacaggaatacaagctgcagaaggagcagaatttgaacatgcaacttttcagtgagatccataatctgcagaataagttcagagatctctcacctcccagatacgattcattagttcagtcccaagccagggagctctcccttcaacggcagcagattaaggatggccatggcatctgtgtcatctcccgtcaacacatgaacaccatgattaaggcatttgaggagttgctgcaggccagtgatgtggattactgtgtggccgagggtttccaggaacagctgaatcaatgtgctgagctgctggagaaattggaaaagctatttctcaacggaaaatcagttggagtggaaatgaacacccagaatgaactgatggagaggattgaggaagacaacttaacctaccaacatcttctgcctgaatctcctgagccttcagcctctcatgcgctctctgattatgaaacatctgaaaagtccttcttctcacgagaccagaagcaagataatgagacagagaagacttcagttatggtgaacagtttttctcaagacttactaatggaacacatacaggaaattcgaactttgagaaagcgtttagaagaatctattaaaacaaatgagaagctacggaaacagttggaacggcaaggatctgaatttgttcaaggttctacaagcatttttgcttctggttcagagcttcatagttctctaacatcagaaattcatttcttgaggaagcagaaccaggccctcaatgcaatgctcattaaaggatccagagataaacagaaggagaatgacaaattacgagagtccctctccaggaagaccgtgagcctggagcaccttcagcgggagtatgccagcgtgaaggaagaaaatgaaaggctgcagaaagaaggcagcgagaaggagagacacaaccagcagctgatccaggaggtccgctgcagcggccaggagctgagcagggtgcaggaggaggtgaagttgaggcagcagctgctctcacagaatgacaagctattgcagtctctccgagtggagctgaaggcgtatgagaagctggatgaagagcacaggagactgagagatggtgacaaatatcccatggaaagtgataattcatttgatctgtttgattcctcccaggcagtgacaccaaaatcagtttcagagactcctccactctctgggaatgacacggactccctctcctgcgacagtggcagttcggcaactagcactccgtgtgtgtcccgcctggtcactggccaccacctgtgggccagcaagaatggccgccatgtcctgggcctgattgaggactatgaggccctgctcaaacagatcagccagggacagaggctccttgctgaaatggacattcaaacccaagaggctcccagctccacaagtcaagagctgggaacaaagggtccacacccagcaccactgagcaagtttgtgagcagtgtgagcacggccaagctgaccctggaagaggcctacaggcggctgaagcttctctggagagtctcactccccgaggatggccagtgcccccttcactgtgagcagattggagaaatgaaggcagaggtcaccaaactacataaaaaattgtttgaacaagaaaagaagttgcaaaacaccatgaagcttttgcagctgagcaagcgccaggaaaaagtcatctttgatcaattggtcgtaacccacaaaatccttcggaaggccagaggaaacctggagcttaggcctgggggagcccatccaggaacatgcagtcccagcagaccaggctcctgagaagaactttcagccaataaagcttgtgcttcccccaccgagctcacgctgtctctttgttccaagtgtggttcctatttattgaggaagaaagagctgtctggccaaaggaaatctattttttcccttcatgttttctctctgaaagttggcttgagagttgttgtcagaaaggtgcaggtgctccacaaacgggtggtaaaaaggcctcgagctcttggatgttgtatttcagatcaggggcaggcaccggagttgaggctgtgcgccttggtgggcttcacgtcttcccctggatttgcttagtactcagccagtgccacagtttgaagattctcattaaatgattcatttcatttc

SEQ ID NO: 115936 - DNA, 5551 bp, Homo sapiens
  Payload ID: 2623
  Gene Symbol: CDK5RAP2
  Gene Name: CDK5 regulatory subunit associated protein 2
  ENST ID: ENST00000360822
  CDS Start-End: 193-5184
ctcgtttccgtaggaagaagcgccgggaaagatggcggcgtctgtggtttgaattccagcggcgccgccagagtctgaacaagagctggggtggagggggcggggacctggggagcccggcgggtcgctatcgcggggggtactagtggcgccgccgccacagacaccaacgctgtcgccacctctgtagccatgatggacttggtgttggaagaggacgtcaccgtccctgggacgctcagcggctgcagtggccttgttcccagtgtaccagatgacctggatggcatcaaccccaatgctgggttgggaaatggtctgctcccaaatgtgtcagaagaaacagtgtctcccaccagagcacggaacatgaaggactttgaaaatcaaatcactgaattgaagaaagaaaactttaacctaaagctccgcatctatttccttgaggaaagaatgcaacaggaatttcatggccccactgaacatatctacaaaactaacattgagctcaaggtggaagtagaaagtctgaagcgggaactccaggagagagagcagctgctcatcaaagcctccaaagcagttgagagcttagctgaagcaggtggctctgaaatccagcgggtgaaagaagatgctcgaaagaaggtgcagcaggtggaagatctcctaactaaaagaatactccttttggaaaaggatgtgacagccgcccaggcagaactggaaaaggcctttgcagggacagagacggagaaggctcttcggttgcgtttggaaagcaagctttcagagatgaagaagatgcacgagggggacttggcgatggctctggtcctggatgagaaagacagactgattgaggagttgaagctgtctttgaagagcaaagaagctttaattcagtgccttaaagaggagaaatctcagatggcatgtcctgatgagaatgtgtcatctggagagctccgaggactttgtgctgctccaagggaagaaaaggagagagaaactgaggctgcacaaatggagcatcagaaggagagaaacagctttgaagagaggatccaggcacttgaagaggacctgagagagaaggaaagagaaattgctacagagaagaaaaatagtctaaagagggataaagccattcagggtttaaccatggcattaaaatcaaaggaaaaaaaggttgaagaacttaactctgaaattgaaaagctcagtgctgcctttgctaaagccagagaggccctacagaaagcacagacccaggaatttcaggggtctgaagactatgagactgctctatcaggaaaggaagccctttcggctgcgctgcgctcacaaaacctcaccaagagtacagagaaccacagactgcgtagaagcattaagaagatcacccaggagctgagtgacttgcagcaggagagggagagactggagaaggacctggaggaagcccatcgagagaagagcaaaggagactgcaccatccgtgatcttagaaatgaagttgaaaaattacgcaatgaagtgaatgaaagagagaaagcaatggaaaatcgttacaagagtcttctgagtgaaagcaataaaaaattgcacaatcaagagcaagtgatcaaacatctaacagaaagtaccaatcagaaggacgtgttgcttcagaaattcaatgaaaaagatttggaagtaatacagcagaactgctatttaatggctgcagaggatcttgagctcaggagtgaaggcttaataacagaaaagtgctcttctcaacagccaccaggcagcaaaaccatcttctctaaggaaaagaaacaatcatcagactatgaagagctgattcaggtcttaaagaaagagcaggacatctatacccatctggtcaaatctctgcaggaatcagacagtatcaacaacctgcaggctgagttaaacaagatttttgccctgcggaagcaactggagcaggatgtgctttcatatcagaatttgcggaagaccttggaggagcagatcagcgaaattcggaggcgggaagaatcattttcactttatagtgatcaaacatcttatctaagtatttgccttgaagaaaacaatcggtttcaagtggaacatttttctcaagaagaacttaagaaaaaggtcagtgaccttatacagctagtgaaggagctgtatacagacaaccagcacctgaagaaaaccatttttgatctctcctgcatgggtttccagggaaatgggtttccagatagacttgcgtctacagaacaaacagaggaggctaagaagtcccgcttgccaatcctaataaaaccatcccggtcattaggaaatatgtatcgtctccctgccacccaggaggtggtgacgcagctgcagagccagatcttggagctgcagggggagctgaaggagtttaaaacttgtaataagcaacttcaccaaaagttaattctggctgaagcagtgatggaggggaggccaacgcccgacaaaacgttgctgaatgctcagccccctgtgggagcagcctaccaggacagcccaggagagcagaaaggaattaaaaccacatcttctgtctggagagacaaggaaatggacagtgatcagcaaagaagctacgagattgactctgagatttgcccacctgatgaccttgccagcttgccatcatgcaaagaaaatcctgaagatgttctgagcccaacttcagtagctacttacctgagttccaagagtcagccttctgctaaagtcagtgtgatggggactgatcagtcagagagcattaatacctcaaatgagacagaatacttaaaacagaaaatccatgacttggaaactgagctggaaggctaccagaatttcatatttcagcttcaaaagcactcccagtgcagtgaggccataattacagttttgtgtgggacagaaggggcccaggatggcttgagcaagcccaagaatggttctgatggggaagaaatgaccttttcaagtttgcaccaagtgcgatacgtgaaacacgtgaaaatcctcggtccgctggccccagagatgattgacagcagggtgctggagaacctcaaacagcagctggaggaacaggaatacaagctgcagaaggagcagaatttgaacatgcaacttttcagtgagatccataatctgcagaataagttcagagatctctcacctcccagatacgattcattagttcagtcccaagccagggagctctcccttcaacggcagcagattaaggatggccatggcatctgtgtcatctcccgtcaacacatgaacaccatgattaaggcatttgaggagttgctgcaggccagtgatgtggattactgtgtggccgagggtttccaggaacagctgaatcaatgtgctgagctgctggagaaattggaaaagctatttctcaacggaaaatcagttggagtggaaatgaacacccagaatgaactgatggagaggattgaggaagacaacttaacctaccaacatcttctgcctgaatctcctgagccttcagcctctcatgcgctctctgattatgaaacatctgaaaagtccttcttctcacgagaccagaagcaagataatgagacagagaagacttcagttatggtgaacagtttttctcaagacttactaatggaacacatacaggaaattcgaactttgagaaagcgtttagaagaatctattaaaacaaatgagaagctacggaaacagttggaacggcaaggatctgaatttgttcaaggttctacaagcatttttgcttctggttcagagcttcatagttctctaacatcagaaattcatttcttgaggaagcagaaccaggccctcaatgcaatgctcattaaaggatccagagataaacagaaggagaatgacaaattacgagagtccctctccaggaagaccgtgagcctggagcaccttcagcgggagtatgccagcgtgaaggaagaaaatgaaaggctgcagaaagaaggcagcgagaaggagagacacaaccagcagctgatccaggaggtccgctgcagcggccaggagctgagcagggtgcaggaggaggtgaagttgaggcagcagctgctctcacagaatgacaagctattgcagtctctccgagtggagctgaaggcgtatgagaagctggatgaagagcacaggagactgagagaggcgtcgggagaaggctggaaggggcaggatcctttcagggacctgcacagcctcctgatggagatccaggctctgcgcttgcaactagaaaggagcatcgaaaccagcagcactctgcagagcaggctcaaggaacagctggcaaggggggcagagaaggcacaggaaggagccctcactctggctgtccaagccgtgtccatccctgaggtgccccttcagcctgacaaacacgatggtgacaaatatcccatggaaagtgataattcatttgatctgtttgattcctcccaggcagtgacaccaaaatcagtttcagagactcctccactctctgggaatgacacggactccctctcctgcgacagtggcagttcggcaactagcactccgtgtgtgtcccgcctggtcactggccaccacctgtgggccagcaagaatggccgccatgtcctgggcctgattgaggactatgaggccctgctcaaacagatcagccagggacagaggctccttgctgaaatggacattcaaacccaagaggctcccagctccacaagtcaagagctgggaacaaagggtccacacccagcaccactgagcaagtttgtgagcagtgtgagcacggccaagctgaccctggaagaggcctacaggcggctgaagcttctctggagagtctcactccccgaggatggccagtgcccccttcactgtgagcagattggagaaatgaaggcagaggtcaccaaactacataaaaaattgtttgaacaagaaaagaagttgcaaaacaccatgaagcttttgcagctgagcaagcgccaggaaaaagtcatctttgatcaattggtcgtaacccacaaaatccttcggaaggccagaggaaacctggagcttaggcctgggggagcccatccaggaacatgcagtcccagcagaccaggctcctgagaagaactttcagccaataaagcttgtgcttcccccaccgagctcacgctgtctctttgttccaagtgtggttcctatttattgaggaagaaagagctgtctggccaaaggaaatctattttttcccttcatgttttctctctgaaagttggcttgagagttgttgtcagaaaggtgcaggtgctccacaaacgggtggtaaaaaggcctcgagctcttggatgttgtatttcagatcaggggcaggcaccggagttgaggctgtgcgccttggtgggcttcacgtcttcccctggatttgcttagtactcagccagtgccacagtttgaagattctcattaaatgattcatttcatttcaccttga

SEQ ID NO: 115937 - DNA, 3902 bp, Homo sapiens
  Payload ID: 2623
  Gene Symbol: CDK5RAP2
  Gene Name: CDK5 regulatory subunit associated protein 2
  ENST ID: ENST00000416449
  CDS Start-End: 1-3864
gacagtatcaacaacctgcaggctgagttaaacaagatttttgccctgcggaagcaactggagcaggatgtgctttcatatcagaatttgcggaagaccttggaggagcagatcagcgaaattcggaggcgggaagaagaatcattttcactttatagtgatcaaacatcttatctaagtatttgccttgaagaaaacaatcggtttcaagtggaacatttttctcaagaagaacttaagaaaaaggtcagtgaccttatacagctagtgaaggagctgtatacagacaaccagcacctgaagaaaaccatttttgatctctcctgcatgggtttccagggaaatgggtttccagatagacttgcgtctacagaacaaacagagattatgaaagacctttccaaaggaggctgcaaaaatggatacttaaggcacacggagtctaagatttcagattgtgatggggcccacgcacctggctgcctagaagaaggtgcattcataaacctgcttgcccctttgttcaatgagaaggccacattattactggaatccaggccagaccttctgaaagtggtacgggaactgcttctgggacaactattcttgacagagcaggaagtttctggagaacaccttgatggtaaaactgagaagacacctaagcaaaaaggtgaacttgtacattttgtccaaaccaactcattttccaagccacatgatgaactgaagttgtcttgtgaggcccagctagtaaaggcaggcgaagtgcccaaggtaggactgaaagatgcctcagtgcagactgtggccacggagggcgacctgctgagattcaagcatgaagcaacaagagaggcttgggaagagaaaccgatcaacactgcactcagcgcagagcatcggccagagaacctgcacggggtgcctgggtggcaggctgccctcctttccctccctggtattaccaacagagaggctaagaagtcccgcttgccaatcctaataaaaccatcccggtcattaggaaatatgtatcgtctccctgccacccaggaggtggtgacgcagctgcagagccagatcttggagctgcagggggagctgaaggagtttaaaacttgtaataagcaacttcaccaaaagttaattctggctgaagcagtgatggaggggaggccaacgcccgacaaaacgttgctgaatgctcagccccctgtgggagcagcctaccaggacagcccaggagagcagaaaggaattaaaaccacatcttctgtctggagagacaaggaaatggacagtgatcagcaaagaagctacgagattgactctgagatttgcccacctgatgaccttgccagcttgccatcatgcaaagaaaatcctgaagatgttctgagcccaacttcagtagctacttacctgagttccaagagtcagccttctgctaaagtcagtgtgatggggactgatcagtcagagagcattaatacctcaaatgagacagaatacttaaaacagaaaatccatgacttggaaactgagctggaaggctaccagaatttcatatttcagcttcaaaagcactcccagtgcagtgaggccataattacagttttgtgtgggacagaaggggcccaggatggcttgagcaagcccaagaatggttctgatggggaagaaatgaccttttcaagtttgcaccaagtgcgatacgtgaaacacgtgaaaatcctcggtccgctggccccagagatgattgacagcagggtgctggagaacctcaaacagcagctggaggaacaggaatacaagctgcagaaggagcagaatttgaacatgcaacttttcagtgagatccataatctgcagaataagttcagagatctctcacctcccagatacgattcattagttcagtcccaagccagggagctctcccttcaacggcagcagattaaggatggccatggcatctgtgtcatctcccgtcaacacatgaacaccatgattaaggcatttgaggagttgctgcaggccagtgatgtggattactgtgtggccgagggtttccaggaacagctgaatcaatgtgctgagctgctggagaaattggaaaagctatttctcaacggaaaatcagttggagtggaaatgaacacccagaatgaactgatggagaggattgaggaagacaacttaacctaccaacatcttctgcctgaatctcctgagccttcagcctctcatgcgctctctgattatgaaacatctgaaaagtccttcttctcacgagaccagaagcaagataatgagacagagaagacttcagttatggtgaacagtttttctcaagacttactaatggaacacatacaggaaattcgaactttgagaaagcgtttagaagaatctattaaaacaaatgagaagctacggaaacagttggaacggcaaggatctgaatttgttcaaggttctacaagcatttttgcttctggttcagagcttcatagttctctaacatcagaaattcatttcttgaggaagcagaaccaggccctcaatgcaatgctcattaaaggatccagagataaacagaaggagaatgacaaattacgagagtccctctccaggaagaccgtgagcctggagcaccttcagcgggagtatgccagcgtgaaggaagaaaatgaaaggctgcagaaagaaggcagcgagaaggagagacacaaccagcagctgatccaggaggtccgctgcagcggccaggagctgagcagggtgcaggaggaggtgaagttgaggcagcagctgctctcacagaatgacaagctattgcagtctctccgagtggagctgaaggcgtatgagaagctggatgaagagcacaggagactgagagaggcgtcgggagaaggctggaaggggcaggatcctttcagggacctgcacagcctcctgatggagatccaggctctgcgcttgcaactagaaaggagcatcgaaaccagcagcactctgcagagcaggctcaaggaacagctggcaaggggggcagagaaggcacaggaaggagccctcactctggctgtccaagccgtgtccatccctgaggtgccccttcagcctgacaaacacgatggtgacaaatatcccatggaaagtgataattcatttgatctgtttgattcctcccaggcagtgacaccaaaatcagtttcagagactcctccactctctgggaatgacacggactccctctcctgcgacagtggcagttcggcaactagcactccgtgtgtgtcccgcctggtcactggccaccacctgtgggccagcaagaatggccgccatgtcctgggcctgattgaggactatgaggccctgctcaaacagatcagccagggacagaggctccttgctgaaatggacattcaaacccaagaggctcccagctccacaagtcaagagctgggaacaaagggtccacacccagcaccactgagcaagtttgtgagcagtgtgagcacggccaagctgaccctggaagaggcctacaggcggctgaagcttctctggagagtctcactccccgaggatggccagtgcccccttcactgtgagcagattggagaaatgaaggcagaggtcaccaaactacataaaaaattgtttgaacaagaaaagaagttgcaaaacaccatgaagcttttgcagctgagcaagcgccaggaaaaagtcatctttgatcaattggtcgtaacccacaaaatccttcggaaggccagaggaaacctggagcttaggcctgggggagcccatccaggaacatgcagtcccagcagaccaggctcctgagaagaactttcagccaataaagcttgtgcttcccccac

SEQ ID NO: 115938 - DNA, 2747 bp, Homo sapiens
  Payload ID: 2623
  Gene Symbol: CDK5RAP2
  Gene Name: CDK5 regulatory subunit associated protein 2
  ENST ID: ENST00000425647
  CDS Start-End: 1-2712
aatatgtatcgtctccctgccacccaggaggtggtgacgcagctgcagagccagatcttggagctgcagggggagctgaaggagtttaaaacttgtaataagcaacttcaccaaaagttaattctggctgaagcagtgatggaggggaggccaacgcccgacaaaacgttgctgaatgactctgagatttgcccacctgatgaccttgccagcttgccatcatgcaaagaaaatcctgaagatgttctgagcccaacttcagtagctacttacctgagttccaagagtcagccttctgctaaagtcagtgtgatggggactgatcagtcagagagcattaatacctcaaatgagacagaatacttaaaacagaaaatccatgacttggaaactgagctggaaggctaccagaatttcatatttcagcttcaaaagcactcccagtgcagtgaggccataattacagttttgtgtgggacagaaggggcccaggatggcttgagcaagcccaagaatggttctgatggggaagaaatgaccttttcaagtttgcaccaagtgcgatacgtgaaacacgtgaaaatcctcggtccgctggccccagagatgattgacagcagggtgctggagaacctcaaacagcagctggaggaacaggaatacaagctgcagaaggagcagaatttgaacatgcaacttttcagtgagatccataatctgcagaataagttcagagatctctcacctcccagatacgattcattagttcagtcccaagccagggagctctcccttcaacggcagcagattaaggatggccatggcatctgtgtcatctcccgtcaacacatgaacaccatgattaaggcatttgaggagttgctgcaggccagtgatgtggattactgtgtggccgagggtttccaggaacagctgaatcaatgtgctgagctgctggagaaattggaaaagctatttctcaacggaaaatcagttggagtggaaatgaacacccagaatgaactgatggagaggattgaggaagacaacttaacctaccaacatcttctgcctgaatctcctgagccttcagcctctcatgcgctctctgattatgaaacatctgaaaagtccttcttctcacgagaccagaagcaagataatgagacagagaagacttcagttatggtgaacagtttttctcaagacttactaatggaacacatacaggaaattcgaactttgagaaagcgtttagaagaatctattaaaacaaatgagaagctacggaaacagttggaacggcaaggatctgaatttgttcaaggttctacaagcatttttgcttctggttcagagcttcatagttctctaacatcagaaattcatttcttgaggaagcagaaccaggccctcaatgcaatgctcattaaaggatccagagataaacagaaggagaatgacaaattacgagagtccctctccaggaagaccgtgagcctggagcaccttcagcgggagtatgccagcgtgaaggaagaaaatgaaaggctgcagaaagaaggcagcgagaaggagagacacaaccagcagctgatccaggaggtccgctgcagcggccaggagctgagcagggtgcaggaggaggtgaagttgaggcagcagctgctctcacagaatgacaagctattgcagtctctccgagtggagctgaaggcgtatgagaagctggatgaagagcacaggagactgagagaggcgtcgggagaaggctggaaggggcaggatcctttcagggacctgcacagcctcctgatggagatccaggctctgcgcttgcaactagaaaggagcatcgaaaccagcagcactctgcagagcaggctcaaggaacagctggcaaggggggcagagaaggcacaggaaggagccctcactctggctgtccaagccgtgtccatccctgaggtgccccttcagcctgacaaacacgatggtgacaaatatcccatggaaagtgataattcatttgatctgtttgattcctcccaggcagtgacaccaaaatcagtttcagagactcctccactctctgggaatgacacggactccctctcctgcgacagtggcagttcggcaactagcactccgtgtgtgtcccgcctggtcactggccaccacctgtgggccagcaagaatggccgccatgtcctgggcctgattgaggactatgaggccctgctcaaacagatcagccagggacagaggctccttgctgaaatggacattcaaacccaagaggctcccagctccacaagtcaagagctgggaacaaagggtccacacccagcaccactgagcaagtttgtgagcagtgtgagcacggccaagctgaccctggaagaggcctacaggcggctgaagcttctctggagagtctcactccccgaggatggccagtgcccccttcactgtgagcagattggagaaatgaaggcagaggtcaccaaactacataaaaaattgtttgaacaagaaaagaagttgcaaaacaccatgaagcttttgcagctgagcaagcgccaggaaaaagtcatctttgatcaattggtcgtaacccacaaaatccttcggaaggccagaggaaacctggagcttaggcctgggggagcccatccaggaacatgcagtcccagcagaccaggctcctgagaagaactttcagccaataaagcttgtgcttcccc

SEQ ID NO: 115939 - DNA, 970 bp, Homo sapiens
  Payload ID: 2623
  Gene Symbol: CDK5RAP2
  Gene Name: CDK5 regulatory subunit associated protein 2
  ENST ID: ENST00000481266
  CDS Start-End: 84-911
ggggagcccggcgggtcgctatcgcggggggtactagtggcgccgccgccacagacaccaacgctgtcgccacctctgtagccatgatggacttggtgttggaagaggacgtcaccgtccctgggacgctcagcggctgcagtggccttgttcccagtgtaccagatgacctggatggcatcaaccccaatgctgggttgggaaatggtctgctcccaaatgtgtcagaagaaacagtgtctcccaccagagcacggaacatgaaggactttgaaaatcaaatcactgaattgaagaaagaaaactttaacctaaagctccgcatctatttccttgaggaaagaatgcaacaggaatttcatggccccactgaacatatctacaaaactaacattgagctcaaggtggaagtagaaagtctgaagcgggaactccaggagagagagcagctgctcatcaaagcctccaaagcagttgagagcttagctgaagcaggtggctctgaaatccagcgggtgaaagaagatgctcgaaagaaggtgcagcaggtggaagatctcctaactaaaagaatactccttttggaaaaggatgtgacagccgcccaggcagaactggaaaaggcctttgcagggacagagacggagaaggctcttcggttgcgtttggaaagcaagctttcagagatgaagaagatgcacgagggggacttggcgatggctctggtcctggatgagaaagacagactgattgaggagttgaagctgtctttgaagagcaaagaagctttaattcagtgccttaaagaggagaaatctcagatggcatgtcctgatgagaatgtgtcatctggagagctccgaggactttgtgctgctccaagggaagaaaaggagagagaaactgagtagtgggggaaggagagaaacagctttgaagagaggatccaggcacttgaagaggacctgag

SEQ ID NO: 115940 - DNA, 5826 bp, Homo sapiens
  Payload ID: 2623
  Gene Symbol: CDK5RAP2
  Gene Name: CDK5 regulatory subunit associated protein 2
  ENST ID: ENST00000480112
  CDS Start-End: 28-2277
accaacgctgtcgccacctctgtagccatgatggacttggtgttggaagaggacgtcaccgtccctgggacgctcagcggctgcagtggccttgttcccagtgtaccagatgacctggatggcatcaaccccaatgctgggttgggaaatgtgctcccaaatgtgtcagaagaaacagtgtctcccaccagagcacggaacatgaaggactttgaaaatcaaatcactgaattgaagaaagaaaactttaacctaaagctccgcatctatttccttgaggaaagaatgcaacaggaatttcatggccccactgaacatatctacaaaactaacattgagctcaaggtggaagtagaaagtctgaagcgggaactccaggagagagagcagctgctcatcaaagcctccaaagcagttgagagcttagctgaagcaggtggctctgaaatccagcgggtgaaagaagatgctcgaaagaaggtgcagcaggtggaagatctcctaactaaaagaatactccttttggaaaaggatgtgacagccgcccaggcagaactggaaaaggcctttgcagggacagagacggagaaggctcttcggttgcgtttggaaagcaagctttcagagatgaagaagatgcacgagggggacttggcgatggctctggtcctggatgagaaagacagactgattgaggagttgaagctgtctttgaagagcaaagaagctttaattcagtgccttaaagaggagaaatctcagatggcatgtcctgatgagaatgtgtcatctggagagctccgaggactttgtgctgctccaagggaagaaaaggagagagaaactgaggctgcacaaatggagcatcagaaggagagaaacagctttgaagagaggatccaggcacttgaagaggacctgagagagaaggaaagagaaattgctacagagaagaaaaatagtctaaagagggataaagccattcagggtttaaccatggcattaaaatcaaaggaaaaaaaggttgaagaacttaactctgaaattgaaaagctcagtgctgcctttgctaaagccagagaggccctacagaaagcacagacccaggaatttcaggggtctgaagactatgagactgctctatcaggaaaggaagccctttcggctgcgctgcgctcacaaaacctcaccaagagtacagagaaccacagactgcgtagaagcattaagaagatcacccaggagctgagtgacttgcagcaggagagggagagactggagaaggacctggaggaagcccatcgagagaagagcaaaggagactgcaccatccgtgatcttagaaatgaagttgaaaaattacgcaatgaagtgaatgaaagagagaaagcaatggaaaatcgttacaagagtcttctgagtgaaagcaataaaaaattgcacaatcaagagcaagtgatcaaacatctaacagaaagtaccaatcagaaggacgtgttgcttcagaaattcaatgaaaaagatttggaagtaatacagcagaactgctatttaatggctgcagaggatcttgagctcaggagtgaaggcttaataacagaaaagtgctcttctcaacagccaccaggcagcaaaaccatcttctctaaggaaaagaaacaatcatcagactatgaagagctgattcaggtcttaaagaaagagcaggacatctatacccatctggtcaaatctctgcaggaatcagacagtatcaacaacctgcaggctgagttaaacaagatttttgccctgcggaagcaactggagcaggatgtgctttcatatcagaatttgcggaagaccttggaggagcagatcagcgaaattcggaggcgggaagaagaatcattttcactttatagtgatcaaacatcttatctaagtatttgccttgaagaaaacaatcggtttcaagtggaacatttttctcaagaagaacttaagaaaaaggtcagtgaccttatacagctagtgaaggagctgtatacagacaaccagcacctgaagaaaaccatttttgatctctcctgcatgggtttccagggaaatgggtttccagatagacttgcgtctacagaacaaacagagacatcactgacttattcatacatattcatgctgcacacttttttgggttgcattttcacaccattccatgctccatgtagcttctggctagcaaggaggacgaggacacgatcaaaattggggaggatgacgagattaatttcctgagtgaccagcatttgcagcagagtaatgagattatgaaagacctttccaaaggaggctgcaaaaatggatacttaaggcacacggagtctaagatttcagattgtgatggggcccacgcacctggctgcctagaagaaggtgcattcataaacctgcttgcccctttgttcaatgagaaggccacattattactggaatccaggccagaccttctgaaagtggtacgggaactgcttctgggacaactattcttgacagagcaggaagtttctggagaacaccttgatggtaaaactgagaagacacctaagcaaaaaggtgaacttgtacattttgtccaaaccaactcattttccaagccacatgatgaactgaagttgtcttgtgaggcccagctagtaaaggcaggcgaagtgcccaaggtaggactgaaagatgcctcagtgcagactgtggccacggagggcgacctgctgagattcaagcatgaagcaacaagagaggcttgggaagagaaaccgatcaacactgcactcagcgcagagcatcggccagagaacctgcacggggtgcctgggtggcaggctgccctcctttccctccctggtattaccaacagagaggctaagaagtcccgcttgccaatcctaataaaaccatcccggtcattaggaaatatgtatcgtctccctgccacccaggaggtggtgacgcagctgcagagccagatcttggagctgcagggggagctgaaggagtttaaaacttgtaataagcaacttcaccaaaagttaattctggctgaagcagtgatggaggggaggccaacgcccgacaaaacgttgctgaatgctcagccccctgtgggagcagcctaccaggacagcccaggagagcagaaaggaattaaaaccacatcttctgtctggagagacaaggaaatggacagtgatcagcaaagaagctacgagattgactctgagatttgcccacctgatgaccttgccagcttgccatcatgcaaagaaaatcctgaagatgttctgagcccaacttcagtagctacttacctgagttccaagagtcagccttctgctaaagtcagtgtgatggggactgatcagtcagagagcattaatacctcaaatgagacagaatacttaaaacagaaaatccatgacttggaaactgagctggaaggctaccagaatttcatatttcagcttcaaaagcactcccagtgcagtgaggccataattacagttttgtgtgggacagaaggggcccaggatggcttgagcaagcccaagaatggttctgatggggaagaaatgaccttttcaagtttgcaccaagtgcgatacgtgaaacacgtgaaaatcctcggtccgctggccccagagatgattgacagcagggtgctggagaacctcaaacagcagctggaggaacaggaatacaagctgcagaaggagcagaatttgaacatgcaacttttcagtgagatccataatctgcagaataagttcagagatctctcacctcccagatacgattcattagttcagtcccaagccagggagctctcccttcaacggcagcagattaaggatggccatggcatctgtgtcatctcccgtcaacacatgaacaccatgattaaggcatttgaggagttgctgcaggccagtgatgtggattactgtgtggccgagggtttccaggaacagctgaatcaatgtgctgagctgctggagaaattggaaaagctatttctcaacggaaaatcagttggagtggaaatgaacacccagaatgaactgatggagaggattgaggaagacaacttaacctaccaacatcttctgcctgaatctcctgagccttcagcctctcatgcgctctctgattatgaaacatctgaaaagtccttcttctcacgagaccagaagcaagataatgagacagagaagacttcagttatggtgaacagtttttctcaagacttactaatggaacacatacaggaaattcgaactttgagaaagcgtttagaagaatctattaaaacaaatgagaagctacggaaacagttggaacggcaaggatctgaatttgttcaaggttctacaagcatttttgcttctggttcagagcttcatagttctctaacatcagaaattcatttcttgaggaagcagaaccaggccctcaatgcaatgctcattaaaggatccagagataaacagaaggagaatgacaaattacgagagtccctctccaggaagaccgtgagcctggagcaccttcagcgggagtatgccagcgtgaaggaagaaaatgaaaggctgcagaaagaaggcagcgagaaggagagacacaaccagcagctgatccaggaggtccgctgcagcggccaggagctgagcagggtgcaggaggaggtgaagttgaggcagcagctgctctcacagaatgacaagctattgcagtctctccgagtggagctgaaggcgtatgagaagctggatgaagagcacaggagactgagagaggcgtcgggagaaggctggaaggggcaggatcctttcagggacctgcacagcctcctgatggagatccaggctctgcgcttgcaactagaaaggagcatcgaaaccagcagcactctgcagagcaggctcaaggaacagctggcaaggggggcagagaaggcacaggaaggagccctcactctggctgtccaagccgtgtccatccctgaggtgccccttcagcctgacaaacacgatggtgacaaatatcccatggaaagtgataattcatttgatctgtttgattcctcccaggcagtgacaccaaaatcagtttcagagactcctccactctctgggaatgacacggactccctctcctgcgacagtggcagttcggcaactagcactccgtgtgtgtcccgcctggtcactggccaccacctgtgggccagcaagaatggccgccatgtcctgggcctgattgaggactatgaggccctgctcaaacagatcagccagggacagaggctccttgctgaaatggacattcaaacccaagaggctcccagctccacaagtcaagagctgggaacaaagggtccacacccagcaccactgagcaagtttgtgagcagtgtgagcacggccaagctgaccctggaagaggcctacaggcggctgaagcttctctggagagtctcactccccgaggatggccagtgcccccttcactgtgagcagattggagaaatgaaggcagaggtcaccaaactacataaaaaattgtttgaacaagaaaagaagttgcaaaacaccatgaagcttttgcagctgagcaagcgccaggaaaaagtcatctttgatcaattggtcgtaacccacaaaatccttcggaaggccagaggaaacctggagcttaggcctgggggagcccatccaggaacatgcagtcccagcagaccaggctcctgagaagaactttcagccaataaagcttgtgcttcccccaccg

SEQ ID NO: 115941 - DNA, 5956 bp, Homo sapiens
  Payload ID: 2623
  Gene Symbol: CDK5RAP2
  Gene Name: CDK5 regulatory subunit associated protein 2
  ENST ID: ENST00000473282
  CDS Start-End: 28-1410
accaacgctgtcgccacctctgtagccatgatggacttggtgttggaagaggacgtcaccgtccctgggacgctcagcggctgcagtggccttgttcccagtgtaccagatgacctggatggcatcaaccccaatgctgggttgggaaatgtgctcccaaatgtgtcagaagaaacagtgtctcccaccagagcacggaacatgaaggactttgaaaatcaaatcactgaattgaagaaagaaaactttaacctaaagctccgcatctatttccttgaggaaagaatgcaacaggaatttcatggccccactgaacatatctacaaaactaacattgagctcaaggtggaagtagaaagtctgaagcgggaactccaggagagagagcagctgctcatcaaagcctccaaagcagttgagagcttagctgaagcaggtggctctgaaatccagcgggtgaaagaagatgctcgaaagaaggtgcagcaggtggaagatctcctaactaaaagaatactccttttggaaaaggatgtgacagccgcccaggcagaactggaaaaggcctttgcagggacagagacggagaaggctcttcggttgcgtttggaaagcaagctttcagagatgaagaagatgcacgagggggacttggcgatggctctggtcctggatgagaaagacagactgattgaggagttgaagctgtctttgaagagcaaagaagctttaattcagtgccttaaagaggagaaatctcagatggcatgtcctgatgagaatgtgtcatctggagagctccgaggactttgtgctgctccaagggaagaaaaggagagagaaactgaggctgcacaaatggagcatcagaaggagagaaacagctttgaagagaggatccaggcacttgaagaggacctgagagagaaggaaagagaaattgctacagagaagaaaaatagtctaaagagggataaagccattcagggtttaaccatggcattaaaatcaaaggaaaaaaaggttgaagaacttaactctgaaattgaaaagctcagtgctgcctttgctaaagccagagaggccctacagaaagcacagacccaggaatttcaggggtctgaagactatgagactgctctatcaggaaaggaagccctttcggctgcgctgcgctcacaaaacctcaccaagagtacagagaaccacagactgcgtagaagcattaagaagatcacccaggagctgagtgacttgcagcaggagagggagagactggagaaggacctggaggaagcccatcgagagaagagcaaaggagactgcaccatccgtggtctcactctgtttcctgggctgttcctgaactcctgggctcaagtgatcctcccacctcagtttcttgagtagctgggattataggcacatgccaccatgcccacctcactgattgttcctgatagaggatcttagaaatgaagttgaaaaattacgcaatgaagtgaatgaaagagagaaagcaatggaaaatcgttacaagagtcttctgagtgaaagcaataaaaaattgcacaatcaagagcaagtgatcaaacatctaacagaaagtaccaatcagaaggacgtgttgcttcagaaattcaatgaaaaagatttggaagtaatacagcagaactgctatttaatggctgcagaggatcttgagctcaggagtgaaggcttaataacagaaaagtgctcttctcaacagccaccaggcagcaaaaccatcttctctaaggaaaagaaacaatcatcagactatgaagagctgattcaggtcttaaagaaagagcaggacatctatacccatctggtcaaatctctgcaggaatcagacagtatcaacaacctgcaggctgagttaaacaagatttttgccctgcggaagcaactggagcaggatgtgctttcatatcagaatttgcggaagaccttggaggagcagatcagcgaaattcggaggcgggaagaagaatcattttcactttatagtgatcaaacatcttatctaagtatttgccttgaagaaaacaatcggtttcaagtggaacatttttctcaagaagaacttaagaaaaaggtcagtgaccttatacagctagtgaaggagctgtatacagacaaccagcacctgaagaaaaccatttttgatctctcctgcatgggtttccagggaaatgggtttccagatagacttgcgtctacagaacaaacagagacatcactgacttattcatacatattcatgctgcacacttttttgggttgcattttcacaccattccatgctccatgtagcttctggctagcaaggaggacgaggacacgatcaaaattggggaggatgacgagattaatttcctgagtgaccagcatttgcagcagagtaatgagattatgaaagacctttccaaaggaggctgcaaaaatggatacttaaggcacacggagtctaagatttcagattgtgatggggcccacgcacctggctgcctagaagaaggtgcattcataaacctgcttgcccctttgttcaatgagaaggccacattattactggaatccaggccagaccttctgaaagtggtacgggaactgcttctgggacaactattcttgacagagcaggaagtttctggagaacaccttgatggtaaaactgagaagacacctaagcaaaaaggtgaacttgtacattttgtccaaaccaactcattttccaagccacatgatgaactgaagttgtcttgtgaggcccagctagtaaaggcaggcgaagtgcccaaggtaggactgaaagatgcctcagtgcagactgtggccacggagggcgacctgctgagattcaagcatgaagcaacaagagaggcttgggaagagaaaccgatcaacactgcactcagcgcagagcatcggccagagaacctgcacggggtgcctgggtggcaggctgccctcctttccctccctggtattaccaacagagaggctaagaagtcccgcttgccaatcctaataaaaccatcccggtcattaggaaatatgtatcgtctccctgccacccaggaggtggtgacgcagctgcagagccagatcttggagctgcagggggagctgaaggagtttaaaacttgtaataagcaacttcaccaaaagttaattctggctgaagcagtgatggaggggaggccaacgcccgacaaaacgttgctgaatgctcagccccctgtgggagcagcctaccaggacagcccaggagagcagaaaggaattaaaaccacatcttctgtctggagagacaaggaaatggacagtgatcagcaaagaagctacgagattgactctgagatttgcccacctgatgaccttgccagcttgccatcatgcaaagaaaatcctgaagatgttctgagcccaacttcagtagctacttacctgagttccaagagtcagccttctgctaaagtcagtgtgatggggactgatcagtcagagagcattaatacctcaaatgagacagaatacttaaaacagaaaatccatgacttggaaactgagctggaaggctaccagaatttcatatttcagcttcaaaagcactcccagtgcagtgaggccataattacagttttgtgtgggacagaaggggcccaggatggcttgagcaagcccaagaatggttctgatggggaagaaatgaccttttcaagtttgcaccaagtgcgatacgtgaaacacgtgaaaatcctcggtccgctggccccagagatgattgacagcagggtgctggagaacctcaaacagcagctggaggaacaggaatacaagctgcagaaggagcagaatttgaacatgcaacttttcagtgagatccataatctgcagaataagttcagagatctctcacctcccagatacgattcattagttcagtcccaagccagggagctctcccttcaacggcagcagattaaggatggccatggcatctgtgtcatctcccgtcaacacatgaacaccatgattaaggcatttgaggagttgctgcaggccagtgatgtggattactgtgtggccgagggtttccaggaacagctgaatcaatgtgctgagctgctggagaaattggaaaagctatttctcaacggaaaatcagttggagtggaaatgaacacccagaatgaactgatggagaggattgaggaagacaacttaacctaccaacatcttctgcctgaatctcctgagccttcagcctctcatgcgctctctgattatgaaacatctgaaaagtccttcttctcacgagaccagaagcaagataatgagacagagaagacttcagttatggtgaacagtttttctcaagacttactaatggaacacatacaggaaattcgaactttgagaaagcgtttagaagaatctattaaaacaaatgagaagctacggaaacagttggaacggcaaggatctgaatttgttcaaggttctacaagcatttttgcttctggttcagagcttcatagttctctaacatcagaaattcatttcttgaggaagcagaaccaggccctcaatgcaatgctcattaaaggatccagagataaacagaaggagaatgacaaattacgagagtccctctccaggaagaccgtgagcctggagcaccttcagcgggagtatgccagcgtgaaggaagaaaatgaaaggctgcagaaagaaggcagcgagaaggagagacacaaccagcagctgatccaggaggtccgctgcagcggccaggagctgagcagggtgcaggaggaggtgaagttgaggcagcagctgctctcacagaatgacaagctattgcagtctctccgagtggagctgaaggcgtatgagaagctggatgaagagcacaggagactgagagaggcgtcgggagaaggctggaaggggcaggatcctttcagggacctgcacagcctcctgatggagatccaggctctgcgcttgcaactagaaaggagcatcgaaaccagcagcactctgcagagcaggctcaaggaacagctggcaaggggggcagagaaggcacaggaaggagccctcactctggctgtccaagccgtgtccatccctgaggtgccccttcagcctgacaaacacgatggtgacaaatatcccatggaaagtgataattcatttgatctgtttgattcctcccaggcagtgacaccaaaatcagtttcagagactcctccactctctgggaatgacacggactccctctcctgcgacagtggcagttcggcaactagcactccgtgtgtgtcccgcctggtcactggccaccacctgtgggccagcaagaatggccgccatgtcctgggcctgattgaggactatgaggccctgctcaaacagatcagccagggacagaggctccttgctgaaatggacattcaaacccaagaggctcccagctccacaagtcaagagctgggaacaaagggtccacacccagcaccactgagcaagtttgtgagcagtgtgagcacggccaagctgaccctggaagaggcctacaggcggctgaagcttctctggagagtctcactccccgaggatggccagtgcccccttcactgtgagcagattggagaaatgaaggcagaggtcaccaaactacataaaaaattgtttgaacaagaaaagaagttgcaaaacaccatgaagcttttgcagctgagcaagcgccaggaaaaagtcatctttgatcaattggtcgtaacccacaaaatccttcggaaggccagaggaaacctggagcttaggcctgggggagcccatccaggaacatgcagtcccagcagaccaggctcctgagaagaactttcagccaataaagcttgtgcttcccccaccg

SEQ ID NO: 115942 - DNA, 565 bp, Homo sapiens
  Payload ID: 2623
  Gene Symbol: CDK5RAP2
  Gene Name: CDK5 regulatory subunit associated protein 2
  ENST ID: ENST00000482047
  CDS Start-End: 166-565
agaaaactggagccagagtccttggttttgccctggtgagacggatccagatctgcgacacagattgactcactgttgggcagggcaagactgattgaggagttgaagctgtctttgaagagcaaagaagctttaattcagtgccttaaagaggagaaatctcagatggcatgtcctgatgagaatgtgtcatctggagagctccgaggactttgtgctgctccaagggaagaaaaggagagagaaactgaggctgcacaaatggagcatcagaaggagagaaacagctttgaagagaggatccaggcacttgaagaggacctgagagagaaggaaagagaaattgctacagagaagaaaaatagtctaaagagggataaagccattcagggtttaaccatggcattaaaatcaaaggaaaaaaaggttgaagaacttaactctgaaattgaaaagctcagtgctgcctttgctaaagccagagaggccctacagaaagcacagacccaggaatttcaggggtctgaagactatgagactgctctatcaggaaaggaagcccttt

SEQ ID NO: 115943 - DNA, 1866 bp, Homo sapiens
  Payload ID: 2624
  Gene Symbol: CDK5RAP3
  Gene Name: CDK5 regulatory subunit associated protein 3
  Uniprot ID: Q96JB5
  ENST ID: ENST00000338399
  CDS Start-End: 107-1627
aggatgcccgtttgtgtctaaacggaggctcggccacaacgccactggattggtggtagggcggggcgggccacagtctccagcctgaagcggaagtggaggaaagatggaggaccatcagcacgtgcccatcgacatccagaccagcaagctgctcgattggctggtggacagaaggcactgcagcctgaaatggcagagtctggtgctgacgatccgcgagaagatcaatgctgccatccaggacatgccagagagcgaagagatcgcccagctgctgtctgggtcctacattcactactttcactgcctaagaatcctggaccttctcaaaggcacagaggcctccacgaagaatatttttggccgatactcttcacagcggatgaaggattggcaggagattatagctctgtatgagaaggacaacacctacttagtggaactctctagcctcctggttcggaatgtcaactatgagatcccctcactgaagaagcagattgccaagtgccagcagctgcagcaagaatacagccgcaaggaggaggagtgccaggcaggggctgccgagatgcgggagcagttctaccactcctgcaagcagtatggcatcacgggcgaaaatgtccgaggagaactgctggccctggtgaaggacctgccgagtcagctggctgagattggggcagcggctcagcagtccctgggggaagccattgacgtgtaccaggcgtctgtggggtttgtgtgtgagagccccacagagcaggtgttgccaatgctgcggttcgtgcagaagcggggaaactcaacggtgtacgagtggaggacagggacagagccctctgtggtggaacgaccccacctcgaggagcttcctgagcaggtggcagaagatgcgattgactggggcgactttggggtagaggcagtgtctgaggggactgactctggcatctctgccgaggctgctggaatcgactggggcatcttcccggaatcagattcaaaggatcctggaggtgatgggatagactggggagacgatgctgttgctttgcagatcacagtgctggaagcaggaacccaggctccagaaggtgttgccaggggcccagatgccctgacactgcttgaatacactgagacccggaatcagttccttgatgagctcatggagcttgagatcttcttagcccagagagcagtggagttgagtgaggaggcagatgtcctgtctgtgagccagttccagctggctccagccatcctgcagggccagaccaaagagaagatggttaccatggtgtcagtgctggaggatctgattggcaagcttaccagtcttcagctgcaacacctgtttatgatcctggcctcaccaaggtatgtggaccgagtgactgaattcctccagcaaaagctgaagcagtcccagctgctggctttgaagaaagagctgatggtgcagaagcagcaggaggcacttgaggagcaggcggctctggagcctaagctggacctgctactggagaagaccaaggagctgcagaagctgattgaagctgacatctccaagaggtacagcgggcgccctgtgaacctgatgggaacctctctgtgacaccctccgtgttcttgcctgcccatcttctccgcttttgggatgaagatgatagccagggctgttgttttggggcccttcaaggcaaaagaccaggctgactggaagatggaaagccacaggaaggaagcggcacctgatggtgatcttggcactctccatgttctctacaagaagctgtggtgattggccctgtggtctatcaggcgaaaaccacagattctccttctagttagtat

SEQ ID NO: 115944 - DNA, 1975 bp, Homo sapiens
  Payload ID: 2624
  Gene Symbol: CDK5RAP3
  Gene Name: CDK5 regulatory subunit associated protein 3
  Uniprot ID: Q96JB5
  ENST ID: ENST00000536708
  CDS Start-End: 110-1705
aatgtaggtgttctctttgggacgtctcaccgactctcttccttccccttccctgccctaatcgcccaacacgttgcaggtgctcaaccatgtctattagagaaactgaatgaggaggcaaagcatgacaagtgccacaagagacctgcacactgctctggatggtaaagcgacgcaaggagggaagaaggaccatcagcacgtgcccatcgacatccagaccagcaagctgctcgattggctggtggacagaaggcactgcagcctgaaatggcagagtctggtgctgacgatccgcgagaagatcaatgctgccatccaggacatgccagagagcgaagagatcgcccagctgctgtctgggtcctacattcactactttcactgcctaagaatcctggaccttctcaaaggcacagaggcctccacgaagaatatttttggccgatactcttcacagcggatgaaggattggcaggagattatagctctgtatgagaaggacaacacctacttagtggaactctctagcctcctggttcggaatgtcaactatgagatcccctcactgaagaagcagattgccaagtgccagcagctgcagcaagaatacagccgcaaggaggaggagtgccaggcaggggctgccgagatgcgggagcagttctaccactcctgcaagcagtatggcatcacgggcgaaaatgtccgaggagaactgctggccctggtgaaggacctgccgagtcagctggctgagattggggcagcggctcagcagtccctgggggaagccattgacgtgtaccaggcgtctgtggggtttgtgtgtgagagccccacagagcaggtgttgccaatgctgcggttcgtgcagaagcggggaaactcaacggtgtacgagtggaggacagggacagagccctctgtggtggaacgaccccacctcgaggagcttcctgagcaggtggcagaagatgcgattgactggggcgactttggggtagaggcagtgtctgaggggactgactctggcatctctgccgaggctgctggaatcgactggggcatcttcccggaatcagattcaaaggatcctggaggtgatgggatagactggggagacgatgctgttgctttgcagatcacagtgctggaagcaggaacccaggctccagaaggtgttgccaggggcccagatgccctgacactgcttgaatacactgagacccggaatcagttccttgatgagctcatggagcttgagatcttcttagcccagagagcagtggagttgagtgaggaggcagatgtcctgtctgtgagccagttccagctggctccagccatcctgcagggccagaccaaagagaagatggttaccatggtgtcagtgctggaggatctgattggcaagcttaccagtcttcagctgcaacacctgtttatgatcctggcctcaccaaggtatgtggaccgagtgactgaattcctccagcaaaagctgaagcagtcccagctgctggctttgaagaaagagctgatggtgcagaagcagcaggaggcacttgaggagcaggcggctctggagcctaagctggacctgctactggagaagaccaaggagctgcagaagctgattgaagctgacatctccaagaggtacagcgggcgccctgtgaacctgatgggaacctctctgtgacaccctccgtgttcttgcctgcccatcttctccgcttttgggatgaagatgatagccagggctgttgttttggggcccttcaaggcaaaagaccaggctgactggaagatggaaagccacaggaaggaagcggcacctgatggtgatcttggcactctccatgttctctacaagaagctgtggtgattggccctgtggtctatcaggcgaaaaccacagattctccttctagttagtatagcggacttaataaaagaggaaaaaactctt

SEQ ID NO: 115945 - DNA, 1862 bp, Homo sapiens
  Payload ID: 2624
  Gene Symbol: CDK5RAP3
  Gene Name: CDK5 regulatory subunit associated protein 3
  ENST ID: ENST00000584991
  CDS Start-End: 99-416
cgtttgtgtctaaacggaggctcggccacaacgccactggattggtggtagggcggggcgggccacagtctccagcctgaagcggaagtggaggaaagatggaggaccatcagcacgtgcccatcgacatccagaccagcaagctgctcgattggctggtggacagaaggcactgcagcctgaaatggcagagtctggtgctgacgatccgcgagaagatcaatgctgccatccaggacatgccagagagcgaagagatcgcccagctgctgtctgggtcctacattcactactttcactgcctaagaatcctggaccttctcaaaggcacagaggcctccacgaagaatatttttggccgatactcttcacagcggatgaaggcaagattggcaggagattatagctctgtatgagaaggacaacacctacttagtggaactctctagcctcctggttcggaatgtcaactatgagatcccctcactgaagaagcagattgccaagtgccagcagctgcagcaagaatacagccgcaaggaggaggagtgccaggcaggggctgccgagatgcgggagcagttctaccactcctgcaagcagtatggcatcacgggcgaaaatgtccgaggagaactgctggccctggtgaaggacctgccgagtcagctggctgagattggggcagcggctcagcagtccctgggggaagccattgacgtgtaccaggcgtctgtggggtttgtgtgtgagagccccacagagcaggtgttgccaatgctgcggttcgtgcagaagcggggaaactcaacggtgtacgagtggaggacagggacagagccctctgtggtggaacgaccccacctcgaggagcttcctgagcaggtggcagaagatgcgattgactggggcgactttggggtagaggcagtgtctgaggggactgactctggcatctctgccgaggctgctggaatcgactggggcatcttcccggaatcagattcaaaggatcctggaggtgatgggatagactggggagacgatgctgttgctttgcagatcacagtgctggaagcaggaacccaggctccagaaggtgttgccaggggcccagatgccctgacactgcttgaatacactgagacccggaatcagttccttgatgagctcatggagcttgagatcttcttagcccagagagcagtggagttgagtgaggaggcagatgtcctgtctgtgagccagttccagctggctccagccatcctgcagggccagaccaaagagaagatggttaccatggtgtcagtgctggaggatctgattggcaagcttaccagtcttcagctgcaacacctgtttatgatcctggcctcaccaaggtatgtggaccgagtgactgaattcctccagcaaaagctgaagcagtcccagctgctggctttgaagaaagagctgatggtgcagaagcagcaggaggcacttgaggagcaggcggctctggagcctaagctggacctgctactggagaagaccaaggagctgcagaagctgattgaagctgacatctccaagaggtacagcgggcgccctgtgaacctgatgggaacctctctgtgacaccctccgtgttcttgcctgcccatcttctccgcttttgggatgaagatgatagccagggctgttgttttggggcccttcaaggcaaaagaccaggctgactggaagatggaaagccacaggaaggaagcggcacctgatggtgatcttggcactctccatgttctctacaagaagctgtggtgattggccctgtggtctatcaggcgaaaaccacagattctccttctagttagtat

SEQ ID NO: 115946 - DNA, 560 bp, Homo sapiens
  Payload ID: 2624
  Gene Symbol: CDK5RAP3
  Gene Name: CDK5 regulatory subunit associated protein 3
  ENST ID: ENST00000579605
  CDS Start-End: 70-426
aacgccactggattggtggtagggcggggcgggccacagtctccagcctgaagcggaagtggaggaaagatggaggaccatcagcacgtgcccatcgacatccagaccagcaagctgctcgattggctggtggacagaaggcactgcagcctgaaatggcagagtctggtgctgacgatccgcgagaagatcaatgctgccatccaggacatgccagagagcgaagagatcgcccagctgctgtctgggtcctacattcactactttcactgcctaagaatcctggaccttctcaaaggcacagaggcctccacgaagaatatttttggccgatactcttcacagcggatgaaggattggcaggagattatagctctgtatgagaaggacaacacctacttaggtggtaaaatcaattgtttttgatggaattgattttccctgagtggagtgctgggggaaggaggaggtccaggccggtagtggccattcgccgtgcctcagcgagcagcagattgccaagtgccagcagctgcagcaagaatacagccgcaaggagg

SEQ ID NO: 115947 - DNA, 564 bp, Homo sapiens
  Payload ID: 2624
  Gene Symbol: CDK5RAP3
  Gene Name: CDK5 regulatory subunit associated protein 3
  ENST ID: ENST00000578525
  CDS Start-End: 26-400
agcctgaagcggaagtggaggaaagatggaggaccatcagcacgtgcccatcgacatccagaccagcaagctgctcgattggctggtggacagaaggcactgcagcctgaaatggcagagtctggtgctgacgatccgcgagaagatcaatgctgccatccaggacatgccagagagcgaagagatcgcccagctgctgtctgggtcctacattcactactttcactgcctaagaatcctggaccttctcaaaggcacagaggcctccacgaagaatatttttggccgatactcttcacagcggatgaaggattggcaggagattatagctctgtatgagaaggacaacacctacttagcctcctggttcggaatgtcaactatgagatcccctcactgaagaagcagattgccaagtgccagcagctgcagcaagaatacagccgcaaggaggaggagtgccaggcaggggctgccgagatgcgggagcagttctaccactcctgcaagcagtatggcatcacgggcgaaaatgtccgaggagaactgctggccctggtgaag

SEQ ID NO: 115948 - DNA, 558 bp, Homo sapiens
  Payload ID: 2624
  Gene Symbol: CDK5RAP3
  Gene Name: CDK5 regulatory subunit associated protein 3
  ENST ID: ENST00000583363
  CDS Start-End: 13-159
agtggaggaaagatggaggtgtggggacaggagctgggtgtgctggggactggccgcggacccctaacctgtgtctccggtctccctccggaagcggctcaacccagcccatcgctctggccccgttctggccctgcagggtggtggttgggacgttgaaatgagcgcgcgagtgattggctggtggacagaaggcactgcagcctgaaatggcagagtctggtgctgacgatccgcgagaagatcaatgctgccatccaggacatgccagagagcgaagagatcgcccagctgctgtctgggtcctacattcactactttcactgcctaagaatcctggaccttctcaaaggcacagaggcctccacgaagaatatttttggccgatactcttcacagcggatgaaggattggcaggagattatagctctgtatgagaaggacaacacctacttaggtggtaaaatcaattgtttttgatggaattgattttccctgagtggagtgctgggggaaggaggaggtccaggccggtagtggccattcgccgtgcctcag

SEQ ID NO: 115949 - DNA, 567 bp, Homo sapiens
  Payload ID: 2624
  Gene Symbol: CDK5RAP3
  Gene Name: CDK5 regulatory subunit associated protein 3
  ENST ID: ENST00000578018
  CDS Start-End: 376-567
agcctgaagcggaagtggaggaaagatggaggtgtggggacaggagctgggtgtgctggggactggccgcggacccctaacctgtgtctccggtctccctccggaagcggctcaacccagcccatcgctctggccccgttctggccctgcagggtggtggttgggacgttgaaatgagcgcgcgagtggtacgtcctctctccgcgctcacgcccccctcctcaccgtgtttcccgccaggaccatcagcacgtgcccatcgacatccagaccagcaagctgctcgattggctggtggacagaaggcactgcagcctgaaatggcagagtctggtgctgacgatccgcgagaagatcaatgctgccatccaggacatgccagagagcgaagagatcgcccagctgctgtctgggtcctacattcactactttcactgcctaagaatcctggaccttctcaaaggcacagaggcctccacgaagaatatttttggccgatactcttcacagcggatgaaggattggcaggagattatagctctgtatgagaaggacaacacctactta

SEQ ID NO: 115950 - DNA, 901 bp, Homo sapiens
  Payload ID: 2624
  Gene Symbol: CDK5RAP3
  Gene Name: CDK5 regulatory subunit associated protein 3
  ENST ID: ENST00000583352
  CDS Start-End: 531-901
aggtgtggggacaggagctgggtgtgctggggactggccgcggacccctaacctgtgtctccggtctccctccggaagcggctcaacccagcccatcgctctggccccgttctggccctgcagggtggtggttgggacgttgaaatgagcgcgcgagtggtacgtcctctctccgcgctcacgcccccctcctcaccgtgtttcccgccaggaccatcagcacgtgcccatcgacatccagaccagcaagctgctcgattggctggtggacagaaggcactgcagcctgaaatggcagagtctggtgctgacgatccgcgagaagatcaatgctgccatccaggacatgccagagagcgaagagatcgcccagctgctgtctgggtcctgtgagtgcttaggggctgtcactggagtcccctctttgctgaggtaacattcactactttcactgcctaagaatcctggaccttctcaaaggcacagaggcctccacgaagaatatttttggccgatactcttcacagcggatgaaggattggcaggagattatagctctgtatgagaaggacaacacctacttagtggaactctctagcctcctggttcggaatgtcaactatgagatcccctcactgaagaagcagattgccaagtgccagcagctgcagcaagaatacagccgcaaggaggaggagtgccaggcaggggctgccgagatgcgggagcagttctaccactcctgcaagcagtatggcatcacgggcgaaaatgtccgaggagaactgctggccctggtgaaggacctgccgagtcagctggctgagattggggcagcggctcagcagtccctgggggaagccattgacgtgtaccaggcgtctgtggggtttgtgtgtga

SEQ ID NO: 115951 - DNA, 1768 bp, Homo sapiens
  Payload ID: 2624
  Gene Symbol: CDK5RAP3
  Gene Name: CDK5 regulatory subunit associated protein 3
  ENST ID: ENST00000580670
  CDS Start-End: 1-312
gaccatcagcacgtgcccatcgacatccagaccagcaagctgctcgattggctggtggacagaaggcactgcagcctgaaatggcagagtctggtgctgacgatccgcgagaagatcaatgctgccatccaggacatgccagagagcgaagagatcgcccagctgctgtctgggtcctacattcactactttcactgcctaagaatcctggaccttctcaaaggcacagaggcctccacgaagaatatttttggccgatactcttcacagcggatgaaggcaagattggcaggagattatagctctgtatgagaaggacaacacctacttagtggaactctctagcctcctggttcggaatgtcaactatgagatcccctcactgaagaagcagattgccaagtgccagcagctgcagcaagaatacagccgcaaggaggaggagtgccaggcaggggctgccgagatgcgggagcagttctaccactcctgcaagcagtatggcatcacgggcgaaaatgtccgaggagaactgctggccctggtgaaggacctgccgagtcagctggctgagattggggcagcggctcagcagtccctgggggaagccattgacgtgtaccaggcgtctgtggggtttgtgtgtgagagccccacagagcaggtgttgccaatgctgcggttcgtgcagaagcggggaaactcaacggtgtacgagtggaggacagggacagagccctctgtggtggaacgaccccacctcgaggagcttcctgagcaggtggcagaagatgcgattgactggggcgactttggggtagaggcagtgtctgaggggactgactctggcatctctgccgaggctgctggaatcgactggggcatcttcccggaatcagattcaaaggatcctggaggtgatgggatagactggggagacgatgctgttgctttgcagatcacagtgctggaagcaggaacccaggaaggtgttgccaggggcccagatgccctgacactgcttgaatacactgagacccggaatcagttccttgatgagctcatggagcttgagatcttcttagcccagagagcagtggagttgagtgaggaggcagatgtcctgtctgtgagccagttccagctggctccagccatcctgcagggccagaccaaagagaagatggttaccatggtgtcagtgctggaggatctgattggcaagcttaccagtcttcagctgcaacacctgtttatgatcctggcctcaccaaggtatgtggaccgagtgactgaattcctccagcaaaagctgaagcagtcccagctgctggctttgaagaaagagctgatggtgcagaagcagcaggaggcacttgaggagcaggcggctctggagcctaagctggacctgctactggagaagaccaaggagctgcagaagctgattgaagctgacatctccaagaggtacagcgggcgccctgtgaacctgatgggaacctctctgtgacaccctccgtgttcttgcctgcccatcttctccgcttttgggatgaagatgatagccagggctgttgttttggggcccttcaaggcaaaagaccaggctgactggaagatggaaagccacaggaaggaagcggcacctgatggtgatcttggcactctccatgttctctacaagaagctgtggtgattggccctgtggtctatcaggcgaaaaccacagattctccttctagttagtatagcggacttaataaaa

SEQ ID NO: 115952 - DNA, 1957 bp, Homo sapiens
  Payload ID: 2624
  Gene Symbol: CDK5RAP3
  Gene Name: CDK5 regulatory subunit associated protein 3
  ENST ID: ENST00000580391
  CDS Start-End: 342-518
tggggacaggagctgggtgtgctggggactggccgcggacccctaacctgtgtctccggtctccctccggaagcggctcaacccagcccatcgctctggccccgttctggccctgcagggtggtggttgggacgttgaaatgagcgcgcgagtggtacgtcctctctccgcgctcacgcccccctcctcaccgtgtttcccgccaggaccatcagcacgtgcccatcgacatccagaccagcaagctgctcgattggctggtggacagaaggcactgcagcctgaaatggcagagtctggtgctgacgatccgcgagaagatcaatgctgccatccaggacatgccagagagcgaagagatcgcccagctgctgtctgggtcctacattcactactttcactgcctaagaatcctggaccttctcaaaggcacagaggcctccacgaagaatatttttggccgatactcttcacagcggatgaaggcaagattggcaggagattatagctctgtatgagaaggacaacacctacttagtggaactctctagcctcctggttcggaatgtcaactatgagatcccctcactgaagaagcagattgccaagtgccagcagctgcagcaagaatacagccgcaaggaggaggagtgccaggcaggggctgccgagatgcgggagcagttctaccactcctgcaagcagtatggcatcacgggcgaaaatgtccgaggagaactgctggccctggtgaaggacctgccgagtcagctggctgagattggggcagcggctcagcagtccctgggggaagccattgacgtgtaccaggcgtctgtggggtttgtgtgtgagagccccacagagcaggtgttgccaatgctgcggttcgtgcagaagcggggaaactcaacggtgtacgagtggaggacagggacagagccctctgtggtggaacgaccccacctcgaggagcttcctgagcaggtggcagaagatgcgattgactggggcgactttggggtagaggcagtgtctgaggggactgactctggcatctctgccgaggctgctggaatcgactggggcatcttcccggaatcagattcaaaggatcctggaggtgatgggatagactggggagacgatgctgttgctttgcagatcacagtgctggaagcaggaacccaggctccagaaggtgttgccaggggcccagatgccctgacactgcttgaatacactgagacccggaatcagttccttgatgagctcatggagcttgagatcttcttagcccagagagcagtggagttgagtgaggaggcagatgtcctgtctgtgagccagttccagctggctccagccatcctgcagggccagaccaaagagaagatggttaccatggtgtcagtgctggaggatctgattggcaagcttaccagtcttcagctgcaacacctgtttatgatcctggcctcaccaaggtatgtggaccgagtgactgaattcctccagcaaaagctgaagcagtcccagctgctggctttgaagaaagagctgatggtgcagaagcagcaggaggcacttgaggagcaggcggctctggagcctaagctggacctgctactggagaagaccaaggagctgcagaagctgattgaagctgacatctccaagaggtacagcgggcgccctgtgaacctgatgggaacctctctgtgacaccctccgtgttcttgcctgcccatcttctccgcttttgggatgaagatgatagccagggctgttgttttggggcccttcaaggcaaaagaccaggctgactggaagatggaaagccacaggaaggaagcggcacctgatggtgatcttggcactctccatgttctctacaagaagctgtggtgattggccctgtggtctatcaggcgaaaaccacagattctccttctag

SEQ ID NO: 115953 - DNA, 867 bp, Homo sapiens
  Payload ID: 2624
  Gene Symbol: CDK5RAP3
  Gene Name: CDK5 regulatory subunit associated protein 3
  ENST ID: ENST00000579175
  CDS Start-End: 25-867
gcctgaagcggaagtggaggaaagatggaggaccatcagcacgtgcccatcgacatccagaccagcaagctgctcgattggctggtggacagaaggcactgcagcctgaaatggcagagtctggtgctgacgatccgcgagaagatcaatgctgccatccaggacatgccagagagcgaagagatcgcccagctgctgtctgggtcctacattcactactttcactgcctaagaatcctggaccttctcaaaggcacagaggcctccacgaagaatatttttggccgatactcttcacagcggatgaaggattggcaggagattatagctctgtatgagaaggacaacacctacttagtggaactctctagcctcctggttcggaatgtcaactatgagatcccctcactgaagaagcagattgccaagtgccagcagctgcagcaagaatacagccgcaaggaggaggagtgccaggcaggggctgccgagatgcgggagcagttctaccactcctgcaagcagtatggcatcacgggcgaaaatgtccgaggagaactgctggccctggtgaaggacctgccgagtcagctggctgagattggggcagcggctcagcagtccctgggggaagccattgacgtgtaccaggcgtctgtgggccccacagagcaggtgttgccaatgctgcggttcgtgcagaagcggggaaactcaacggtgtacgagtggaggacagggacagagccctctgtggtggaacgaccccacctcgaggagcttcctgagcaggtggcagaagatgcgattgactggggcgactttggggtagaggcagtgtctgaggggactgactctggcatctct

SEQ ID NO: 115954 - DNA, 852 bp, Homo sapiens
  Payload ID: 2624
  Gene Symbol: CDK5RAP3
  Gene Name: CDK5 regulatory subunit associated protein 3
  ENST ID: ENST00000583697
  CDS Start-End: 1-818
gcgactttggggtagaggcagtgtctgaggggactgactctggcatctctgccgaggctgctggaatcgactggggcatcttcccggaatcagattcaaaggatcctggaggtgatgggatagactggggagacgatgctgttgctttgcagatcacagtgctggaagcaggaacccaggctccagaaggtgttgccaggggcccagatgccctgacactgcttgaatacactgagacccggaatcagttccttgatgagctcatggagcttgagatcttcttagcccagagagcagtggagttgagtgaggaggcagatgtcctgtctgtgagccagttccagctggctccagccatcctgcagggccagaccaaagagaagatggttaccatggtgtcagtgctggaggatctgattggcaagcttaccagtcttcagctgcaacacctgtttatgatcctggcctcaccaaggtatgtggaccgagtgactgaattcctccagcaaaagctgaagcagtcccagctgctggctttgaagaaagagctgatggtgcagaagcagcaggaggcacttgaggagcaggcggctctggagcctaagctggacctgctactggagaagaccaaggagctgcagaagctgattgaagctgacatctccaagaggcaaaagaccaggctgactggaagatggaaagccacaggaaggaagcggcacctgatggtgatcttggcactctccatgttctctacaagaagctgtggtgattggccctgtggtctatcaggcgaaaaccacagattctccttctagttagtatagcggacttaataaaagaggaaaaaac

SEQ ID NO: 115955 - DNA, 568 bp, Homo sapiens
  Payload ID: 2624
  Gene Symbol: CDK5RAP3
  Gene Name: CDK5 regulatory subunit associated protein 3
  ENST ID: ENST00000577664
  CDS Start-End: 26-358
agcctgaagcggaagtggaggaaagatggaggtgtggggacaggagctgggaccatcagcacgtgcccatcgacatccagaccagcaagctgctcgattggctggtggacagaaggcactgcagcctgaaatggcagagtctggtgctgacgatccgcgagaagatcaatgctgccatccaggacatgccagagagcgaagagatcgcccagctgctgtctgggtcctacattcactactttcactgcctaagaatcctggaccttctcaaaggcacagaggcctccacgaagaatatttttggccgatactcttcacagcggatgaaggattggcaggagattatagctctgtatgagaaggacaacacctacttagtggaactctctagcctcctggttcggaatgtcaactatgagatcccctcactgaagaagcagattgccaagtgccagcagctgcagcaagaatacagccgcaaggaggaggagtgccaggcaggggctgccgagatgcgggagcagttctaccactcctgcaagcagtatggcatcacgggcgaaaatgt

SEQ ID NO: 115956 - DNA, 738 bp, Homo sapiens
  Payload ID: 2624
  Gene Symbol: CDK5RAP3
  Gene Name: CDK5 regulatory subunit associated protein 3
  ENST ID: ENST00000579632
  CDS Start-End: 151-738
ctcccccagagcctctgcagtcagcagaggcaggttctctcccagagcctctggctttgggacagcctccctggagtcagtagctgggcagaactgttctcaaacatccttctgctccacgtgctcaaccatgtctattagagaaactgaatgaggaggcaaagcatgacaagtgccacaagagacctgcacactgctctggatggtaaagcgacgcaaggagggaagaaggaccatcagcacgtgcccatcgacatccagaccagcaagctgctcgattggctggtggacagaaggcactgcagcctgaaatggcagagtctggtgctgacgatccgcgagaagatcaatgctgccatccaggacatgccagagagcgaagagatcgcccagctgctgtctgggtcctacattcactactttcactgcctaagaatcctggaccttctcaaaggcacagaggcctccacgaagaatatttttggccgatactcttcacagcggatgaaggattggcaggagattatagctctgtatgagaaggacaacacctacttagtggaactctctagcctcctggttcggaatgtcaactatgagatcccctcactgaagaagcagattgccaagtgccagcagctgcagcaagaatacagccgcaaggaggaggagtgccaggcaggggctgccgagatgcgggagcagttctaccactcctgcaagcagtatggcatcacg

SEQ ID NO: 115957 - DNA, 2742 bp, Homo sapiens
  Payload ID: 2625
  Gene Symbol: CIZ1
  Gene Name: CDKN1A interacting zinc finger protein 1
  ENST ID: ENST00000277465
  CDS Start-End: 4-2616
accatgttcagccagcagcagcagcagcagctccagcaacagcagcagcagctccagcagttacagcagcagcagctccagcagcagcaattgcagcagcagcagttactgcagctccagcagctgctccagcagtccccaccacaggccccgttgcccatggctgtcagccgggggctccccccgcagcagccacagcagccgcttctgaatctccagggcaccaactcagcctccctcctcaacggctccatgctgcagagagctttgcttttacagcagttgcaaggactggaccagtttgcaatgccaccagccacgtatgacactgccggtctcaccatgcccacagcaacactgggtaacctccgaggctatggcatggcatccccaggcctcgcagcccccagcctcacacccccacaactggccactccaaatttgcaacagttctttccccaggccactcgccagtccttgctgggacctcctcctgttggggtccccatgaacccttcccagttcaacctttcaggacggaacccccagaaacaggcccggacctcctcctctaccacccccaatcgaaaggattcttcttctcagacaatgcctgtggaagacaagtcagaccccccagaggggtctgaggaagccgcagagccccggatggacacaccagaagaccaagatttaccgccctgcccagaggacatcgccaaggaaaaacgcactccagcacctgagcctgagccttgtgaggcgtccgagctgccagcaaagagattgaggagctcagaagagcccacagagaaggaacctccagggcagttacaggtgaaggcccagccgcaggcccggatgacagtaccgaaacagacacagacaccagacctgctgcctgaggccctggaagcccaagtgctgccacgattccagccacgggtcctgcaggtccaggcccaggtgcagtcacagactcagccgcggataccatccacagacacccaggtgcagccaaagctgcagaagcaggcgcaaacacagacctctccagagcacttagtgctgcaacagaagcaggtgcagccacagctgcagcaggaggcagagccacagaagcaggtgcagccacaggtacagccacaggcacattcacagggcccaaggcaggtgcagctgcagcaggaggcagagccgctgaagcaggtgcagccacaggtccacacacaggcacagccaagcgtccagccacaggagcatcctccagcgcaggtgtcagtacagccaccagagcagacccatgagcagcctcacacccagccgcaggtgtcgttgctggctccagagcaaacaccagttgtggttcatgtctgcgggctggagatgccacctgatgcagtagaagctggtggaggcatggaaaagaccttgccagagcctgtgggcacccaagtcagcatggaagagattcagaatgagtcggcctgtggcctagatgtgggagaatgtgaaaacagagcgagagagatgccaggggtatggggcgccgggggctccctgaaggtcaccattctgcagagcagtgacagccgggcctttagcactgtacccctgacacctgtcccccgccccagtgactccgtctcctccacccctgcggctaccagcactccctctaagcaggccctccagttcttctgctacatctgcaaggccagctgctccagccagcaggagttccaggaccacatgtcggagcctcagcaccagcagcggctaggggagatccagcacatgagccaagcctgcctcctgtccctgctgcccgtgccccgggacgtcctggagacagaggatgaggagcctccaccaaggcgctggtgcaacacctgccagctctactacatgggggacctgatccaacaccgcaggacacaggaccacaagattgccaaacaatccttgcgacccttctgcaccgtttgcaaccgctacttcaaaacccctcgcaagtttgtggagcacgtgaagtcccaggggcataaggacaaagccaaggagctgaagtcgcttgagaaagaaattgctggccaagatgaggaccacttcattacagtggacgctgtgggttgcttcgagggtgatgaagaagaggaagaggatgatgaggatgaagaagagatcgaggttgaggaggaactctgcaagcaggtgaggtccagagatatatccagagaggagtggaagggctcggagacctacagccccaatactgcatatggtgtggacttcctggtgcccgtgatgggctatatctgccgcatctgccacaagttctatcacagcaactcaggggcacagctctcccactgcaagtccctgggccactttgagaacctgcagaaatacaaggcggccaagaaccccagccccaccacccgacctgtgagccgccggtgcgcaatcaacgcccggaacgctttgacagccctgttcacctccagcggccgcccaccctcccagcccaacacccaggacaaaacacccagcaaggtgacggctcgaccctcccagcccccactacctcggcgctcaacccgcctcaaaacctgatagagggacctccctgtccctggcctgcctgggtccagatctgctaatgctttttaggagtctgcctggaaactttgacatggttcatgtttttactcaaaatccaataaaacaaggtagtttggc

SEQ ID NO: 115958 - DNA, 809 bp, Homo sapiens
  Payload ID: 2625
  Gene Symbol: CIZ1
  Gene Name: CDKN1A interacting zinc finger protein 1
  ENST ID: ENST00000324544
  CDS Start-End: 52-809
ggtctccgagcctccccttcgcgatgcggaggacgcgggacagaggccaccatgttcagccagcagcagcagcagcagctccagcaacagcagcagcagctccagcagttacagcagcagcagctccagcagcagcaattgcagcagcagcagttactgcagctccagcagctgctccagcagtccccaccacaggccccgttgcccatggctgtcagccgggggctccccccgcagcagccacagcagccgcttctgaatctccagggcaccaactcagcctccctcctcaacggctccatgctgcagagagctttgcttttacagcagttgcaaggactggaccagtttgcaatgccaccagccacgtatgacactgccggtctcaccatgcccacagcaacactgggtaacctccgaggctatggcatggcatccccaggcctcgcagcccccagcctcacacccccacaactggccactccaaatttgcaacagttctttccccaggccactcgccagtccttgctgggacctcctcctgttggggtccccatgaacccttcccagttcaacctttcaggacggaacccccagaaacaggcccggacctcctcctctaccacccccaatcgaaaggattcttcttctcagacaatgcctgtggaagacaagtcagaccccccagaggggtctgaggaagccgcagagccccggatggacacaccagaagaccaagatttaccgccctgcccagaggacatcgccaaggaaaaacgcactccagcacctgagcctgagccttgtga

SEQ ID NO: 115959 - DNA, 2907 bp, Homo sapiens
  Payload ID: 2625
  Gene Symbol: CIZ1
  Gene Name: CDKN1A interacting zinc finger protein 1
  ENST ID: ENST00000357558
  CDS Start-End: 164-2776
cccgcccgcatttgggccttacgagcccacaggccccggagtagcagcggggaggccgggagcccgcgggccggagccgcccggccgaggcgtgggggctgcggggccggcccatccgtgggggcgacttgagcgttgagggcgcgcggggaggcgagccaccatgttcagccagcagcagcagcagcagctccagcaacagcagcagcagctccagcagttacagcagcagcagctccagcagcagcaattgcagcagcagcagttactgcagctccagcagctgctccagcagtccccaccacaggccccgttgcccatggctgtcagccgggggctccccccgcagcagccacagcagccgcttctgaatctccagggcaccaactcagcctccctcctcaacggctccatgctgcagagagctttgcttttacagcagttgcaaggactggaccagtttgcaatgccaccagccacgtatgacactgccggtctcaccatgcccacagcaacactgggtaacctccgaggctatggcatggcatccccaggcctcgcagcccccagcctcacacccccacaactggccactccaaatttgcaacagttctttccccaggccactcgccagtccttgctgggacctcctcctgttggggtccccatgaacccttcccagttcaacctttcaggacggaacccccagaaacaggcccggacctcctcctctaccacccccaatcgaaaggattcttcttctcagacaatgcctgtggaagacaagtcagaccccccagaggggtctgaggaagccgcagagccccggatggacacaccagaagaccaagatttaccgccctgcccagaggacatcgccaaggaaaaacgcactccagcacctgagcctgagccttgtgaggcgtccgagctgccagcaaagagattgaggagctcagaagagcccacagagaaggaacctccagggcagttacaggtgaaggcccagccgcaggcccggatgacagtaccgaaacagacacagacaccagacctgctgcctgaggccctggaagcccaagtgctgccacgattccagccacgggtcctgcaggtccaggcccaggtgcagtcacagactcagccgcggataccatccacagacacccaggtgcagccaaagctgcagaagcaggcgcaaacacagacctctccagagcacttagtgctgcaacagaagcaggtgcagccacagctgcagcaggaggcagagccacagaagcaggtgcagccacaggtacagccacaggcacattcacagggcccaaggcaggtgcagctgcagcaggaggcagagccgctgaagcaggtgcagccacaggtccacacacaggcacagccaagcgtccagccacaggagcatcctccagcgcaggtgtcagtacagccaccagagcagacccatgagcagcctcacacccagccgcaggtgtcgttgctggctccagagcaaacaccagttgtggttcatgtctgcgggctggagatgccacctgatgcagtagaagctggtggaggcatggaaaagaccttgccagagcctgtgggcacccaagtcagcatggaagagattcagaatgagtcggcctgtggcctagatgtgggagaatgtgaaaacagagcgagagagatgccaggggtatggggcgccgggggctccctgaaggtcaccattctgcagagcagtgacagccgggcctttagcactgtacccctgacacctgtcccccgccccagtgactccgtctcctccacccctgcggctaccagcactccctctaagcaggccctccagttcttctgctacatctgcaaggccagctgctccagccagcaggagttccaggaccacatgtcggagcctcagcaccagcagcggctaggggagatccagcacatgagccaagcctgcctcctgtccctgctgcccgtgccccgggacgtcctggagacagaggatgaggagcctccaccaaggcgctggtgcaacacctgccagctctactacatgggggacctgatccaacaccgcaggacacaggaccacaagattgccaaacaatccttgcgacccttctgcaccgtttgcaaccgctacttcaaaacccctcgcaagtttgtggagcacgtgaagtcccaggggcataaggacaaagccaaggagctgaagtcgcttgagaaagaaattgctggccaagatgaggaccacttcattacagtggacgctgtgggttgcttcgagggtgatgaagaagaggaagaggatgatgaggatgaagaagagatcgaggttgaggaggaactctgcaagcaggtgaggtccagagatatatccagagaggagtggaagggctcggagacctacagccccaatactgcatatggtgtggacttcctggtgcccgtgatgggctatatctgccgcatctgccacaagttctatcacagcaactcaggggcacagctctcccactgcaagtccctgggccactttgagaacctgcagaaatacaaggcggccaagaaccccagccccaccacccgacctgtgagccgccggtgcgcaatcaacgcccggaacgctttgacagccctgttcacctccagcggccgcccaccctcccagcccaacacccaggacaaaacacccagcaaggtgacggctcgaccctcccagcccccactacctcggcgctcaacccgcctcaaaacctgatagagggacctccctgtccctggcctgcctgggtccagatctgctaatgctttttaggagtctgcctggaaactttgacatggttcatgtttttactcaaaatccaataaaacaaggtagtttggctgtgc

SEQ ID NO: 115960 - DNA, 2984 bp, Homo sapiens
  Payload ID: 2625
  Gene Symbol: CIZ1
  Gene Name: CDKN1A interacting zinc finger protein 1
  Uniprot ID: Q9ULV3
  ENST ID: ENST00000372938
  CDS Start-End: 164-2860
cccgcccgcatttgggccttacgagcccacaggccccggagtagcagcggggaggccgggagcccgcgggccggagccgcccggccgaggcgtgggggctgcggggccggcccatccgtgggggcgacttgagcgttgagggcgcgcggggaggcgagccaccatgttcagccagcagcagcagcagcagctccagcaacagcagcagcagctccagcagttacagcagcagcagctccagcagcagcaattgcagcagcagcagttactgcagctccagcagctgctccagcagtccccaccacaggccccgttgcccatggctgtcagccgggggctccccccgcagcagccacagcagccgcttctgaatctccagggcaccaactcagcctccctcctcaacggctccatgctgcagagagctttgcttttacagcagttgcaaggactggaccagtttgcaatgccaccagccacgtatgacactgccggtctcaccatgcccacagcaacactgggtaacctccgaggctatggcatggcatccccaggcctcgcagcccccagcctcacacccccacaactggccactccaaatttgcaacagttctttccccaggccactcgccagtccttgctgggacctcctcctgttggggtccccatgaacccttcccagttcaacctttcaggacggaacccccagaaacaggcccggacctcctcctctaccacccccaatcgaaaggattcttcttctcagacaatgcctgtggaagacaagtcagaccccccagaggggtctgaggaagccgcagagccccggatggacacaccagaagaccaagatttaccgccctgcccagaggacatcgccaaggaaaaacgcactccagcacctgagcctgagccttgtgaggcgtccgagctgccagcaaagagattgaggagctcagaagagcccacagagaaggaacctccagggcagttacaggtgaaggcccagccgcaggcccggatgacagtaccgaaacagacacagacaccagacctgctgcctgaggccctggaagcccaagtgctgccacgattccagccacgggtcctgcaggtccaggcccaggtgcagtcacagactcagccgcggataccatccacagacacccaggtgcagccaaagctgcagaagcaggcgcaaacacagacctctccagagcacttagtgctgcaacagaagcaggtgcagccacagctgcagcaggaggcagagccacagaagcaggtgcagccacaggtacagccacaggcacattcacagggcccaaggcaggtgcagctgcagcaggaggcagagccgctgaagcaggtgcagccacaggtgcagccccaggcacattcacagcccccaaggcaggtgcagctgcagctgcagaagcaggtccagacacagacatatccacaggtccacacacaggcacagccaagcgtccagccacaggagcatcctccagcgcaggtgtcagtacagccaccagagcagacccatgagcagcctcacacccagccgcaggtgtcgttgctggctccagagcaaacaccagttgtggttcatgtctgcgggctggagatgccacctgatgcagtagaagctggtggaggcatggaaaagaccttgccagagcctgtgggcacccaagtcagcatggaagagattcagaatgagtcggcctgtggcctagatgtgggagaatgtgaaaacagagcgagagagatgccaggggtatggggcgccgggggctccctgaaggtcaccattctgcagagcagtgacagccgggcctttagcactgtacccctgacacctgtcccccgccccagtgactccgtctcctccacccctgcggctaccagcactccctctaagcaggccctccagttcttctgctacatctgcaaggccagctgctccagccagcaggagttccaggaccacatgtcggagcctcagcaccagcagcggctaggggagatccagcacatgagccaagcctgcctcctgtccctgctgcccgtgccccgggacgtcctggagacagaggatgaggagcctccaccaaggcgctggtgcaacacctgccagctctactacatgggggacctgatccaacaccgcaggacacaggaccacaagattgccaaacaatccttgcgacccttctgcaccgtttgcaaccgctacttcaaaacccctcgcaagtttgtggagcacgtgaagtcccaggggcataaggacaaagccaaggagctgaagtcgcttgagaaagaaattgctggccaagatgaggaccacttcattacagtggacgctgtgggttgcttcgagggtgatgaagaagaggaagaggatgatgaggatgaagaagagatcgaggttgaggaggaactctgcaagcaggtgaggtccagagatatatccagagaggagtggaagggctcggagacctacagccccaatactgcatatggtgtggacttcctggtgcccgtgatgggctatatctgccgcatctgccacaagttctatcacagcaactcaggggcacagctctcccactgcaagtccctgggccactttgagaacctgcagaaatacaaggcggccaagaaccccagccccaccacccgacctgtgagccgccggtgcgcaatcaacgcccggaacgctttgacagccctgttcacctccagcggccgcccaccctcccagcccaacacccaggacaaaacacccagcaaggtgacggctcgaccctcccagcccccactacctcggcgctcaacccgcctcaaaacctgatagagggacctccctgtccctggcctgcctgggtccagatctgctaatgctttttaggagtctgcctggaaactttgacatggttcatgtttttactcaaaatccaataaaacaaggtagtttg

SEQ ID NO: 115961 - DNA, 2858 bp, Homo sapiens
  Payload ID: 2625
  Gene Symbol: CIZ1
  Gene Name: CDKN1A interacting zinc finger protein 1
  Uniprot ID: Q9ULV3
  ENST ID: ENST00000372948
  CDS Start-End: 204-2732
aacacgattcctctggccaggccaaggggagggcgacactgacaggcgccccccacccaggggccgtggcgaagcaaggggccggctgctcagaaaaggataagaagtggtttctcctcccctcttcccttcctcatcctgcagcccgcgcctcccccctcgccgcgctgcgcacggatggcggcgggagccgcagagccaccatgttcagccagcagcagcagcagcagctccagcaacagcagcagcagctccagcagttacagcagcagcagctccagcagcagcaattgcagcagcagcagttactgcagctccagcagctgctccagcagtccccaccacaggccccgttgcccatggctgtcagccgggggctccccccgcagcagccacagcagccgcttctgaatctccagggcaccaactcagcctccctcctcaacggctccatgctgcagagagctttgcttttacagcagttgcaaggactggaccagtttgcaatgccaccagccacgtatgacactgccggtctcaccatgcccacagcaacactgggtaacctccgaggctatggcatggcatccccaggcctcgcagcccccagcctcacacccccacaactggccactccaaatttgcaacagttctttccccaggccactcgccagtccttgctgggacctcctcctgttggggtccccatgaacccttcccagttcaacctttcaggacggaacccccagaaacaggcccggacctcctcctctaccacccccaatcgaaaggattcttcttctcagacaatgcctgtggaagacaagtcagaccccccagaggggtctgaggaagccgcagagccccggatggacacaccagaagaccaagatttaccgccctgcccagaggacatcgccaaggaaaaacgcactccagcacctgagcctgagccttgtgaggcgtccgagctgccagcaaagagattgaggagctcagaagagcccacagagaaggaacctccagggcagttacaggtgaaggcccagccgcaggcccggatgacagtaccgaaacagacacagacaccagacctgctgcctgaggccctggaagcccaagtgctgccacgattccagccacgggtcctgcaggtccaggcccaggtgcagtcacagactcagccgcggataccatccacagacacccaggtgcagccaaagctgcagaagcaggcgcaaacacagacctctccagagcacttagtgctgcaacagaagcaggtgcagccacagctgcagcaggaggcagagccacagaagcaggtgcagccacaggtccacacacaggcacagccaagcgtccagccacaggagcatcctccagcgcaggtgtcagtacagccaccagagcagacccatgagcagcctcacacccagccgcaggtgtcgttgctggctccagagcaaacaccagttgtggttcatgtctgcgggctggagatgccacctgatgcagtagaagctggtggaggcatggaaaagaccttgccagagcctgtgggcacccaagtcagcatggaagagattcagaatgagtcggcctgtggcctagatgtgggagaatgtgaaaacagagcgagagagatgccaggggtatggggcgccgggggctccctgaaggtcaccattctgcagagcagtgacagccgggcctttagcactgtacccctgacacctgtcccccgccccagtgactccgtctcctccacccctgcggctaccagcactccctctaagcaggccctccagttcttctgctacatctgcaaggccagctgctccagccagcaggagttccaggaccacatgtcggagcctcagcaccagcagcggctaggggagatccagcacatgagccaagcctgcctcctgtccctgctgcccgtgccccgggacgtcctggagacagaggatgaggagcctccaccaaggcgctggtgcaacacctgccagctctactacatgggggacctgatccaacaccgcaggacacaggaccacaagattgccaaacaatccttgcgacccttctgcaccgtttgcaaccgctacttcaaaacccctcgcaagtttgtggagcacgtgaagtcccaggggcataaggacaaagccaaggagctgaagtcgcttgagaaagaaattgctggccaagatgaggaccacttcattacagtggacgctgtgggttgcttcgagggtgatgaagaagaggaagaggatgatgaggatgaagaagagatcgaggttgaggaggaactctgcaagcaggtgaggtccagagatatatccagagaggagtggaagggctcggagacctacagccccaatactgcatatggtgtggacttcctggtgcccgtgatgggctatatctgccgcatctgccacaagttctatcacagcaactcaggggcacagctctcccactgcaagtccctgggccactttgagaacctgcagaaatacaaggcggccaagaaccccagccccaccacccgacctgtgagccgccggtgcgcaatcaacgcccggaacgctttgacagccctgttcacctccagcggccgcccaccctcccagcccaacacccaggacaaaacacccagcaaggtgacggctcgaccctcccagcccccactacctcggcgctcaacccgcctcaaaacctgatagagggacctccctgtccctggcctgcctgggtccagatctgctaatgctttttaggagtctgcctggaaactttgacatggttcatgtttttactcaaaatccaataaaacaaggtagtttggc

SEQ ID NO: 115962 - DNA, 2731 bp, Homo sapiens
  Payload ID: 2625
  Gene Symbol: CIZ1
  Gene Name: CDKN1A interacting zinc finger protein 1
  Uniprot ID: Q9ULV3
  ENST ID: ENST00000372954
  CDS Start-End: 143-2599
cgagcccacaggccccggagtagcagcggggaggccgggagcccgcgggccggagccgcccggccgaggcgtgggggctgcggggccggcccatccgtgggggcgacttgagcgttgagggcgcgcggggaggcgagccaccatgttcagccagcagcagcagcagcagctccagcaacagcagcagcagctccagcagttacagcagcagcagctccagcagcagcaattgcagcagcagcagttactgcagctccagcagctgctccagcagtccccaccacaggccccgttgcccatggctgtcagccgggggctccccccgcagcagccacagcagccgcttctgaatctccagggcaccaactcagcctccctcctcaacggctccatgctgcagagagctttgcttttacagcagttgcaaggtaacctccgaggctatggcatggcatccccaggcctcgcagcccccagcctcacacccccacaactggccactccaaatttgcaacagttctttccccaggccactcgccagtccttgctgggacctcctcctgttggggtccccatgaacccttcccagttcaacctttcaggacggaacccccagaaacaggcccggacctcctcctctaccacccccaatcgaaaggattcttcttctcagacaatgcctgtggaagacaagtcagaccccccagaggggtctgaggaagccgcagagccccggatggacacaccagaagaccaagatttaccgccctgcccagaggacatcgccaaggaaaaacgcactccagcacctgagcctgagccttgtgaggcgtccgagctgccagcaaagagattgaggagctcagaagagcccacagagaaggaacctccagggcagttacaggtgaaggcccagccgcaggcccggatgacagtaccgaaacagacacagacaccagacctgctgcctgaggccctggaagcccaagtgctgccacgattccagccacgggtcctgcaggtccaggcccaggtgcagtcacagactcagccgcggataccatccacagacacccaggtgcagccaaagctgcagaagcaggcgcaaacacagacctctccagagcacttagtgctgcaacagaagcaggtgcagccacagctgcagcaggaggcagagccacagaagcaggtgcagccacaggtccacacacaggcacagccaagcgtccagccacaggagcatcctccagcgcaggtgtcagtacagccaccagagcagacccatgagcagcctcacacccagccgcaggtgtcgttgctggctccagagcaaacaccagttgtggttcatgtctgcgggctggagatgccacctgatgcagtagaagctggtggaggcatggaaaagaccttgccagagcctgtgggcacccaagtcagcatggaagagattcagaatgagtcggcctgtggcctagatgtgggagaatgtgaaaacagagcgagagagatgccaggggtatggggcgccgggggctccctgaaggtcaccattctgcagagcagtgacagccgggcctttagcactgtacccctgacacctgtcccccgccccagtgactccgtctcctccacccctgcggctaccagcactccctctaagcaggccctccagttcttctgctacatctgcaaggccagctgctccagccagcaggagttccaggaccacatgtcggagcctcagcaccagcagcggctaggggagatccagcacatgagccaagcctgcctcctgtccctgctgcccgtgccccgggacgtcctggagacagaggatgaggagcctccaccaaggcgctggtgcaacacctgccagctctactacatgggggacctgatccaacaccgcaggacacaggaccacaagattgccaaacaatccttgcgacccttctgcaccgtttgcaaccgctacttcaaaacccctcgcaagtttgtggagcacgtgaagtcccaggggcataaggacaaagccaaggagctgaagtcgcttgagaaagaaattgctggccaagatgaggaccacttcattacagtggacgctgtgggttgcttcgagggtgatgaagaagaggaagaggatgatgaggatgaagaagagatcgaggttgaggaggaactctgcaagcaggtgaggtccagagatatatccagagaggagtggaagggctcggagacctacagccccaatactgcatatggtgtggacttcctggtgcccgtgatgggctatatctgccgcatctgccacaagttctatcacagcaactcaggggcacagctctcccactgcaagtccctgggccactttgagaacctgcagaaatacaaggcggccaagaaccccagccccaccacccgacctgtgagccgccggtgcgcaatcaacgcccggaacgctttgacagccctgttcacctccagcggccgcccaccctcccagcccaacacccaggacaaaacacccagcaaggtgacggctcgaccctcccagcccccactacctcggcgctcaacccgcctcaaaacctgatagagggacctccctgtccctggcctgcctgggtccagatctgctaatgctttttaggagtctgcctggaaactttgacatggttcatgtttttactcaaaatccaataaaacaaggtagtttggctgtgca

SEQ ID NO: 115963 - DNA, 2645 bp, Homo sapiens
  Payload ID: 2625
  Gene Symbol: CIZ1
  Gene Name: CDKN1A interacting zinc finger protein 1
  ENST ID: ENST00000393608
  CDS Start-End: 1-2514
atgttcagccagcagcagcagcagcagctccagcaacagcagcaggccccgttgcccatggctgtcagccgggggctccccccgcagcagccacagcagccgcttctgaatctccagggcaccaactcagcctccctcctcaacggctccatgctgcagagagctttgcttttacagcagttgcaaggactggaccagtttgcaatgccaccagccacgtatgacactgccggtctcaccatgcccacagcaacactgggtaacctccgaggctatggcatggcatccccaggcctcgcagcccccagcctcacacccccacaactggccactccaaatttgcaacagttctttccccaggccactcgccagtccttgctgggacctcctcctgttggggtccccatgaacccttcccagttcaacctttcaggacggaacccccagaaacaggcccggacctcctcctctaccacccccaatcgaaaggattcttcttctcagacaatgcctgtggaagacaagtcagaccccccagaggggtctgaggaagccgcagagccccggatggacacaccagaagaccaagatttaccgccctgcccagaggacatcgccaaggaaaaacgcactccagcacctgagcctgagccttgtgaggcgtccgagctgccagcaaagagattgaggagctcagaagagcccacagagaaggaacctccagggcagttacaggtgaaggcccagccgcaggcccggatgacagtaccgaaacagacacagacaccagacctgctgcctgaggccctggaagcccaagtgctgccacgattccagccacgggtcctgcaggtccaggcccaggtgcagtcacagactcagccgcggataccatccacagacacccaggtgcagccaaagctgcagaagcaggcgcaaacacagacctctccagagcacttagtgctgcaacagaagcaggtgcagccacagctgcagcaggaggcagagccacagaagcaggtgcagccacaggtacagccacaggcacattcacagggcccaaggcaggtgcagctgcagcaggaggcagagccgctgaagcaggtgcagccacaggtccacacacaggcacagccaagcgtccagccacaggagcatcctccagcgcaggtgtcagtacagccaccagagcagacccatgagcagcctcacacccagccgcaggtgtcgttgctggctccagagcaaacaccagttgtggttcatgtctgcgggctggagatgccacctgatgcagtagaagctggtggaggcatggaaaagaccttgccagagcctgtgggcacccaagtcagcatggaagagattcagaatgagtcggcctgtggcctagatgtgggagaatgtgaaaacagagcgagagagatgccaggggtatggggcgccgggggctccctgaaggtcaccattctgcagagcagtgacagccgggcctttagcactgtacccctgacacctgtcccccgccccagtgactccgtctcctccacccctgcggctaccagcactccctctaagcaggccctccagttcttctgctacatctgcaaggccagctgctccagccagcaggagttccaggaccacatgtcggagcctcagcaccagcagcggctaggggagatccagcacatgagccaagcctgcctcctgtccctgctgcccgtgccccgggacgtcctggagacagaggatgaggagcctccaccaaggcgctggtgcaacacctgccagctctactacatgggggacctgatccaacaccgcaggacacaggaccacaagattgccaaacaatccttgcgacccttctgcaccgtttgcaaccgctacttcaaaacccctcgcaagtttgtggagcacgtgaagtcccaggggcataaggacaaagccaaggagctgaagtcgcttgagaaagaaattgctggccaagatgaggaccacttcattacagtggacgctgtgggttgcttcgagggtgatgaagaagaggaagaggatgatgaggatgaagaagagatcgaggttgaggaggaactctgcaagcaggtgaggtccagagatatatccagagaggagtggaagggctcggagacctacagccccaatactgcatatggtgtggacttcctggtgcccgtgatgggctatatctgccgcatctgccacaagttctatcacagcaactcaggggcacagctctcccactgcaagtccctgggccactttgagaacctgcagaaatacaaggcggccaagaaccccagccccaccacccgacctgtgagccgccggtgcgcaatcaacgcccggaacgctttgacagccctgttcacctccagcggccgcccaccctcccagcccaacacccaggacaaaacacccagcaaggtgacggctcgaccctcccagcccccactacctcggcgctcaacccgcctcaaaacctgatagagggacctccctgtccctggcctgcctgggtccagatctgctaatgctttttaggagtctgcctggaaactttgacatggttcatgtttttactcaaaatccaataaaacaaggtagtttggctgtgc

SEQ ID NO: 115964 - DNA, 2508 bp, Homo sapiens
  Payload ID: 2625
  Gene Symbol: CIZ1
  Gene Name: CDKN1A interacting zinc finger protein 1
  ENST ID: ENST00000415526
  CDS Start-End: 1-2463
ccgttgcccatggctgtcagccgggggctccccccgcagcagccacagcagccgcttctgaatctccagggcaccaactcagcctccctcctcaacggctccatgctgcagagagctttgcttttacagcagttgcaaggtaacctccgaggctatggcatggcatccccaggcctcgcagcccccagcctcacacccccacaactggccactccaaatttgcaacagttctttccccaggccactcgccagtccttgctgggacctcctcctgttggggtccccatgaacccttcccagttcaacctttcaggacggaacccccagaaacaggcccggacctcctcctctaccacccccaatcgaaagacaatgcctgtggaagacaagtcagaccccccagaggggtctgaggaagccgcagagccccggatggacacaccagaagaccaagatttaccgccctgcccagaggacatcgccaaggaaaaacgcactccagcacctgagcctgagccttgtgaggcgtccgagctgccagcaaagagattgaggagctcagaagagcccacagagaaggaacctccagggcagttacaggtgaaggcccagccgcaggcccggatgacagtaccgaaacagacacagacaccagacctgctgcctgaggccctggaagcccaagtgctgccacgattccagccacgggtcctgcaggtccaggcccaggtgcagtcacagactcagccgcggataccatccacagacacccaggtgcagccaaagctgcagaagcaggcgcaaacacagacctctccagagcacttagtgctgcaacagaagcaggtgcagccacagctgcagcaggaggcagagccacagaagcaggtgcagccacaggtacagccacaggcacattcacagggcccaaggcaggtgcagctgcagcaggaggcagagccgctgaagcaggtgcagccacaggtgcagccccaggcacattcacagcccccaaggcaggtgcagctgcagctgcagaagcaggtccagacacagacatatccacaggtccacacacaggcacagccaagcgtccagccacaggagcatcctccagcgcaggtgtcagtacagccaccagagcagacccatgagcagcctcacacccagccgcaggtgtcgttgctggctccagagcaaacaccagttgtggttcatgtctgcgggctggagatgccacctgatgcagtagaagctggtggaggcatggaaaagaccttgccagagcctgtgggcacccaagtcagcatggaagagattcagaatgagtcggcctgtggcctagatgtgggagaatgtgaaaacagagcgagagagatgccaggggtatggggcgccgggggctccctgaaggtcaccattctgcagagcagtgacagccgggcctttagcactgtacccctgacacctgtcccccgccccagtgactccgtctcctccacccctgcggctaccagcactccctctaagcaggccctccagttcttctgctacatctgcaaggccagctgctccagccagcaggagttccaggaccacatgtcggagcctcagcaccagcagcggctaggggagatccagcacatgagccaagcctgcctcctgtccctgctgcccgtgccccgggacgtcctggagacagaggatgaggagcctccaccaaggcgctggtgcaacacctgccagctctactacatgggggacctgatccaacaccgcaggacacaggaccacaagattgccaaacaatccttgcgacccttctgcaccgtttgcaaccgctacttcaaaacccctcgcaagtttgtggagcacgtgaagtcccaggggcataaggacaaagccaaggagctgaagtcgcttgagaaagaaattgctggccaagatgaggaccacttcattacagtggacgctgtgggttgcttcgagggtgatgaagaagaggaagaggatgatgaggatgaagaagagatcgaggttgaggaggaactctgcaagcaggtgaggtccagagatatatccagagaggagtggaagggctcggagacctacagccccaatactgcatatggtgtggacttcctggtgcccgtgatgggctatatctgccgcatctgccacaagttctatcacagcaactcaggggcacagctctcccactgcaagtccctgggccactttgagaacctgcagaaatacaaggcggccaagaaccccagccccaccacccgacctgtgagccgccggtgcgcaatcaacgcccggaacgctttgacagccctgttcacctccagcggccgcccaccctcccagcccaacacccaggacaaaacacccagcaaggtgacggctcgaccctcccagcccccactacctcggcgctcaacccgcctcaaaacctgatagagggacctccctgtccctggcctgcctgggtccagatctgct

SEQ ID NO: 115965 - DNA, 684 bp, Homo sapiens
  Payload ID: 2625
  Gene Symbol: CIZ1
  Gene Name: CDKN1A interacting zinc finger protein 1
  ENST ID: ENST00000420484
  CDS Start-End: 179-684
gagggcgcgcggggaggcgaggtgcggggccgggggcggctgggtcgtggggctccgcctgcgagctggctgtgtctgcggaggaggcggctggcggggtgggagcgggcggagtggggcgcgaggaggtggcggtggtggagagaagccgtcccacggagctcaggaccacgccaccatgttcagccagcagcagcagcagcagctccagcaacagcagcagcagctccagcagttacagcagcagcagctccagcagcagcaattgcagcagcagcagttactgcagctccagcagctgctccagcagtccccaccacaggccccgttgcccatggctgtcagccgggggctccccccgcagcagccacagcagccgcttctgaatctccagggcaccaactcagcctccctcctcaacggctccatgctgcagagagctttgcttttacagcagttgcaaggactggaccagtttgcaatgccaccagccacgtatgacactgccggtctcaccatgcccacagcaacactgggtaacctccgaggctatggcatggcatccccaggcctcgcagcccccagcctcacacccccacaactggccactccaaatttgcaacagttctttccccaggccactcgccagtccttgctgggacctcctcctgttggggtccccat

SEQ ID NO: 115966 - DNA, 2996 bp, Homo sapiens
  Payload ID: 2625
  Gene Symbol: CIZ1
  Gene Name: CDKN1A interacting zinc finger protein 1
  ENST ID: ENST00000538431
  CDS Start-End: 1-2865
atgtacatccgccaactgcgcgccccctctcaccgcagccccgcgcggggccccaggatcgcaggaccgcggcggccgcagggagccaccatgttcagccagcagcagcagcagcagctccagcaacagcagcagcagctccagcagttacagcagcagcagctccagcagcagcaattgcagcagcagcagttactgcagctccagcagctgctccagcagtccccaccacaggccccgttgcccatggctgtcagccgggggctccccccgcagcagccacagcagccgcttctgaatctccagggcaccaactcagcctccctcctcaacggctccatgctgcagagagctttgcttttacagcagttgcaaggactggaccagtttgcaatgccaccagccacgtatgacactgccggtctcaccatgcccacagcaacactgggtaacctccgaggctatggcatggcatccccaggcctcgcagcccccagcctcacacccccacaactggccactccaaatttgcaacagttctttccccaggccactcgccagtccttgctgggacctcctcctgttggggtccccatgaacccttcccagttcaacctttcaggacggaacccccagaaacaggcccggacctcctcctctaccacccccaatcgaaaggattcttcttctcagacaatgcctgtggaagacaagtcagaccccccagaggggtctgaggaagccgcagagccccggatggacacaccagaagaccaagatttaccgccctgcccagaggacatcgccaaggaaaaacgcactccagcacctgagcctgagccttgtgaggcgtccgagctgccagcaaagagattgaggagctcagaagagcccacagagaaggaacctccagggcagttacaggtgaaggcccagccgcaggcccggatgacagtaccgaaacagacacagacaccagacctgctgcctgaggccctggaagcccaagtgctgccacgattccagccacgggtcctgcaggtccaggcccaggtgcagtcacagactcagccgcggataccatccacagacacccaggtgcagccaaagctgcagaagcaggcgcaaacacagacctctccagagcacttagtgctgcaacagaagcaggtgcagccacagctgcagcaggaggcagagccacagaagcaggtgcagccacaggtacagccacaggcacattcacagggcccaaggcaggtgcagctgcagcaggaggcagagccgctgaagcaggtgcagccacaggtgcagccccaggcacattcacagcccccaaggcaggtgcagctgcagctgcagaagcaggtccagacacagacatatccacaggtccacacacaggcacagccaagcgtccagccacaggagcatcctccagcgcaggtgtcagtacagccaccagagcagacccatgagcagcctcacacccagccgcaggtgtcgttgctggctccagagcaaacaccagttgtggttcatgtctgcgggctggagatgccacctgatgcagtagaagctggtggaggcatggaaaagaccttgccagagcctgtgggcacccaagtcagcatggaagagattcagaatgagtcggcctgtggcctagatgtgggagaatgtgaaaacagagcgagagagatgccaggggtatggggcgccgggggctccctgaaggtcaccattctgcagagcagtgacagccgggcctttagcactgtacccctgacacctgtcccccgccccagtgactccgtctcctccacccctgcggctaccagcactccctctaagcaggccctccagttcttctgctacatctgcaaggccagctgctccagccagcaggagttccaggaccacatgtcggagcctcagcaccagcagcggctaggggagatccagcacatgagccaagcctgcctcctgtccctgctgcccgtgccccgggacgtcctggagacagaggatgaggagcctccaccaaggcgctggtgcaacacctgccagctctactacatgggggacctgatccaacaccgcaggacacaggaccacaagccacccacaccacgaagagatgtgtttgcccacgttccagtgcaggggtggagcacagcccggcttgttacagatatgattgccaaacaatccttgcgacccttctgcaccgtttgcaaccgctacttcaaaacccctcgcaagtttgtggagcacgtgaagtcccaggggcataaggacaaagccaaggagctgaagtcgcttgagaaagaaattgctggccaagatgaggaccacttcattacagtggacgctgtgggttgcttcgagggtgatgaagaagaggaagaggatgatgaggatgaagaagagatcgaggttgaggaggaactctgcaagcaggtgaggtccagagatatatccagagaggagtggaagggctcggagacctacagccccaatactgcatatggtgtggacttcctggtgcccgtgatgggctatatctgccgcatctgccacaagttctatcacagcaactcaggggcacagctctcccactgcaagtccctgggccactttgagaacctgcagaaatacaaggcggccaagaaccccagccccaccacccgacctgtgagccgccggtgcgcaatcaacgcccggaacgctttgacagccctgttcacctccagcggccgcccaccctcccagcccaacacccaggacaaaacacccagcaaggtgacggctcgaccctcccagcccccactacctcggcgctcaacccgcctcaaaacctgatagagggacctccctgtccctggcctgcctgggtccagatctgctaatgctttttaggagtctgcctggaaactttgacatggttcatgtttttactcaaaatccaataaaacaaggtagtttggctgtgc

SEQ ID NO: 115967 - DNA, 2855 bp, Homo sapiens
  Payload ID: 2625
  Gene Symbol: CIZ1
  Gene Name: CDKN1A interacting zinc finger protein 1
  Uniprot ID: Q9ULV3
  ENST ID: ENST00000629610
  CDS Start-End: 334-2727
cttacgagcccacaggccccggagtagcagcggggaggccgggagcccgcgggccggagccgcccggccgaggcgtgggggctgcggggccggcccatccgtgggggcgacttgagcgttgagggcgcgcggggaggcgagccaccatgttcagccagcagcagcagcagcagctccagcaacagcagcagcagctccagcagttacagcagcagcagctccagcagcagcaattgcagcagcagcagttactgcagctccagcagctgctccagcagtccccaccacaggccccgttgcccatggctgtcagccggactggaccagtttgcaatgccaccagccacgtatgacactgccggtctcaccatgcccacagcaacactgggtaacctccgaggctatggcatggcatccccaggcctcgcagcccccagcctcacacccccacaactggccactccaaatttgcaacagttctttccccaggccactcgccagtccttgctgggacctcctcctgttggggtccccatgaacccttcccagttcaacctttcaggacggaacccccagaaacaggcccggacctcctcctctaccacccccaatcgaaaggattcttcttctcagacaatgcctgtggaagacaagtcagaccccccagaggggtctgaggaagccgcagagccccggatggacacaccagaagaccaagatttaccgccctgcccagaggacatcgccaaggaaaaacgcactccagcacctgagcctgagccttgtgaggcgtccgagctgccagcaaagagattgaggagctcagaagagcccacagagaaggaacctccagggcagttacaggtgaaggcccagccgcaggcccggatgacagtaccgaaacagacacagacaccagacctgctgcctgaggccctggaagcccaagtgctgccacgattccagccacgggtcctgcaggtccaggcccaggtgcagtcacagactcagccgcggataccatccacagacacccaggtgcagccaaagctgcagaagcaggcgcaaacacagacctctccagagcacttagtgctgcaacagaagcaggtgcagccacagctgcagcaggaggcagagccacagaagcaggtgcagccacaggtacagccacaggcacattcacagggcccaaggcaggtgcagctgcagcaggaggcagagccgctgaagcaggtgcagccacaggtgcagccccaggcacattcacagcccccaaggcaggtgcagctgcagctgcagaagcaggtccagacacagacatatccacaggtccacacacaggcacagccaagcgtccagccacaggagcatcctccagcgcaggtgtcagtacagccaccagagcagacccatgagcagcctcacacccagccgcaggtgtcgttgctggctccagagcaaacaccagttgtggttcatgtctgcgggctggagatgccacctgatgcagtagaagctggtggaggcatggaaaagaccttgccagagcctgtgggcacccaagtcagcatggaagagattcagaatgagtcggcctgtggcctagatgtgggagaatgtgaaaacagagcgagagagatgccaggggtatggggcgccgggggctccctgaaggtcaccattctgcagagcagtgacagccgggcctttagcactgtacccctgacacctgtcccccgccccagtgactccgtctcctccacccctgcggctaccagcactccctctaagcaggccctccagttcttctgctacatctgcaaggccagctgctccagccagcaggagttccaggaccacatgtcggagcctcagcaccagcagcggctaggggagatccagcacatgagccaagcctgcctcctgtccctgctgcccgtgccccgggacgtcctggagacagaggatgaggagcctccaccaaggcgctggtgcaacacctgccagctctactacatgggggacctgatccaacaccgcaggacacaggaccacaagattgccaaacaatccttgcgacccttctgcaccgtttgcaaccgctacttcaaaacccctcgcaagtttgtggagcacgtgaagtcccaggggcataaggacaaagccaaggagctgaagtcgcttgagaaagaaattgctggccaagatgaggaccacttcattacagtggacgctgtgggttgcttcgagggtgatgaagaagaggaagaggatgatgaggatgaagaagagatcgaggttgaggaggaactctgcaagcaggtgaggtccagagatatatccagagaggagtggaagggctcggagacctacagccccaatactgcatatggtgtggacttcctggtgcccgtgatgggctatatctgccgcatctgccacaagttctatcacagcaactcaggggcacagctctcccactgcaagtccctgggccactttgagaacctgcagaaatacaaggcggccaagaaccccagccccaccacccgacctgtgagccgccggtgcgcaatcaacgcccggaacgctttgacagccctgttcacctccagcggccgcccaccctcccagcccaacacccaggacaaaacacccagcaaggtgacggctcgaccctcccagcccccactacctcggcgctcaacccgcctcaaaacctgatagagggacctccctgtccctggcctgcctgggtccagatctgctaatgctttttaggagtctgcctggaaactttgacatggttcatgtttttactcaaaatccaataaaacaaggtagtttggctg

SEQ ID NO: 115968 - DNA, 928 bp, Homo sapiens
  Payload ID: 2625
  Gene Symbol: CIZ1
  Gene Name: CDKN1A interacting zinc finger protein 1
  ENST ID: ENST00000471839
  CDS Start-End: 1-928
gttcttctgctacatctgcaaggccagctgctccagccagcaggagttccaggaccacatgtcggagcctcagcaccagcagcggctaggggagatccagcacatgagccaagcctgcctcctgtccctgctgcccgtgccccgggacgtcctggagacagaggatgaggagcctccaccaaggcgctggtgcaacacctgccagctctactacatgggggacctgatccaacaccgcaggacacaggaccacaagccacccacaccacgaagagatgtgtttgcccacgttccagtgcaggggtggagcacagcccggcttgttacagatatgattgccaaacaatccttgcgacccttctgcaccgtttgcaaccgctacttcaaaacccctcgcaagtttgtggagcacgtgaagtcccaggggcataaggacaaagccaaggagctgaagtcgcttgagaaagaaattgctggccaagatgaggaccacttcattacagtggacgctgtgggttgcttcgagggtgatgaagaagaggaagaggatgatgaggatgaagaagagatcgaggttgaggaggaactctgcaagcaggtgaggtccagagatatatccagagaggagtggaagggctcggagacctacagccccaatactgcatatggtgtggacttcctggtgcccgtgatgggctatatctgccgcatctgccacaagttctatcacagcaactcaggggcacagctctcccactgcaagtccctgggccactttgagaacctgcagaaatacaaggcggccaagaaccccagccccaccacccgacctgtgagccgccggtgcgcaatcaacgcccggaacgctttgacagccctgttcacctccagcggccgcccaccctcccagcccaacacccaggacaaa

SEQ ID NO: 115969 - DNA, 3462 bp, Homo sapiens
  Payload ID: 2625
  Gene Symbol: CIZ1
  Gene Name: CDKN1A interacting zinc finger protein 1
  ENST ID: ENST00000634901
  CDS Start-End: 658-3354
tcgccgcgctgcgcacggatggcggcgggagccgcagaggtgtgtgtgtgctggcgggaggccgtgcccggtcctcgatgcccgcgggactacgtcctcttctagggactgggatgcgggggctgacctctgccacggcccaggaattcccatggggtttccttgtttctagaaggagaaagttggaacatgaattcaacaaatatttactaggtacctgctagaagccaggccctgtcctaggcactgaagattcagcaacgaataagacagccaaggcctctgccctcatagatcttgcatcaagctggggagacagacagtaaataaaaatgggattatactaagtatcctatactgctgtatcactgatgccaggccagcagcctggcatcacatggagttggttgaaaagaagaatctcagggccaggtgcagtggcccacacctgtaatcccagcactttaggaggccaaggcgggtggatcacttgaggccaggagttggagaccagcctgtccaacatggcgaaacaccatctctactaaatatacaaaaattagctgggcatggtagcccgcacctgtaatcccaggtatggatcagtggctactatgtgccagatctcagcaagacagaggaggatgaagagccaccatgttcagccagcagcagcagcagcagctccagcaacagcagcagcagctccagcagttacagcagcagcagctccagcagcagcaattgcagcagcagcagttactgcagctccagcagctgctccagcagtccccaccacaggccccgttgcccatggctgtcagccgggggctccccccgcagcagccacagcagccgcttctgaatctccagggcaccaactcagcctccctcctcaacggctccatgctgcagagagctttgcttttacagcagttgcaaggactggaccagtttgcaatgccaccagccacgtatgacactgccggtctcaccatgcccacagcaacactgggtaacctccgaggctatggcatggcatccccaggcctcgcagcccccagcctcacacccccacaactggccactccaaatttgcaacagttctttccccaggccactcgccagtccttgctgggacctcctcctgttggggtccccatgaacccttcccagttcaacctttcaggacggaacccccagaaacaggcccggacctcctcctctaccacccccaatcgaaaggattcttcttctcagacaatgcctgtggaagacaagtcagaccccccagaggggtctgaggaagccgcagagccccggatggacacaccagaagaccaagatttaccgccctgcccagaggacatcgccaaggaaaaacgcactccagcacctgagcctgagccttgtgaggcgtccgagctgccagcaaagagattgaggagctcagaagagcccacagagaaggaacctccagggcagttacaggtgaaggcccagccgcaggcccggatgacagtaccgaaacagacacagacaccagacctgctgcctgaggccctggaagcccaagtgctgccacgattccagccacgggtcctgcaggtccaggcccaggtgcagtcacagactcagccgcggataccatccacagacacccaggtgcagccaaagctgcagaagcaggcgcaaacacagacctctccagagcacttagtgctgcaacagaagcaggtgcagccacagctgcagcaggaggcagagccacagaagcaggtgcagccacaggtacagccacaggcacattcacagggcccaaggcaggtgcagctgcagcaggaggcagagccgctgaagcaggtgcagccacaggtgcagccccaggcacattcacagcccccaaggcaggtgcagctgcagctgcagaagcaggtccagacacagacatatccacaggtccacacacaggcacagccaagcgtccagccacaggagcatcctccagcgcaggtgtcagtacagccaccagagcagacccatgagcagcctcacacccagccgcaggtgtcgttgctggctccagagcaaacaccagttgtggttcatgtctgcgggctggagatgccacctgatgcagtagaagctggtggaggcatggaaaagaccttgccagagcctgtgggcacccaagtcagcatggaagagattcagaatgagtcggcctgtggcctagatgtgggagaatgtgaaaacagagcgagagagatgccaggggtatggggcgccgggggctccctgaaggtcaccattctgcagagcagtgacagccgggcctttagcactgtacccctgacacctgtcccccgccccagtgactccgtctcctccacccctgcggctaccagcactccctctaagcaggccctccagttcttctgctacatctgcaaggccagctgctccagccagcaggagttccaggaccacatgtcggagcctcagcaccagcagcggctaggggagatccagcacatgagccaagcctgcctcctgtccctgctgcccgtgccccgggacgtcctggagacagaggatgaggagcctccaccaaggcgctggtgcaacacctgccagctctactacatgggggacctgatccaacaccgcaggacacaggaccacaagattgccaaacaatccttgcgacccttctgcaccgtttgcaaccgctacttcaaaacccctcgcaagtttgtggagcacgtgaagtcccaggggcataaggacaaagccaaggagctgaagtcgcttgagaaagaaattgctggccaagatgaggaccacttcattacagtggacgctgtgggttgcttcgagggtgatgaagaagaggaagaggatgatgaggatgaagaagagatcgaggttgaggaggaactctgcaagcaggtgaggtccagagatatatccagagaggagtggaagggctcggagacctacagccccaatactgcatatggtgtggacttcctggtgcccgtgatgggctatatctgccgcatctgccacaagttctatcacagcaactcaggggcacagctctcccactgcaagtccctgggccactttgagaacctgcagaaatacaaggcggccaagaaccccagccccaccacccgacctgtgagccgccggtgcgcaatcaacgcccggaacgctttgacagccctgttcacctccagcggccgcccaccctcccagcccaacacccaggacaaaacacccagcaaggtgacggctcgaccctcccagcccccactacctcggcgctcaacccgcctcaaaacctgatagagggacctccctgtccctggcctgcctgggtccagatctgctaatgctttttaggagtctgcctggaaactttgacatggttcatgtttttactcaaaatccaat

SEQ ID NO: 115970 - DNA, 2646 bp, Homo sapiens
  Payload ID: 2626
  Gene Symbol: CDKN2AIP
  Gene Name: CDKN2A interacting protein
  ENST ID: ENST00000302350
  CDS Start-End: 164-544
aagtgggcggttcggcggctctgggcgctgttgtttggtctttaggcctgcggaggggcgttatctggagggccgcgggtgcaggccgcagtgacagggccgctcgccccgctagtcctgcctgtctcccggtgcagctgtgttcgcggcctgcaggcccaacatggcgcaggaggtgtcggagtacctgagccagaacccgcgggtggcagcctgggtggaggcgctgcgctgcgacggcgagactgacaaacactggcgccaccgccgggattttttgcttcgcaacgccggggacctggcccccgctggcggcgctgcctccgctagcacggatgaagctgccgacgccgagagcgggacccgaaaccggcagctgcagcagctcatctccttttccatggcctgggcgaaccacgtcttcctcgggtgccgataccctcaaaaagttatggataaaatacttagtatggctgaaggcatcaaagtgacagatgctccaacctatacaacaagagatgaactggttgccaagaaggggtagaagagccatccaaaaaacgagttatagaaggaaaaaacagttctgcagttgagcaagatcacgcaaaaacctctgccaagacagaacgtgcatcagctcagcaggaaaacagttcaacgtgtatagggtcggccatcaaatcagagagtgggaactcagctcggagctctggcatctccagtcagaatagctctacaagtgatggagatcgatctgtttccagccaaagcagcagcagcgtttcctctcaggtaacaacggcaggatctgggaaagcttctgaagcagaagctccagataaacacggttctgcatcatttgtttccttgctgaaatccagtgtgaatagtcacatgacccaatccactgattctagacaacaaagtggatcacctaaaaagagtgctttggaaggctcttcagcctcagcttctcaaagcagctcagagatcgaggtgcccttgttgggctcctcaggaagctcagaggtagaattgccactattgtcttccaaacctagttcagagacagcttcaagtgggttaacttccaaaactagttcagaggcaagtgtttcatcatcagttgctaaaaacagttcctcatcaggcacatccttactgactcccaagagcagctcttcaacaaatacatcgctgctaacttccaagagcacttcccaggtagctgcatcactactagcttccaagagcagctcccagaccagtggatctctggtttccaaaagcacttccttagcaagtgtgtcccagttggcttctaagagtagttctcagactagcacctcacagttgccttctaaaagtacttcacagtcaagtgagagttctgtcaaattctcttgcaagttaaccaatgaagatgtgaaacagaagcaaccttttttcaatagactatataaaacggtggcatggaagttggtagctgttggtggctttagtcccaatgtgaatcatggagagctcctaaatgcagctattgaggctctgaaagcaacactggatgtattttttgtcccactaaaagaattggcagatctgcctcaaaataagagctctcaagaaagtattgtttgtgaattgaggtgcaagtctgtgtatttgggcactggctgtggaaaaagcaaagaaaatgcaaaagcagttgcatcaagagaagcattgaagttatttctcaagaaaaaggtggtggtaaaaatatgtaaaaggaaatacagaggcagtgaaatagaagatctagtactccttgatgaagaatcgaggcctgtaaacttacctccagcactaaaacatcctcaagaattactataatgtgtccaaaatatcactgcatacaatatctggtatttgaagagaaaaactgacttttgtatagtataaaacacaggctttcacaaattttgtattgctttttttccagttttgcagaaaatttacattctagttctcttcacacagtagcagttgtaaataatttatgaatgacagtacacattaaaaggtatgcattagcagcatattagtatgctgttttatttgctgaagaaaatactgtcttctatttttaatgatacattaggtacgatgtgtagttcggtagagtcctaaaatttttgtactactttcaatttggtgaaaatgtattaagttgtctaccatgttttcttttctagctgaataaaccacatcaaaggaaagggaccacagtatttgaatgtttgaaagtctgtaaagcttaaggttttaaaaatgttgcccgtaatgttgaacgtgtctgttaaaaaataaaagaaaaaatagttgcttcaaactatttttatgagaagttgtaagcattttttagatataaagcagtataaagtacttgttattttactctgaagttgtttaaaattcaccatgactttgaccgctgaagattctttaagcgggttaatttatgttttgaggtggaatacaatttacacttttttcttaaaaacatgaatgtgggtttctatattaagcatattttgtgactactattaacagattgatttgtttagatattaaatgctttaagctattttaccttttcaagaa

SEQ ID NO: 115971 - DNA, 860 bp, Homo sapiens
  Payload ID: 2626
  Gene Symbol: CDKN2AIP
  Gene Name: CDKN2A interacting protein
  ENST ID: ENST00000510928
  CDS Start-End: 102-509
atctggagggccgcgggtgcaggccgcagtgacagggccgctcgccccgctagtcctgcctgtctcccggtgcagctgtgttcgcggcctgcaggcccaacatggcgcaggaggtgtcggagtacctgagccagaacccgcgggtggcagcctgggtggaggcgctgcgctgcgacggcgagactgacaaacactggcgccaccgccgggattttttgcttcgcaacgccggggacctggcccccgctggcggcgctgcctccgctagcacggatgaagctgccgacgccgagagcgggacccgaaaccggcagctgcagcagctcatctccttttccatggcctgggcgaaccacgtcttcctcgggtgccgataccctcaaaaagttatggataaaatacttagtatggctgaaggcatcaaagtgacagatgctccaacctatacaacaagagatgaactggttgccaaggtgaagaaaagagggatatcgagtagcaatggttagcagatcatagatgtgaacatacataggagtttagagcataagtttgatataattaggaattattgttactaatttttttaacaagccagaatttttatgttattaataagtaataaagttggaatgttaaacctaaagtatatatctgtgtctttaggctttgaatttgatagtttgctttgactgctttagattttgaagtgtccactgttgtctgatgctgttatttttttaatattagacattcatgatgttattcaacactgttttaagaaattaatgactccacactttttaaagaaacgattagtcttgaaatgttttcactttgtgcctttattttaatgtgta

SEQ ID NO: 115972 - DNA, 2721 bp, Homo sapiens
  Payload ID: 2626
  Gene Symbol: CDKN2AIP
  Gene Name: CDKN2A interacting protein
  Uniprot ID: Q9NXV6
  ENST ID: ENST00000504169
  CDS Start-End: 208-1950
ggcggcggcgaggttataaaagggaagaagccggcggtgggcggaagtgggcggttcggcggctctgggcgctgttgtttggtctttaggcctgcggaggggcgttatctggagggccgcgggtgcaggccgcagtgacagggccgctcgccccgctagtcctgcctgtctcccggtgcagctgtgttcgcggcctgcaggcccaacatggcgcaggaggtgtcggagtacctgagccagaacccgcgggtggcagcctgggtggaggcgctgcgctgcgacggcgagactgacaaacactggcgccaccgccgggattttttgcttcgcaacgccggggacctggcccccgctggcggcgctgcctccgctagcacggatgaagctgccgacgccgagagcgggacccgaaaccggcagctgcagcagctcatctccttttccatggcctgggcgaaccacgtcttcctcgggtgccgataccctcaaaaagttatggataaaatacttagtatggctgaaggcatcaaagtgacagatgctccaacctatacaacaagagatgaactggttgccaaggtgaagaaaagagggatatcgagtagcaatgaaggggtagaagagccatccaaaaaacgagttatagaaggaaaaaacagttctgcagttgagcaagatcacgcaaaaacctctgccaagacagaacgtgcatcagctcagcaggaaaacagttcaacgtgtatagggtcggccatcaaatcagagagtgggaactcagctcggagctctggcatctccagtcagaatagctctacaagtgatggagatcgatctgtttccagccaaagcagcagcagcgtttcctctcaggtaacaacggcaggatctgggaaagcttctgaagcagaagctccagataaacacggttctgcatcatttgtttccttgctgaaatccagtgtgaatagtcacatgacccaatccactgattctagacaacaaagtggatcacctaaaaagagtgctttggaaggctcttcagcctcagcttctcaaagcagctcagagatcgaggtgcccttgttgggctcctcaggaagctcagaggtagaattgccactattgtcttccaaacctagttcagagacagcttcaagtgggttaacttccaaaactagttcagaggcaagtgtttcatcatcagttgctaaaaacagttcctcatcaggcacatccttactgactcccaagagcagctcttcaacaaatacatcgctgctaacttccaagagcacttcccaggtagctgcatcactactagcttccaagagcagctcccagaccagtggatctctggtttccaaaagcacttccttagcaagtgtgtcccagttggcttctaagagtagttctcagactagcacctcacagttgccttctaaaagtacttcacagtcaagtgagagttctgtcaaattctcttgcaagttaaccaatgaagatgtgaaacagaagcaaccttttttcaatagactatataaaacggtggcatggaagttggtagctgttggtggctttagtcccaatgtgaatcatggagagctcctaaatgcagctattgaggctctgaaagcaacactggatgtattttttgtcccactaaaagaattggcagatctgcctcaaaataagagctctcaagaaagtattgtttgtgaattgaggtgcaagtctgtgtatttgggcactggctgtggaaaaagcaaagaaaatgcaaaagcagttgcatcaagagaagcattgaagttatttctcaagaaaaaggtggtggtaaaaatatgtaaaaggaaatacagaggcagtgaaatagaagatctagtactccttgatgaagaatcgaggcctgtaaacttacctccagcactaaaacatcctcaagaattactataatgtgtccaaaatatcactgcatacaatatctggtatttgaagagaaaaactgacttttgtatagtataaaacacaggctttcacaaattttgtattgctttttttccagttttgcagaaaatttacattctagttctcttcacacagtagcagttgtaaataatttatgaatgacagtacacattaaaaggtatgcattagcagcatattagtatgctgttttatttgctgaagaaaatactgtcttctatttttaatgatacattaggtacgatgtgtagttcggtagagtcctaaaatttttgtactactttcaatttggtgaaaatgtattaagttgtctaccatgttttcttttctagctgaataaaccacatcaaaggaaagggaccacagtatttgaatgtttgaaagtctgtaaagcttaaggttttaaaaatgttgcccgtaatgttgaacgtgtctgttaaaaaataaaagaaaaaatagttgcttcaaactatttttatgagaagttgtaagcattttttagatataaagcagtataaagtacttgttattttactctgaagttgtttaaaattcaccatgactttgaccgctgaagattctttaagcgggttaatttatgttttgaggtggaatacaatttacacttttttcttaaaaacatgaatgtgggtttctatattaagcatattttgtgactactattaacagattgatttgtttagatattaaatgctttaagctattttaccttttcaagaa

SEQ ID NO: 115973 - DNA, 800 bp, Homo sapiens
  Payload ID: 2627
  Gene Symbol: CDKN2AIPNL
  Gene Name: CDKN2A interacting protein N-terminal like
  Uniprot ID: Q96HQ2
  ENST ID: ENST00000395009
  CDS Start-End: 28-285
atccggtcctcggctgcggcgggcaccatggtcggtggcgaggcggctgccgcagtggaggagctggtttcgggggtgcggcaggcggccgacttcgcggagcagttccgctcctactcagagagcgagaagcaatggaaggcccgcatggaattcatcctgcgccacctgcccgactaccgcgacccgcccgacggcagtggccgcctggaccagctgctctccctctccatggtctgggccaaccatctcttcctaggctgcagcccacggggtcctaagtaggaaccagcttcacctctctgctttccctcttatgaaaatggccgatgcctttttgtgaaggtctcaaagcccacttcatcctggctgcagcaccaaaaggacaaaggcccgcttttgaagtgcctgataaggcattcctttcacccctccatgaggaaggtggcaaatcttgagactccctattagagagcttcgattttcctgaaattgtgttaggaaaatagggtgacttggtttgatcttggtttctatacctattatggctgcctgactctggtcatttggcccctgcaggcctaagccacttggttttgcttcacatattggggtttattagaacagtacgtagggaagcaatgccagaggcacccgtcccttttccctgccttctaggtgctcctgggaaatcctggttttccatggttaggcaaatgtcagagaattggggaaataaataatgtttttgttagactaacattccatgtatttaaaaaataaaaatattttggtcctca

SEQ ID NO: 115974 - DNA, 1223 bp, Homo sapiens
  Payload ID: 2627
  Gene Symbol: CDKN2AIPNL
  Gene Name: CDKN2A interacting protein N-terminal like
  Uniprot ID: Q96HQ2
  ENST ID: ENST00000458198
  CDS Start-End: 45-395
cgggaaggcggcgggctatccggtcctcggctgcggcgggcaccatggtcggtggcgaggcggctgccgcagtggaggagctggtttcgggggtgcggcaggcggccgacttcgcggagcagttccgctcctactcagagagcgagaagcaatggaaggcccgcatggaattcatcctgcgccacctgcccgactaccgcgacccgcccgacggcagtggccgcctggaccagctgctctccctctccatggtctgggccaaccatctcttcctaggctgcagttacaataaagaccttttagacaaggtgatggaaatggccgatgggattgaagtggaagacctgccacaatttactaccagaagtgaattaatgaaaaagcatcaaagctaagccagaagatttatcacattttcatcatcagctacaggattagaaaggaggctgggatgaatgtgacatagaccacagcagctctcttaagactcctggtattaccaacataaagaggcaggtggaatgagaaggactctgtctagattggcttttttaacattctcattttcccaggagttatcactgtaaaagtatgcatggatatttatgtatttataaatcatgcactctaagatgagttcatcaacattgtaaaagccctcttttctgttttcaggtttttttttttcttatcgacaaggtctcactctgtcgcccaggcagaagcacaaaggtgcagtattggctcattgcagcctcgaactcctgggctcatattttcagggttttttgttttttgttttgtttttttgagacagagtcttgctctgttgcccaggcagtagtgcagtggcgcgatatattttcagtttttaaacgtcagaatttttgtttaaaatgcctttttgggctgggcacagtggcttatgcccataataatcccagcactttgggaggccgaggtgagcagatcacctgaggttaggagtttgagaccagcctggccaacacgatgaaaccccgtctctactaaaaatacaaacaaaattagctgggcatggtggcggacatctgtaatcccagctactcaggaggctgaagcagaagaactgcttgaacctgggaggtggaggttgcagtgagccaagatcgcaccattgcactccatcctgggcgacaaaaatgaaacaccgtctcaaaaaaaataaaaataataaaataaaa

SEQ ID NO: 115975 - DNA, 4461 bp, Homo sapiens
  Payload ID: 2628
  Gene Symbol: CDS1
  Gene Name: CDP-diacylglycerol synthase (phosphatidate cytidylyltransferase) 1
  Uniprot ID: Q92903
  ENST ID: ENST00000295887
  CDS Start-End: 424-1809
gcggggcgggaggggcctgcgcggcggcgggagcccagagccgcgctaaagcgggtcaagcgtcctccttttctccccgccccttctcctcctcctacctgggcctctgcgtggagacgcgcacctggcaaccggaggccgcgtctccgccttctctgctcgcgcctggcgcccggagcctgcccgggacctccgccggagccgcgctcgctgcaggcggcctcgagcgctctctcgttgatgccgttttggaggtgaccggcgcggcggccgctctatggtggggccgcgttagtggctgcggctccgcgggactccagggcgcggctgcgaggtggcggggcgccccgcctgcagaaccctgcttgcagctcaggtttcggggtgcttgaggaggccgccacggcagcgcgggagcggaagatgttggagctgaggcaccggggaagctgccccggccccagggaagcggtgtcgccgccacaccgcgagggagaggcggccggcggcgaccacgaaaccgagagcaccagcgacaaagaaacagatattgatgacagatatggagatttggattccagaacagattctgatattccggaaattccaccatcctcagatagaacccctgagattctcaaaaaagctctatctggtttatcttcaaggtggaaaaactggtggatacgtggaattctcactctaactatgatctcgttgtttttcctgatcatctatatgggatccttcatgctgatgcttcttgttctgggcatccaagtgaaatgcttccatgaaattatcactataggttatagagtctatcattcttatgatctaccatggtttagaacactaagttggtactttctattgtgtgtaaactactttttctatggagagactgtagctgattattttgctacatttgttcaaagagaagaacaacttcagttcctcattcgctaccatagatttatatcatttgccctctatctggcaggtttctgcatgtttgtactgagtttggtgaagaaacattatcgtctgcagttttatatgttcgcatggactcatgtcactttactgataactgtcactcagtcacaccttgtcatccaaaatctgtttgaaggcatgatatggttccttgttccaatatcaagtgttatctgcaatgacataactgcttacctttttggatttttttttgggagaactccattaattaagttgtctcctaaaaagacttgggaaggattcattggtggtttcttttccacagttgtgtttggattcattgctgcctatgtgttatccaaataccagtactttgtctgcccagtggaataccgaagtgatgtaaactccttcgtgacagaatgtgagccctcagaacttttccagcttcagacttactcacttccaccctttctaaaggcagtcttgagacaggaaagagtgagcttgtaccctttccagatccacagcattgcactgtcaacctttgcatctttaattggcccatttggaggcttctttgctagtggattcaaaagagccttcaaaatcaaggattttgcaaataccattcctggacatggtgggataatggacagatttgattgtcagtatttgatggcaacttttgtacatgtgtacatcacaagttttataaggggcccaaatcccagcaaagtgctacagcagttgttggtgcttcaacctgaacagcagttaaatatatataaaaccctgaagactcatctcattgagaaaggaatcctacaacccaccttgaaggtataactggatccagagagggaaggactgacaagaaggaattattcagaaaaacactgacagatgttttataaattgtacagaaaaatagttaaaaatgcaataggttgaagttttggagatatgtttctctctgaaattactgtgaatatttaacaaacacttacttgatctatgttatgaaataagtagcaaattgccagcaaaatgtcttgtaccttttctaaagtgtattttctgatgtgaacttccttccccttacttgctaggtttcataatttaaaagactggtatttaaaagagtcaaacactataaaatgagtaagttgacgatgttttaagattgcacctggcagtgtgcctttttgcacaaatatttacttttgcacttggagctgcttttaattttagcaaaatgttttatgcaaggcacaataggaagtcagttctcctgcacttcctcctcatgtagtctggagtactttctaaagggcttagttggatttaaaaaaaaaaaaaaaagattgtctacttttcaaagaagtaaccatttgccaggggaaaacattctgcttttaggtagtttcaaaattcaggggagggagcctgaaatttttgccatgattggtttgttagaaagagcaggcatcagactacttctgataaaattgtttggaaggtcacgacctcgcaaaaacttttcaagagcaacaaggaagaattctgctgtgaagaacacagtgtacggatcctccgcatattatctcaacagaggacagtagctcaggaggcagcttcaaacggtgacctgtggcctgggccatctcttcgtcatgtgcttcacttttccctgtttccctgtgaactggcttccatggttctgtagggtagtgagtcggggttgtggctgcagcagagcaggagatgcttgcccgagtgggagcaacccacccccgtgtccccaatgcctcactcctggcttctagtgcagccctttgtagactcacctcgcaagaaggaagatctgcctggagacctgatcccagtccagctttttgaccataggtcatctttgtccccttgctcctttgcatcatgtcataaaatttgaggatatcagctgattattttttcttccaagaatgaaaatcaagcagaattgattcctacacgaaaaaaaagcacacgaatgccaaacctttcctttggtggactggacactaaccagatgagagtaaatttcttatccgtggacgtatgtaagctactgctgctgtgtgctctccacagccatatttattgtattaaacaatcagcactaaaccttcaaaaattgcccagtgttcctagttaaatgttcagaggggagaaatagatatattttaaataatgttttgctaatgaaaagagtaaatatttttgtttaaatcagcaaaaactttccattattttatatttccgtctactatacctaaaacaaaagattgccgttatacctgggttccactgatgcagtcagccagcacctcctcacatgcacacatgattagacataggtgcactcggtaccaagagtccattttatggtccagcatatactccattgattcatcatcactgcatgtgttcagccagtgtatctcacactatccatacaaatctaaaattgatactggaaatgttattataggaggcagtgatcgcatttaaaatcaggccacctacaagtttaattttcaacatctcatgtttttatttgtcccattacagcctcaaatgttggtcataaaaaaaatttaggctaccaaagtttaaagaataaaatgaaaattttataagaacttacattaaaaactcagtagtttgcatgagtaagaactccttgagatacacagatccccccacatttgtatttaaaataattggtgaggcattgaaatccagaattataagaaagcattactgaatatgtgtgttataaaatcaatattattataaacaaaataggaagctagaaatatttgggatcacagtaatagcttttctcaaatatacttttagaattgaatgtacattatcctatatgtaaaaaagcaaattattaattttaatggagctctcgattgacctttttagcatacttttatagcatgtatattaaaatagaatatattttagcaaaagattgccataaaaccctgacttggctcattttgatatttgcactgtgaagagggcttaaattccaatgtagcaatgtggtggcagacaaatgaaaaactaggaagttctttcacagtaatgcctagttgttccaaatttgctatatttggaggtgctctactggtacttcctgcttgactctctgacctgtgggatgcacattcttcctcagcgctttttccttgttgtggtgacgtacattcactatctgagagtgaaagaccacacacacccctctttttaaaattattgtatctcttccttttcactttggtttgaacaaagatagtgtcaccttgttccgtgaaaaagaaaaagcataaacagtgtatatttagggtatatgggtgatagcttatgatgtgtgtcaatcagttctctgaatcttttactgaaactgagacaggaaaataaaactgaaacaaatcatatttt

SEQ ID NO: 115976 - DNA, 563 bp, Homo sapiens
  Payload ID: 2628
  Gene Symbol: CDS1
  Gene Name: CDP-diacylglycerol synthase (phosphatidate cytidylyltransferase) 1
  ENST ID: ENST00000511298
  CDS Start-End: 134-379
gttagtggctgcggctccgcgggactccagggcgcggctgcgaggtggcggggcgccccgcctgcagaaccctgcttgcagctcaggtttcggggtgcttgaggaggccgccacggcagcgcgggagcggaagatgttggagctgaggcaccggggaagctgccccggccccagggaagcggtgtcgccgccacaccgcgagggagaggcggccggcggcgaccacgaaaccgagagcaccagcgacaaagtggaaaaactggtggatacgtggaattctcactctaactatgatctcgttgtttttcctgatcatctatatgggatccttcatgctgatgcttcttgttctgggcatccaagtgaaatgcttccatgaaattatcactataggttatagagtctatcattcttatgatctaccatggtttagaacactaagttggtactttctattgtgtgtaaactactttttctatggagagactgtagctgattattttgctacatttgttcaaagagaagaacaacttcagttcctcattcgctaccatagatttata

SEQ ID NO: 115977 - DNA, 945 bp, Homo sapiens
  Payload ID: 2629
  Gene Symbol: CDS2
  Gene Name: CDP-diacylglycerol synthase (phosphatidate cytidylyltransferase) 2
  Uniprot ID: O95674
  ENST ID: ENST00000450570
  CDS Start-End: 195-945
ccagggctggctgctgggctgctaagggaactgtgagccgctcagagccgcgcgcctcccgggcggggcggggccggccgtgggagtccgcgcgtgcccgcgccgagctgcctgctccggcggcttcgctgctagctcgcggcgacgtcgggccgattttcccaggatgacagagctgaggcagagggtggcccatgagccggttgcgccacccgaggacaagatggaagaactggtgggtgagaggcatcctgactttggccatgattgcatttttcttcatcatcatttacctgggaccaatggttttgatgataatcgtgatgtgcgttcagattaagtgtttccatgagataatcactattggctacaacgtctaccactcatatgatctgccctggttcaggacgctcagctggtactttctcctgtgtgtaaactatttcttctatggtgagacagtgacggattacttcttcaccctggtccagagagaagagcctttgcggattctcagtaaataccaccggttcatttcctttactctctatctaataggattctgcatgtttgtactgagtctggtcaagaagcattatcgactgcagttctacatgtttggctggacccatgtgacattgctgattgttgtaacacagtcacatcttgttatccacaacctatttgaaggaatgatctggttcattgtccccatatcttgtgtgatctgtaatgacatcatggcctatatgtttggctttttctttggtcggaccccactcatcaagctgtccccgaagaagacctgggaaggcttcattgggggcttctttgctactgtggtgtttggccttctgctgtcctatgtgatgtccgggtacagatgctttgtctgccctgtggagtacaacaatgacaccaacagcttcactgtggactgtgagc

SEQ ID NO: 115978 - DNA, 9298 bp, Homo sapiens
  Payload ID: 2629
  Gene Symbol: CDS2
  Gene Name: CDP-diacylglycerol synthase (phosphatidate cytidylyltransferase) 2
  Uniprot ID: O95674
  ENST ID: ENST00000460006
  CDS Start-End: 308-1645
gaccgtgatggtggcgctgcgcgtgcgcactcgctccgagccctgctcccgggagagggagctctcgggtcggggctagggaaggctgaccccgctcggcccgggtgaaagggcggtgacggcactgggtggggccgagctccagggctggctgctgggctgctaagggaactgtgagccgctcagagccgcgcgcctcccgggcggggcggggccggccgtgggagtccgcgcgtgcccgcgccgagctgcctgctccggcggcttcgctgctagctcgcggcgacgtcgggccgattttcccaggatgacagagctgaggcagagggtggcccatgagccggttgcgccacccgaggacaaggagtcagagtcagaagcaaaggtagatggagagactgcatcggacagtgagagccgggcagaatccgcacccctgccagtctctgcagatgataccccggaggtcctcaatagggccctttccaacttgtcttcaagatggaagaactggtgggtgagaggcatcctgactttggccatgattgcatttttcttcatcatcatttacctgggaccaatggttttgatgataatcgtgatgtgcgttcagattaagtgtttccatgagataatcactattggctacaacgtctaccactcatatgatctgccctggttcaggacgctcagctggtactttctcctgtgtgtaaactatttcttctatggtgagacagtgacggattacttcttcaccctggtccagagagaagagcctttgcggattctcagtaaataccaccggttcatttcctttactctctatctaataggattctgcatgtttgtactgagtctggtcaagaagcattatcgactgcagttctacatgtttggctggacccatgtgacattgctgattgttgtaacacagtcacatcttgttatccacaacctatttgaaggaatgatctggttcattgtccccatatcttgtgtgatctgtaatgacatcatggcctatatgtttggctttttctttggtcggaccccactcatcaagctgtccccgaagaagacctgggaaggcttcattgggggcttctttgctactgtggtgtttggccttctgctgtcctatgtgatgtccgggtacagatgctttgtctgccctgtggagtacaacaatgacaccaacagcttcactgtggactgtgagccctcggacctgtttcgcctgcaggagtacaacattcctggggtgatccagtcagtcattggctggaaaacggtccggatgtaccccttccagattcacagcatcgctctctccacctttgcctcgctcattggcccctttggaggattcttcgcaagtggattcaaacgagcctttaaaatcaaagactttgccaataccattcctggccatggaggcatcatggatcgctttgactgccagtatctgatggccacctttgtcaatgtatacatcgccagttttatcagaggccctaacccaagcaaactgattcagcagttcctgactttacggccagatcagcagctccacatcttcaacacgctgcggtctcatctgatcgacaaagggatgctgacatccaccacagaggacgagtaggggccacccagggccaggagaacaggaacagaactgagcaggggcaggtctccaaggcaagcccagctggtgtgacttagacaatgacgaggcttcaactcactgtcttttttttttttttttggagggtattttttatttgtgggttcaaaaaatctgtatatacagtctatgtgtttagaatttgtgttgtaagtaaactacagctttgagttggaaagaagtcacgggttgtaaaaccatttggatttttttaaaacaaaagtattaataatctggaagacagtgttgcccaggtcaggagtgttttcttggtggttccagcccccatcaattgaactgtttctgggctcagtcagacacagacattcatctgtgtctgaccaaatcaggggacttccccacctgtggtgggaggcacagcttagatgttttgtacacctggtcttttctagaaatccctgcttggagctgcagaagggttgccttctgtaggtcggaggaatggaggcttactaaccaggtaagccttctatgcatccacaccaaaatcctgcagaatgtaagtaagctctgctttataagatgggttcaccttcatcgcagactgaaagtttcagtttttatttttttcagaaagcacgaaaaattatttataatagtctggagaaaaaacacactgtaatatttcaagtgtatgcagtagaatgtactgtaactgagccctttcccacatgtctaggctccaatgtctcctgtaggtccacctaactgtgtgttttcagggacaatgccatccatgtttgtgctgtagacttgctgctgctgaatcctttctggggactttctcatcgggcagggagcagagggcttctcgttcatgcaccctttgcctgaacacccatgtagctgctgtgttgtgtatatattactcttaagaggagtgtgtgtgtctgtgtttgttttaaaagtcacttatttcttacagtgatttcaattgcaccatgacttcttcactaaaaccacaaagtcctgcttaaaactatggaaaacctaacctgattagagccttgactattttgaagattaaatgcacactttttatataatgtgaccagtttaaatgtagtttgtattgtactgggggacctttcgttgttgttgtttgcttaaactgtgattttttttcccctccctaatttcaggggtgagattgactttgggaagacagattagttctttgtcaggccaacaagtgatggagtgcgggagagagaacttggcacccaaatatatcaaactattccgtgccgtggatgttttcattgccaacgagggtgtaatgatttgcttctgcaccttggtctagtgctggtttgtggtgtttttgtttgtaaattagcctcactgcctccctgaaagtgcacagtcagcccaggtctctagagtgtccagcagaggatggagccctcgggatgtttcagctcacacatccttgagtgacttcccatatgtgtgtggggctgaagcggcttctttccgctgaacttttatttccatttcagcctcgtggcttctcttattcaggtccaaggccccttaaaaacaaaacatattatcgcaagggctttcatttcagtattggctgtgtcactggcaggatgcatcactctccagggcctctttttcggagctactcccaattccactcttctgtgattctggctgagcaagttcatgccggtagaggctcattaagtgaggtcctgggcaccccccaaacaggaagtgttttcaggcccttacatgcttatccttaaggtgagtaggtatctcagcagcacacccgaacagtaaaggtgatcaataacgaaactgtagttttcagattgaagaatgaacctggatcaccaaactagataccgaaagggctcctcatttgtctcttttgtcccattgtgggcatatggtgggctccttgagaggagggagtctcagctggggcctggctgcagagacctgctcttgaatagggctgcctttgggatcagggagccgagcatactgggcaaggctcatcatgttcctttgtggaagtggttacttggtgggggtggggtggggaaggggggtctaggaagccgaagctgagtgcgcactagagctgctagcaggcaggccagagggtcagcttgtgttttattttctgatttctcctgcatgctttctggagatgaggattttttgtcaggtagctaggagagcactgccaccttgtgtccatatagcacaatgtttctctttcctattcacagacaagattcaagaaaccatttttacgtgtgtacattcaaatcttcatgaatggcatcacttgctttagacccattttttttttattggtcagaaataaaatgtgactgcaactgtgtgccctcccttgtcgtgaattccctgtttatcacttccatgcatggttttatgcttctcatttgtttatgtattcatgaatactgcatagtcctgattcagagacttttgctttgctttccaacttgtatccctacattctcacaacagccttcttacctcgggtgagagtcatgagcaccttaccaggcagggagcttccccaggatagtgtggtggagtcaggactcactccatcctgcactttacccacaggacacctggagggtcccccagccctgcttgcttttgtgaacgtcgtgtgagtacaccgaggtgttgcagctttccttccctctagctcaggaggcctggcctgagccaggttggagcttaaattgctgttggctcctgcctggtggaacaagggggtcatagaaaccagggctgatgggcaccccccagcccctgggagctctgctcatgaccgctcacagggtaccgagtctttgccttttgtgtgtgcgcatgctgccctcttaactgcttttagtattcagaaaggttccatttatgttttactcctgaaagtgaaaccctcttaggcaacttgtttcatattctgggcattttagtagctacagtattttgcatttaaaatgtaattactcttagtattgtacagccctataatgtatgagaactagtttcacatcctttgaaactaatctctttcattggggaggatacaacttttgactttacacaggtggactttgaatccatttttatagaatttttttccactgtaacttgacctatattatgcaagaaaatcccaaaaatatgttttaagggagactacacagaccttgtgatttggtctgagctagttgctgagttgactggagccttatttgaatggatctttgagttgagatcttcacactgtcagtgagcccttggctcagcccttgtcacctgtttgtatggggaccatgtttcccaaagctcaggttcatctccactattgacagagtcgggtagtgggagagtataagtgacttgagacagagtgtccttgctcagaaaactgtgaagcaggggtcttgttagttacaaagccagtcctagttgcatgtccaagggggtagattttcatcaccctactaaatgtggtatgtcactgctgaagccttttcctgttttagtaatatcttaggcactattgtcttttgtcttccagagtaacatatctgggcccacctttcttgcacactgtgattatgtgctaagaaaagggtggagttgggaggacaatttcacttgaacaggtttctgttcttctgaggtcagggtggggaggatgtccaggtgacttttatggacacattgcaagacagtaagccgcggatggactctcacttgtgctttggaacactggactccaaagagcaggtggaacaaactctggcctgaagatgatggctaatactcaggcagagccccgtattcttccctgacttggtcaaaacaaacttccttttcccttgatcaccctgcacgcagctgcccagcttccagtttttaaagagatgaacagctctcacttcctgactcagtttctcttgttgggtgggggccttgtgccacaacctgcatggggtgctagggtttaaaccaagtggtcacgaaggattcttatctcagggctctgcctggcccaccttctcttgggcctggactctccttatccacatccctgcagaaggtgggccctattctcagaagagtcctggctgctgttgccatctgaatgcgcccttccctttcaggttgaccagcagtggccttacctggcctctcaggtggatggaggctgttctcatctggggctgtctcttgattaaggctgtcacctgtttgtatagggaccatgtttcccaacgcactttgagtgcagtttaggaggtatcctttggatgctgaagtgttgggattttgaggacatgcggatgatttatgagaatagaggggcagagtttgtgaagtctagggttttttgtccagtgggtttcaaatttgttggctgtttaaagaccctgtctcctcccccaccctccccttccttttcccatcaaatgcctacctactgaggcgccttctctttttattcttgagccaatgagatatcagtgtgtttattaataaggattgcaatagtatagtgcttaatatgtgccaggcatagtgctaagggtttacatacgttatcccttttaatccagaaaacagcctttgattaggtattgttgtctccattttatagatgaggaaactgaggcagtatgactgaggccgagagcagtggttaagacagactttgggatcaaatcaccctaggtgcgggcaggtttctaggctgctctaagcttctaccttgaaggcagttgggtctgataatagtaccttcttcctggggtggttgtgaggatataacgaggtaatgcatgtaagcatttagtaccatgcctggcacatagtaagcactcaataaatggtagttacttttgttgagctcagctggtagtttgacctccgttggtgcaatgccagagatgggattgtcagccaccacactgccaccaccctgcacacagtctgggtccctccgagagaagcacgccaaccttaacatcccctacagcatcttggtgcttcacacaccatttaggaggccaccctaacgaggcaagaggacatgggggtgtgcagaagttctgttcttagtgagaatggctggcctgagaatccagctcacctcctctgcccacagtctggactgcttgtgggaaggccatctcctcctgtctggtggtacctccactctgggcagggagggcctgtctgtgactcgctctggaccccacttcccgctctggccaagggctgtcttctgtgcacatagctcaggagcctgcagcagttccctgtatgggtggatgtcctcaggggccaagaagagaagaatggggacaacagaaacctgctttgtaggggattatgtagactaaaagcctagaagttctgcccacatccttatgacgcagccaatctggagcttcatgtttccttctaaaagtagtaaccgggtagaagtgggtgacccattgaggacacatgatgtgaggtatttctgccggattctaggttagcaaagactcaaatgggtgactcatgaatgaagggagaacaggcacaggacttaatgaaaagagtttcttgaacttagttttctgaatgggggtggggagttggggcacgtgtgtgtaaggggaggctgcctcactttgaaggaatggtgttggctaacaggatccatgaaattcctaggtcagttgaataataactgaactactggtttgactgtggattatttcctgggtattagtgggacccaacagcacattgctattaatagtatggaaataatggtccctctgtttcattgaattgctgaagtaatgataatgccatgaaccaggagaagatggttgtgggggtttctaggaagcagctgctgtgacaggccaatcccaggcttgcccccgagccctcctgtccttctgggtttgtgtttgccttgcctggtgcttcctccctcattgtgttgttgaatagacctaggcagccttgtatccatagaaagcctccactgctgggccggggagggggttgtggtaagggccctctggaaatcaagcagagaatgcctttgcagtggtctcccgggcattgggcagggcctagccttttgcagcccccagaggaccttgcctgcataaagcactcagaagggttagccacctggtgattttgtctctagtgaaactgtgtttgccgataatcatccacatagccacctctgtcctcgcagtttggatgcctttttttgacacctgcgctaggttcttgtatgctggcttttcttaaaggaacagcagagtagaaaagaggttgagaatgttttctagcaggcagaatgtgcatacatgttttcatgagtgtcctttgggtgctgtttcttttaaatcctctgtgcacagggctctggcctttagtaaactgtttttctgtcttacgtcatgctgactgggtgctaggggctgattacaaaggggaagagttgaacagacatcaggggccgatgaaaccaaaggactaggagtcaggagaacaagtcagggattaggagacagcggtttggtttattgttatccagctggaggactcctaggggcagcagcaggaggaataccagggccacggaggggccaggagtctcacagtggagggcagactctaacagatgccagctgaacgctcgctggccctggatgtcatacgagttggggaccagaaatctgggctcagagaacccgtccagggagatttgaagccatgggttatcttctagagttgatactgataatatattttaatttttattgatgtttaataccttctgaaacaggagggtaagatcagatgggaagcccctctgttgaaggatcttgggaaccttggtggttttttttttttttttggttttttttttttgatcgagctgtggacatccttcttaattcgattctgaggatttgtttaactaaaaagttcccaaacacagaaagggcctccccacctgctttggggagctgtctgtgctgggagtgccaggcatcccatgggacccatcactgccagtgtctgtgcctcccagaggtcagccgtgtctgccctggctctgtctcctctgtgacagggcagagcatttctggtcagtttctccatggtgcctcccacccctttgtaaagtggatggacatgatggaattcagttgtctcaccctgatagcctgggtgttgatattcactttacccgcactcagacacaggcgaccttgaagcagttctcggtgtgtagagtccacgtgacagtccccacagcctccccagatagctgtgtgcctgtgcgctactgctgtgccattttcccaacttggcgtttcactaaatgcagctgatctctctctctgtgcactcgtgatccatgttgaacaatacatgtaggttctttttccacgcaatgtaagaacatgatatactgtacgttggaaagcatttaccttatttatatacctgaatgttcctactacacaaataaacatatattaaattcta

SEQ ID NO: 115979 - DNA, 2353 bp, Homo sapiens
  Payload ID: 2630
  Gene Symbol: CDIPT
  Gene Name: CDP-diacylglycerol--inositol 3-phosphatidyltransferase
  Uniprot ID: O14735
  ENST ID: ENST00000219789
  CDS Start-End: 880-1521
ccgtacccctccaggtgcctccttgagggcagtgaccccaagcgccagacgcttgagaagcttgggaggatgacgtagggtggagcctgcgacctaatcctcccatcacaaggggcacgcgaaaagcaacccatctgcagggcgctctggagcctctctagccgcctagagcctgcgagagcaaaggcggctggagacttagggggcggggagtaaagtgaggactgcaccaaatctcctggcctcttggggacgcaaagactcaggaggaggaattttatcgccttatctttgcctccaggaagtcataccctccacaaaaggaaagcagagatttttattcggtcttctcttttaccctttccttttccgtttctaactttgcttgacgttaatggttccttcctccctctcctcctctgcgctttggtacgagccaagggagaggggcggagggaggaaaagggaaaggaagccgacaggccttaaaggggccgcaactatttttttaagccactttttcctctctccaattttgcaacgacgggcgcggaggaggaggttcccggaagccacgcgcagctggagcagcggcgaccgcagctggaggcccggagcgcctgcggggctggcagaggcgagggaggttgcgggtaggaagggcggactgcgcgcgccccctgcgtcccgcgcacctcggggccggtccatgctcccgacggctgcgggcttcagcatctggggccaggttggggcggcggggtccagggcgcaggtggtgcggccgatgcgccgggccggaggctgaggccgcgctgcggggctgggacagcactggcatctccagagcaggcccggggcagcaagggaggcgccgcgatgccagacgaaaatatcttcctgttcgtgcccaacctcatcggttatgcccggattgtcttcgccatcatttctttctacttcatgccctgctgccccctcacggcctcctccttctacctgctcagcggcctgctggacgctttcgatggacacgctgctcgcgctcttaatcaaggaacccggtttggggccatgctggacatgctgacggaccgctgctccaccatgtgcctgttggtcaacctggccctgctgtaccctggagccacgctgttcttccaaatcagcatgagtttggatgtggccagtcactggctgcacctccacagttctgtggtccgaggcagtgagagtcacaagatgatcgacttgtccgggaatccggtgcttcggatctactacacctcgaggcctgctctgttcaccttgtgtgctgggaatgagctcttctactgcctcctctacctgttccatttctctgagggacctttagttggctctgtgggactgttccggatgggcctctgggtcactgcccccatcgccttgctgaagtcgctcatcagcgtcatccacctgatcacggccgcccgcaacatggctgccctggacgcagcagaccgcgccaagaagaagtgacgctggagccccgggtcctggctgcccacctgccctgggagtcttgctgtgccacacagctccccaccccctgctaggaggtcccagtctcacgccttcctcatgtgttgttctacctgctgggatgggggtcagcctctctttggtgacgtcacgttctctgggatcctgaggacccgggcctcaaatcagggaggatacgcgggaggccccctccatccaggcggtgctcctggggtgccgggaccgggcagtgtcacaccctgcctgctcagtcctggggtccgagatgctagggacgcttgagtgagggaggtggtgtgagggccaggtttcctgaaaggcgggagtcagacctccgcccccagccagagcaagcttggggcaccatgcccaggagggaagaagccatccacagccttccctgtcaccggctcctctgtcctgcctaccctggtcctggcgggacttcactatttgacttggtttcctttcagatattcttggctcagggcctgggttgagggagcttagggaaggacgtccgtctgggtgcttttcctccagtttgctggctggcttctccgtctacccacagtgacctcacagagaggccctcctgccacccatgctcatgtggtgtccccaccgcccacttgtttgatgtcactgactgtctacatgtatttatattcttgatattttctaccctcactagaatgtaaactccatgaaggcacagacttttcttgttctcttctctatccctagagtaagaccaacttgaacctggcatatagtagctgcttaataaatactcgtctgtcaatga

SEQ ID NO: 115980 - DNA, 1346 bp, Homo sapiens
  Payload ID: 2630
  Gene Symbol: CDIPT
  Gene Name: CDP-diacylglycerol--inositol 3-phosphatidyltransferase
  Uniprot ID: O14735
  ENST ID: ENST00000570016
  CDS Start-End: 244-885
aattttgcaacgacgggcgcggaggaggaggttcccggaagccacgcgcagctggagcagcggcgaccgcagctggaggcccggagcgcctgcggggctggcagaggcgagggaggttgcgggtaggaagggcggactgcgcgcgccccctgcgtcccgcgcacctcggggccggtccatgctcccgacggctgcgggcttcagcatctggggccaggttggggcggcgggggaggcgccgcgatgccagacgaaaatatcttcctgttcgtgcccaacctcatcggttatgcccggattgtcttcgccatcatttctttctacttcatgccctgctgccccctcacggcctcctccttctacctgctcagcggcctgctggacgctttcgatggacacgctgctcgcgctcttaatcaaggaacccggtttggggccatgctggacatgctgacggaccgctgctccaccatgtgcctgttggtcaacctggccctgctgtaccctggagccacgctgttcttccaaatcagcatgagtttggatgtggccagtcactggctgcacctccacagttctgtggtccgaggcagtgagagtcacaagatgatcgacttgtccgggaatccggtgcttcggatctactacacctcgaggcctgctctgttcaccttgtgtgctgggaatgagctcttctactgcctcctctacctgttccatttctctgagggacctttagttggctctgtgggactgttccggatgggcctctgggtcactgcccccatcgccttgctgaagtcgctcatcagcgtcatccacctgatcacggccgcccgcaacatggctgccctggacgcagcagaccgcgccaagaagaagtgacgctggagccccgggtcctggctgcccacctgccctgggagtcttgctgtgccacacagctccccaccccctgctaggaggtcccagtctcacgccttcctcatgtgttgttctacctgctgggatgggggtcagcctctctttggtgacgtcacgttctctgggatcctgaggacccgggcctcaaatcagggaggatacgcgggaggccccctccatccaggcggtgctcctggggtgccgggaccgggcagtgtcacaccctgcctgctcagtcctggggtccgagatgctagggacgcttgagtgagggaggtggtgtgagggccaggtttcctgaaaggcgggagtcagacctccgcccccagccagagcaagcttggggcaccatgcccaggagggaagaagccatccacagccttccctgtcaccggctcctctgtcctgcctaccctggtcct

SEQ ID NO: 115981 - DNA, 1726 bp, Homo sapiens
  Payload ID: 2630
  Gene Symbol: CDIPT
  Gene Name: CDP-diacylglycerol--inositol 3-phosphatidyltransferase
  ENST ID: ENST00000561555
  CDS Start-End: 186-899
ctactgtgtgccctgcataagcagttggggttccagaaggcatgcttagagggaggatggagagggaagggtgatggcttctggagggttgactaattttttaatctgttctccagacccaactgtaaggcttcccctgaggcatcaagtctctatctagccctggagtcttggttctggggttgatgagttgcagacatagctttcctctcctcctaccctgttccctccactctcatgcctttctcagttcatgccatggtgacctttgcccactgacctcacacacagcctgttttctagcctgcgttcctccccaggcaggcggacacttccagtcttcgtttacaccctgcgtcagagtgataaaccaaatatgggcacctgtcctgcatccactgtgccataacagcccttgcccacctaatcttccaggaacccggtttggggccatgctggacatgctgacggaccgctgctccaccatgtgcctgttggtcaacctggccctgctgtaccctggagccacgctgttcttccaaatcagcatgagtttggatgtggccagtcactggctgcacctccacagttctgtggtccgaggcagtgagagtcacaagatgatcgacttgtccgggaatccggtgcttcggatctactacacctcgaggcctgctctgttcaccttgtgtgctgggaatgagctcttctactgcctcctctacctgttccatttctctgagggacctttagttggctctgtgggactgttccggatgggcctctgggtcactgcccccatcgccttgctgaagtcgctcatcagcgtcatccacctgatcacggccgcccgcaacatggctgccctggacgcagcagaccgcgccaagaagaagtgacgctggagccccgggtcctggctgcccacctgccctgggagtcttgctgtgccacacagctccccaccccctgctaggaggtcccagtctcacgccttcctcatgtgttgttctacctgctgggatgggggtcagcctctctttggtgacgtcacgttctctgggatcctgaggacccgggcctcaaatcagggaggatacgcgggaggccccctccatccaggcggtgctcctggggtgccgggaccgggcagtgtcacaccctgcctgctcagtcctggggtccgagatgctagggacgcttgagtgagggaggtggtgtgagggccaggtttcctgaaaggcgggagtcagacctccgcccccagccagagcaagcttggggcaccatgcccaggagggaagaagccatccacagccttccctgtcaccggctcctctgtcctgcctaccctggtcctggcgggacttcactatttgacttggtttcctttcagatattcttggctcagggcctgggttgagggagcttagggaaggacgtccgtctgggtgcttttcctccagtttgctggctggcttctccgtctacccacagtgacctcacagagaggccctcctgccacccatgctcatgtggtgtccccaccgcccacttgtttgatgtcactgactgtctacatgtatttatattcttgatattttctaccctcactagaatgtaaactccatgaaggcacagacttttcttgttctcttctctatccctagagtaagaccaacttgaacctggcatatagtagctgcttaataaatactcgtctgtc

SEQ ID NO: 115982 - DNA, 1015 bp, Homo sapiens
  Payload ID: 2630
  Gene Symbol: CDIPT
  Gene Name: CDP-diacylglycerol--inositol 3-phosphatidyltransferase
  ENST ID: ENST00000564296
  CDS Start-End: 420-545
aaaagggaaaggaagccgacaggccttaaaggggccgcaactatttttttaagccactttttcctctctccaattttgcaacgacgggcgcggaggaggaggttcccggaagccacgcgcagctggagcagcggcgaccgcagctggaggcccggagcgcctgcggggctggcagaggcgagggaggttgcgggtaggaagggcggactgcgcgcgccccctgcgtcccgcgcacctcggggccggtccatgctcccgacggctgcgggcttcagcatctggggccaggttggggcggcggggtccagggcgcaggtggtgcggccgatgcgccgggccggaggctgaggccgcgctgcggggctgggacagcactggcatctccagagcaggcccggggcagcaagggaggcgccgcgatgccagacgaaaatatcttcctgttcgtgcccaacctcatcgcggcctgctggacgctttcgatggacacgctgctcgcgctcttaatcaaggaacccggtttggggccatgctggacatgctgacggaccgctgctccaccatgtgcctgttggtcaacctggccctgctgtaccctggagccacgctgttcttccaaatcagcatgagtttggatgtggccagtcactggctgcacctccacagttctgtggtccgaggcagtgagagtcacaagatgatcgacttgtccgggaatccggtgcttcggatctactacacctcgaggcctgctctgttcaccttgtgtgctgggaatgagctcttctactgcctcctctacctgttccatttctctgagggacctttagttggctctgtgggactgttccggatgggcctctgggtcactgcccccatcgccttgctgaagtcgctcatcagcgtcatccacctgatcacggccgcccgcaacatggctgccctggacgcagcagaccgcgccaagaagaagtgacgctggagccccgggtcctggctgcccacctgccctggg

SEQ ID NO: 115983 - DNA, 1532 bp, Homo sapiens
  Payload ID: 2630
  Gene Symbol: CDIPT
  Gene Name: CDP-diacylglycerol--inositol 3-phosphatidyltransferase
  Uniprot ID: O14735
  ENST ID: ENST00000569956
  CDS Start-End: 87-728
aattttgcaacgacgggcgcggaggaggaggttcccggaagccacgcgcagctggagcagcggcgaccgcagctggaggcgccgcgatgccagacgaaaatatcttcctgttcgtgcccaacctcatcggttatgcccggattgtcttcgccatcatttctttctacttcatgccctgctgccccctcacggcctcctccttctacctgctcagcggcctgctggacgctttcgatggacacgctgctcgcgctcttaatcaaggaacccggtttggggccatgctggacatgctgacggaccgctgctccaccatgtgcctgttggtcaacctggccctgctgtaccctggagccacgctgttcttccaaatcagcatgagtttggatgtggccagtcactggctgcacctccacagttctgtggtccgaggcagtgagagtcacaagatgatcgacttgtccgggaatccggtgcttcggatctactacacctcgaggcctgctctgttcaccttgtgtgctgggaatgagctcttctactgcctcctctacctgttccatttctctgagggacctttagttggctctgtgggactgttccggatgggcctctgggtcactgcccccatcgccttgctgaagtcgctcatcagcgtcatccacctgatcacggccgcccgcaacatggctgccctggacgcagcagaccgcgccaagaagaagtgacgctggagccccgggtcctggctgcccacctgccctgggagtcttgctgtgccacacagctccccaccccctgctaggaggtcccagtctcacgccttcctcatgtgttgttctacctgctgggatgggggtcagcctctctttggtgacgtcacgttctctgggatcctgaggacccgggcctcaaatcagggaggatacgcgggaggccccctccatccaggcggtgctcctggggtgccgggaccgggcagtgtcacaccctgcctgctcagtcctggggtccgagatgctagggacgcttgagtgagggaggtggtgtgagggccaggtttcctgaaaggcgggagtcagacctccgcccccagccagagcaagcttggggcaccatgcccaggagggaagaagccatccacagccttccctgtcaccggctcctctgtcctgcctaccctggtcctggcgggacttcactatttgacttggtttcctttcagatattcttggctcagggcctgggttgagggagcttagggaaggacgtccgtctgggtgcttttcctccagtttgctggctggcttctccgtctacccacagtgacctcacagagaggccctcctgccacccatgctcatgtggtgtccccaccgcccacttgtttgatgtcactgactgtctacatgtatttatattcttgatattttctaccctcactagaatgtaaactccatgaaggcacagacttttcttgttctcttctctatccctagagtaagaccaacttgaacctggcatatagtagc

SEQ ID NO: 115984 - DNA, 1671 bp, Homo sapiens
  Payload ID: 2630
  Gene Symbol: CDIPT
  Gene Name: CDP-diacylglycerol--inositol 3-phosphatidyltransferase
  Uniprot ID: O14735
  ENST ID: ENST00000566113
  CDS Start-End: 348-854
attttgcaacgacgggcgcggaggaggaggttcccggaagccacgcgcagctggagcagcggcgaccgcagctggaggcccggagcgcctgcggggctggcagaggcgagggaggttgcgggtaggaagggcggactgcgcgcgccccctgcgtcccgcgcacctcggggccggtccatgctcccgacggctgcgggcttcagcatctggggccaggttggggcggcggggtccagggcgcaggtggtgcggccgatgcgccgggccggaggctgaggccgcgctgcggggctgggacagcactggcatctccagagcaggcccggggcagcaagggaggcgccgcgatgccagacgaaaatatcttcctgttcgtgcccaacctcatcggaacccggtttggggccatgctggacatgctgacggaccgctgctccaccatgtgcctgttggtcaacctggccctgctgtaccctggagccacgctgttcttccaaatcagcatgagtttggatgtggccagtcactggctgcacctccacagttctgtggtccgaggcagtgagagtcacaagatgatcgacttgtccgggaatccggtgcttcggatctactacacctcgaggcctgctctgttcaccttgtgtgctgggaatgagctcttctactgcctcctctacctgttccatttctctgagggacctttagttggctctgtgggactgttccggatgggcctctgggtcactgcccccatcgccttgctgaagtcgctcatcagcgtcatccacctgatcacggccgcccgcaacatggctgccctggacgcagcagaccgcgccaagaagaagtgacgctggagccccgggtcctggctgcccacctgccctgggagtcttgctgtgccacacagctccccaccccctgctaggaggtcccagtctcacgccttcctcatgtgttgttctacctgctgggatgggggtcagcctctctttggtgacgtcacgttctctgggatcctgaggacccgggcctcaaatcagggaggatacgcgggaggccccctccatccaggcggtgctcctggggtgccgggaccgggcagtgtcacaccctgcctgctcagtcctggggtccgagatgctagggacgcttgagtgagggaggtggtgtgagggccaggtttcctgaaaggcgggagtcagacctccgcccccagccagagcaagcttggggcaccatgcccaggagggaagaagccatccacagccttccctgtcaccggctcctctgtcctgcctaccctggtcctggcgggacttcactatttgacttggtttcctttcagatattcttggctcagggcctgggttgagggagcttagggaaggacgtccgtctgggtgcttttcctccagtttgctggctggcttctccgtctacccacagtgacctcacagagaggccctcctgccacccatgctcatgtggtgtccccaccgcccacttgtttgatgtcactgactgtctacatgtatttatattcttgatattttctaccctcactagaatgtaaactccatgaaggcacagacttttcttgttctcttctctatccctagagtaagaccaacttgaacctggcatatagtagctgcttaataaata

SEQ ID NO: 115985 - DNA, 1047 bp, Homo sapiens
  Payload ID: 2630
  Gene Symbol: CDIPT
  Gene Name: CDP-diacylglycerol--inositol 3-phosphatidyltransferase
  ENST ID: ENST00000563415
  CDS Start-End: 34-507
gagcaggcccggggcagcaagggaggcgccgcgatgccagacgaaaatatcttcctgttcgtgcccaacctcatcggttatgcccggattgtcttcgccatcatttctttctacttcatgccctgctgccccctcacggcctcctccttctacctgctcagcggcctgctggacgctttcgatggacacgctgctcgcgctcttaatcaaggaacccggtttggggccatgctggacatgctgacggaccgctgctccaccatgtgcctgttggtcaacctggccctgctgtaccctggagccacgctgttcttccaaatcagcatgagtttggatgtggccagtcactggctgcacctccacagttctgtggtccgaggcagtgagagtcacaagatgatcgacttgtccgggaatccggtgcttcggatctactacacctcgaggttggctctgtgggactgttccggatgggcctctgggtcactgcccccatcgccttgctgaagtcgctcatcagcgtcatccacctgatcacggccgcccgcaacatggctgccctggacgcagcagaccgcgccaagaagaagtgacgctggagccccgggtcctggctgcccacctgccctgggagtcttgctgtgccacacagctccccaccccctgctaggaggtcccagtctcacgccttcctcatgtgttgttctacctgctgggatgggggtcagcctctctttggtgacgtcacgttctctgggatcctgaggacccgggcctcaaatcagggaggatacgcgggaggccccctccatccaggcggtgctcctggggtgccgggaccgggcagtgtcacaccctgcctgctcagtcctggggtccgagatgctagggacgcttgagtgagggaggtggtgtgagggccaggtttcctgaaaggcgggagtcagacctccgcccccagccagagcaagcttggggcaccatgcccaggagggaagaagccatccacagccttccctgtcaccggctcctctgtcctgcctaccc

SEQ ID NO: 115986 - DNA, 3307 bp, Homo sapiens
  Payload ID: 2631
  Gene Symbol: CDV3
  Gene Name: CDV3 homolog (mouse)
  Uniprot ID: Q9UKY7
  ENST ID: ENST00000264993
  CDS Start-End: 316-1092
ctggctcgcgcgtgccttttcccctcaggttgtggggagagcggaatcctgctccgccgtcgcagcagcagcggcagccccggcagcctcgggcgacagcggcggcgcgcgagcccccgggcggaccgtaccaccgctcgccagcacgcagggggagccgcccgtctcgccgcgcacgcctcggcgaccccgcggggctgaggcgtcgccgcgcccggcagcgtgagcgcagagccggcctcgaccccgagctcggagccccgcgggccgcgcccgccgccggccccacccatccgggtcgaggaggccgaggccatggctgagacggaggagcggagcctggacaacttctttgccaagagggacaagaagaagaagaaggagcggagcaaccgggcggcgagtgccgcgggcgcagcgggcagcgccggcggaagcagtggagccgcgggtgcggcgggcggcggggcgggcgcggggacccggccgggtgacggcgggaccgccagcgcgggggctgcgggcccaggggccgccaccaaggctgtgacgaaggacgaagatgaatggaaagaattggagcaaaaagaggttgattacagcggcctcagggttcaggcaatgcaaataagcagtgaaaaggaagaagacgataatgaaaagagacaagatccaggtgataactgggaagaaggtggaggtggtggtggaggtatggaaaaatcttcaggtccctggaataaaacagctccagtacaagcacctcctgctccagtaattgttacagaaaccccagaaccagcgatgactagtggtgtgtataggcctcctggggccaggttaaccacaacaaggaaaacaccacaaggaccaccagaaatctacagtgatacacagttcccatccctgcagtcaactgccaagcatgtagaaagccggaaggataaagaaatggagaagagctttgaagtagtaagacacaaaaatagaggtagggatgaggtttcaaaaaaccaggcccttaaacttcagctagacaaccaatatgctgtgcttgaaaatcagaaaagcagccactcacaatacaattaaggaatgggctttgctaacccttctgaggtaactagactgcagctaaccaccaccaacagccattcatcatctgatctctgctggatctacagacaccgatgcagaccactcgatttcatgaccggccctattgcactatggaagttaaagtgtcacgactgctctatgcatattggatttaggggaattttcattgttacataaatgtgtgaactagtttcaacagtgttctttcatatttactctgcaaatacaaaaaaccaaaacctgcagccagtggtcatttcaaaatctttttatgttcagatactgagccttcataagggttgactacctcagatttgctgcactcattgtggacttcatgtggatcacaacttctggataagaagattacaactattaagtgtcgatgtgaaccttgcaaccagctctactggattcttatcagaaatcctgcataaaaagtcagccatctgggttctgatctgctgtaaaagatgaagatttaagtgaccttaattaacctgtcctgtgccctacccttaaggaatactctctgtagtaggctgttgttatattagacttcctggaacacactgctgaaaagaactgatgtgttcagatcatctgtgtagggctgtgatttgtaatttaaactaattgtattctgaggtaaccacaaaataaattcaaccaaactggggtccaccaagtgggggaaggggaagggagagaataatcttgggggttttttttttttggtaatttttttatttggatagtgcttttttgttttgtttttgttctgcattaaggccttttttgctttgacttgaaataagttctttgacagagcatattgcttggttaattaagtaacctaaagtatgcattaggattgtgaaatgtctcgtgagtatgccaatcctgagggtggaaccaaatagcctttgatgaaaagggcagtggattctggaggctctacttcaggtgctgctataatgcctcatctaatcaggactaaattgtgtaggaaactgcagtgggaagaatatgctttctgctcaggctaagagggtcactgatctgtccttagaaattcagagtaacatgagcaaaacctcagctaaaacccatttaagtggcatggattgtgcatgatctttgataagaattcctcatgtacttgtgcctagtttttcaaggtattggctgttctatagatgcagtgattgtcccagctagctctgttaccagccttttggtgtgtctttatgttcatttggagagtcagggcgaaagacaggtgatgtagcacttctgtttttaataattattgcttaaaatacctattaatagttttgggtcatttaaagggacttgaggaagctacccaggattacagaagagtgtccacctaacaagatggtctggcagtttcctagttttgtatctggttcaatagaaatatgtgaaagtggtaatgtcatcatttgatgcagagtccgggtttctctataataaatccctttgccaaatgcatgagttgcagacttgctactggcaagagtgaagcaagtgggtgagtaaaactattttgacgtgggagcgttttcagataggagtttagtcttgacgaaagtgtccgtgcaggaattggactccgaggagggttacagtatctcctgacgggacctgccactcgcatctgggcaatgttgacatttgaggtggcaggcaggatgcctgccttctaatatatttgggtgagtaactgagccagccaagggaaggttgaatgattaaatcagaaatgggattcttggtaaactgaagacttttatttgggaatgaaaaaccttaaaaaaatctcttcatcgttgaactgtgcattttccctgcattttttcccaacaaaattttgttgggggttatgttactgaagaatgaacagatgagtaagtggaggtgttatgtaaaggcatattgtactcgaaatctgaagacctgcagcagatttaaattacaactcttgttataactttttaaaagattgtgaaaatatcaaaatataaatgaatcaagttttaatatactgtatgatgggtggatgaggctgtccattgtaccatttgtttgaattctcaggcatggtttggcagtgcaagaattctgtaacattaacaaattcaataaaaagtaaatatatgga

SEQ ID NO: 115987 - DNA, 955 bp, Homo sapiens
  Payload ID: 2631
  Gene Symbol: CDV3
  Gene Name: CDV3 homolog (mouse)
  Uniprot ID: Q9UKY7
  ENST ID: ENST00000431519
  CDS Start-End: 70-711
ccgagctcggagccccgcgggccgcgcccgccgccggccccacccatccgggtcgaggaggccgaggccatggctgagacggaggagcggagcctggacaacttctttgccaagagggacaagaagaagaagaaggagcggagcaaccgggcggcgagtgccgcgggcgcagcgggcagcgccggcggaagcagtggagccgcgggtgcggcgggcggcggggcgggcgcggggacccggccgggtgacggcgggaccgccagcgcgggggctgcgggcccaggggccgccaccaaggctgtgacgaaggacgaagatgaatggaaagaattggagcaaaaagaggttgattacagcggcctcagggttcaggcaatgcaaataagcagtgaaaaggaagaagacgataatgaaaagagacaagatccaggtgataactgggaagaaggtggaggtggtggtggaggtatggaaaaatcttcaggtccctggaataaaacagctccagtacaagcacctcctgctccagtaattgttacagaaaccccagaaccagcgatgactagtggtgtgtataggcctcctggggccaggttaaccacaacaaggaaaacaccacaaggaccaccagaaatctacagtgatacacagttcccatccctgcagtcaactgccaagcatgtagaaagccggaacaggtacttaaaatgaatgctacctggaattaaatgactacatatggcacatctacatcttactttagggacatgaattttttaaaataaataaaatgggaagaaatgtaaatgacatcagatggaaatgtgttttttggggtggcttttagaataaatcccagccttttcaccactttgagagcacagctggcttgaatttaaacctccacgtggacttgctcctctgctctgtcttaaaaaatgtgtaagggaccttg

SEQ ID NO: 115988 - DNA, 3621 bp, Homo sapiens
  Payload ID: 2631
  Gene Symbol: CDV3
  Gene Name: CDV3 homolog (mouse)
  Uniprot ID: Q9UKY7
  ENST ID: ENST00000420115
  CDS Start-End: 203-535
accccttccgatatccgcggtggagccgcccttcccaccccgcgtcgctcggcgttagccaaggcccgggcggcgccaccctccgggggcactaggtctggggccgcagtgcccagcacagagcagcgtttatcgggacgaagatgaatggaaagaattggagcaaaaagaggttgattacagcggcctcagggttcaggcaatgcaaataagcagtgaaaaggaagaagacgataatgaaaagagacaagatccaggtgataactgggaagaaggtggaggtggtggtggaggtatggaaaaatcttcaggtccctggaataaaacagctccagtacaagcacctcctgctccagtaattgttacagaaaccccagaaccagcgatgactagtggtgtgtataggcctcctggggccaggttaaccacaacaaggaaaacaccacaaggaccaccagaaatctacagtgatacacagttcccatccctgcagtcaactgccaagcatgtagaaagccggaagtacttaaaatgaatgctacctggaattaaatgactacatatggcacatctacatcttactttagggacatgaattttttaaaataaataaaatgggaagaaatgtaaatgacatcagatggaaatgtgttttttggggtggcttttagaataaatcccagccttttcaccactttgagagcacagctggcttgaatttaaacctccacgtggacttgctcctctgctctgtcttaaaaaatgtgtaagggaccttgggagggcagtgattcaccacactcgagtttctttacctgatctaatcagatccactcccacaaaatcgatgtgaggagaaatcattgactaatgagtagaatttacttgaatgagaaaattgttacccttgtgcataaagagagagatgtattatctattacttgctaaaagtaagagtcttaggaggaatgtcattacacagcttttaacagttttcttcaagtttgtcctgaaatagggtcacagttaatactgttcagtagaagataggaccctagagcttcaatacagcgttctgtgttttctgtttgaattgaagccttaaaatggtttgataaggattttctatatgcctccactcctacccctccccaggattcttctaaggggtggcttttttttaaattcaaggacgaatattttcaaaaaccctagtgaagaagaaatatttactgattacatttcttttcccttagggataaagaaatggagaagagctttgaagtagtaagacacaaaaatagaggtagggatgaggtttcaaaaaaccaggcccttaaacttcagctagacaaccaatatgctgtgcttgaaaatcagaaaagcagccactcacaatacaattaaggaatgggctttgctaacccttctgaggtaactagactgcagctaaccaccaccaacagccattcatcatctgatctctgctggatctacagacaccgatgcagaccactcgatttcatgaccggccctattgcactatggaagttaaagtgtcacgactgctctatgcatattggatttaggggaattttcattgttacataaatgtgtgaactagtttcaacagtgttctttcatatttactctgcaaatacaaaaaaccaaaacctgcagccagtggtcatttcaaaatctttttatgttcagatactgagccttcataagggttgactacctcagatttgctgcactcattgtggacttcatgtggatcacaacttctggataagaagattacaactattaagtgtcgatgtgaaccttgcaaccagctctactggattcttatcagaaatcctgcataaaaagtcagccatctgggttctgatctgctgtaaaagatgaagatttaagtgaccttaattaacctgtcctgtgccctacccttaaggaatactctctgtagtaggctgttgttatattagacttcctggaacacactgctgaaaagaactgatgtgttcagatcatctgtgtagggctgtgatttgtaatttaaactaattgtattctgaggtaaccacaaaataaattcaaccaaactggggtccaccaagtgggggaaggggaagggagagaataatcttgggggttttttttttttggtaatttttttatttggatagtgcttttttgttttgtttttgttctgcattaaggccttttttgctttgacttgaaataagttctttgacagagcatattgcttggttaattaagtaacctaaagtatgcattaggattgtgaaatgtctcgtgagtatgccaatcctgagggtggaaccaaatagcctttgatgaaaagggcagtggattctggaggctctacttcaggtgctgctataatgcctcatctaatcaggactaaattgtgtaggaaactgcagtgggaagaatatgctttctgctcaggctaagagggtcactgatctgtccttagaaattcagagtaacatgagcaaaacctcagctaaaacccatttaagtggcatggattgtgcatgatctttgataagaattcctcatgtacttgtgcctagtttttcaaggtattggctgttctatagatgcagtgattgtcccagctagctctgttaccagccttttggtgtgtctttatgttcatttggagagtcagggcgaaagacaggtgatgtagcacttctgtttttaataattattgcttaaaatacctattaatagttttgggtcatttaaagggacttgaggaagctacccaggattacagaagagtgtccacctaacaagatggtctggcagtttcctagttttgtatctggttcaatagaaatatgtgaaagtggtaatgtcatcatttgatgcagagtccgggtttctctataataaatccctttgccaaatgcatgagttgcagacttgctactggcaagagtgaagcaagtgggtgagtaaaactattttgacgtgggagcgttttcagataggagtttagtcttgacgaaagtgtccgtgcaggaattggactccgaggagggttacagtatctcctgacgggacctgccactcgcatctgggcaatgttgacatttgaggtggcaggcaggatgcctgccttctaatatatttgggtgagtaactgagccagccaagggaaggttgaatgattaaatcagaaatgggattcttggtaaactgaagacttttatttgggaatgaaaaaccttaaaaaaatctcttcatcgttgaactgtgcattttccctgcattttttcccaacaaaattttgttgggggttatgttactgaagaatgaacagatgagtaagtggaggtgttatgtaaaggcatattgtactcgaaatctgaagacctgcagcagatttaaattacaactcttgttataactttttaaaagattgtgaaaatatcaaaatataaatgaatcaagttttaatatactgtatgatgggtggatgaggctgtccattgtaccatttgtttgaattctcaggcatggtttggcagtgcaagaattctgtaacattaacaaattcaataaaaagtaaatatatgg

SEQ ID NO: 115989 - DNA, 563 bp, Homo sapiens
  Payload ID: 2631
  Gene Symbol: CDV3
  Gene Name: CDV3 homolog (mouse)
  ENST ID: ENST00000503932
  CDS Start-End: 1-563
ctttgccaagagggacaagaagaagaagaaggagcggagcaaccgggcggcgagtgccgcgggcgcagcgggcagcgccggcggaagcagtggagccgcgggacgaagatgaatggaaagaattggagcaaaaagaggttgattacagcggcctcagggttcaggcaatgcaaataagcagtgaaaaggaagaagacgataatgaaaagagacaagatccaggtgataactgggaagaaggtggaggtggtggtggaggtatggaaaaatcttcaggtccctggaataaaacagctccagtacaagcacctcctgctccagtaattgttacagaaaccccagaaccagcgatgactagtggtgtgtataggcctcctggggccaggttaaccacaacaaggaaaacaccacaaggaccaccagaaatctacagtgatacacagttcccatccctgcagtcaactgccaagcatgtagaaagccggaaggataaagaaatggagaagagctttgaagtagtaagacacaaaaatagaggtagggatgaggtttcaaaaaaccag

SEQ ID NO: 115990 - DNA, 1305 bp, Homo sapiens
  Payload ID: 2631
  Gene Symbol: CDV3
  Gene Name: CDV3 homolog (mouse)
  ENST ID: ENST00000515421
  CDS Start-End: 176-502
gaattttcgctttcagcagccgcatttgtagcagctcttttgtgatgacttagtctctaagcccgtgaaagaaaaagaaaactctcggtggcaaggttgaagtagaaatgacgaagatgaatggaaagaattggagcaaaaagaggttgattacagcggcctcagggttcaggcaatgcaaataagcagtgaaaaggaagaagacgataatgaaaagagacaagatccaggtgataactgggaagaaggtggaggtggtggtggaggtatggaaaaatcttcaggtccctggaataaaacagctccagtacaagcacctcctgctccagtaattgttacagaaaccccagaaccagcgatgactagtggtgtgtataggcctcctggggccaggttaaccacaacaaggaaaacaccacaaggaccaccagaaatctacagtgatacacagttcccatccctgcagtcaactgccaagcatgtagaaagccggaaatactgagccttcataagggttgactacctcagatttgctgcactcattgtggacttcatgtggatcacaacttctggataagaagattacaactattaagtgtcgatgtgaaccttgcaaccagctctactggattcttatcagaaatcctgcataaaaagtcagccatctgggttctgatctgctgtaaaagatgaagatttaagtgaccttaattaacctgtcctgtgccctacccttaaggaatactctctgtagtaggctgttgttatattagacttcctggaacacactgctgaaaagaactgatgtgttcagatcatctgtgtagggctgtgatttgtaatttaaactaattgtattctgaggtaaccacaaaataaattcaaccaaactggggtccaccaagtgggggaaggggaagggagagaataatcttgggggttttttttttttggtaatttttttatttggatagtgcttttttgttttgtttttgttctgcattaaggccttttttgctttgacttgaaataagttctttgacagagcatattgcttggttaattaagtaacctaaagtatgcattaggattgtgaaatgtctcgtgagtatgccaatcctgagggtggaaccaaatagcctttgatgaaaagggcagtggattctggaggctctacttcaggtgctgctataatgcctcatctaatcaggactaaattgtgtaggaaactgcagtgggaagaatatgctttctgctcaggctaagagggtcactgatctgtccttagaaattcagagtaacatg

SEQ ID NO: 115991 - DNA, 661 bp, Homo sapiens
  Payload ID: 2631
  Gene Symbol: CDV3
  Gene Name: CDV3 homolog (mouse)
  ENST ID: ENST00000508481
  CDS Start-End: 185-655
gggctgggctcgccagggccgggaccccttccgatatccgcggtggagccgcccttcccaccccgcgtcgctcggcgttagccaaggcccgggcggcgccaccctccgggggcactaggacgaagatgaatggaaagaattggagcaaaaagaggttgattacagcggcctcagggttcaggcaatgcaaataagcagtgaaaaggaagaagacgataatgaaaagagacaagatccaggtgataactgggaagaaggtggaggtggtggtggaggtatggaaaaatcttcaggtccctggaataaaacagctccagtacaagcacctcctgctccagtaattgttacagaaaccccagaaccagcgatgactagtggtgtgtataggcctcctggggccaggttaaccacaacaaggaaaacaccacaaggaccaccagaaatctacagtgatacacagttcccatccctgcagtcaactgccaagcatgtagaaagccggaaggataaagaaatggagaagagctttgaagtagtaagacacaaaaatagaggtagggatgaggtttcaaaaaaccaggcccttaaacttcagctagacaaccaatatgctgtgcttgaaaatcagaaaagcagccactcacaatacaattaaggaatg

SEQ ID NO: 115992 - DNA, 471 bp, Homo sapiens
  Payload ID: 2631
  Gene Symbol: CDV3
  Gene Name: CDV3 homolog (mouse)
  ENST ID: ENST00000504867
  CDS Start-End: 312-471
gcgtcgctcggcgttagccaaggcccgggcggcgccaccctccgggggcactaggtctggggccgcagtgcccagcacagagcagcgtttatcgggtgacgtctaggctgagtaattccgtgtgctgacctcagcccagtagtttgagctgaattttcgctttcagcagccgcatttgtagcagctcttttgtgatgacttagtctctaagcccgtgaaagaaaaagaaaactctcggtggcaaggacgaagatgaatggaaagaattggagcaaaaagaggttgattacagcggcctcagggttcaggcaatgcaaataagcagtgaaaaggaagaagacgataatgaaaagagacaagatccaggtgataactgggaagaaggtggaggtggtggtggaggtatggaaaaatcttcaggtccctggaataaaacagctccagtacaagcacctcctgctccagtaattg

SEQ ID NO: 115993 - DNA, 448 bp, Homo sapiens
  Payload ID: 2631
  Gene Symbol: CDV3
  Gene Name: CDV3 homolog (mouse)
  ENST ID: ENST00000507408
  CDS Start-End: 172-448
agtttgagctgaattttcgctttcagcagccgcatttgtagcagctcttttgtgatgacttagtctctaagcccgtgaaagaaaaagaaaactctcggtggcaaggacgaagatgaatggaaagaattggagcaaaaagaggttgattacagcggcctcagggttcaggcaatgcaaataagtgaaaaggaagaagacgataatgaaaagagacaagatccaggtgataactgggaagaaggtggaggtggtggtggaggtatggaaaaatcttcaggtccctggaataaaacagctccagtacaagcacctcctgctccagtaattgttacagaaaccccagaaccagcgatgactagtggtgtgtataggcctcctggggccaggttaaccacaacaaggaaaacaccacaaggaccaccagaaatctacagtgatacacagttcc

SEQ ID NO: 115994 - DNA, 554 bp, Homo sapiens
  Payload ID: 2631
  Gene Symbol: CDV3
  Gene Name: CDV3 homolog (mouse)
  ENST ID: ENST00000511392
  CDS Start-End: 186-512
agtttgagctgaattttcgctttcagcagccgcatttgtagcagctcttttgtgatgacttagtctctaagcccgtgaaagaaaaagaaaactctcggtggcaaggttgaagtagaaatgacgaagatgaatggaaagaattggagcaaaaagaggttgattacagcggcctcagggttcaggcaatgcaaataagcagtgaaaaggaagaagacgataatgaaaagagacaagatccaggtgataactgggaagaaggtggaggtggtggtggaggtatggaaaaatcttcaggtccctggaataaaacagctccagtacaagcacctcctgctccagtaattgaaaccccagaaccagcgatgactagtggtgtgtataggcctcctggggccaggttaaccacaacaaggaaaacaccacaaggaccaccagaaatctacagtgatacacagttcccatccctgcagtcaactgccaagcatgtagaaagccggaagtacttaaaatgaatgctacctggaattaaatgactacatatggcacatctacat

SEQ ID NO: 115995 - DNA, 568 bp, Homo sapiens
  Payload ID: 2632
  Gene Symbol: CEBPZOS
  Gene Name: CEBPZ opposite strand
  Uniprot ID: A8MTT3
  ENST ID: ENST00000397064
  CDS Start-End: 35-277
gcgcatgcgcagtcccccttgaacgcacctcaggatggcccgtactttggaaccactagcaaagaagatctttaaaggagttttggtagccgaacttgtaggcgtttttggagcatattttttgtttagcaagatgcacacaagccaagatttcaggcaaacaatgagcaagaaatatcccttcatcttggaagtttattacaaatccactgagaagtctggaatgtatggaatcagagagctagatcaaaaaacatggttgaacagcaaaaattagatgatttcactctgtcacccaggctagagtgcagtgccgtaatcttggctcacggcaacctctgactcctggattcaagcgattctcgtgcctctgcttctcgagtagctgggactacaggtgcgtgccaccatgcccagctcattttttggggtttttagtagagacagggtttcaccatattggccaggctggtctcgaactcctgacctcaaacaatcttcctgcctcggcctgccaaagtgctgggattacaggtgtgagccacagcgcctggccccaaatatttct

SEQ ID NO: 115996 - DNA, 1499 bp, Homo sapiens
  Payload ID: 2632
  Gene Symbol: CEBPZOS
  Gene Name: CEBPZ opposite strand
  Uniprot ID: A8MTT3
  ENST ID: ENST00000397226
  CDS Start-End: 425-667
aagactctggcgagtggcttcccatgggcggtcggatttcggggtccctagtgcgacgagagtggggcggtcttctgcgtggggcctcgtcacagttctgggggcatgtggaggatagtcaggtgtcactgccttaattcactggaggtgtatccctggtggtctgtagcaaaggaacttgaagttttatcagcctcctgaagccgagagcctcagtgcaaaacgtatatgtatttttaaaaaggcattgaaaaggggtcggaagtgaatggagtaaacacctgacagcagcgagctgggattgagaacaaaagagcacacacaggacaatagaaaaatctgaaaaacaagtggttctcctcttctggactttgaggttataaggaggctgactaaaaacttgggtttacattaatgtcttcagatggcccgtactttggaaccactagcaaagaagatctttaaaggagttttggtagccgaacttgtaggcgtttttggagcatattttttgtttagcaagatgcacacaagccaagatttcaggcaaacaatgagcaagaaatatcccttcatcttggaagtttattacaaatccactgagaagtctggaatgtatggaatcagagagctagatcaaaaaacatggttgaacagcaaaaattagatccagtcatcacgttcagcctcccatctaagctgtttgagacctttgagagaagaagaaaagatgagtgtactaccacactgtagactcttggtggtcccacagaacatgctgctgagtcacaggaacttctagcctgccttggcctgtggtttcccacccactatacaaacccactgcttgtttgttgcttttcttctcatatttattgtcaaagataaatgtttcaaaaagaaatgactaaggaaggaaaagaaacaaatgctctaaagattttctctccccaagcacttttactggtgaaataaaaaccagtaacaatcaatatgtaaaaacggcccacttccctaaaaaaaagtaatttttgtagtctgcaaggttttttttttttttgctttagtctaaatacttgttaatcttacatgttctcctgagagaagaaaaagccattcctttcaggttgtaaagtaccatgaaaaggtctttcaaaaatattcctatcagccaggcatggtggctcacaccagtaatctcagcactttgggaggccgaggcaggcgggtcacttgaggtcaggagttcgagaccagcctggccaacatggtgaaaccctgtttctactaaaaatacaaaaattagctgggcgtggtggtgcatgcctgtaatcccagctacttgggaggctaaggtaggagaattacttgaacatgggagatggaggttgcagtgagccaagatcatgccactgcattccaacctgggcaagggagtgagacgctgtctcaaaaaaaaaaaaaaaaaaaaaaaaaaaaaaaaaaaaaaaaaaaaaaaa

SEQ ID NO: 115997 - DNA, 695 bp, Homo sapiens
  Payload ID: 2632
  Gene Symbol: CEBPZOS
  Gene Name: CEBPZ opposite strand
  Uniprot ID: A8MTT3
  ENST ID: ENST00000392061
  CDS Start-End: 15-257
gaacgcacctcaggatggcccgtactttggaaccactagcaaagaagatctttaaaggagttttggtagccgaacttgtaggcgtttttggagcatattttttgtttagcaagatgcacacaagccaagatttcaggcaaacaatgagcaagaaatatcccttcatcttggaagtttattacaaatccactgagaagtctggaatgtatggaatcagagagctagatcaaaaaacatggttgaacagcaaaaattagatagtctcgctttgtcgccaggctggagtacaggggcgtgatctcggctcactgcaacctctgccttctgggttcaagcgattctcctgcctcagcctcccaagtagctgggcctacaagtgcatgccaccacgccaagctaatttttgtatttttagtagagatggggtttcatcatgttggccaggatggtcttgatctcttgaccttgtgatctacctgccttggcctcccaaagtgctgggattacaggcgtgagccactgcgcccagccatttttgattttttgtagagatggggtctcattgtgttgcccaggctgattaaagtttctataaggtatgtttattcttaaggatatctactctaacacctgtaaatgtagggtgatcaattagtaaattaataaatctgaatcaattaataaatctgtttaaa

SEQ ID NO: 115998 - DNA, 3158 bp, Homo sapiens
  Payload ID: 2632
  Gene Symbol: CEBPZOS
  Gene Name: CEBPZ opposite strand
  Uniprot ID: A8MTT3
  ENST ID: ENST00000402297
  CDS Start-End: 35-277
gcgcatgcgcagtcccccttgaacgcacctcaggatggcccgtactttggaaccactagcaaagaagatctttaaaggagttttggtagccgaacttgtaggcgtttttggagcatattttttgtttagcaagatgcacacaagccaagatttcaggcaaacaatgagcaagaaatatcccttcatcttggaagtttattacaaatccactgagaagtctggaatgtatggaatcagagagctagatcaaaaaacatggttgaacagcaaaaattagatccagtcatcacgttcagcctcccatctaagctgtttgagacctttgagagaagaagaaaagatgagtgtactaccacactgtagactcttggtggtcccacagaacatgctgctgagtcacaggaacttctagcctgccttggcctgtggtttcccacccactatacaaacccactgcttgtttgttgcttttcttctcatatttattgtcaaagataaatgtttcaaaaagaaatgactaaggaaggaaaagaaacaaatgctctaaagattttctctccccaagcacttttactggtgaaataaaaaccagtaacaatcaatatgtaaaaacggcccacttccctaaaaaaaagtaatttttgtagtctgcaaggttttttttttttttgctttagtctaaatacttgttaatcttacatgttctcctgagagaagaaaaagccattcctttcaggttgtaaagtaccatgaaaaggtctttcaaaaatattcctatcagccaggcatggtggctcacaccagtaatctcagcactttgggaggccgaggcaggcgggtcacttgaggtcaggagttcgagaccagcctggccaacatggtgaaaccctgtttctactaaaaatacaaaaattagctgggcgtggtggtgcatgcctgtaatcccagctacttgggaggctaaggtaggagaattacttgaacatgggagatggaggttgcagtgagccaagatcatgccactgcattccaacctgggcaagggagtgagacgctgtctcaaaaaaaaaaaaaaaaaaaaaaaaaaaaaaaaaaaaaaaaaaaaaaaagaataaataaaataacgaaaatttcctatcttctgaagttccaagccaaagctatttttaaaacatcaataaaaaaatttaagttacttacttgcattatctttgttagccatggcattcatgccaatgttatcaaacttggatcccatattttcatccaatagatggccaaacttttaaacaaaaacgataaatttattagaaaactaaaaataatgtagaatagctagcttgttaaaacagtacattagccttacctcttcagcagatacaaataggctggaatcatttaagtttcttttcttttttcttggccctaaaaaaaattgtaagtctacattattcaattataaatctaatgattttagaaaaatgcaatgcaacatgattttattttaaaaattatacttgggtaaaaacaattgcaataatcttctggcaccattgggtagctggcatttaaatataatttaagagttagtatataatattttcaaaaagctaacaacatcctaatagaactgttcagatgacaagagtgtcttcttgcttttcagatttggccactgatcgaagttttacccataagggaaataacatagtatcaagcaatagtaaaattatcagtttgacatggatgggttttgaaatacttaagacacaacataaaatttagttcaggggtctttagattgtaaagaaattgactgaaagtatgtttattatgctataaatgaagttgtttataacagcgaaaaaggttctcctttaaaaaaaaaacttatctgtagtactgaatatataaacttttcctgaaacaattattcaaactctgcatctttgatatcaatgtctctagcagtagtagagccatattttaaaaagagctttactaaatacagatcataacattcagctgttttaagtgtattaacgcattttggtaaatttacagacttgttcaaccacaaccacagtctgattttagaacatttccatcaacttcaaagatccctggtgccatttgtagtcctccaacccatctccgatctatcttgtttctatgacttgccttttctggctatttcatataaatgggatcatatgacatgtggtttcctatatctgacttttttcatttagcataacgtttttgaggctcatccatgttgtagtactccatgccatgttgtgggctacataatattccattgtatggatataccacattttgcttatcagttaatggacatttaggttttgtctactttttggcattaatagtgctgctgtgaacaatcatgtacaagtctttgtatcagagccacttttgataaaatagtttctaaaacatttcatcttgatttttattaaggtgatatgtatgttacttaacagctgtataatacacatttgcatgcattaggaagttttttttgggttttattcatcctgtagtgatgtatctgtgacctcaacgagtaggcacttctgtactgtactggtttcttaaagtttcttttatcccgcccccacccccaacctcagcctcaagtatgtaacaccatgcctggctaatttttgatttttttttttttttttttgagacagagtctcgctttgtcgccaggctggagtacaggggcgtgatctcggctcactgcaacctctgccttctgggttcaagcgattctcctgcctcagcctcccaagtagctgggcctacaagtgcatgccaccacgccaagctaatttttgtatttttagtagagatggggtttcatcatgttggccaggatggtcttgatctcttgaccttgtgatctacctgccttggcctcccaaagtgctgggattacaggcgtgagccactgcgcccagccatttttgattttttgtagagatggggtctcattgtgttgcccaggctgattaaagtttctataaggtatgtttattcttaaggatatctactctaacacctgtaaatgtagggtgatcaattagtaaattaataaatctgaatcaattaataaatctgtttaaaat

SEQ ID NO: 115999 - DNA, 687 bp, Homo sapiens
  Payload ID: 2632
  Gene Symbol: CEBPZOS
  Gene Name: CEBPZ opposite strand
  Uniprot ID: A8MTT3
  ENST ID: ENST00000406711
  CDS Start-End: 197-439
cttgaacgcacctcaggcattgaaaaggggtcggaagtgaatggagtaaacacctgacagcagcgagctgggattgagaacaaaagagcacacacaggacaatagaaaaatctgaaaaacaagtggttctcctcttctggactttgaggttataaggaggctgactaaaaacttgggtttacattaatgtcttcagatggcccgtactttggaaccactagcaaagaagatctttaaaggagttttggtagccgaacttgtaggcgtttttggagcatattttttgtttagcaagatgcacacaagccaagatttcaggcaaacaatgagcaagaaatatcccttcatcttggaagtttattacaaatccactgagaagtctggaatgtatggaatcagagagctagatcaaaaaacatggttgaacagcaaaaattagatatttggccactgatcgaagttttacccataagggaaataacatagtatcaagcaatagtaaaattatcagtttgacatggatgggttttgaaatacttaagacacaacataaaatttagttcaggggtctttagattgtaaagaaattgactgaaagtatgtttattatgctataaatgaagttgtttataacagcgaaaaaggttctcctttaaaaaaaaaacttatctgtagtactgaatatat

SEQ ID NO: 116000 - DNA, 4186 bp, Homo sapiens
  Payload ID: 2633
  Gene Symbol: CDON
  Gene Name: cell adhesion associated, oncogene regulated
  Uniprot ID: Q4KMG0
  ENST ID: ENST00000263577
  CDS Start-End: 129-3923
gtctctccaagggaatgaaaggtgaggggagcgtgagtgcaggcatgatgggaatctccgtgacttgtgaaccaaggactgggttttgctctggaagcctgtcctgattgcttctgtaatctggcgctatgcatccggatcttggacccttatgtacactgctgtatgttactcttacaattctgtgctcttctgtgagttcagacttggcaccttattttacttctgagccgctctctgctgtccagaaacttggtggacctgtagtactgcattgttctgctcaacctgtgaccactcgtatctcatggctgcataacggaaaaacattggatggaaacctggaacatgttaagattcatcaggggactctgacaattctttctctcaactcctctcttttgggttactaccagtgccttgccaacaatagcatcggtgccattgtgagtggccctgcgacagtatctgtggcagttcttggtgattttggttcatccacaaagcatgttattacagcagaagaaaaaagtgctggtttcattggctgcagggtaccggagagtaaccccaaagctgaggtgcgctataaaatccggggaaaatggctggaacattccacagagaattacttaatccttccatcaggaaatcttcagattttgaatgtatccttagaggacaagggatcatacaaatgtgcagcttataatcctgtcacacatcaattaaaagttgaacctattggccgaaagctccttgtgagtcgtccttcttcagatgatgttcacattcttcaccccacccattcacaggcattagctgttctttctcgtagccctgtaaccttggagtgtgtggtgagtggggtcccggctcctcaagtgtattggctaaaggacgggcaggacattgcaccaggaagcaactggagaaggttgtattctcatcttgccactgatagcgttgacccggcggactccggaaactattcctgcatggcgggaaacaagtctggagatgtaaaatatgtgacttacatggttaatgtacttgaacatgcttccatttctaaaggactacaggatcagatagtgtctctgggtgccacagtacactttacctgcgacgttcatgggaacccagcccccaactgtacctggtttcacaatgcacagcctattcatccttctgcacgacatctaactgcaggaaacggactgaaaatcagtggggttactgtggaagatgttgggatgtatcagtgtgtagcagataatgggattggatttatgcactctactggaagacttgaaattgaaaatgacggtggattcaagccagttataattacggcaccagtaagtgcaaaggttgcagacggagactttgttactctgtcctgcaatgccagtgggctgccggttccggtcattcgttggtatgacagccatggattgataaccagccatccatctcaagtcctgagatcgaaatcccgaaaatcacagttatcaagacctgagggcttgaacctggagcctgtgtacttcgtcctgtcccaagctggtgcaagctctctccatattcaggctgtgactcaggaacatgcggggaaatacatctgcgaagctgcaaatgaacatggtaccacacaggcagaagcatctctcatggttgttccttttgaaacaaatacaaaagcagagacagtcacacttcctgatgctgctcagaatgatgacagaagtaagagagatggttcagaaactgggttactgagctcatttccggtgaaggtccatcccagtgcagtggaatcagcaccagagaaaaacgccagcggcatctctgttcctgatgcccccatcatactgagccccccacagacccacacaccagacacgtacaacctggtgtggagggcaggcaaggatggtgggctgcccatcaatgcttactttgtgaagtatcgaaagctggatgatggggttggcatgctgggaagctggcacacggttcgagtcccaggaagtgaaaatgagctccatttagctgagctggagccatctagtctttatgaagtcttgatggtagcaagaagcgcagcaggtgaaggccaacctgccatgcttaccttccgaaccagcaaagaaaaaacagcgtcatcaaaaaacacccaggcatcctctccacccgtgggcatccctaagtatcccgttgtttcagaggctgcaaacaacaattttggagtggtacttacagattcctctaggcacagtggagttccagaggcaccagatcggcctaccatctccactgcatcagagacatcagtctatgtcacttggattcctcgggcaaacgggggttctccaatcactgccttcaaagtcgaatataaacggatgaggaccagcaattggctggtggcagctgaagacatccctccttccaaactttcagtggaagttcgtagtttagaaccaggttcaacatacaaatttagggtcattgccatcaaccattatggtgagagttttcggagttcagcatctcgtccttatcaagtggttgggttccccaatcgcttttccagccgtccaataactggacctcacattgcatacacagaggctgtcagcgatactcagatcatgctaaagtggacgtacattccatcaagtaacaataacactcccattcaaggattttatatctattaccgaccaacagatagtgacaatgacagtgattacaagagggatgttgtagaaggttcaaagcagtggcacatgattggccacctgcagccagaaacctcctatgacattaaaatgcaatgcttcaatgaaggaggagaaagtgaatttagcaatgtgatgatctgcgagactaaagtgaaacgtgttcctggagcttctgaatatcctgtcaaagacttgagtacccctccaaattctttgggaagtggaggaaatgtggggcctgcaaccagccctgccagaagcagtgacatgttatatctgatcgttggctgtgtgctgggcgtcatggtcctcattctgatggttttcattgcaatgtgcctgtggaagaatcgccagcagaataccatacaaaaatatgacccaccaggatatctctaccaaggatcagatatgaacgggcagatggtggactacaccactctctcaggagcaagtcagataaatggaaatgttcacggaggcttcctaaccaatggcggtctcagcagtggctattcccaccttcaccataaggtccccaatgcagtcaatggaattgtgaatgggagcctaaatggagggctttactccgggcacagcaactctctaaccaggacacacgtggattttgaacatcctcatcatctagtgaatggtggtggaatgtacacggccgtgcctcagattgaccctctggagtgtgttaactgccgaaattgtcgaaacaacaataggtgtttcaccaaaaccaacagcactttcagcagcagccctcctcctgtggtccctgtggtagcaccttatcctcaggatggtttggaaatgaagcccctcagtcacgtgaaggtgcctgtatgcctgacttccgcagtccctgattgtggccagttgccggaggagagcgtcaaggacaatgtggaaccagtccctactcagcgtacctgctgtcaggacattgtaaatgacgtcagctctgatggctcagaagatccagcagagttcagcagaggagacagctgtgcccattcagaaacagagatcaacattgtaagttggaatgctcttattttgccacctgtccccgagggctgtgctgagaagacaatgtggtctccacctggcattcctttagacagcccgacagaggtccttcagcagccccgggaaacctgaggacatgcaaacaaccagtcatgttccaacttcaagccggtaactgcacacaacaggcctgggagcgaactgtgtgaaggaccttaattcaaatcagagaaaatcattatttatttttttgtagtagtaatgtcatatgaatgtatcttaaaacgtgtgcccttttatattatttatgccttaaatgttttcttccccattccttcctccccctcggtaggaaacaaccttgttttgcatagtattcagtcacctggagggca

SEQ ID NO: 116001 - DNA, 9138 bp, Homo sapiens
  Payload ID: 2633
  Gene Symbol: CDON
  Gene Name: cell adhesion associated, oncogene regulated
  Uniprot ID: Q4KMG0
  ENST ID: ENST00000392693
  CDS Start-End: 129-3992
gtctctccaagggaatgaaaggtgaggggagcgtgagtgcaggcatgatgggaatctccgtgacttgtgaaccaaggactgggttttgctctggaagcctgtcctgattgcttctgtaatctggcgctatgcatccggatcttggacccttatgtacactgctgtatgttactcttacaattctgtgctcttctgtgagttcagacttggcaccttattttacttctgagccgctctctgctgtccagaaacttggtggacctgtagtactgcattgttctgctcaacctgtgaccactcgtatctcatggctgcataacggaaaaacattggatggaaacctggaacatgttaagattcatcaggggactctgacaattctttctctcaactcctctcttttgggttactaccagtgccttgccaacaatagcatcggtgccattgtgagtggccctgcgacagtatctgtggcagttcttggtgattttggttcatccacaaagcatgttattacagcagaagaaaaaagtgctggtttcattggctgcagggtaccggagagtaaccccaaagctgaggtgcgctataaaatccggggaaaatggctggaacattccacagagaattacttaatccttccatcaggaaatcttcagattttgaatgtatccttagaggacaagggatcatacaaatgtgcagcttataatcctgtcacacatcaattaaaagttgaacctattggccgaaagctccttgtgagtcgtccttcttcagatgatgttcacattcttcaccccacccattcacaggcattagctgttctttctcgtagccctgtaaccttggagtgtgtggtgagtggggtcccggctcctcaagtgtattggctaaaggacgggcaggacattgcaccaggaagcaactggagaaggttgtattctcatcttgccactgatagcgttgacccggcggactccggaaactattcctgcatggcgggaaacaagtctggagatgtaaaatatgtgacttacatggttaatgtacttgaacatgcttccatttctaaaggactacaggatcagatagtgtctctgggtgccacagtacactttacctgcgacgttcatgggaacccagcccccaactgtacctggtttcacaatgcacagcctattcatccttctgcacgacatctaactgcaggaaacggactgaaaatcagtggggttactgtggaagatgttgggatgtatcagtgtgtagcagataatgggattggatttatgcactctactggaagacttgaaattgaaaatgacggtggattcaagccagttataattacggcaccagtaagtgcaaaggttgcagacggagactttgttactctgtcctgcaatgccagtgggctgccggttccggtcattcgttggtatgacagccatggattgataaccagccatccatctcaagtcctgagatcgaaatcccgaaaatcacagttatcaagacctgagggcttgaacctggagcctgtgtacttcgtcctgtcccaagctggtgcaagctctctccatattcaggctgtgactcaggaacatgcggggaaatacatctgcgaagctgcaaatgaacatggtaccacacaggcagaagcatctctcatggttgttccttttgaaacaaatacaaaagcagagacagtcacacttcctgatgctgctcagaatgatgacagaagtaagagagatggttcagaaactgggttactgagctcatttccggtgaaggtccatcccagtgcagtggaatcagcaccagagaaaaacgccagcggcatctctgttcctgatgcccccatcatactgagccccccacagacccacacaccagacacgtacaacctggtgtggagggcaggcaaggatggtgggctgcccatcaatgcttactttgtgaagtatcgaaagctggatgatggggttggcatgctgggaagctggcacacggttcgagtcccaggaagtgaaaatgagctccatttagctgagctggagccatctagtctttatgaagtcttgatggtagcaagaagcgcagcaggtgaaggccaacctgccatgcttaccttccgaaccagcaaagaaaaaacagcgtcatcaaaaaacacccaggcatcctctccacccgtgggcatccctaagtatcccgttgtttcagaggctgcaaacaacaattttggagtggtacttacagattcctctaggcacagtggagttccagaggcaccagatcggcctaccatctccactgcatcagagacatcagtctatgtcacttggattcctcgggcaaacgggggttctccaatcactgccttcaaagtcgaatataaacggatgaggaccagcaattggctggtggcagctgaagacatccctccttccaaactttcagtggaagttcgtagtttagaaccaggttcaacatacaaatttagggtcattgccatcaaccattatggtgagagttttcggagttcagcatctcgtccttatcaagtggttgggttccccaatcgcttttccagccgtccaataactggacctcacattgcatacacagaggctgtcagcgatactcagatcatgctaaagtggacgtacattccatcaagtaacaataacactcccattcaaggattttatatctattaccgaccaacagatagtgacaatgacagtgattacaagagggatgttgtagaaggttcaaagcagtggcacatgattggccacctgcagccagaaacctcctatgacattaaaatgcaatgcttcaatgaaggaggagaaagtgaatttagcaatgtgatgatctgcgagactaaagtgaaacgtgttcctggagcttctgaatatcctgtcaaagacttgagtacccctccaaattctttgggaagtggaggaaatgtggggcctgcaaccagccctgccagaagcagtgacatgttatatctgatcgttggctgtgtgctgggcgtcatggtcctcattctgatggttttcattgcaatgtgcctgtggaagaatcgccagcagaataccatacaaaaatatgacccaccaggatatctctaccaaggatcagatatgaacgggcagatggtggactacaccactctctcaggagcaagtcagataaatggaaatgttcacggaggcttcctaaccaatggcggtctcagcagtggctattcccaccttcaccataaggtccccaatgcagtcaatggaattgtgaatgggagcctaaatggagggctttactccgggcacagcaactctctaaccaggacacacgtggattttgaacatcctcatcatctagtgaatggtggtggaatgtacacggccgtgcctcagattgaccctctggagtgtgttaactgccgaaattgtcgaaacaacaataggtgtttcaccaaaaccaacagcactttcagcagcagccctcctcctgtggtccctgtggtagcaccttatcctcaggatggtttggaaatgaagcccctcagtcacgtgaaggtgcctgtatgcctgacttccgcagtccctgattgtggccagttgccggaggagagcgtcaaggacaatgtggaaccagtccctactcagcgtacctgctgtcaggacattgtaaatgacgtcagctctgatggctcagaagatccagcagagttcagcagaggtcaggaaggcatgatcaaccttaggattccagatcatcttcagttagctaagagctgtgtatgggaaggagacagctgtgcccattcagaaacagagatcaacattgtaagttggaatgctcttattttgccacctgtccccgagggctgtgctgagaagacaatgtggtctccacctggcattcctttagacagcccgacagaggtccttcagcagccccgggaaacctgaggacatgcaaacaaccagtcatgttccaacttcaagccggtaactgcacacaacaggcctgggagcgaactgtgtgaaggaccttaattcaaatcagagaaaatcattatttatttttttgtagtagtaatgtcatatgaatgtatcttaaaacgtgtgcccttttatattatttatgccttaaatgttttcttccccattccttcctccccctcggtaggaaacaaccttgttttgcatagtattcagtcacctggagggcagaggggtccttccatgttttctaacagctatagtgacagcaagagctcctcatgcaaaggatcccatctcttggctgcttcggctaggagggaatgcaggggcccgttgaaggttgccaccagctgggttttcaggtggaaaatggtctttcaatagtgtattctcagacttttttttgtttgttttttgagatggagtcttgctgtcatccaggctggagtgcaatggctcgatcttggctcactgcaacctccgcctcccaggttcaagcaattctcccgcctcagcctcctgagtagctgggactacaggcacctgccaccacgtccagctaattgtcttgtatttttattagagacaaggtttcaggctggttttgaactcctgacctcaagtgatccacccgcctccgcctcccaaagtgcgaggattacaggcgtgagccaccacgtctggcctgtattatcagacttcctgagaacactttgaaatcaactgcagttgtgacccatgtttataataacagacctggctgacggattttacaagagtgccttccacagaagtggtaatgtgacctgttgactttgtatctgcacgtgggcacgagtgatgttcagtttgctaggcactagtcatagtgttatggacgtggtggagtgtaaggtcttgatgaattacggcagtatgcagaaaaggaaccaaggccagagagacaaataatgcctcatgtcccactgctttaaaattacattaatttataaaatggccactatgggctctttttgactgtttctcggagtaggaacaaaataagacattaaatggtggcttgaagagaaagatacacattttcagaagaaagaaaggggagggctgcagggagcctgtcttggcgggagctctccagtctgttggattagcacagggacacgcttatggtgccatgacgccgaaactagtcatcccccatctccagcataggcaacggcctgcaggggtgagtgtcagaaaagacttactttggaagaaaagggtttttttttgtttgtttgttttttgtttttttttgtttgtttgttttgggtttttttcctgaaatttcctgatacctttttcagaatgtcacccttgtaaataggcacctaaagccaagttggtcagcagagctcctgaccacggctgcctctgcgtgacaaggacatttgcagctgcctttggaaggctcttcacattaaaaaacaataattatgtaagtgtgtttcatagcttgagtcaagctttcaaggatcactgctcctttgtgcattgtgcatccctttggggaaagaaacagaaaattattctctttctatagagtcaagcaattccagcagaagtgaagaaatgttagtttcccagaaatcgcagtggaatagaatacaatactgtgttaaccaactttctgtataaatgcatcagtattcccttacatatgtctatatattttataatagaactgttagtgaaaatgtgcttgtttaagctgggtcactatgcaagagttacttccagtagaatgtagtgaatgtaattccctagtcggatattagggatgctgtagacccaagttctacattccagatgtccgtgcctatagtatactggatttattcttcatgttgcttaaatgcagttagctctggagggggatagctgcatcccttacttctgtgactagcaaaggacaaagtcccagcgcacagaatatgaaaacataccctgtgttagccaatcaagttacagcaatgctgtcacaaagggagttttagaaaactggggagtcattgtccgtagacagccattttgatttaggaaacaggtgtattagcatgagccttaggtcatgaactgcttttaaagattgagtttgaatatgggatctgtccacgaggaagagaaaatggctttacctttaggacaatctcattgtggactgctttatttatattattagtaacgctgttttaagtgttattctttttattgtattttatttataaaaaatgcctttatatattgaaatatataaatatatatatataaacacacacacacacacacacacacacatatatatatatatatataattgcctttatatttaggcggtatgagttctccctaagcgtgagttggctctgccctgcacaggcacccaaacagtcctacctaatgtcacttcaccaggaaatgagaggacatggtacagtgtgggagacagcactaacacgtgctgaataactactgtgtaccaggcactgtgctcggtgcttgttactgttaactcatttaacccccacaactcatctacaaagttggcattaaaatccccaagtcactcagtgagccatgggacctgaatccgaacctagtttatctggagccataatctgggctcctcccatttttccatactgctttccaaaagcattgtggttcactctttggatggaaccagtcccgttccgtatgctgtgatctatccctgccgtggaattcctccgaggctccaactccgcagccagagaagctgctctctggcctccgcgggcagagctctgcttatgacttcgtcttccagaggtccacatttctccccttgacgccccctgtctaccacctccacctggaaatttgatctttactgtgctcagtgatcacgaaattggtcaagcctattcatgttccttctcatctagaattctgtgtgattgttttagcataaactgccccgctcccactgtatcatttcacgatctccttttaatgtttttctttcagttttgcactgacagtctggtgacaggtgctgccagggtgcaagttacattgcaatgttctaaaccttttgaagtgttcttagcaaaagcctttctttctgggtgtttttgtcgaatgagtctatgaagactcaatgcatccatcttgggctgatcatgccacagatctcattccagctatagtactgccaagaagtgaagtttatcattgaattttacctgtgttgctctcttttaaagtaatgactttgagatgcatgctttgtatcatattgaaaagtatgttttattttccttaaagttgtaatattgtgtgtgaaactgtacatattttaaatgatgtagctttggcaggttttatttggttgatatgattttatattaaaagagaaggctgctttcatatagcatagcccctgaaggtgggaatactccctgtttgtacaacgctgcttatagtttgtgattggggtgggcgaatgtcttcctctgaaattctttggaaccccccacccctgtcctcccctgaaactcccctgtgcacacccctctgttctgactgcagagatcaaggccctgaaggagcaggatcttgggcaagtgttttaggggacgctgagaacatacctgaccctgggggcgatgtggaggcaggcccacctcctcggggcaactttgcgtttccttggagggaagggaggtgggtaggagaggagcttgggaggatgaggaggagcggtcccgcctcacacattgtctatttttaccattaaccgagcgccacatgtttatgaacttcaggatagaaatttagcctccttgtgaaaacgttttgttttactgccctaagaaaatacacatctctaggcttgtctgaccagaaagccagcaaagtcttttgcatcgggtgtggcccttttgtattttatttcccatatttaaataagccttccttaaaccctagccccagtcctgagagctttgagggtagccgaaaccccttatctaataaagtctaactctgtgagaaccacagaatcttcttaagcttctcaattttctgtctcctttcaggcgccacgtcccttgtgctggcgggtcccccgttggctttcttgccgtttcttctcatctgtgtctcctgcagaggcggctcggagtcccgagtcttctagtcagttgaacaagcattcatttgtgttttcacccagattacagacacacacacaaacagacacacacacttggagctagtgagtcatgctggcagctgacattgtgactctggaacagccccggtgctctgtgggccagctcccccagcctgggggcgggaagctacatctgcagtacctctgctccgtatcttgtgggctgcgactcctggagtcggaccactgcagcgtcagtgatgttcgtaagctatggttgagcaaaggaacacacacctacacaccttgcttcttcccactagccaaacctgggacccagccatcagcctgtctctgtgggagtcgcaatggaagtagccctctattggcgtgaacatcagctctgatttatttaggaattgctccatccacagactttttttctggaagcagctagcttgctcatacttctatagcaccacagatccttcccagtaccatggctttcacttgccctcagacacccagagatccctgtctccccattgtgggtcctcttccttgtcctgccacctctgtcttccacaaggtgggccagggcttctcttgtaaccatgtcacttagggacactgcagctgggccttgtaccagttgtgaagactgggtattaagtgaaagtggtagttggtgtcttagctacgttggttttatgaccaaagtctgacagaagggctcttcccaaatcccacctgccctccctaagcctatttgcatcttcctctttgggccttatggtgttgcagtcactgtgatggtgacattcactggagaatccgtggtttcttgtgcaggatccaaacctggggtggtggttggtgtttcaaggcctatgaagagcatatgtgggc

SEQ ID NO: 116002 - DNA, 1745 bp, Homo sapiens
  Payload ID: 2633
  Gene Symbol: CDON
  Gene Name: cell adhesion associated, oncogene regulated
  ENST ID: ENST00000531830
  CDS Start-End: 1-731
agaattacttaatccttccatcaggaaatcttcagattttgaatgtatccttagaggacaagggatcatacaaatgtgcagcttataatcctgtcacacatcaattaaaagttgaacctattggccgaaagctccttgtgagtcgtccttcttcagatgatgttcacattcttcaccccacccattcacaggcattagctgttctttctcgtagccctgtaaccttggagtgtgtggtgagtggggtcccggctcctcaagtgtattggctaaaggacgggcaggacattgcaccaggaagcaactggagaaggttgtattctcatcttgccactgatagcgttgacccggcggactccggaaactattcctgcatggcgggaaacaagtctggagatgtaaaatatgtgacttacatggttaatgtacttgaacatgcttccatttctaaaggactacaggatcagatagtgtctctgggtgccacagtacactttacctgcgacgttcatgggaacccagcccccaactgtacctggtttcacaatgcacagcctattcatccttctgcacgacatctaactgcaggaaacggactgaaaatcagtggggttactgtggaagatgttgggatgtatcagtgtgtagcagataatgggattggatttatgcactctactggaagacttgaaattgaaaatggacaggaaatttacgtaggaaatgtttaggagcccacagctatgaaacaactctaccatttattgacagtcttacttggtgaaagttgagaagggaactaataaggagacggtggattcaagccagttataattacggcaccagtaagtgcaaaggttgcagacggagactttgttactctgtcctgcaatgccagtgggctgccggttccggtcattcgttggtatgacagccatggattgataaccagccatccatctcaagtcctgagatcgaaatcccgaaaatcacagttatcaagacctgagggcttgaacctggagcctgtgtacttcgtcctgtcccaagctggtgcaagctctctccatattcaggctgtgactcaggaacatgcggggaaatacatctgcgaagctgcaaatgaacatggtaccacacaggcagaagcatctctcatggttgttccttttgaaacaaatacaaaagcagagacagtcacacttcctgatgctgctcagaatgatgacagaagtaagagagatggttcagaaactgggttactgagctcatttccggtgaaggtccatcccagtgcagtggaatcagcaccagagaaaaacgccagcggcatctctgttcctgatgcccccatcatactgagccccccacagacccacacaccagacacgtacaacctggtgtggagggcaggcaaggatggtgggctgcccatcaatgcttactttgtgaagtatcgaaagaatggcaggaaacagaacaagagtcttccagactgatgagtttgtcagagagatcccagtcatgctggatttaccaatcctaggaaagcactgagaatgaagtataatttccccccaaattggaattctaggaacccaatgatgtctttacatgtgtattcaaatgttttagcccttcaacataaagctctataaccacttttaaaacacaaattccttccctctctaaggtagtagaataccatttatgtagcaaataaagcagtttcttattaaaaacaa

SEQ ID NO: 116003 - DNA, 5803 bp, Homo sapiens
  Payload ID: 2633
  Gene Symbol: CDON
  Gene Name: cell adhesion associated, oncogene regulated
  ENST ID: ENST00000531738
  CDS Start-End: 388-2313
ataattaccaatgatacctattattttatacttattttattcttcattagcccaggaagaaagaaggcattgtttccattacaagtaaaggaaacagagtctgggagggcagtaacttgcttgaggccacacattagtggtcagatgcagagccaggagtctttctacagtgagaattgcagcgttcttgcagcagatcttctatttcttaatatgaagaagtattgtgtcttttttacttaccatgctgtattacttcttaaaactcttctagaattaaatgaatcctagttttgatcaaatgtgaccgaaagatttcctatcctccatctcctgcttttcttttctggtgtgttttctcttgggcagctggatgatggggttggcatgctgggaagctggcacacggttcgagtcccaggaagtgaaaatgagctccatttagctgagctggagccatctagtctttatgaagtcttgatggtagcaagaagcgcagcaggtgaaggccaacctgccatgcttaccttccgaaccagcaaagaaaaaacagcgtcatcaaaaaacacccaggcatcctctccacccgtgggcatccctaagtatcccgttgtttcagaggctgcaaacaacaattttggagtggtacttacagattcctctaggcacagtggagttccagaggcaccagatcggcctaccatctccactgcatcagagacatcagtctatgtcacttggattcctcgggcaaacgggggttctccaatcactgccttcaaagtcgaatataaacggatgaggaccagcaattggctggtggcagctgaagacatccctccttccaaactttcagtggaagttcgtagtttagaaccaggttcaacatacaaatttagggtcattgccatcaaccattatggtgagagttttcggagttcagcatctcgtccttatcaagtggttgggttccccaatcgcttttccagccgtccaataactggacctcacattgcatacacagaggctgtcagcgatactcagatcatgctaaagtggacgtacattccatcaagtaacaataacactcccattcaaggattttatatctattaccgaccaacagatagtgacaatgacagtgattacaagagggatgttgtagaaggttcaaagcagtggcacatgattggccacctgcagccagaaacctcctatgacattaaaatgcaatgcttcaatgaaggaggagaaagtgaatttagcaatgtgatgatctgcgagactaaagtgaaacgtgttcctggagcttctgaatatcctgtcaaagacttgagtacccctccaaattctttgggaagtggaggaaatgtggggcctgcaaccagccctgccagaagcagtgacatgttatatctgatcgttggctgtgtgctgggcgtcatggtcctcattctgatggttttcattgcaatgtgcctgtggaagaatcgccagcagaataccatacaaaaatatgacccaccaggatatctctaccaaggatcagatatgaacgggcagatggtggactacaccactctctcaggagcaagtcagataaatggaaatgttcacggaggcttcctaaccaatggcggtctcagcagtggctattcccaccttcaccataaggtccccaatgcagtcaatggaattgtgaatgggagcctaaatggagggctttactccgggcacagcaactctctaaccaggacacacgtggattttgaacatcctcatcatctagtgaatggtggtggaatgtacacggccgtgcctcagattgaccctctggagtgtgttaactgccgaaattgtcgaaacaacaataggtgtttcaccaaaaccaacagcactttcagcagcagccctcctcctgtggtccctgtggtagcaccttatcctcaggatggtttggaaatgaagcccctcagtcacgtgaaggtgcctgtatgcctgacttccgcagtccctgattgtggccagttgccggaggagagcgtcaaggacaatgtggaaccagtccctactcagcgtacctgctgtcaggacattgtaaatgacgtcagctctgatggctcagaagatccagcagagttcagcagaggagacagctgtgcccattcagaaacagagatcaacattgtaagttggaatgctcttattttgccacctgtccccgagggctgtgctgagaagacaatgtggtctccacctggcattcctttagacagcccgacagaggtccttcagcagccccgggaaacctgaggacatgcaaacaaccagtcatgttccaacttcaagccggtaactgcacacaacaggcctgggagcgaactgtgtgaaggaccttaattcaaatcagagaaaatcattatttatttttttgtagtagtaatgtcatatgaatgtatcttaaaacgtgtgcccttttatattatttatgccttaaatgttttcttccccattccttcctccccctcggtaggaaacaaccttgttttgcatagtattcagtcacctggagggcagaggggtccttccatgttttctaacagctatagtgacagcaagagctcctcatgcaaaggatcccatctcttggctgcttcggctaggagggaatgcaggggcccgttgaaggttgccaccagctgggttttcaggtggaaaatggtctttcaatagtgtattctcagacttttttttgtttgttttttgagatggagtcttgctgtcatccaggctggagtgcaatggctcgatcttggctcactgcaacctccgcctcccaggttcaagcaattctcccgcctcagcctcctgagtagctgggactacaggcacctgccaccacgtccagctaattgtcttgtatttttattagagacaaggtttcaggctggttttgaactcctgacctcaagtgatccacccgcctccgcctcccaaagtgcgaggattacaggcgtgagccaccacgtctggcctgtattatcagacttcctgagaacactttgaaatcaactgcagttgtgacccatgtttataataacagacctggctgacggattttacaagagtgccttccacagaagtggtaatgtgacctgttgactttgtatctgcacgtgggcacgagtgatgttcagtttgctaggcactagtcatagtgttatggacgtggtggagtgtaaggtcttgatgaattacggcagtatgcagaaaaggaaccaaggccagagagacaaataatgcctcatgtcccactgctttaaaattacattaatttataaaatggccactatgggctctttttgactgtttctcggagtaggaacaaaataagacattaaatggtggcttgaagagaaagatacacattttcagaagaaagaaaggggagggctgcagggagcctgtcttggcgggagctctccagtctgttggattagcacagggacacgcttatggtgccatgacgccgaaactagtcatcccccatctccagcataggcaacggcctgcaggggtgagtgtcagaaaagacttactttggaagaaaagggtttttttttgtttgtttgttttttgtttttttttgtttgtttgttttgggtttttttcctgaaatttcctgatacctttttcagaatgtcacccttgtaaataggcacctaaagccaagttggtcagcagagctcctgaccacggctgcctctgcgtgacaaggacatttgcagctgcctttggaaggctcttcacattaaaaaacaataattatgtaagtgtgtttcatagcttgagtcaagctttcaaggatcactgctcctttgtgcattgtgcatccctttggggaaagaaacagaaaattattctctttctatagagtcaagcaattccagcagaagtgaagaaatgttagtttcccagaaatcgcagtggaatagaatacaatactgtgttaaccaactttctgtataaatgcatcagtattcccttacatatgtctatatattttataatagaactgttagtgaaaatgtgcttgtttaagctgggtcactatgcaagagttacttccagtagaatgtagtgaatgtaattccctagtcggatattagggatgctgtagacccaagttctacattccagatgtccgtgcctatagtatactggatttattcttcatgttgcttaaatgcagttagctctggagggggatagctgcatcccttacttctgtgactagcaaaggacaaagtcccagcgcacagaatatgaaaacataccctgtgttagccaatcaagttacagcaatgctgtcacaaagggagttttagaaaactggggagtcattgtccgtagacagccattttgatttaggaaacaggtgtattagcatgagccttaggtcatgaactgcttttaaagattgagtttgaatatgggatctgtccacgaggaagagaaaatggctttacctttaggacaatctcattgtggactgctttatttatattattagtaacgctgttttaagtgttattctttttattgtattttatttataaaaaatgcctttatatattgaaatatataaatatatatatataaacacacacacacacacacacacacacatatatatatatatatataattgcctttatatttaggcggtatgagttctccctaagcgtgagttggctctgccctgcacaggcacccaaacagtcctacctaatgtcacttcaccaggaaatgagaggacatggtacagtgtgggagacagcactaacacgtgctgaataactactgtgtaccaggcactgtgctcggtgcttgttactgttaactcatttaacccccacaactcatctacaaagttggcattaaaatccccaagtcactcagtgagccatgggacctgaatccgaacctagtttatctggagccataatctgggctcctcccatttttccatactgctttccaaaagcattgtggttcactctttggatggaaccagtcccgttccgtatgctgtgatctatccctgccgtggaattcctccgaggctccaactccgcagccagagaagctgctctctggcctccgcgggcagagctctgcttatgacttcgtcttccagaggtccacatttctccccttgacgccccctgtctaccacctccacctggaaatttgatctttactgtgctcagtgatcacgaaattggtcaagcctattcatgttccttctcatctagaattctgtgtgattgttttagcataaactgccccgctcccactgtatcatttcacgatctccttttaatgtttttctttcagttttgcactgacagtctggtgacaggtgctgccagggtgcaagttacattgcaatgttctaaaccttttgaagtgttcttagcaaaagcctttctttctgggtgtttttgtcgaatgagtctatgaagactcaatgcatccatcttgggctgatcatgccacagatctcattccagctatagtactgccaagaagtgaagtttatcattgaattttacctgtgttgctctcttttaaagtaatgactttgagatgcatgctttgtatcatattgaaaagtatgttttattttccttaaagttgtaatattgtgtgtgaaactgtacatattttaaatgatgtagctttggcaggttttatttggttgatatgattttatattaaaagagaaggctgctttcat

SEQ ID NO: 116004 - DNA, 624 bp, Homo sapiens
  Payload ID: 2633
  Gene Symbol: CDON
  Gene Name: cell adhesion associated, oncogene regulated
  ENST ID: ENST00000531586
  CDS Start-End: 129-624
gtctctccaagggaatgaaaggtgaggggagcgtgagtgcaggcatgatgggaatctccgtgacttgtgaaccaaggactgggttttgctctggaagcctgtcctgattgcttctgtaatctggcgctatgcatccggatcttggacccttatgtacactgctgtatgttactcttacaattctgtgctcttctgtgagttcagacttggcaccttattttacttctgagccgctctctgctgtccagaaacttggtggacctgtagtactgcattgttctgctcaacctgtgaccactcgtatctcatggctgcataacggaaaaacattggatggaaacctggaacatgttaagattcatcaggggactctgacaattctttctctcaactcctctcttttgggttactaccagtgccttgccaacaatagcatcggtgccattgtgagtggccctgcgacagtatctgtggcagttcttggtgattttggttcatccacaaagcatgttattacagcagaagaaaaaagtgctggtttcattggctgcagggtaccggagagtaaccccaaagctgaggtgcgctataaaatccggggaaaatggctggaacattccacag

SEQ ID NO: 116005 - DNA, 1948 bp, Homo sapiens
  Payload ID: 2633
  Gene Symbol: CDON
  Gene Name: cell adhesion associated, oncogene regulated
  ENST ID: ENST00000534661
  CDS Start-End: 1-1948
agacttggcaccttattttacttctgagccgctctctgctgtccagaaacttggtggacctgtagtactgcattgttctgctcaacctgtgaccactcgtatctcatggctgcataacggaaaaacattggatggaaacctggaacatgttaagattcatcaggggactctgacaattctttctctcaactcctctcttttgggttactaccagtgccttgccaacaatagcatcggtgccattgtgagtggccctgcgacagtatctgtggcagttcttggtgattttggttcatccacaaagcatgttattacagcagaagaaaaaagtgctggtttcattggctgcagggtaccggagagtaaccccaaagctgaggtgcgctataaaatccggggaaaatggctggaacattccacagagaattacttaatccttccatcaggaaatcttcagattttgaatgtatccttagaggacaagggatcatacaaatgtgcagcttataatcctgtcacacatcaattaaaagttgaacctattggccgaaagctccttgtgagtcgtccttcttcagatgatgttcacattcttcaccccacccattcacaggcattagctgttctttctcgtagccctgtaaccttggagtgtgtggtgagtggggtcccggctcctcaagtgtattggctaaaggacgggcaggacattgcaccaggaagcaactggagaaggttgtattctcatcttgccactgatagcgttgacccggcggactccggaaactattcctgcatggcgggaaacaagtctggagatgtaaaatatgtgacttacatggttaatgtacttgaacatgcttccatttctaaaggactacaggatcagatagtgtctctgggtgccacagtacactttacctgcgacgttcatgggaacccagcccccaactgtacctggtttcacaatgcacagcctattcatccttctgcacgacatctaactgcaggaaacggactgaaaatcagtggggttactgtggaagatgttgggatgtatcagtgtgtagcagataatgggattggatttatgcactctactggaagacttgaaattgaaaatgacggtggattcaagccagttataattacggcaccagtaagtgcaaaggttgcagacggagactttgttactctgtcctgcaatgccagtgggctgccggttccggtcattcgttggtatgacagccatggattgataaccagccatccatctcaagtcctgagatcgaaatcccgaaaatcacagttatcaagacctgagggcttgaacctggagcctgtgtacttcgtcctgtcccaagctggtgcaagctctctccatattcaggctgtgactcaggaacatgcggggaaatacatctgcgaagctgcaaatgaacatggtaccacacaggcagaagcatctctcatggttgttccttttgaaacaaatacaaaagcagagacagtcacacttcctgatgctgctcagaatgatgacagaagtaagagagatggttcagaaactgggttactgagctcatttccggtgaaggtccatcccagtgcagtggaatcagcaccagagaaaaacgccagcggcatctctgttcctgatgcccccatcatactgagccccccacagacccacacaccagacacgtacaacctggtgtggagggcaggcaaggatggtgggctgcccatcaatgcttactttgtgaagtatcgaaagctggatgatggggttggcatgctgggaagctggcacacggttcgagtcccaggaagtgaaaatgagctccatttagctgagctggagccatctagtctttatgaagtcttgatggtagcaagaagcgcagcaggtgaaggccaacctgccatgcttaccttccgaaccagc

SEQ ID NO: 116006 - DNA, 722 bp, Homo sapiens
  Payload ID: 2633
  Gene Symbol: CDON
  Gene Name: cell adhesion associated, oncogene regulated
  ENST ID: ENST00000527967
  CDS Start-End: 295-722
ggtgcgaggagacccgggaccccacgcccgcccgccctgcccagcgccccagccccggcgtgcgaggcgccgctccctcctctgccctgcgcggtgcatggaggggcccgttcggatcgcagccgccgccaccgtagccgccgccgcgcgcgcgcggggggatgacctgggggtggctttccgagccggctgcagcgcaggaggtctggaggcttagccagccccgcggagagtgaaccaaggactgggttttgctctggaagcctgtcctgattgcttctgtaatctggcgctatgcatccggatcttggacccttatgtacactgctgtatgttactcttacaattctgtgctcttctgtgagttcagacttggcaccttattttacttctgagccgctctctgctgtccagaaacttggtggacctgtagtactgcattgttctgctcaacctgtgaccactcgtatctcatggctgcataacggaaaaacattggatggaaacctggaacatgttaagattcatcaggggactctgacaattctttctctcaactcctctcttttgggttactaccagtgccttgccaacaatagcatcggtgccattgtgagtggccctgcgacagtatctgtggcagttcttggtgattttggttcatccacaaagcatgttattacagcagaagaaaaaagtgctggtttcattggctgcagggt

SEQ ID NO: 116007 - DNA, 459 bp, Homo sapiens
  Payload ID: 2633
  Gene Symbol: CDON
  Gene Name: cell adhesion associated, oncogene regulated
  ENST ID: ENST00000534818
  CDS Start-End: 126-459
tcgggggacagagtcgaccatttggagacctgccagaagagccgtctctccaagggaatgaaagtgaaccaaggactgggttttgctctggaagcctgtcctgattgcttctgtaatctggcgctatgcatccggatcttggacccttatgtacactgctgtatgttactcttacaattctgtgctcttctgtgagttcagacttggcaccttattttacttctgagccgctctctgctgtccagaaacttggtggacctgtagtactgcattgttctgctcaacctgtgaccactcgtatctcatggctgcataacggaaaaacattggatggaaacctggaacatgttaagattcatcaggggactctgacaattctttctctcaactcctctcttttgggttactaccagtgccttgccaacaatagcatcggtgccattgtgagtggccctgcga

SEQ ID NO: 116008 - DNA, 1766 bp, Homo sapiens
  Payload ID: 2634
  Gene Symbol: CADM1
  Gene Name: cell adhesion molecule 1
  Uniprot ID: Q9BY67
  ENST ID: ENST00000331581
  CDS Start-End: 172-1587
agggggcggggtgggggagggagcgaggccctccgagagccgggttgggctcgcggcgctgtgattggtctgcccggactccgcctccagcgcatgtcattagcatctcattagctgtccgctcgggctccggaggcagccaacgccgccagtctgaggcaggtgcccgacatggcgagtgtagtgctgccgagcggatcccagtgtgcggcggcagcggcggcggcggcgcctcccgggctccggctccggcttctgctgttgctcttctccgccgcggcactgatccccacaggtgatgggcagaatctgtttacgaaagacgtgacagtgatcgagggagaggttgcgaccatcagttgccaagtcaataagagtgacgactctgtgattcagctactgaatcccaacaggcagaccatttatttcagggacttcaggcctttgaaggacagcaggtttcagttgctgaatttttctagcagtgaactcaaagtatcattgacaaacgtctcaatttctgatgaaggaagatacttttgccagctctataccgatcccccacaggaaagttacaccaccatcacagtcctggtcccaccacgtaatctgatgatcgatatccagaaagacactgcggtggaaggtgaggagattgaagtcaactgcactgctatggccagcaagccagccacgactatcaggtggttcaaagggaacacagagctaaaaggcaaatcggaggtggaagagtggtcagacatgtacactgtgaccagtcagctgatgctgaaggtgcacaaggaggacgatggggtcccagtgatctgccaggtggagcaccctgcggtcactggaaacctgcagacccagcggtatctagaagtacagtataagcctcaagtgcacattcagatgacttatcctctacaaggcttaacccgggaaggggacgcgcttgagttaacatgtgaagccatcgggaagccccagcctgtgatggtaacttgggtgagagtcgatgatgaaatgcctcaacacgccgtactgtctgggcccaacctgttcatcaataacctaaacaaaacagataatggtacataccgctgtgaagcttcaaacatagtggggaaagctcactcggattatatgctgtatgtatacgatccccccacaactatccctcctcccacaacaaccaccaccaccaccaccaccaccaccaccaccatccttaccatcatcacagacacaacggcgacgacagaaccagcagttcacggccttactcagttgcccaattccgcagaagaactggacagtgaggacctctcagattcccgagcaggtgaagaaggctcgatcagggcagtggatcatgccgtgatcggtggcgtcgtggcggtggtggtgttcgccatgctgtgcttgctcatcattctggggcgctattttgccagacataaaggtacatacttcactcatgaagccaaaggagccgatgacgcagcagacgcagacacagctataatcaatgcagaaggaggacagaacaactccgaagaaaagaaagagtacttcatctagatcagcctttttgtttcaatgaggtgtccaactggccctatttagatgataaagagacagtgatattggaacttgcgagaaattcgtgtgtttttttatgaatgggtggaaaggtgtgagactgggaaggcttgggatttgctgtgtaaaaaaaaaaaaaatgttctttggaaagtaca

SEQ ID NO: 116009 - DNA, 8588 bp, Homo sapiens
  Payload ID: 2634
  Gene Symbol: CADM1
  Gene Name: cell adhesion molecule 1
  Uniprot ID: Q9BY67
  ENST ID: ENST00000452722
  CDS Start-End: 22-1350
agtctgaggcaggtgcccgacatggcgagtgtagtgctgccgagcggatcccagtgtgcggcggcagcggcggcggcggcgcctcccgggctccggctccggcttctgctgttgctcttctccgccgcggcactgatccccacaggtgatgggcagaatctgtttacgaaagacgtgacagtgatcgagggagaggttgcgaccatcagttgccaagtcaataagagtgacgactctgtgattcagctactgaatcccaacaggcagaccatttatttcagggacttcaggcctttgaaggacagcaggtttcagttgctgaatttttctagcagtgaactcaaagtatcattgacaaacgtctcaatttctgatgaaggaagatacttttgccagctctataccgatcccccacaggaaagttacaccaccatcacagtcctggtcccaccacgtaatctgatgatcgatatccagaaagacactgcggtggaaggtgaggagattgaagtcaactgcactgctatggccagcaagccagccacgactatcaggtggttcaaagggaacacagagctaaaaggcaaatcggaggtggaagagtggtcagacatgtacactgtgaccagtcagctgatgctgaaggtgcacaaggaggacgatggggtcccagtgatctgccaggtggagcaccctgcggtcactggaaacctgcagacccagcggtatctagaagtacagtataagcctcaagtgcacattcagatgacttatcctctacaaggcttaacccgggaaggggacgcgcttgagttaacatgtgaagccatcgggaagccccagcctgtgatggtaacttgggtgagagtcgatgatgaaatgcctcaacacgccgtactgtctgggcccaacctgttcatcaataacctaaacaaaacagataatggtacataccgctgtgaagcttcaaacatagtggggaaagctcactcggattatatgctgtatgtatacgatccccccacaactatccctcctcccacaacaaccaccaccaccaccaccaccaccaccaccaccatccttaccatcatcacagattcccgagcaggtgaagaaggctcgatcagggcagtggatcatgccgtgatcggtggcgtcgtggcggtggtggtgttcgccatgctgtgcttgctcatcattctggggcgctattttgccagacataaaggtacatacttcactcatgaagccaaaggagccgatgacgcagcagacgcagacacagctataatcaatgcagaaggaggacagaacaactccgaagaaaagaaagagtacttcatctagatcagcctttttgtttcaatgaggtgtccaactggccctatttagatgataaagagacagtgatattggaacttgcgagaaattcgtgtgtttttttatgaatgggtggaaaggtgtgagactgggaaggcttgggatttgctgtgtaaaaaaaaaaaaaatgttctttggaaagtacactctgctgtttgacacctcttttttcgtttgtttgtttgtttaatttttatttcttcctaccaagtcaaacttggatacttggatttagtttcagtagattgcagaaaattctgtgccttgttttttgtttgtttgttgcgttcctttcttttccccctttgtgcacatttatttcctccctctaccccaatttcggattttttccaaaatctcccattttggaatttgcctgctgggattccttagactcttttccttcccttttctgttctagttttttacttttgtttatttttatggtaactgctttctgttccaaattcagtttcataaaaggagaaccagcacagcttagatttcatagttcagaatttagtgtatccataatgcattcttctctgttgtcgtaaagatttgggtgaacaaacaatgaaaactctttgctgctgcccatgtttcaaatacttagagcagtgaagactagaaaattagactgtgattcagaaaatgttctgtttgctgtggaactacattactgtacagggttatctgcaagtgaggtgtgtcacaatgagattgaatttcactgtctttaattctgtatctgtagacggctcagtatagataccctacgctgtccagaaaggtttggggcagaaaggactcctcctttttccatgccctaaacagacctgacaggtgaggtctgttccttttatataagtggacaaattttgagttgccacaggaggggaagtagggaggggggaaatacagttctgctctggttgtttctgttccaaatgattccatccacctttcccaatcggccttacttctcactaatttgtaggaaaaagcaagttcgtctgttgtgcgaatgactgaatgggacagagttgatttttttttttttttcctttgtgcttagttaggaaggcagtaggatgtggcctgcatgtactgtatattacagatatttgtcatgctgggatttccaactcgaatctgtgtgaaactttcattccttcagatttggcttgacaaaggcaggaggtacaaaagaagggctggtattgttctcacactggtctgctgtcgctctcagttctcgataggtcagagcagaggtggaaaaacagcatgtacggattttcagttacttaatcaaaactcaaatgtgagtgtttttatctttttacctttcatacactagccttggcctctttcctcagccttaagaaccatctgccaaaaattactgatcctcgcatgatggcagccatagtgcatagctactaaaatcagtgaccttgaacatatcttagatggggagcctcgggaaaaggtagaggagtcacgttaccatttacatgttttaaagaaagaagtgtggggattttcactgaaacgtctaggaaatctagaagtagtcctgaaggacagaaactaaactcttaccatatgtttggtaagactccagactccagctaacagtccctatggaaagatggcatcaaaaaagatagatctatatatatatataaatatatattctattacattttcagtgagtaattttggattttgcaaggtgcatttttactattgttacattatgtggaaaacttatgctgatttatttaagggggaaaaagtgtcaactctttgttatttgaaaacatgtttatttttcttgtctttattttaacctttgatagaaccattgcaatatgggggccttttgggaacggactggtatgtaaaagaaaatccattatcgagcagcattttatttacccctcccctatccctaggcacttaaccaagacaaaaagccacaatgaacatccctttttcaatgaattttataatctgcagctctattccgagcccttagcacccattccgaccatagtataatcatatcaaagggtgagaatcatttagcatgttgttgaaaggttttttttcagttgttctttttagaaaaaaagaaaaacaaaaacaaaaacaaaaaaaaaaaatcacaccattgctcacagaattggcatctcatttttgggacctcccatctttctgttttgaaaagtgtacagtagtgcagtgttcctgatgtaactttatggcttacaatgttgacatgtctcaggttcatgtgttgcgattggtgttttccgtctcaggtagattgcaaagtgtaggccccacacattggaaaaaataataataaaacaaagcaaaaacaggaaattatggattttagttgtatattggtttatgtattttttcttaagtatacagtgcactgtttgaaatgtattgttgagtattactttgtacaggttgatcactttttttagagtgaagaaagaacaaacttgttttttgtgttttttaaaggaatataaaataatgaaggatgtataattgatgccaaataagcttgttctttagtcacaccgacgtcttatttttccctttaggccagttctgtttttaaggtgtacatggacaatgttacagtgtaagaaactccatatccatatgttcccattcgcattttgtattggttcatgtataccatttttacaaaaaaaaaaagaaaaaaaagaagtactataaaatatctgtcttcttaataaaaaaaaattaatgttacaaagtgatcctttaatctctttatggacttcttatggacgcctccgagtgagagaagagatgggcctctggtcccagcttcctccttaggaccatgtacggggccaggaacgctggcagtagatgctaggacatgctgccggctgggttgctgggggccgcgctctctctccttctccgctcatccttcctgtccttgttctcttccccactctcagtggacaggtgagccaagtgctgtgccgtggctgagtctgggctcccacgtggactcagcgatttgtgcaggtgtgcgagctgtcgtggcgggcccgccggaacaggccgctcccgtagatgtgtcttccgcactcatcccctctctcaccgcccccccaccctcaccaacttccctgtgttggctgctccacctgtctcttactttgggagtttgtgtcttaacaattcattctgccttcttccttgaaagttctctctcctttcataaaaagaagacgtgagctgtggaggactggcttggctgcctgcagaagattgttctcacttgctgtttaggttgctgagacttccaggcctgggtagacagcaggatttgctctgttgtcatcgtccttgccttgcaggctgaagtgagcaatgactacacttcatggtggccgatcttataaatgtgcagataacgtctggccaggcccaaagtgcccttttcccaccatcccctcagctgtggttgatgagttccccttttctcccttggccacgtcatggggaaagttccataggaaaagcaaaggtaagctccagaaagactgaaggctgtgcatctccccttgagccacttccatcctggcctggtctcttacctgtctctgttaaaaaaaaaaaaaaaaaaaaaaaaaaaaaaaaatcagatatgcagttattgagcacctgctgtatgtccagcatggtgagggatgcagagaagtataaggcggtctctggaggccaagtagagcatcagttacatcacctgaaaacttgaagtgaccctgagccatgggtgccccactgaacacagagaagcccagagagtgctatgagaattttctggagaagggtaatcagtgaaggctggtgagtccctagacagcttcacaaagagctgggaccccagctggatcttaaaggatggtttcgtggagaaggaatgtgagtcaaaagtacagagggcaacaagcccagccagcctgctgatttgtatggggagaagaaagcaattccgtgtgcagggtgggatgggtcttgtggctgtactgaaaagtccgggcagaggactcgatacttcagtgacctctcccagcctctgccagagggcaaggagcagtagggagtactcattcattgcatctctataaaaagacccagagagatagaataaggatcaaaagcacacactagagagaggctgcctgcattcagatccctgtcccaccatgtagcagtgaaacctcgggtgagtagcccagcctacctggcttcagtctcttgctctgcaaggtggacatcaccatagcctcgaaggttgttaggaaagatcagtgagatatgcagtcagcgctcagccaaaaaggtgccagacacacactacttgttcattacatgtcagtcacaggatagaggcaaatggtgactaaaacgatagaaggttacccagggctacgaagaagcggtcactactcagagggagctctgagggctcctctgcatatagacacatcatgcccttgcaaaccacgacttagaaggtttaatgacccttttctcttcaccattcattagcagacttattccaagccacgtggcatgcagtatgtttagtctccccacccctctccctcttgtctgcagcatgaggctccagctttagctgtaccctacagaaaaaagtcccagaagttccttgagctgaggcagacaggaggtggtgactgctgtacatttgccttttgagctccacagggtatgcaaatgagaaggtgctagaagccgtccccgctcaaaggatcttgataagttgcccactccttcatttgagaagagtgcgtacgagagtgaaaatggccctcgtttcccccagagagttttcacaaatgttttggcctggcattctccaaatacatcaactggaaccctgaggtgatatgcgggtgttaattggtgcaatctttcactgtcctctgtctacctgaaatgtaattcttttaccgctgtggacttgctccatggagaaatgctcctttgattctgtcatcaagaacctcaaagaaaccatgtggccactgtgttacaggtagaaagaccctgcttaagtgaaggtatttttgttttattataaaatcatgcccaagattaatacacctttttgccaggatcccaaatacgcagccctttgtcatgaagaactggcagccacattccttcagggtgaaatttgtattcacagccatacatgtatagtttttgaagcgctggccccccgtacaggagaagaaagaagggactcttggctcatccatgaccttgtaggtcaataccatattaaagttcctgtcaggcacgcagtagtcacccagcaagtatcagctgattaaagggagaagagtcgagcacctggctgactgagccttacgttacacttaatctgaatgggccaccgatgctgtatttcaaaccttgatgtttgcatgtccatccttactacaggtggctttcaggttggccgtgaagggacaagccagccagtcctgagtttagagcgattggccctatcattctcaaggacccactggaatagtatcagggaatatcattttgggtaatggccaagcaaagccttagtattgctatcatatattgtgaggggccttcagaatgcaatatggcctcttttaaaaatgcaaactatagtccttgccttatctgtgtttatctcaaaatgttgaaatgtgcctctaataggaactgcaggattcagtccccccccaccaccccccacccaacactcacatcattacacatgagcatccctgaactgagacctgaaagcaagaatcttctctgttttcaggtgttccaaacctcagcttccagcctcttcagtacacaggaaactttgtttcatttttatgtttttatttatttttttcattcccaaaaaacataaaatgtctactgcccctggtggtcagtgctgggaaatacaactcgagccttgcctattgaaatgcagaatgtattccaacaaggaacctgacattgtctactgctttttctctcacacacatgcacacctacctgcgcctcccattttactccctcctaatccttcgaagtgttgatctggggaaggtgagaaccactactgaggggcaaatcaaccggttctctgggcccgggacttcagctgccctccagacgtgcacaggctcacagtcatatttcagacgtgaccgcctcaaatcttccttaagtgctatcttctcaggttaattaatcaccaggcttaaacttgctgttaccagcaggaagtccatcctgaagtcagcaatgttacgattgcatcttctaatactgtttatcctgcattagtgtttacttagggggaaaattgatccgtaattgatatttcagtcttccagagctggtgttggaagagcctaatgcaggcctttaatagcaagcaaatatttaaatcccttaatggttgctgaatattgaaatgtgtgactttattactctttttggtttgttttctctgtagttgtgtatttcatcgtttaaacctgcaatggatgctggcaagtgcaagtctagctaatccacaaaagctgtttgcccagacacagcagacctgattaaaaagtattgctatggaagggaatcttctgcactaatcagtctctgttagctagtgacgaaattactatccatctctctctctttctctttctctccctctctctaggcctgttttctctaacctcctctcccagaataaagtgatgagggcagctatagtgttgcaattaggaacatgaatcttttatcgtttggacaaggaagggaaaatgccattactgtcaactgaaatgtcctacttgggttttttgctcctacttccctgccaaagcccattgctgctgctgaaattgtataacattcacagctgttcttgatggcttgattcttaacacagccagaaatgtagcccgggagatgcttaagacagtttatggaaaataatagatttccttgcagagacaccaatgcatcgagaagggccttgagtcacgttagccccagccaagatcaccaattttctctctatctggcttcagttacaaaggctatgcctt

SEQ ID NO: 116010 - DNA, 4223 bp, Homo sapiens
  Payload ID: 2634
  Gene Symbol: CADM1
  Gene Name: cell adhesion molecule 1
  Uniprot ID: Q9BY67
  ENST ID: ENST00000542447
  CDS Start-End: 130-1374
ggttgggctcgcggcgctgtgattggtctgcccggactccgcctccagcgcatgtcattagcatctcattagctgtccgctcgggctccggaggcagccaacgccgccagtctgaggcaggtgcccgacatggcgagtgtagtgctgccgagcggatcccagtgtgcggcggcagcggcggcggcggcgcctcccgggctccggctccggcttctgctgttgctcttctccgccgcggcactgatccccacaggtgatgggcagaatctgtttacgaaagacgtgacagtgatcgagggagaggttgcgaccatcagttgccaagtcaataagagtgacgactctgtgattcagctactgaatcccaacaggcagaccatttatttcagggacttcaggcctttgaaggacagcaggtttcagttgctgaatttttctagcagtgaactcaaagtatcattgacaaacgtctcaatttctgatgaaggaagatacttttgccagctctataccgatcccccacaggaaagttacaccaccatcacagtcctggtcccaccacgtaatctgatgatcgatatccagaaagacactgcggtggaaggtgaggagattgaagtcaactgcactgctatggccagcaagccagccacgactatcaggtggttcaaagggaacacagagctaaaaggcaaatcggaggtggaagagtggtcagacatgtacactgtgaccagtcagctgatgctgaaggtgcacaaggaggacgatggggtcccagtgatctgccaggtggagcaccctgcggtcactggaaacctgcagacccagcggtatctagaagtacagtataagcctcaagtgcacattcagatgacttatcctctacaaggcttaacccgggaaggggacgcgcttgagttaacatgtgaagccatcgggaagccccagcctgtgatggtaacttgggtgagagtcgatgatgaaatgcctcaacacgccgtactgtctgggcccaacctgttcatcaataacctaaacaaaacagataatggtacataccgctgtgaagcttcaaacatagtggggaaagctcactcggattatatgctgtatgtatacgattcccgagcaggtgaagaaggctcgatcagggcagtggatcatgccgtgatcggtggcgtcgtggcggtggtggtgttcgccatgctgtgcttgctcatcattctggggcgctattttgccagacataaaggtacatacttcactcatgaagccaaaggagccgatgacgcagcagacgcagacacagctataatcaatgcagaaggaggacagaacaactccgaagaaaagaaagagtacttcatctagatcagcctttttgtttcaatgaggtgtccaactggccctatttagatgataaagagacagtgatattggaacttgcgagaaattcgtgtgtttttttatgaatgggtggaaaggtgtgagactgggaaggcttgggatttgctgtgtaaaaaaaaaaaaaatgttctttggaaagtacactctgctgtttgacacctcttttttcgtttgtttgtttgtttaatttttatttcttcctaccaagtcaaacttggatacttggatttagtttcagtagattgcagaaaattctgtgccttgttttttgtttgtttgttgcgttcctttcttttccccctttgtgcacatttatttcctccctctaccccaatttcggattttttccaaaatctcccattttggaatttgcctgctgggattccttagactcttttccttcccttttctgttctagttttttacttttgtttatttttatggtaactgctttctgttccaaattcagtttcataaaaggagaaccagcacagcttagatttcatagttcagaatttagtgtatccataatgcattcttctctgttgtcgtaaagatttgggtgaacaaacaatgaaaactctttgctgctgcccatgtttcaaatacttagagcagtgaagactagaaaattagactgtgattcagaaaatgttctgtttgctgtggaactacattactgtacagggttatctgcaagtgaggtgtgtcacaatgagattgaatttcactgtctttaattctgtatctgtagacggctcagtatagataccctacgctgtccagaaaggtttggggcagaaaggactcctcctttttccatgccctaaacagacctgacaggtgaggtctgttccttttatataagtggacaaattttgagttgccacaggaggggaagtagggaggggggaaatacagttctgctctggttgtttctgttccaaatgattccatccacctttcccaatcggccttacttctcactaatttgtaggaaaaagcaagttcgtctgttgtgcgaatgactgaatgggacagagttgatttttttttttttttcctttgtgcttagttaggaaggcagtaggatgtggcctgcatgtactgtatattacagatatttgtcatgctgggatttccaactcgaatctgtgtgaaactttcattccttcagatttggcttgacaaaggcaggaggtacaaaagaagggctggtattgttctcacactggtctgctgtcgctctcagttctcgataggtcagagcagaggtggaaaaacagcatgtacggattttcagttacttaatcaaaactcaaatgtgagtgtttttatctttttacctttcatacactagccttggcctctttcctcagccttaagaaccatctgccaaaaattactgatcctcgcatgatggcagccatagtgcatagctactaaaatcagtgaccttgaacatatcttagatggggagcctcgggaaaaggtagaggagtcacgttaccatttacatgttttaaagaaagaagtgtggggattttcactgaaacgtctaggaaatctagaagtagtcctgaaggacagaaactaaactcttaccatatgtttggtaagactccagactccagctaacagtccctatggaaagatggcatcaaaaaagatagatctatatatatatataaatatatattctattacattttcagtgagtaattttggattttgcaaggtgcatttttactattgttacattatgtggaaaacttatgctgatttatttaagggggaaaaagtgtcaactctttgttatttgaaaacatgtttatttttcttgtctttattttaacctttgatagaaccattgcaatatgggggccttttgggaacggactggtatgtaaaagaaaatccattatcgagcagcattttatttacccctcccctatccctaggcacttaaccaagacaaaaagccacaatgaacatccctttttcaatgaattttataatctgcagctctattccgagcccttagcacccattccgaccatagtataatcatatcaaagggtgagaatcatttagcatgttgttgaaaggttttttttcagttgttctttttagaaaaaaagaaaaacaaaaacaaaaacaaaaaaaaaaaatcacaccattgctcacagaattggcatctcatttttgggacctcccatctttctgttttgaaaagtgtacagtagtgcagtgttcctgatgtaactttatggcttacaatgttgacatgtctcaggttcatgtgttgcgattggtgttttccgtctcaggtagattgcaaagtgtaggccccacacattggaaaaaataataataaaacaaagcaaaaacaggaaattatggattttagttgtatattggtttatgtattttttcttaagtatacagtgcactgtttgaaatgtattgttgagtattactttgtacaggttgatcactttttttagagtgaagaaagaacaaacttgttttttgtgttttttaaaggaatataaaataatgaaggatgtataattgatgccaaataagcttgttctttagtcacaccgacgtcttatttttccctttaggccagttctgtttttaaggtgtacatggacaatgttacagtgtaagaaactccatatccatatgttcccattcgcattttgtattggttcatgtataccatttttacaaaaaaaaaaagaaaaaaaagaagtactataaaatatctgtcttcttaataaaaaaaaattaatgttacaaagtga

SEQ ID NO: 116011 - DNA, 581 bp, Homo sapiens
  Payload ID: 2634
  Gene Symbol: CADM1
  Gene Name: cell adhesion molecule 1
  ENST ID: ENST00000545094
  CDS Start-End: 36-581
agcagaaaactgttcagagatctgctcccattgcaatgaaggcatctggacataccagtggtgatgggcagaatctgtttacgaaagacgtgacagtgatcgagggagaggttgcgaccatcagttgccaagtcaataagagtgacgactctgtgattcagctactgaatcccaacaggcagaccatttatttcagggacttcaggcctttgaaggacagcaggtttcagttgctgaatttttctagcagtgaactcaaagtatcattgacaaacgtctcaatttctgatgaaggaagatacttttgccagctctataccgatcccccacaggaaagttacaccaccatcacagtcctggtcccaccacgtaatctgatgatcgatatccagaaagacactgcggtggaaggtgaggagattgaagtcaactgcactgctatggccagcaagccagccacgactatcaggtggttcaaagggaacacagagctaaaaggcaaatcggaggtggaagagtggtcagacatgtacactgtgaccagtcagctgatgctgaaggtgcacaaggaggacgatggg

SEQ ID NO: 116012 - DNA, 3550 bp, Homo sapiens
  Payload ID: 2634
  Gene Symbol: CADM1
  Gene Name: cell adhesion molecule 1
  Uniprot ID: Q9BY67
  ENST ID: ENST00000537058
  CDS Start-End: 22-1383
agtctgaggcaggtgcccgacatggcgagtgtagtgctgccgagcggatcccagtgtgcggcggcagcggcggcggcggcgcctcccgggctccggctccggcttctgctgttgctcttctccgccgcggcactgatccccacaggtgatgggcagaatctgtttacgaaagacgtgacagtgatcgagggagaggttgcgaccatcagttgccaagtcaataagagtgacgactctgtgattcagctactgaatcccaacaggcagaccatttatttcagggacttcaggcctttgaaggacagcaggtttcagttgctgaatttttctagcagtgaactcaaagtatcattgacaaacgtctcaatttctgatgaaggaagatacttttgccagctctataccgatcccccacaggaaagttacaccaccatcacagtcctggtcccaccacgtaatctgatgatcgatatccagaaagacactgcggtggaaggtgaggagattgaagtcaactgcactgctatggccagcaagccagccacgactatcaggtggttcaaagggaacacagagctaaaaggcaaatcggaggtggaagagtggtcagacatgtacactgtgaccagtcagctgatgctgaaggtgcacaaggaggacgatggggtcccagtgatctgccaggtggagcaccctgcggtcactggaaacctgcagacccagcggtatctagaagtacagtataagcctcaagtgcacattcagatgacttatcctctacaaggcttaacccgggaaggggacgcgcttgagttaacatgtgaagccatcgggaagccccagcctgtgatggtaacttgggtgagagtcgatgatgaaatgcctcaacacgccgtactgtctgggcccaacctgttcatcaataacctaaacaaaacagataatggtacataccgctgtgaagcttcaaacatagtggggaaagctcactcggattatatgctgtatgtatacgatccccccacaactatccctcctcccacaacaaccaccaccaccaccaccaccaccaccaccaccatccttaccatcatcacagacacaacggcgacgacagaaccagcagttcacgattcccgagcaggtgaagaaggctcgatcagggcagtggatcatgccgtgatcggtggcgtcgtggcggtggtggtgttcgccatgctgtgcttgctcatcattctggggcgctattttgccagacataaaggtacatacttcactcatgaagccaaaggagccgatgacgcagcagacgcagacacagctataatcaatgcagaaggaggacagaacaactccgaagaaaagaaagagtacttcatctagatcagcctttttgtttcaatgaggtgtccaactggccctatttagatgataaagagacagtgatattggaacttgcgagaaattcgtgtgtttttttatgaatgggtggaaaggtgtgagactgggaaggcttgggatttgctgtgtaaaaaaaaaaaaaatgttctttggaaagtacactctgctgtttgacacctcttttttcgtttgtttgtttgtttaatttttatttcttcctaccaagtcaaacttggatacttggatttagtttcagtagattgcagaaaattctgtgccttgttttttgtttgtttgttgcgttcctttcttttccccctttgtgcacatttatttcctccctctaccccaatttcggattttttccaaaatctcccattttggaatttgcctgctgggattccttagactcttttccttcccttttctgttctagttttttacttttgtttatttttatggtaactgctttctgttccaaattcagtttcataaaaggagaaccagcacagcttagatttcatagttcagaatttagtgtatccataatgcattcttctctgttgtcgtaaagatttgggtgaacaaacaatgaaaactctttgctgctgcccatgtttcaaatacttagagcagtgaagactagaaaattagactgtgattcagaaaatgttctgtttgctgtggaactacattactgtacagggttatctgcaagtgaggtgtgtcacaatgagattgaatttcactgtctttaattctgtatctgtagacggctcagtatagataccctacgctgtccagaaaggtttggggcagaaaggactcctcctttttccatgccctaaacagacctgacaggtgaggtctgttccttttatataagtggacaaattttgagttgccacaggaggggaagtagggaggggggaaatacagttctgctctggttgtttctgttccaaatgattccatccacctttcccaatcggccttacttctcactaatttgtaggaaaaagcaagttcgtctgttgtgcgaatgactgaatgggacagagttgatttttttttttttttcctttgtgcttagttaggaaggcagtaggatgtggcctgcatgtactgtatattacagatatttgtcatgctgggatttccaactcgaatctgtgtgaaactttcattccttcagatttggcttgacaaaggcaggaggtacaaaagaagggctggtattgttctcacactggtctgctgtcgctctcagttctcgataggtcagagcagaggtggaaaaacagcatgtacggattttcagttacttaatcaaaactcaaatgtgagtgtttttatctttttacctttcatacactagccttggcctctttcctcagccttaagaaccatctgccaaaaattactgatcctcgcatgatggcagccatagtgcatagctactaaaatcagtgaccttgaacatatcttagatggggagcctcgggaaaaggtagaggagtcacgttaccatttacatgttttaaagaaagaagtgtggggattttcactgaaacgtctaggaaatctagaagtagtcctgaaggacagaaactaaactcttaccatatgtttggtaagactccagactccagctaacagtccctatggaaagatggcatcaaaaaagatagatctatatatatatataaatatatattctattacattttcagtgagtaattttggattttgcaaggtgcatttttactattgttacattatgtggaaaacttatgctgatttatttaagggggaaaaagtgtcaactctttgttatttgaaaacatgtttatttttcttgtctttattttaacctttgatagaaccattgcaatatgggggccttttgggaacggactggtatgtaaaagaaaatccattatcgagcagcattttatttacccctcccctatccctaggcacttaaccaagacaaaaagccacaatgaacatccctttttcaatgaattttataatctgcagctctattccgagcccttagcacccattccgaccatagtataatcatatcaaagggtgagaatcatttagcatgttgttgaaaggttttttttcagttgttcttttt

SEQ ID NO: 116013 - DNA, 629 bp, Homo sapiens
  Payload ID: 2634
  Gene Symbol: CADM1
  Gene Name: cell adhesion molecule 1
  ENST ID: ENST00000543540
  CDS Start-End: 393-629
gcagcagagtgtgcctgtgaggccaggagcgtggagctctcaaaggaccatcttgtttttctggttttaaaccaggtgatgggcagaatctgtttacgaaagacgtgacagtgatcgagggagaggttgcgaccatcagttgccaagtcaataagagtgacgactctgtgattcagctactgaatcccaacaggcagaccatttatttcagggacttcaggcctttgaaggacagcaggtttcagttgctgaatttttctagcagtgaactcaaagtatcattgacaaacgtctcaatttctgatgaaggaagatacttttgccagctctataccgatcccccacaggaaagttacaccaccatcacagtcctggtcccaccacgtaatctgatgatcgatatccagaaagacactgcggtggaaggtgaggagattgaagtcaactgcactgctatggccagcaagccagccacgactatcaggtggttcaaagggaacacagagctaaaaggcaaatcggaggtggaagagtggtcagacatgtacactgtgaccagtcagctgatgctgaaggtgcacaaggaggacgatggggtcccagtgatctgccaggtggagcaccctgcg

SEQ ID NO: 116014 - DNA, 3520 bp, Homo sapiens
  Payload ID: 2634
  Gene Symbol: CADM1
  Gene Name: cell adhesion molecule 1
  ENST ID: ENST00000536727
  CDS Start-End: 22-1353
agtctgaggcaggtgcccgacatggcgagtgtagtgctgccgagcggatcccagtgtgcggcggcagcggcggcggcggcgcctcccgggctccggctccggcttctgctgttgctcttctccgccgcggcactgatccccacaggtgatgggcagaatctgtttacgaaagacgtgacagtgatcgagggagaggttgcgaccatcagttgccaagtcaataagagtgacgactctgtgattcagctactgaatcccaacaggcagaccatttatttcagggacttcaggcctttgaaggacagcaggtttcagttgctgaatttttctagcagtgaactcaaagtatcattgacaaacgtctcaatttctgatgaaggaagatacttttgccagctctataccgatcccccacaggaaagttacaccaccatcacagtcctggtcccaccacgtaatctgatgatcgatatccagaaagacactgcggtggaaggtgaggagattgaagtcaactgcactgctatggccagcaagccagccacgactatcaggtggttcaaagggaacacagagctaaaaggcaaatcggaggtggaagagtggtcagacatgtacactgtgaccagtcagctgatgctgaaggtgcacaaggaggacgatggggtcccagtgatctgccaggtggagcaccctgcggtcactggaaacctgcagacccagcggtatctagaagtacagtataagcctcaagtgcacattcagatgacttatcctctacaaggcttaacccgggaaggggacgcgcttgagttaacatgtgaagccatcgggaagccccagcctgtgatggtaacttgggtgagagtcgatgatgaaatgcctcaacacgccgtactgtctgggcccaacctgttcatcaataacctaaacaaaacagataatggtacataccgctgtgaagcttcaaacatagtggggaaagctcactcggattatatgctgtatgtatacgacacaacggcgacgacagaaccagcagttcacggccttactcagttgcccaattccgcagaagaactggacagtgaggacctctcagattcccgagcaggtgaagaaggctcgatcagggcagtggatcatgccgtgatcggtggcgtcgtggcggtggtggtgttcgccatgctgtgcttgctcatcattctggggcgctattttgccagacataaaggtacatacttcactcatgaagccaaaggagccgatgacgcagcagacgcagacacagctataatcaatgcagaaggaggacagaacaactccgaagaaaagaaagagtacttcatctagatcagcctttttgtttcaatgaggtgtccaactggccctatttagatgataaagagacagtgatattggaacttgcgagaaattcgtgtgtttttttatgaatgggtggaaaggtgtgagactgggaaggcttgggatttgctgtgtaaaaaaaaaaaaaatgttctttggaaagtacactctgctgtttgacacctcttttttcgtttgtttgtttgtttaatttttatttcttcctaccaagtcaaacttggatacttggatttagtttcagtagattgcagaaaattctgtgccttgttttttgtttgtttgttgcgttcctttcttttccccctttgtgcacatttatttcctccctctaccccaatttcggattttttccaaaatctcccattttggaatttgcctgctgggattccttagactcttttccttcccttttctgttctagttttttacttttgtttatttttatggtaactgctttctgttccaaattcagtttcataaaaggagaaccagcacagcttagatttcatagttcagaatttagtgtatccataatgcattcttctctgttgtcgtaaagatttgggtgaacaaacaatgaaaactctttgctgctgcccatgtttcaaatacttagagcagtgaagactagaaaattagactgtgattcagaaaatgttctgtttgctgtggaactacattactgtacagggttatctgcaagtgaggtgtgtcacaatgagattgaatttcactgtctttaattctgtatctgtagacggctcagtatagataccctacgctgtccagaaaggtttggggcagaaaggactcctcctttttccatgccctaaacagacctgacaggtgaggtctgttccttttatataagtggacaaattttgagttgccacaggaggggaagtagggaggggggaaatacagttctgctctggttgtttctgttccaaatgattccatccacctttcccaatcggccttacttctcactaatttgtaggaaaaagcaagttcgtctgttgtgcgaatgactgaatgggacagagttgatttttttttttttttcctttgtgcttagttaggaaggcagtaggatgtggcctgcatgtactgtatattacagatatttgtcatgctgggatttccaactcgaatctgtgtgaaactttcattccttcagatttggcttgacaaaggcaggaggtacaaaagaagggctggtattgttctcacactggtctgctgtcgctctcagttctcgataggtcagagcagaggtggaaaaacagcatgtacggattttcagttacttaatcaaaactcaaatgtgagtgtttttatctttttacctttcatacactagccttggcctctttcctcagccttaagaaccatctgccaaaaattactgatcctcgcatgatggcagccatagtgcatagctactaaaatcagtgaccttgaacatatcttagatggggagcctcgggaaaaggtagaggagtcacgttaccatttacatgttttaaagaaagaagtgtggggattttcactgaaacgtctaggaaatctagaagtagtcctgaaggacagaaactaaactcttaccatatgtttggtaagactccagactccagctaacagtccctatggaaagatggcatcaaaaaagatagatctatatatatatataaatatatattctattacattttcagtgagtaattttggattttgcaaggtgcatttttactattgttacattatgtggaaaacttatgctgatttatttaagggggaaaaagtgtcaactctttgttatttgaaaacatgtttatttttcttgtctttattttaacctttgatagaaccattgcaatatgggggccttttgggaacggactggtatgtaaaagaaaatccattatcgagcagcattttatttacccctcccctatccctaggcacttaaccaagacaaaaagccacaatgaacatccctttttcaatgaattttataatctgcagctctattccgagcccttagcacccattccgaccatagtataatcatatcaaagggtgagaatcatttagcatgttgttgaaaggttttttttcagttgttcttttt

SEQ ID NO: 116015 - DNA, 833 bp, Homo sapiens
  Payload ID: 2634
  Gene Symbol: CADM1
  Gene Name: cell adhesion molecule 1
  ENST ID: ENST00000542450
  CDS Start-End: 502-833
ccttcccaggatttcatcgagatcccaaagagtcactcactcacacacgatgaactgcctatacattgggactgtcaacatcaactaacaagacgagattatttattgaaccctcctacctacttctattaagtggctccttgagtttctgtgaggctgaccaaatagcttagctcaagggcaggtgatgggcagaatctgtttacgaaagacgtgacagtgatcgagggagaggttgcgaccatcagttgccaagtcaataagagtgacgactctgtgattcagctactgaatcccaacaggcagaccatttatttcagggacttcaggcctttgaaggacagcaggtttcagttgctgaatttttctagcagtgaactcaaagtatcattgacaaacgtctcaatttctgatgaaggaagatacttttgccagctctataccgatcccccacaggaaagttacaccaccatcacagtcctggtcccaccacgtaatctgatgatcgatatccagaaagacactgcggtggaaggtgaggagattgaagtcaactgcactgctatggccagcaagccagccacgactatcaggtggttcaaagggaacacagagctaaaaggcaaatcggaggtggaagagtggtcagacatgtacactgtgaccagtcagctgatgctgaaggtgcacaaggaggacgatggggtcccagtgatctgccaggtggagcaccctgcggtcactggaaacctgcagacccagcggtatctagaagtacagtataagcctcaagtgcacattcagatgacttatcctctacaaggcttaacccg

SEQ ID NO: 116016 - DNA, 565 bp, Homo sapiens
  Payload ID: 2634
  Gene Symbol: CADM1
  Gene Name: cell adhesion molecule 1
  ENST ID: ENST00000543249
  CDS Start-End: 1-565
aatccggggacctgccttcttactctccactcccgcacagcccccgttcccaaagatctattccttcggtgcaaggtgatgggcagaatctgtttacgaaagacgtgacagtgatcgagggagaggttgcgaccatcagttgccaagtcaataagagtgacgactctgtgattcagctactgaatcccaacaggcagaccatttatttcagggacttcaggcctttgaaggacagcaggtttcagttgctgaatttttctagcagtgaactcaaagtatcattgacaaacgtctcaatttctgatgaaggaagatacttttgccagctctataccgatcccccacaggaaagttacaccaccatcacagtcctggtcccaccacgtaatctgatgatcgatatccagaaagacactgcggtggaaggtgaggagattgaagtcaactgcactgctatggccagcaagccagccacgactatcaggtggttcaaagggaacacagagctaaaaggcaaatcggaggtggaagagtggtcagacatgtacactgtgaccagtcagct

SEQ ID NO: 116017 - DNA, 2373 bp, Homo sapiens
  Payload ID: 2634
  Gene Symbol: CADM1
  Gene Name: cell adhesion molecule 1
  ENST ID: ENST00000545380
  CDS Start-End: 1-1240
gagtgtagtgctgccgagcggatcccagtgtgcggcggcagcggcggcggcggcgcctcccgggctccggctccggcttctgctgttgctcttctccgccgcggcactgatccccacaggtgatgggcagaatctgtttacgaaagacgtgacagtgatcgagggagaggttgcgaccatcagttgccaagtcaataagagtgacgactctgtgattcagctactgaatcccaacaggcagaccatttatttcagggacttcaggcctttgaaggacagcaggtttcagttgctgaatttttctagcagtgaactcaaagtatcattgacaaacgtctcaatttctgatgaaggaagatacttttgccagctctataccgatcccccacaggaaagttacaccaccatcacagtcctggtcccaccacgtaatctgatgatcgatatccagaaagacactgcggtggaaggtgaggagattgaagtcaactgcactgctatggccagcaagccagccacgactatcaggtggttcaaagggaacacagagctaaaaggcaaatcggaggtggaagagtggtcagacatgtacactgtgaccagtcagctgatgctgaaggtgcacaaggaggacgatggggtcccagtgatctgccaggtggagcaccctgcggtcactggaaacctgcagacccagcggtatctagaagtacagtataagcctcaagtgcacattcagatgacttatcctctacaaggcttaacccgggaaggggacgcgcttgagttaacatgtgaagccatcgggaagccccagcctgtgatggtaacttgggtgagagtcgatgatgaaatgcctcaacacgccgtactgtctgggcccaacctgttcatcaataacctaaacaaaacagataatggtacataccgctgtgaagcttcaaacatagtggggaaagctcactcggattatatgctgtatgtatacgattcccgagcaggtgaagaaggctcgatcagggcagtggatcatgccgtgatcggtggcgtcgtggcggtggtggtgttcgccatgctgtgcttgctcatcattctggggcgctattttgccagacataaaggtacatacttcactcatgaagccaaaggagccgatgacgcagcagacgcagacacagctataatcaatgcagaaggaggacagaacaactccgaagaaaagaaagagtacttcatctagatcagcctttttgtttcaatgaggtgtccaactggccctatttagatgataaagagacagtgatattggaacttgcgagaaattcgtgtgtttttttatgaatgggtggaaaggtgtgagactgggaaggcttgggatttgctgtgtaaaaaaaaaaaaaatgttctttggaaagtacactctgctgtttgacacctcttttttcgtttgtttgtttgtttaatttttatttcttcctaccaagtcaaacttggatacttggatttagtttcagtagattgcagaaaattctgtgccttgttttttgtttgtttgttgcgttcctttcttttccccctttgtgcacatttatttcctccctctaccccaatttcggattttttccaaaatctcccattttggaatttgcctgctgggattccttagactcttttccttcccttttctgttctagttttttacttttgtttatttttatggtaactgctttctgttccaaattcagtttcataaaaggagaaccagcacagcttagatttcatagttcagaatttagtgtatccataatgcattcttctctgttgtcgtaaagatttgggtgaacaaacaatgaaaactctttgctgctgcccatgtttcaaatacttagagcagtgaagactagaaaattagactgtgattcagaaaatgttctgtttgctgtggaactacattactgtacagggttatctgcaagtgaggtgtgtcacaatgagattgaatttcactgtctttaattctgtatctgtagacggctcagtatagataccctacgctgtccagaaaggtttggggcagaaaggactcctcctttttccatgccctaaacagacctgacaggtgaggtctgttccttttatataagtggacaaattttgagttgccacaggaggggaagtagggaggggggaaatacagttctgctctggttgtttctgttccaaatgattccatccacctttcccaatcggccttacttctcactaatttgtaggaaaaagcaagttcgtctgttgtgcgaatgactgaatgggacagagttgatttttttttttttttcctttgtgcttagttaggaaggcagtaggatgtgg

SEQ ID NO: 116018 - DNA, 572 bp, Homo sapiens
  Payload ID: 2634
  Gene Symbol: CADM1
  Gene Name: cell adhesion molecule 1
  ENST ID: ENST00000540951
  CDS Start-End: 22-225
agtctgaggcaggtgcccgacatggcgagtgtagtgctgccgagcggatcccagtgtgcggcggcagcggcggcggcggcgcctcccgggctccggctccggcttctgctgttgctcttctccgccgcggcactgatccccacaggtctcacttcatcacccaggctggagtgcggtggcacaatctcggctcactgcagcctcggccttcccgtgctcaggtgatgggcagaatctgtttacgaaagacgtgacagtgatcgagggagaggttgcgaccatcagttgccaagtcaataagagtgacgactctgtgattcagctactgaatcccaacaggcagaccatttatttcagggacttcaggcctttgaaggacagcaggtttcagttgctgaatttttctagcagtgaactcaaagtatcattgacaaacgtctcaatttctgatgaaggaagatacttttgccagctctataccgatcccccacaggaaagttacaccaccatcacagtcctggtcccaccacgtaatctgatgatcgatatccagaaagacactgcggtggaag

SEQ ID NO: 116019 - DNA, 1300 bp, Homo sapiens
  Payload ID: 2634
  Gene Symbol: CADM1
  Gene Name: cell adhesion molecule 1
  ENST ID: ENST00000621043
  CDS Start-End: 1-1293
ggtgatgggcagaatctgtttacgaaagacgtgacagtgatcgagggagaggttgcgaccatcagttgccaagtcaataagagtgacgactctgtgattcagctactgaatcccaacaggcagaccatttatttcagggacttcaggcctttgaaggacagcaggtttcagttgctgaatttttctagcagtgaactcaaagtatcattgacaaacgtctcaatttctgatgaaggaagatacttttgccagctctataccgatcccccacaggaaagttacaccaccatcacagtcctggtcccaccacgtaatctgatgatcgatatccagaaagacactgcggtggaaggtgaggagattgaagtcaactgcactgctatggccagcaagccagccacgactatcaggtggttcaaagggaacacagagctaaaaggcaaatcggaggtggaagagtggtcagacatgtacactgtgaccagtcagctgatgctgaaggtgcacaaggaggacgatggggtcccagtgatctgccaggtggagcaccctgcggtcactggaaacctgcagacccagcggtatctagaagtacagtataagcctcaagtgcacattcagatgacttatcctctacaaggcttaacccgggaaggggacgcgcttgagttaacatgtgaagccatcgggaagccccagcctgtgatggtaacttgggtgagagtcgatgatgaaatgcctcaacacgccgtactgtctgggcccaacctgttcatcaataacctaaacaaaacagataatggtacataccgctgtgaagcttcaaacatagtggggaaagctcactcggattatatgctgtatgtatacgatccccccacaactatccctcctcccacaacaaccaccaccaccaccaccaccaccaccaccaccatccttaccatcatcacagacacaacggcgacgacagaaccagcagttcacggccttactcagttgcccaattccgcagaagaactggacagtgaggacctctcagattcccgagcaggtgaagaaggctcgatcagggcagtggatcatgccgtgatcggtggcgtcgtggcggtggtggtgttcgccatgctgtgcttgctcatcattctggggcgctattttgccagacataaaggtacatacttcactcatgaagccaaaggagccgatgacgcagcagacgcagacacagctataatcaatgcagaaggaggacagaacaactccgaagaaaagaaagagtacttcatctagatcagcc

SEQ ID NO: 116020 - DNA, 4054 bp, Homo sapiens
  Payload ID: 2634
  Gene Symbol: CADM1
  Gene Name: cell adhesion molecule 1
  ENST ID: ENST00000621709
  CDS Start-End: 1-1206
ggtgatgggcagaatctgtttacgaaagacgtgacagtgatcgagggagaggttgcgaccatcagttgccaagtcaataagagtgacgactctgtgattcagctactgaatcccaacaggcagaccatttatttcagggacttcaggcctttgaaggacagcaggtttcagttgctgaatttttctagcagtgaactcaaagtatcattgacaaacgtctcaatttctgatgaaggaagatacttttgccagctctataccgatcccccacaggaaagttacaccaccatcacagtcctggtcccaccacgtaatctgatgatcgatatccagaaagacactgcggtggaaggtgaggagattgaagtcaactgcactgctatggccagcaagccagccacgactatcaggtggttcaaagggaacacagagctaaaaggcaaatcggaggtggaagagtggtcagacatgtacactgtgaccagtcagctgatgctgaaggtgcacaaggaggacgatggggtcccagtgatctgccaggtggagcaccctgcggtcactggaaacctgcagacccagcggtatctagaagtacagtataagcctcaagtgcacattcagatgacttatcctctacaaggcttaacccgggaaggggacgcgcttgagttaacatgtgaagccatcgggaagccccagcctgtgatggtaacttgggtgagagtcgatgatgaaatgcctcaacacgccgtactgtctgggcccaacctgttcatcaataacctaaacaaaacagataatggtacataccgctgtgaagcttcaaacatagtggggaaagctcactcggattatatgctgtatgtatacgatccccccacaactatccctcctcccacaacaaccaccaccaccaccaccaccaccaccaccaccatccttaccatcatcacagattcccgagcaggtgaagaaggctcgatcagggcagtggatcatgccgtgatcggtggcgtcgtggcggtggtggtgttcgccatgctgtgcttgctcatcattctggggcgctattttgccagacataaaggtacatacttcactcatgaagccaaaggagccgatgacgcagcagacgcagacacagctataatcaatgcagaaggaggacagaacaactccgaagaaaagaaagagtacttcatctagatcagcctttttgtttcaatgaggtgtccaactggccctatttagatgataaagagacagtgatattggaacttgcgagaaattcgtgtgtttttttatgaatgggtggaaaggtgtgagactgggaaggcttgggatttgctgtgtaaaaaaaaaaaaaatgttctttggaaagtacactctgctgtttgacacctcttttttcgtttgtttgtttgtttaatttttatttcttcctaccaagtcaaacttggatacttggatttagtttcagtagattgcagaaaattctgtgccttgttttttgtttgtttgttgcgttcctttcttttccccctttgtgcacatttatttcctccctctaccccaatttcggattttttccaaaatctcccattttggaatttgcctgctgggattccttagactcttttccttcccttttctgttctagttttttacttttgtttatttttatggtaactgctttctgttccaaattcagtttcataaaaggagaaccagcacagcttagatttcatagttcagaatttagtgtatccataatgcattcttctctgttgtcgtaaagatttgggtgaacaaacaatgaaaactctttgctgctgcccatgtttcaaatacttagagcagtgaagactagaaaattagactgtgattcagaaaatgttctgtttgctgtggaactacattactgtacagggttatctgcaagtgaggtgtgtcacaatgagattgaatttcactgtctttaattctgtatctgtagacggctcagtatagataccctacgctgtccagaaaggtttggggcagaaaggactcctcctttttccatgccctaaacagacctgacaggtgaggtctgttccttttatataagtggacaaattttgagttgccacaggaggggaagtagggaggggggaaatacagttctgctctggttgtttctgttccaaatgattccatccacctttcccaatcggccttacttctcactaatttgtaggaaaaagcaagttcgtctgttgtgcgaatgactgaatgggacagagttgatttttttttttttttcctttgtgcttagttaggaaggcagtaggatgtggcctgcatgtactgtatattacagatatttgtcatgctgggatttccaactcgaatctgtgtgaaactttcattccttcagatttggcttgacaaaggcaggaggtacaaaagaagggctggtattgttctcacactggtctgctgtcgctctcagttctcgataggtcagagcagaggtggaaaaacagcatgtacggattttcagttacttaatcaaaactcaaatgtgagtgtttttatctttttacctttcatacactagccttggcctctttcctcagccttaagaaccatctgccaaaaattactgatcctcgcatgatggcagccatagtgcatagctactaaaatcagtgaccttgaacatatcttagatggggagcctcgggaaaaggtagaggagtcacgttaccatttacatgttttaaagaaagaagtgtggggattttcactgaaacgtctaggaaatctagaagtagtcctgaaggacagaaactaaactcttaccatatgtttggtaagactccagactccagctaacagtccctatggaaagatggcatcaaaaaagatagatctatatatatatataaatatatattctattacattttcagtgagtaattttggattttgcaaggtgcatttttactattgttacattatgtggaaaacttatgctgatttatttaagggggaaaaagtgtcaactctttgttatttgaaaacatgtttatttttcttgtctttattttaacctttgatagaaccattgcaatatgggggccttttgggaacggactggtatgtaaaagaaaatccattatcgagcagcattttatttacccctcccctatccctaggcacttaaccaagacaaaaagccacaatgaacatccctttttcaatgaattttataatctgcagctctattccgagcccttagcacccattccgaccatagtataatcatatcaaagggtgagaatcatttagcatgttgttgaaaggttttttttcagttgttctttttagaaaaaaagaaaaacaaaaacaaaaacaaaaaaaaaaaatcacaccattgctcacagaattggcatctcatttttgggacctcccatctttctgttttgaaaagtgtacagtagtgcagtgttcctgatgtaactttatggcttacaatgttgacatgtctcaggttcatgtgttgcgattggtgttttccgtctcaggtagattgcaaagtgtaggccccacacattggaaaaaataataataaaacaaagcaaaaacaggaaattatggattttagttgtatattggtttatgtattttttcttaagtatacagtgcactgtttgaaatgtattgttgagtattactttgtacaggttgatcactttttttagagtgaagaaagaacaaacttgttttttgtgttttttaaaggaatataaaataatgaaggatgtataattgatgccaaataagcttgttctttagtcacaccgacgtcttatttttccctttaggccagttctgtttttaaggtgtacatggacaatgttacagtgtaagaaactccatatccatatgttcccattcgcattttgtattggttcatgtataccatttttacaaaaaaaaaaagaaaaaaaagaagtactataaaatatctgtcttcttaataaaaaaaaattaatgttacaaagtg

SEQ ID NO: 116021 - DNA, 1042 bp, Homo sapiens
  Payload ID: 2634
  Gene Symbol: CADM1
  Gene Name: cell adhesion molecule 1
  ENST ID: ENST00000612235
  CDS Start-End: 2-1042
aggtgatgggcagaatctgtttacgaaagacgtgacagtgatcgagggagaggttgcgaccatcagttgccaagtcaataagagtgacgactctgtgattcagctactgaatcccaacaggcagaccatttatttcagggacttcaggcctttgaaggacagcaggtttcagttgctgaatttttctagcagtgaactcaaagtatcattgacaaacgtctcaatttctgatgaaggaagatacttttgccagctctataccgatcccccacaggaaagttacaccaccatcacagtcctggtcccaccacgtaatctgatgatcgatatccagaaagacactgcggtggaaggtgaggagattgaagtcaactgcactgctatggccagcaagccagccacgactatcaggtggttcaaagggaacacagagctaaaaggcaaatcggaggtggaagagtggtcagacatgtacactgtgaccagtcagctgatgctgaaggtgcacaaggaggacgatggggtcccagtgatctgccaggtggagcaccctgcggtcactggaaacctgcagacccagcggtatctagaagtacagtataagcctcaagtgcacattcagatgacttatcctctacaaggcttaacccgggaaggggacgcgcttgagttaacatgtgaagccatcgggaagccccagcctgtgatggtaacttgggtgagagtcgatgatgaaatgcctcaacacgccgtactgtctgggcccaacctgttcatcaataacctaaacaaaacagataatggtacataccgctgtgaagcttcaaacatagtggggaaagctcactcggattatatgctgtatgtatacgattcccgagcaggtgaagaaggctcgatcagggcagtggatcatgccgtgatcggtggcgtcgtggcggtggtggtgttcgccatgctgtgcttgctcatcattctggggcgctattttgccagacataaaggcctgttttctctaacctcctctcccagaataaagtga

SEQ ID NO: 116022 - DNA, 3970 bp, Homo sapiens
  Payload ID: 2634
  Gene Symbol: CADM1
  Gene Name: cell adhesion molecule 1
  ENST ID: ENST00000612471
  CDS Start-End: 1-1122
ggtgatgggcagaatctgtttacgaaagacgtgacagtgatcgagggagaggttgcgaccatcagttgccaagtcaataagagtgacgactctgtgattcagctactgaatcccaacaggcagaccatttatttcagggacttcaggcctttgaaggacagcaggtttcagttgctgaatttttctagcagtgaactcaaagtatcattgacaaacgtctcaatttctgatgaaggaagatacttttgccagctctataccgatcccccacaggaaagttacaccaccatcacagtcctggtcccaccacgtaatctgatgatcgatatccagaaagacactgcggtggaaggtgaggagattgaagtcaactgcactgctatggccagcaagccagccacgactatcaggtggttcaaagggaacacagagctaaaaggcaaatcggaggtggaagagtggtcagacatgtacactgtgaccagtcagctgatgctgaaggtgcacaaggaggacgatggggtcccagtgatctgccaggtggagcaccctgcggtcactggaaacctgcagacccagcggtatctagaagtacagtataagcctcaagtgcacattcagatgacttatcctctacaaggcttaacccgggaaggggacgcgcttgagttaacatgtgaagccatcgggaagccccagcctgtgatggtaacttgggtgagagtcgatgatgaaatgcctcaacacgccgtactgtctgggcccaacctgttcatcaataacctaaacaaaacagataatggtacataccgctgtgaagcttcaaacatagtggggaaagctcactcggattatatgctgtatgtatacgattcccgagcaggtgaagaaggctcgatcagggcagtggatcatgccgtgatcggtggcgtcgtggcggtggtggtgttcgccatgctgtgcttgctcatcattctggggcgctattttgccagacataaaggtacatacttcactcatgaagccaaaggagccgatgacgcagcagacgcagacacagctataatcaatgcagaaggaggacagaacaactccgaagaaaagaaagagtacttcatctagatcagcctttttgtttcaatgaggtgtccaactggccctatttagatgataaagagacagtgatattggaacttgcgagaaattcgtgtgtttttttatgaatgggtggaaaggtgtgagactgggaaggcttgggatttgctgtgtaaaaaaaaaaaaaatgttctttggaaagtacactctgctgtttgacacctcttttttcgtttgtttgtttgtttaatttttatttcttcctaccaagtcaaacttggatacttggatttagtttcagtagattgcagaaaattctgtgccttgttttttgtttgtttgttgcgttcctttcttttccccctttgtgcacatttatttcctccctctaccccaatttcggattttttccaaaatctcccattttggaatttgcctgctgggattccttagactcttttccttcccttttctgttctagttttttacttttgtttatttttatggtaactgctttctgttccaaattcagtttcataaaaggagaaccagcacagcttagatttcatagttcagaatttagtgtatccataatgcattcttctctgttgtcgtaaagatttgggtgaacaaacaatgaaaactctttgctgctgcccatgtttcaaatacttagagcagtgaagactagaaaattagactgtgattcagaaaatgttctgtttgctgtggaactacattactgtacagggttatctgcaagtgaggtgtgtcacaatgagattgaatttcactgtctttaattctgtatctgtagacggctcagtatagataccctacgctgtccagaaaggtttggggcagaaaggactcctcctttttccatgccctaaacagacctgacaggtgaggtctgttccttttatataagtggacaaattttgagttgccacaggaggggaagtagggaggggggaaatacagttctgctctggttgtttctgttccaaatgattccatccacctttcccaatcggccttacttctcactaatttgtaggaaaaagcaagttcgtctgttgtgcgaatgactgaatgggacagagttgatttttttttttttttcctttgtgcttagttaggaaggcagtaggatgtggcctgcatgtactgtatattacagatatttgtcatgctgggatttccaactcgaatctgtgtgaaactttcattccttcagatttggcttgacaaaggcaggaggtacaaaagaagggctggtattgttctcacactggtctgctgtcgctctcagttctcgataggtcagagcagaggtggaaaaacagcatgtacggattttcagttacttaatcaaaactcaaatgtgagtgtttttatctttttacctttcatacactagccttggcctctttcctcagccttaagaaccatctgccaaaaattactgatcctcgcatgatggcagccatagtgcatagctactaaaatcagtgaccttgaacatatcttagatggggagcctcgggaaaaggtagaggagtcacgttaccatttacatgttttaaagaaagaagtgtggggattttcactgaaacgtctaggaaatctagaagtagtcctgaaggacagaaactaaactcttaccatatgtttggtaagactccagactccagctaacagtccctatggaaagatggcatcaaaaaagatagatctatatatatatataaatatatattctattacattttcagtgagtaattttggattttgcaaggtgcatttttactattgttacattatgtggaaaacttatgctgatttatttaagggggaaaaagtgtcaactctttgttatttgaaaacatgtttatttttcttgtctttattttaacctttgatagaaccattgcaatatgggggccttttgggaacggactggtatgtaaaagaaaatccattatcgagcagcattttatttacccctcccctatccctaggcacttaaccaagacaaaaagccacaatgaacatccctttttcaatgaattttataatctgcagctctattccgagcccttagcacccattccgaccatagtataatcatatcaaagggtgagaatcatttagcatgttgttgaaaggttttttttcagttgttctttttagaaaaaaagaaaaacaaaaacaaaaacaaaaaaaaaaaatcacaccattgctcacagaattggcatctcatttttgggacctcccatctttctgttttgaaaagtgtacagtagtgcagtgttcctgatgtaactttatggcttacaatgttgacatgtctcaggttcatgtgttgcgattggtgttttccgtctcaggtagattgcaaagtgtaggccccacacattggaaaaaataataataaaacaaagcaaaaacaggaaattatggattttagttgtatattggtttatgtattttttcttaagtatacagtgcactgtttgaaatgtattgttgagtattactttgtacaggttgatcactttttttagagtgaagaaagaacaaacttgttttttgtgttttttaaaggaatataaaataatgaaggatgtataattgatgccaaataagcttgttctttagtcacaccgacgtcttatttttccctttaggccagttctgtttttaaggtgtacatggacaatgttacagtgtaagaaactccatatccatatgttcccattcgcattttgtattggttcatgtataccatttttacaaaaaaaaaaagaaaaaaaagaagtactataaaatatctgtcttcttaataaaaaaaaattaatgttacaaagtg

SEQ ID NO: 116023 - DNA, 1246 bp, Homo sapiens
  Payload ID: 2634
  Gene Symbol: CADM1
  Gene Name: cell adhesion molecule 1
  ENST ID: ENST00000616271
  CDS Start-End: 1-1239
ggtgatgggcagaatctgtttacgaaagacgtgacagtgatcgagggagaggttgcgaccatcagttgccaagtcaataagagtgacgactctgtgattcagctactgaatcccaacaggcagaccatttatttcagggacttcaggcctttgaaggacagcaggtttcagttgctgaatttttctagcagtgaactcaaagtatcattgacaaacgtctcaatttctgatgaaggaagatacttttgccagctctataccgatcccccacaggaaagttacaccaccatcacagtcctggtcccaccacgtaatctgatgatcgatatccagaaagacactgcggtggaaggtgaggagattgaagtcaactgcactgctatggccagcaagccagccacgactatcaggtggttcaaagggaacacagagctaaaaggcaaatcggaggtggaagagtggtcagacatgtacactgtgaccagtcagctgatgctgaaggtgcacaaggaggacgatggggtcccagtgatctgccaggtggagcaccctgcggtcactggaaacctgcagacccagcggtatctagaagtacagtataagcctcaagtgcacattcagatgacttatcctctacaaggcttaacccgggaaggggacgcgcttgagttaacatgtgaagccatcgggaagccccagcctgtgatggtaacttgggtgagagtcgatgatgaaatgcctcaacacgccgtactgtctgggcccaacctgttcatcaataacctaaacaaaacagataatggtacataccgctgtgaagcttcaaacatagtggggaaagctcactcggattatatgctgtatgtatacgatccccccacaactatccctcctcccacaacaaccaccaccaccaccaccaccaccaccaccaccatccttaccatcatcacagacacaacggcgacgacagaaccagcagttcacgattcccgagcaggtgaagaaggctcgatcagggcagtggatcatgccgtgatcggtggcgtcgtggcggtggtggtgttcgccatgctgtgcttgctcatcattctggggcgctattttgccagacataaaggtacatacttcactcatgaagccaaaggagccgatgacgcagcagacgcagacacagctataatcaatgcagaaggaggacagaacaactccgaagaaaagaaagagtacttcatctagatcagcc

SEQ ID NO: 116024 - DNA, 9488 bp, Homo sapiens
  Payload ID: 2635
  Gene Symbol: CADM2
  Gene Name: cell adhesion molecule 2
  Uniprot ID: Q8N3J6
  ENST ID: ENST00000383699
  CDS Start-End: 628-1842
ggtgcttcgtagagctgccgccgtcgccgctgccgctgccgccacagccgccgctgcagccggagcatccgggagccgccactgccgccgccgctgccgctgctaccgccactagcgctgcttccactgcttctacctcccctcccaggaccccgagacaccccgggcgcgagcggcagtgctgcttgcttgctcctcctctcccccagcccttcccctccgtgacctacccactccttgcagccctcgcccgcaccttctccaacaccccggcatccctgcaccacctgctcgggcagccccggcgggctctgggacttgctgtgcgcgccgagaggaaggcaagctccaaacccctgcctggaagacgggctgtcgcggctgcaccaccagcaggaggaggaggagaagaaactatttcgcgataccccattctgcgggtgctttgccgctgccgcttctgctgccgccgatccgagtccgcgggttcgaacaccgcagcggtggggacggtgggtccggcgggcgccgggaggaggacaccagcggagccctgcactctcgtgccccgctcaccagcatctacttgccccctcgttccttccccagccctttagagaagggaccatgatttggaaacgcagcgccgttctccgcttctacagtgtctgcgggctcctgctacaagcggctgcttcaaagaataaagttaaaggcagccaagggcagtttccactaacacagaatgtaaccgttgttgaaggtggaactgcaattttgacctgcagggttgatcaaaatgataacacctccctccagtggtcaaatccagctcaacagactctgtactttgacgacaagaaagctttaagggacaataggatcgagctggttcgcgcttcctggcatgaattgagtattagtgtcagtgatgtgtctctctctgatgaaggacagtacacctgttctttatttacaatgcctgtcaaaacttccaaggcatatctcaccgttctgggtgttcctgaaaagcctcagattagtggattctcatcaccagttatggagggtgacttgatgcagctgacttgcaaaacatctggtagtaaacctgcagctgatataagatggttcaaaaatgacaaagagattaaagatgtaaaatatttaaaagaagaggatgcaaatcgcaagacattcactgtcagcagcacactggacttccgagtggaccggagtgatgatggagtggcggtcatctgcagagtagatcacgaatccctcaatgccacccctcaggtagccatgcaggtgctagaaatacactatacaccatcagttaagattataccatcgactccttttccacaagaaggacagcctttaattttgacttgtgaatccaaaggaaaaccactgccagaacctgttttgtggacaaaggatggcggagaattaccagatcctgaccgaatggttgtgagtggtagggagctaaacattcttttcctgaacaaaacggataatggtacatatcgatgtgaagccacaaacaccattggccaaagcagtgcggaatatgttctcattgtgcatgatcctaatgctttggctggccagaatggccctgaccatgctctcataggaggaatagtggctgtagttgtatttgtcacgctgtgttctatctttctgcttggtcgatatctggcaaggcataaaggaacgtatttaacaaatgaagctaaaggagctgaagatgcaccagatgctgatacagccattatcaatgctgaaggcagccaagtcaatgctgaagagaaaaaagagtatttcatttaagatgcaggccaagattctgagttttactaccaggctgaatgctggagaaaactggctatcatctttcagaagtcatttctaccatcgtctgctacccttattaactcccatactgtactgctatcagtagccagtgtataccaacaatcagctgttgaaagcatcattctttaattactgtaccatccataatgcaggacatttcttactgcctaaatttcacaccattgctcttttaacatacagtgcttgaatatacagccttaacaatgttaatcatctccttggatcattatattgagtggtttttatacattaaaaaatgtatgcagagtttttttcccccattttttcccctttaagtcatagaccttatcagtttgccattggacagctttcacaagtaacaggattagggaaggacataatgtatttaagaataagtgaaggttagaggtttacaattaatgttttctacatgtctgtcttcaaagacaacatgctttggaaacatatgtcctagaaaacataaaattaaaaaaaaacactatagtgtagtttttggaatgttggagattatactggtaaagctgtatcgatttgctattgaaatatagtatttgatacaggagccatgtgtacgaattgcaatcatgacatggtattttctataattatagagatcttactattaggatattgtagcttcatttaccaataaattattccaaatgatttactgcttttggaatcacaaatatttaattcatttctctaatttgattctataatttatttgcttcataaagattcacctgcctaaacaatattgaagtatccatagggcacaattttcagacattttagtatctgtatatagtgcatataataaatccaattaaacattatttgatacatatttaacttttttggctgtatgtaattcagtcataagtaagcattttctaacgtccattatatccctttaggtattacttaaaccaatattataagtagataacatgtattagtatttttgtctgtatgtcctagcactgttcaacaacaaatttttctagttcttgttaatttttatttgttatacaatggaagcacaatgttataaggaaaggtaattttaagctaacaaccagtgcacagcctcaggttttaaattacaaccacagttgaataataacctaaaaataaattttagtttgctaaaaatttacaaattttcattttgcagttccagagctgcttacctatgttggtttgccaaaaagaagtgtttaagatatgttttctgtataaatgaactaattctttatattaaattcctgtctatgcattttgtgaggtacaaactgatgaaacagtgagtgatagagaatttctgccatgcttttaactccaaagtgaaagtctctttctctggattattttaaaattttggcgtgtttaaccattaagaaatgctgtattcttaaatatgaaacagttaatctaaagtcttattatttcttctagtaaaataaaatattgttagattagttctcattaaatttattatatgctaaagaataaaactccagttagatttaaaaaaatcccatttacaagcattgcacctttaagaagaaaacaaatatgacagtatggtagctatacttgtgatgtctgacgcatgatggcctatggttttaaaaatagtattgtggaatatatttttgggtaataagaatggttgagtgcaacatcatgtattaatatcaaatgaaagacaagggtgctgtatctttgattatttatcaaaaaagtataaatcttttaaggaaaatgttagaattttaaagtttttttttgattgttgaagcatttatcttgttgatttcttacaaaagaaaaaggacgatgtcagtcaagcagcactttttcagaatatacagaacataaataatatgatgtggttgagtgttaacataataaatcatatacagtatgacattttaaggaaataagtctgcattgatgtgattgcatgcttgtttttacagttcactccataccatctgtggaaaaatgcaataatatgttaatatagtatggtagtttgagagaatcaggtaggtgctactagacacattgaaactagaataggtttataaactgttcatatctttcaatgcataatctttagaaagactccacaaagcaaaattcatcctgttagtacaaaatggaaaggttcttattacagaagtaagttgtacaaactgcatcatcaattactatgtaaagcctaatttcaggatgcacttacaaaattgctactcttcatcgatgccgtatttacatccctcttcatttcatctatattctacttggctccaacaactaaattgttgcctaaataactcaatcattatttatagcactgtaaaattagaaatccaaaattggttgcatttcatgatttttgactcttttaacccttcagagtaatataaaatctcattagaactcttataaaaccagttagctaaaacaactagattattatactagttataaatgctggtatattataatttgtgggatctaattaaatgtttgcctattaaatatagtttgatttaaatgagacaccatgttctgaactggagaaaacaatatcaatgaagtcatattttcatacctttaaaaattatttaattttcaaccaaacaaaaaataaattgtaaaaattatgctcatttctattccaacaagtcagaaaataatgacataatatttctaaatgagaatgatgtcaatttcattgtctggaacatgcacacttgtgtgcacatagagtcaatttctgtctcttctaagtgagcacagtaggtagggaactcaatggaagcagtgtgcacacacacacacccttagtagaatatggagcattattctttaccaaaagtagctattctctgccagtgtactgtttacagtgtaaattgattgtcctccgtcaaaatcaagtctaagcggcattttacttttcttttcttttttattttccatttttgggtgttctagataggattattatcaaaagtaggaggaaaaagaaatgtttgtgagtgcaagattaaagacagagcgcatgagcagagtactgatggtgtgcgtgtttgtgtgtgtgtatatgtgtgtgtataagagagaaagagaaatcgaaaagagagagaaatttcaacttgttttcttttaccagagaatccaagaagcagtttaaggaacctgatattggagtttaatctagaaactggatgatctcatattgattcatgatgcttaatctttcattgaaactccacaattaaaataacaaatagagaaagaaaactaactttcctaaatatggcaaagaaactaacacctcatttatttttatttctttgtaaaaatataaatatctcaatcaaaagtacaggctcatttgtaattatgtactcatgattgtaacagcattgagatttcatataggcacatgtatagcagctgtttgacagtgatggctcttccatgtaacatagcagttatcgtgtaatttagtgccacttattgcaaagtgttaccaaggggaacatttcaaatgccttttgtttttctttggacatcaaggtaatttagtggacaacaaatattaaattttacattatgctttttaattgtggagaaaatgcaaaacctcatgtcttaccacaactttcccatggtattgctaattacttagagtctctaaaattgcccaatattatttccctttgcaaatggtaatttctgataaaacaatacaaaacaaaaaaaaagcagtaatcacagccaaataaatgaaacacctaatgagaattactgttgagtaatgctttttattaagtggcacaaagtacacactaaaaactatgcaaaatataggtaactacagtgtacgtacatgtaagtatcttgtacttgctgtgtatggatgttggaaacccatgtaattataatatgcattttgaatattgggaaagaggaaatcttagtgtagataatagaatttgttttgaaatatacactggcaatattgaaatatactcagtgcaatatctgcagttctattgctggatacttaatgcaaagggattttaaagaattcttcagcaagatccaagaggttgctaatcttcacctctcacatactaaagcattcattaaaaatacaactaattcaaggacaagttaagtttttcttattaatgtgacacagtaacatttttatttggattagtttttggtgttattgcagagaaagaaataacctgagttttaaatttcgattcatatctcattgaattgggaattcttcaattttgtttgaaatgtgtgcatgttttcatagattgtagcaagtacaaatgtattcaatgaaagaacatagggtagttttaatagttaaagtcactatatcttaatgggaattttaaaatatcttttctttttctattcattttttccctttctctctctattctacccccaaacaagccctttgcactcatacccttccaaaggcaatggattgaaagtagcaagataataaagagagttaaaggggacaacatataacaatgggttctaaaatcatcagcatttttatgtattgagattattaatattgaatgcaatagttattggatatagctggtaagttctctgccatgcatacttacaataatccttctacctctcacttttaacatgggctatgatacttcaatataaatagaggaaataattatttaccagatatcccaggaagcattcttatggaactattataacagtgcactccccaccccctgggaaatctcaaaagccaagttcttcagtgtattctatggtgtatgaatctgcatttgtttttccttttctatcattagcttttcctaaaggcaaaatattataactttataagaatagtccttctcctgcctatttaatatttcaatgttaatataattgtattggtttttaaaaataattaaaatggcaacactttgcgatccaatctgatatttaatttttaaaatgtaacaatttcttataaattcatgctgtgttttaagtaaaaatcatgtatatgaattattttaccaagtagtattatctgcacgagacaaatttaagtattttaaaaatcatccttattaataaataatcctcatataatgcacagtattgccacaaatgcccacttcattttgtctgcatagacatattaagaatttttcaatgatgtaatttaattatcctaaaagaaatgacagattcttctgtaggaaaaaataaaaacatgaatatctcaaattataatggttaatctctaaaatatgcttaaagtaagatgtttctatgttatgtggttatgttatcaataatatttggttgatcttcacatattttatatgcatatatatatcaagaagttatatatatataactcaagaaactcaagttatatatatatgtcaagaaatgtatgattattttggagagaatgggcccaaatgtgaaaaagatataaaaaaaacaaaaaaaacaaaaaaaaaacactattttcccctacgaaatatactgtatatttcaaaagaagaaaagttaaaagatatttgaagattgcaggggcaaaacaaaaacctaccagggctcagcacttaagcacttttcccacatccagggtcaaagcagcagtaactacatggacttttaagtgcggtatgaaatgcaacattacgcttacaaacagtactgtcaaacctcaaatgctttctttcttcagatgctttttcgtgtacatgatactagtagacacttttctctttatatttactgatagtgaaaatcatacgcaataaaatattgatgtttgaaggcagtggtcaccaattggttaaaaaactatgaaatgtaaactgaattgttatatctctatcctttttgcttttctctgtgtttttaatgtatggaataaatctcataaatagaaagaaaaataatctagaaatttttcaaagctagtactctttctccttataaatgtacacaattttaatctttttacaaatttatttaactgtacctactgtacttattgtagattcaatgacgcagttaagtcatcacccaaggatttatgaatttgagattactgacctgttttcttcatattgcattcacatcaatatttgtgaatttgttgttcagcttttcattcaaacaaaaaatattccctcaagaaagctccatttttatcataaacatttcaacataaccaacattagaacaagtctgccatgttaaaaataatttaaagacttatctctgaaaacggtatccagaaacgcaggtgttcccagtaatgtagcttcaaaaataaaatgtgctatttatatgacatgaaattcataacttttggaagggtatatttatgacagcataaaaaataaattctgtgctataaagaagatccaacaaattaaccatataagcacagaaaatagagaaacacagttattgaatctactcttgtcattaacattttcaaaaaacaaaatgcatattgtaatatttggtacatgacacttgcatgttgatatgcctatatacttacaaagtattcaatgtgtacttagcggcgcttaaaatatgtcatgtacaactcttataaacatttttacagggttcccatttgcacttcatctttcagtaaagtcttgtcagaaaaaaattgtctgataaatatggaaaaataaaatttgaattttagttatctgttggacattactgaattgtctattcatttagtacattttcttaaccttgaaaacagacattgaaagatggaactttcttttttccagtgacaggtcattaaatcgatggtacaaaacatacttctttatgccaaacacattattttgaatacctttttttcaacttcatacattatccatccattttagttttcctcgatgatgcccattttctttgtaaatttctaagtggaagttttaaaaattaagcatcagtaaaataaatgttatcttatttgtacaacatttaatcgttattccttggaatatatgaaccttgtaaagtgatgactaagggtcaaaaaaaatgttgctgacttagggaaatttgcttgagaatgccaaaattttaaaactctgtaaaggtaattttacattcacttatgtgtgtttactaatgttgagtaggaacagaagcaaaaatacctaaacctattttttttaaccttcacactctaaccagtattatatatttcagctacctaagataatgcaattaatcatatatccaacctaagcttctgccaataaggatttcagataagcttttaaatttatggaggattttctttgtgtctttggaagttcacttaccataaagtattttatagtctactttaaataacagattttgttacacagggtaagccaaaggctgtacaagatttagtgtcattgggtctcatatttgtgttagaccatgaaatattccattaaaatttatctgtaaatacaaggcaa

SEQ ID NO: 116025 - DNA, 1314 bp, Homo sapiens
  Payload ID: 2635
  Gene Symbol: CADM2
  Gene Name: cell adhesion molecule 2
  Uniprot ID: Q8N3J6
  ENST ID: ENST00000405615
  CDS Start-End: 1-1314
atgtttgttctcttcttgtgcaacctttccttggtaccagcggctgcttcaaagaataaagttaaaggcagccaagggcagtttccactaacacagaatgtaaccgttgttgaaggtggaactgcaattttgacctgcagggttgatcaaaatgataacacctccctccagtggtcaaatccagctcaacagactctgtactttgacgacaagaaagctttaagggacaataggatcgagctggttcgcgcttcctggcatgaattgagtattagtgtcagtgatgtgtctctctctgatgaaggacagtacacctgttctttatttacaatgcctgtcaaaacttccaaggcatatctcaccgttctgggtgttcctgaaaagcctcagattagtggattctcatcaccagttatggagggtgacttgatgcagctgacttgcaaaacatctggtagtaaacctgcagctgatataagatggttcaaaaatgacaaagagattaaagatgtaaaatatttaaaagaagaggatgcaaatcgcaagacattcactgtcagcagcacactggacttccgagtggaccggagtgatgatggagtggcggtcatctgcagagtagatcacgaatccctcaatgccacccctcaggtagccatgcaggtgctagaaatacactatacaccatcagttaagattataccatcgactccttttccacaagaaggacagcctttaattttgacttgtgaatccaaaggaaaaccactgccagaacctgttttgtggacaaaggatggcggagaattaccagatcctgaccgaatggttgtgagtggtagggagctaaacattcttttcctgaacaaaacggataatggtacatatcgatgtgaagccacaaacaccattggccaaagcagtgcggaatatgttctcattgtgcatgatgttcccaacactttgcttcccactactatcatcccctcccttaccactgcaacagtcacaaccactgtagccataacaaccagcccaaccacatctgcaacaaccagcagcatcagagatcctaatgctttggctggccagaatggccctgaccatgctctcataggaggaatagtggctgtagttgtatttgtcacgctgtgttctatctttctgcttggtcgatatctggcaaggcataaaggaacgtatttaacaaatgaagctaaaggagctgaagatgcaccagatgctgatacagccattatcaatgctgaaggcagccaagtcaatgctgaagagaaaaaagagtatttcatttaa

SEQ ID NO: 116026 - DNA, 1422 bp, Homo sapiens
  Payload ID: 2635
  Gene Symbol: CADM2
  Gene Name: cell adhesion molecule 2
  Uniprot ID: Q8N3J6
  ENST ID: ENST00000407528
  CDS Start-End: 63-1370
gccccgctcaccagcatctacttgccccctcgttccttccccagccctttagagaagggaccatgatttggaaacgcagcgccgttctccgcttctacagtgtctgcgggctcctgctacaaggcagccaagggcagtttccactaacacagaatgtaaccgttgttgaaggtggaactgcaattttgacctgcagggttgatcaaaatgataacacctccctccagtggtcaaatccagctcaacagactctgtactttgacgacaagaaagctttaagggacaataggatcgagctggttcgcgcttcctggcatgaattgagtattagtgtcagtgatgtgtctctctctgatgaaggacagtacacctgttctttatttacaatgcctgtcaaaacttccaaggcatatctcaccgttctgggtgttcctgaaaagcctcagattagtggattctcatcaccagttatggagggtgacttgatgcagctgacttgcaaaacatctggtagtaaacctgcagctgatataagatggttcaaaaatgacaaagagattaaagatgtaaaatatttaaaagaagaggatgcaaatcgcaagacattcactgtcagcagcacactggacttccgagtggaccggagtgatgatggagtggcggtcatctgcagagtagatcacgaatccctcaatgccacccctcaggtagccatgcaggtgctagaaatacactatacaccatcagttaagattataccatcgactccttttccacaagaaggacagcctttaattttgacttgtgaatccaaaggaaaaccactgccagaacctgttttgtggacaaaggatggcggagaattaccagatcctgaccgaatggttgtgagtggtagggagctaaacattcttttcctgaacaaaacggataatggtacatatcgatgtgaagccacaaacaccattggccaaagcagtgcggaatatgttctcattgtgcatgatgttcccaacactttgcttcccactactatcatcccctcccttaccactgcaacagtcacaaccactgtagccataacaaccagcccaaccacatctgcaacaaccagcagcatcagagatcctaatgctttggctggccagaatggccctgaccatgctctcataggaggaatagtggctgtagttgtatttgtcacgctgtgttctatctttctgcttggtcgatatctggcaaggcataaaggaacgtatttaacaaatgaagctaaaggagctgaagatgcaccagatgctgatacagccattatcaatgctgaaggcagccaagtcaatgctgaagagaaaaaagagtatttcatttaagatgcaggccaagattctgagttttactaccaggctgaatgctggagaaaac

SEQ ID NO: 116027 - DNA, 2546 bp, Homo sapiens
  Payload ID: 2636
  Gene Symbol: CADM3
  Gene Name: cell adhesion molecule 3
  Uniprot ID: Q8N126
  ENST ID: ENST00000368124
  CDS Start-End: 158-1456
agcgccggctccctcccggtccccacctcggccccgggctccgaagcggctcgggggcgccctttcggtcaacatcgtagtccaccccctccccatccccagcccccggggattcaggctcgccagcgcccagccagggagccggccgggaagcgcgatgggggccccagccgcctcgctcctgctcctgctcctgctgttcgcctgctgctgggcgcccggcggggccaacctctcccaggacggctactggcaggagcaggatttggagctgggaactctggctccactcgacgaggccatcagctccacagtctggagcagccctgacatgctggccagtcaagacagccagccctggacatctgatgaaacagtggtggctggtggcaccgtggtgctcaagtgccaagtgaaagatcacgaggactcatccctgcaatggtctaaccctgctcagcagactctctactttggggagaagagagcccttcgagataatcgaattcagctggttacctctacgccccacgagctcagcatcagcatcagcaatgtggccctggcagacgagggcgagtacacctgctcaatcttcactatgcctgtgcgaactgccaagtccctcgtcactgtgctaggaattccacagaagcccatcatcactggttataaatcttcattacgggaaaaagacacagccaccctaaactgtcagtcttctgggagcaagcctgcagcccggctcacctggagaaagggtgaccaagaactccacggagaaccaacccgcatacaggaagatcccaatggtaaaaccttcactgtcagcagctcggtgacattccaggttacccgggaggatgatggggcgagcatcgtgtgctctgtgaaccatgaatctctaaagggagctgacagatccacctctcaacgcattgaagttttatacacaccaactgcgatgattaggccagaccctccccatcctcgtgagggccagaagctgttgctacactgtgagggtcgcggcaatccagtcccccagcagtacctatgggagaaggagggcagtgtgccacccctgaagatgacccaggagagtgccctgatcttccctttcctcaacaagagtgacagtggcacctacggctgcacagccaccagcaacatgggcagctacaaggcctactacaccctcaatgttaatgaccccagtccggtgccctcctcctccagcacctaccacgccatcatcggtgggatcgtggctttcattgtcttcctgctgctcatcatgctcatcttccttggccactacttgatccggcacaaaggaacctacctgacacatgaggcaaaaggctccgacgatgctccagacgcggacacggccatcatcaatgcagaaggcgggcagtcaggaggggacgacaagaaggaatatttcatctagaggcgcctgcccacttcctgcgccccccaggggccctgtggggactgctggggccgtcaccaacccggacttgtacagagcaaccgcagggccgcccctcccgcttgctccccagcccacccacccccctgtacagaatgtctgctttgggtgcggttttgtactcggtttggaatggggagggaggagggcggggggaggggagggttgccctcagccctttccgtggcttctctgcatttgggttattattatttttgtaacaatcccaaatcaaatctgtctccaggctggagaggcaggagccctggggtgagaaaagcaaaaaacaaacaaaaaacaaaaccctggagtgttaggaggagagtgaaggtagaggggtgaggaagggtaaggggcagggctggtttcagctgggggctctcaccagccctcctttcagcctctacaacagagcagcttcccagacttctccaggaacccagaaacgggatggttgtcggcaaaggttgggagtggcttttcctctggtagccacacacctgagcactacggacagggaggcaggtgccaccttgacacctctcttccatagcaatgggaaagtgatgagtgcgggagtcctgaggagatgtggcctgcagacaacatgcagccatgcagggacccaggactgtaacctggggaggacgcgggtccctgcaaggaagagtagatttggagaggaaggatggaggtggactctcaccccattccccccggaaatgaacaaagccgggccctttccataggaactgcccttggagatagcagagtgtggctgcccctccttgctccagcagcagtgggagaggcactgctctggggcctgaactgcctctgcttccccccctgaggggcccctcactcttacccaagactctggattgttgcacggcaaccactcctcccatggcattgctcagcaactacttctcccttcccggccaccctgtgcccccttcctggtcccaacgccagcccttcatccttcctccctcagcagccaggcagacataacaacaaaactactaaaaggagcttcactgca

SEQ ID NO: 116028 - DNA, 3745 bp, Homo sapiens
  Payload ID: 2636
  Gene Symbol: CADM3
  Gene Name: cell adhesion molecule 3
  Uniprot ID: Q8N126
  ENST ID: ENST00000368125
  CDS Start-End: 158-1354
agcgccggctccctcccggtccccacctcggccccgggctccgaagcggctcgggggcgccctttcggtcaacatcgtagtccaccccctccccatccccagcccccggggattcaggctcgccagcgcccagccagggagccggccgggaagcgcgatgggggccccagccgcctcgctcctgctcctgctcctgctgttcgcctgctgctgggcgcccggcggggccaacctctcccaggacgacagccagccctggacatctgatgaaacagtggtggctggtggcaccgtggtgctcaagtgccaagtgaaagatcacgaggactcatccctgcaatggtctaaccctgctcagcagactctctactttggggagaagagagcccttcgagataatcgaattcagctggttacctctacgccccacgagctcagcatcagcatcagcaatgtggccctggcagacgagggcgagtacacctgctcaatcttcactatgcctgtgcgaactgccaagtccctcgtcactgtgctaggaattccacagaagcccatcatcactggttataaatcttcattacgggaaaaagacacagccaccctaaactgtcagtcttctgggagcaagcctgcagcccggctcacctggagaaagggtgaccaagaactccacggagaaccaacccgcatacaggaagatcccaatggtaaaaccttcactgtcagcagctcggtgacattccaggttacccgggaggatgatggggcgagcatcgtgtgctctgtgaaccatgaatctctaaagggagctgacagatccacctctcaacgcattgaagttttatacacaccaactgcgatgattaggccagaccctccccatcctcgtgagggccagaagctgttgctacactgtgagggtcgcggcaatccagtcccccagcagtacctatgggagaaggagggcagtgtgccacccctgaagatgacccaggagagtgccctgatcttccctttcctcaacaagagtgacagtggcacctacggctgcacagccaccagcaacatgggcagctacaaggcctactacaccctcaatgttaatgaccccagtccggtgccctcctcctccagcacctaccacgccatcatcggtgggatcgtggctttcattgtcttcctgctgctcatcatgctcatcttccttggccactacttgatccggcacaaaggaacctacctgacacatgaggcaaaaggctccgacgatgctccagacgcggacacggccatcatcaatgcagaaggcgggcagtcaggaggggacgacaagaaggaatatttcatctagaggcgcctgcccacttcctgcgccccccaggggccctgtggggactgctggggccgtcaccaacccggacttgtacagagcaaccgcagggccgcccctcccgcttgctccccagcccacccacccccctgtacagaatgtctgctttgggtgcggttttgtactcggtttggaatggggagggaggagggcggggggaggggagggttgccctcagccctttccgtggcttctctgcatttgggttattattatttttgtaacaatcccaaatcaaatctgtctccaggctggagaggcaggagccctggggtgagaaaagcaaaaaacaaacaaaaaacaaaaccctggagtgttaggaggagagtgaaggtagaggggtgaggaagggtaaggggcagggctggtttcagctgggggctctcaccagccctcctttcagcctctacaacagagcagcttcccagacttctccaggaacccagaaacgggatggttgtcggcaaaggttgggagtggcttttcctctggtagccacacacctgagcactacggacagggaggcaggtgccaccttgacacctctcttccatagcaatgggaaagtgatgagtgcgggagtcctgaggagatgtggcctgcagacaacatgcagccatgcagggacccaggactgtaacctggggaggacgcgggtccctgcaaggaagagtagatttggagaggaaggatggaggtggactctcaccccattccccccggaaatgaacaaagccgggccctttccataggaactgcccttggagatagcagagtgtggctgcccctccttgctccagcagcagtgggagaggcactgctctggggcctgaactgcctctgcttccccccctgaggggcccctcactcttacccaagactctggattgttgcacggcaaccactcctcccatggcattgctcagcaactacttctcccttcccggccaccctgtgcccccttcctggtcccaacgccagcccttcatccttcctccctcagcagccaggcagacataacaacaaaactactaaaaggagcttcactgcagtgagctgtttcctgcccaaactaagggaataatgtgaactgtgtgcatgtgtgtggtgtgtatgcatgtgtgcatgtgtgtgtgtgtgtgtgcatgtgtgtgagtgagtgagaggcagagcgaggaactgaggaggagggctaagagccaggggtcctgggcaagtggacagggctgtgggacatgttggggaggctttgggaatggggtattcctagtcagggttcacacctcacctgggatgttgttccatgctggtatttcctctgccacccccaatgcccatcggtcttggagaaaggagtccccgggtgtgtgtttgcccagctgtccattctatctctcccttaaacacagagcattcagcccttccctggatttccctcctctgagccatggagtcagtgccacagcctttgctatgcacctctcaggcctctccttggcgttgaccctggaaagacctaccaccacctattttttcccatagtctgtacccagtgagttgaaggctgggtccccacccttccttttgatttcctgtcttccttctcgtggccccagctggttgctgtggagatgaggttcctggtcctccctgtcctggctggactgccccgcctcagatccaggatgcccttggcatcgctcccaccctcccccagcttttcctccctggtctgacaatgggcatgcaaaaaggggcagctgcaatctagcaggcctgcccacccccttcagttcaggtaatacagttgtgaatcttccagccgctggttagggccttgggcaccacaggcagcccctcacctaagccggggcctactcctcttacaacagcaagagagccctggggccccaggcctgttgagcttcttgtctcccagcacccgcttttgggaaaatgacttttcctcttcaagctgaaccactctgtccatattacacagaagccatatttgtacgggggggtgggagggagaggggctgttgtgctgtgtgtgtctgtccaggggtgggggggtgggggaagggagcagggaggggaccgtgtatctttataatctttctaactctcctgtgctaatctcagaggggtcaccctcaatatatctggattatccgtgtcattcagctgcctcctttctggtcctcttgctgctgctgggatgtgtgtatgtgagggtcttcttcccataccccttgcacctggtgcctggtgcctcaaaaggtggtgtgtcccttgccaggccactctcaagaatatctatgtacagcaacaatataactctacaaggga

SEQ ID NO: 116029 - DNA, 711 bp, Homo sapiens
  Payload ID: 2636
  Gene Symbol: CADM3
  Gene Name: cell adhesion molecule 3
  ENST ID: ENST00000416746
  CDS Start-End: 8-711
aagcgcgatgggggccccagccgcctcgctcctgctcctgctcctgctgttcgcctgctgctgggcgcccggcggggccaacctctcccaggacgacagccagccctggacatctgatgaaacagtggtggctggtggcaccgtggtgctcaagtgccaagtgaaagatcacgaggactcatccctgcaatggtctaaccctgctcagcagactctctactttggggagaagagagcccttcgagataatcgaattcagctggttacctctacgccccacgagctcagcatcagcatcagcaatgtggccctggcagacgagggcgagtacacctgctcaatcttcactatgcctgtgcgaactgccaagtccctcgtcactgtgctaggaattccacagaagcccatcatcactggttataaatcttcattacgggaaaaagacacagccaccctaaactgtcagtcttctgggagcaagcctgcagcccggctcacctggagaaagggtgaccaagaactccacggagaaccaacccgcatacaggaagatcccaatgacacaccaactgcgatgattaggccagaccctccccatcctcgtgagggccagaagctgttgctacactgtgagggtcgcggcaatccagtcccccagcagtacctatgggagaaggagggcagtgtgccacccctgaagatgacccagga

SEQ ID NO: 116030 - DNA, 2178 bp, Homo sapiens
  Payload ID: 2637
  Gene Symbol: CADM4
  Gene Name: cell adhesion molecule 4
  Uniprot ID: Q8NFZ8
  ENST ID: ENST00000222374
  CDS Start-End: 50-1216
tgcaggtgccgggccgggagcgagcggcggcggcggcggcggcggcaccatgggccgggcccggcgcttccagtggccgctgctgctgctgtgggcggccgcggcggggccaggggcaggacaggaagtacagacagagaacgtgacagtggctgagggtggggtggctgagatcacctgccgtctgcaccagtatgatgggtccatagttgtcatccagaacccagcccggcagaccctcttcttcaatggcacccgtgccttgaaggatgagcgtttccagcttgaggagttctccccacgccgggtgcggatccggctctcagatgcccgcctggaggacgaggggggctatttctgccagctctacacagaagacacccaccaccagattgccacgctcacggtactagtggccccagagaatcctgtggtggaggtccgggagcaggcggtagagggcggcgaggtggagctcagctgcctcgttccgcggtcccgtccggctgccaccctgcgctggtaccgggaccgcaaggagctgaaaggagtgagcagcagccaggaaaatggcaaggtctggagcgtggcaagcacagtacggtttcgtgtggaccgtaaggacgacggtggtatcatcatctgtgaggcgcagaaccaggcgctgccctccggacacagcaagcagacgcagtacgtgctggatgtgcagtactcccccacggcccggattcatgcctcccaagctgtggtgagggagggagacacgctggtgttgacgtgtgctgtcacggggaaccccaggccaaaccagatccgctggaaccgcgggaatgagtctttgccggagagggcggaggccgtgggagagacgctcacgctgccgggtctggtatccgcggataacggcacctacacttgcgaggcgtccaataagcacggccatgcgagggcgctctacgtacttgtggtctacgaccctggtgcggtggtagaggctcagacgtcggttccctatgccattgtgggcggcatcctggcgctgctggtgtttctgatcatatgtgtgctagtgggcatggtctggtgctcggtacggcagaagggttcctatctgacccacgaagccagtggcttggatgaacagggagaagcaagagaagccttcctcaatggcagcgacggacacaagaggaaagaggaattcttcatctgaccctatccccaccccaggcctaggcctgggcctgggctggggtcccccccactgccagctgcaaggaaccagcaaagacatttaccagagtctgggatggtgggcttctccccccaccactaacacctcagacgcttgggcagggatgggggtgttggatgcctggatctctgtaagggccagaagtgagggcccagaggtctgggtcccccagggggcaggggccaaaggtccagaccccccaagtccagtgagggcagtagggattgggttgggggaagataactgggggaaggccagggcccctaggctacaaaaccaggtcttgtggggagggggtcagtttctgggaagggtggggggggcagggaaggggaacacagatttctttgggggtcctagaccccatgccagccattgtaagagttccacagagctctgggcacttctttgcaaagccatgtttgcacggtggggggatgggtggggggagggcgtggaaatagggattctgtgtctttgtgtcataactttgatgggggcagtgagggagacagccccaacccttttctccaatcccccttccccaggttcctgggctccccttctctctaccttctcccccaacgtctgtcccatccatatttgtctctctgtccacccactcctgggggggccttccccatctctcctccaggccccccggggagggggaaaggagtttggggaggattcgtggtcttcatggttttatatataatatattaaaaaatcaaaagtctgtatgaaaatatcagattgcacccccctctccccattcctggcttttgccccctttttcttgttaaaaaacaaaaaacaaaaaacaaaaaaccacacacacattttgtacggggtggggaggggaatggggagggggtttggcaatctcactaaccaccattaaactgaggagagaacaa

SEQ ID NO: 116031 - DNA, 8023 bp, Homo sapiens
  Payload ID: 2638
  Gene Symbol: CHL1
  Gene Name: cell adhesion molecule L1-like
  Uniprot ID: O00533
  ENST ID: ENST00000256509
  CDS Start-End: 643-4317
agggatcctacctcttttgaccggagatgttgaaaagcacgaccaaagtttttggcttggtctcttgctttccacaacgagataaagtctgaagcctgtaactctccctgtcccgcgggagcgtgcaaagggagggaagataagcggcgtgggtgaggggtggcggcgcagaacccaggaagggagcagaggcgagagccagcctccggcaggagggcgtagaccccggtgccagccagaacggctccagccttcccgcggccagagagccagcggcgggaggggacgggcgggacctccgcggacagccccgggtgcggaccagcgggcagcggccggcgagaccctccctggatccgcccagagcttaccggaccctgcgcgcccccgtcccggctcccggccggctcgggggagaaggcgcccgaggggaggcgccggacagatcgcgtttcggaggcggcgcaggtgctgtaaactgcaaaccataatcctgtcttaatactgcaaacaaatcatagtggaactaaggggaacttaatttactgtttccaggttaactaaggtctcagctgtaaaccaaaagtgagaggagacattaagattttcattcttaccgggttgtcttcttcctgaagagcaatggagccgcttttacttggaagaggactaatcgtatatctaatgttcctcctgttaaaattctcaaaagcaattgaaataccatcttcagttcaacaggttccaacaatcataaaacagtcaaaagtccaagttgcctttcccttcgatgagtattttcaaattgaatgtgaagctaaaggaaatccagaaccaacattttcgtggactaaggatggcaaccctttttatttcactgaccatcggataattccatcgaacaattcaggaacattcaggatcccaaacgaggggcacatatctcactttcaagggaaataccgctgctttgcttcaaataaactgggaatcgctatgtcagaagaaatagaatttatagttccaagtgttccaaaattcccaaaagaaaaaattgaccctcttgaagtggaggagggagatccaattgtcctcccatgcaatcctcccaaaggcctcccacctttacacatttattggatgaatattgaattagaacacatcgaacaagatgaaagagtatacatgagccaaaagggagatctatacttcgcaaacgtggaagaaaaggacagtcgcaatgactactgttgctttgctgcatttccaagattaaggactattgtacagaaaatgccaatgaaactaacagttaacagtttaaagcatgctaatgactcaagttcatccacagaaattggttccaaggcaaattccatcaagcaaagaaaacccaaactgctgttgcctcccactgagagtggcagtgagtcttcaattaccatcctcaaaggggaaatcttgctgcttgagtgttttgctgaaggcttgccaactccacaggttgattggaacaaaattggtggtgacttaccaaaggggagagaaacaaaagaaaattatggcaagactttgaagatagagaatgtctcctaccaggacaaaggaaattatcgctgcacagccagcaatttcttgggaacagccactcacgattttcacgttatagtagaagagcctcctcgctggacaaagaagcctcagagtgctgtgtatagcaccggaagcaatggcatcttgttatgtgaggctgaaggagaacctcaacccacaatcaagtggagagtcaatggctccccagttgacaatcatccatttgctggtgatgttgtcttccccagggaaatcagttttaccaaccttcaaccaaatcatactgctgtgtaccagtgtgaagcctcaaatgtccatggaactatccttgccaatgccaatattgatgttgtggatgtccgtccattgatacaaaccaaagatggagaaaattacgctacagtggttgggtacagtgctttcttacattgcgagttctttgcttcacctgaggcagtcgtgtcctggcagaaggtggaagaagtgaaacccctggagggcaggcggtatcatatctatgaaaatggcacattgcagatcaacagaaccaccgaagaagatgctgggtcttactcatgttgggtagaaaatgctataggaaaaactgcagtcacagccaatttggatattagaaatgctacaaaacttagagtttctcctaagaatcctcgtatccccaaattgcatatgcttgaattacattgtgaaagcaaatgtgactcacatttgaaacacagtttgaagttgtcctggagtaaagatggagaagcctttgaaattaatggcacagaagatggcaggataattattgatggagctaatttgaccatatctaatgtaactttagaggaccaaggtatttactgctgttcagctcatactgctctagacagtgctgccgatataactcaagtaactgttcttgatgttccggatccaccagaaaaccttcacttgtctgaaagacagaacaggagtgttcggctgacctgggaagctggagctgaccacaacagcaatattagcgagtatattgttgaatttgaaggaaacaaagaagagcctggaaggtgggaggaactgaccagagtccaaggaaagaaaaccacagttatcttacctttggctccatttgtgagataccagttcagggtcatagccgtgaacgaagtagggagaagtcagcctagccagccgtcagaccatcatgaaacaccaccagcagctccagataggaatccacaaaacataagggttcaagcctctcaacccaaggaaatgattataaagtgggagcctttgaaatccatggagcagaatggaccaggcctagagtacagagtgacctggaagccacagggagccccagtggagtgggaagaagaaacagtcacaaaccacacattgcgggtgatgacgcctgctgtctatgccccttatgatgtcaaggtccaggctatcaatcaactaggatctgggcctgaccctcagtcagtgactctctattctggagaagactatcctgatacagctccagtgatccatggggtggacgttataaacagtacattagttaaagttacctggtcaacagttccaaaggacagagtacatggacgtctgaaaggctatcagataaattggtggaaaacaaaaagtctgttggatggaagaacacatcccaaagaagtgaacattctaagattttcaggacaaagaaactctggaatggttccttccttagatgcctttagtgaatttcatttaacagtcttagcctataactctaaaggagctggtcctgaaagtgagccttatatatttcaaacaccagaaggagtacctgaacagccaacttttctaaaggtcatcaaagttgataaagacactgccactttatcttggggactacctaagaaattaaatggaaacttaactggctatcttttgcaatatcagataataaatgacacctacgagattggagaattaaatgatattaacattacaactccatcaaagcccagctggcacctctcaaacctgaatgcaactaccaagtacaaattctacttgagggcttgcacttcacagggctgtggaaaaccgatcacggaggaaagctccaccttaggagaagggagtaaaggtatcgggaagatatcaggagtaaatcttactcaaaagactcacccaatagaggtatttgagccgggagctgaacatatagttcgcctaatgactaagaattggggcgataatgatagcatttttcaagatgtaattgagacaagagggagagaatatgctggtttatatgatgacatctccactcaaggctggtttattggactgatgtgtgcgattgctcttctcacactactattattaactgtttgctttgtgaagaggaatagaggtggaaagtactcagttaaagaaaaggaagatttgcatccagacccagaaattcagtcagtaaaagatgaaacctttggtgaatacagtgacagtgatgaaaagcctctcaaaggaagccttcggtcccttaatagggatatgcagcctactgaaagtgctgacagcttagtcgaatacggagagggagaccatggtctcttcagtgaagatggatcatttattggtgcctacgctggatctaaggagaagggatctgttgaaagcaatggaagttctacagcaacttttccccttcgggcataaacacaacatatgtaagcaacgctactggttcaccccaaccttccatatttatctgttcaaaggagcaagaactttcatataggaatagaaacatgctggccgaagatttcatccagaagtcaacatcctgcaattatgttgaaaagagtagtactttcttcaaaatataaaatgccaagcacttcaggcctatgttttgcttatattgttttcaggtgctcaaaatgcaaaacacaaaacaaatcctgcatttagatacacctcaactaaatccaaagtccccattcagtatattccatatttgcctgattttactattcggtgtgtttgcatagatgttgctacttggtgggtttttctccgtatgcacattggtatacagtctctgagaactggcttggtgactttgcttcactacaggttaaaagaccataagcaaactggttatttaaaatgtaaaaaggaatatgaaagtcttattaaaacacttcattgaaaatatacagtctaaatttattatttaaattttactagcaaaagtcttaggtgaacaatcaactagtatttgttgagctcctatttgcccagagatggtcatatttaaacagaagtatacgtttttcagtttcaacatgaatttttttatttctgtcagttatgacatccacaagcatcactttttgtgtctgttttttttttttttcttggactaaattcaactgcatggaagcggtggtcagaaggttgttttatacgagaacaggcagaaagtgcccattgttcaggattctaatagctacatctacttaatatcttcatttctaaattgactgcttttacctttttctcatgtttatataatggtatgcttgcatatatttcatgaatacattgtacatattatgttaatatttacacaatttaaaatatagatgtgttttattttgaagtgagaaaatgaacattaacaggcatgtttgtacagctagaatatattagtaagatactgtttttcgtcattccagagctacaactaataacacgaggttccaaagctgaagactttgtataaagtatttgggttttgttcttgtattgctttctttcaacagtttcaaaataaaatatcatataaatattgagggaaatgttttcatatttttcaaaataggtttttattgttgaatgtacatctaccccagcccctcaaaagaaaaactgtttacatagaaattcctacacatacgtttgcgtatatgttattttaaacatctttgtggtgagaattttttccccgatattctccttctgtcaaagtcagaacaaattcagggaatttattttctggcagttgtgctccagtccttttaaaattgtacatgaacatgttttagaaacaatatggaggatgatgcatacatgtcggtcaagttcagcgctcgacattttatggaaagatttttttaaccttaccacgaaatacttaactactgtttaagtgaattgacttatttcactttagtttttgaactgtgattattggtatactgttatatcctcaacttggatttatggtaaccccttatagttcatggagaccaaaatttggggtatttataatagtcagcgcaggaatgcacatggaatatctacttgtccttttgaacctcacgagtcatccagaatgtatagacaggaaaagcatgtcttatttaaaactgtaatttatgggctcaggatctgaccgcagtcccgggagtaagcatttcaaagggggaaggcagtgtggtccctaccctgtgtgaatgtgaggatgtagacatccatcagtgcaactcgagctccatcctcctccgatttctaaggttccagttttctggagggacagtcatcatgttttgatttatctgggagaaaactgtggtgcacagcttgtgaggagggcaaggttgtgacgttcgagcttagttctggtgttattctgtctcctcttctttgtcatcagccaaaacgtggtttttaaagagagtcatgcaggttagaaataatgtcaaaaatatttaggaatttaataacctttaagtcagaaactaaaacaaatactgaaatattagctcttcctacacttcgtgttcccctttagctgcctgaaaatcaagattgctcctgctcagatcttctgagtggctaaaacttatggatatgaaaaatgagattgaatgatgactatgctttgctatcattgttacctttcctcaatactatttggcaactactgggactcttcagcacaaaaggaatagatctatgattgaccctgattttaattgtgaaattatatgattcatatattttatgaatcagaataaccttcaaataaaataaatctaagtcggttaaaatggatttcatgattttccctcagaaaatgagtaacagagtccacggcgtgcaatggtaattataaattggtgatgcttgtttgcaaattgcccactcgtgataagtcaacagccaatatttaaaactttgttcgttactggctttaccctaactttctctagtctactgtcaatatcattttaatgtaattgattgtatatagtctcaagaatggttggtgggcatgagttcctagagaactgtccaagggttgggaaaatccaaattctcttcctggttccagcactgattttgtacataaacattaggcaggttgcttaacctttttatttcaaactctctcaactctaaagtgctaataataatctcagttaccttatctttgtcacagggtgttcttttttatgaagaaaaatttgaaaatgataaaagctaagatgccttctaacttcataagcaaacctttaactaattatgtatctgaaagtcacccccacataccaactcaacttttttcctgtgaacacataaatatatttttatagaaaaacaaatctacataaaataaatctactgtttagtgagcagtatgatttgtacatgccattgaaaattattaatcagaagaaaattaagcagggtctttgctatacaaaagtgttttccactaattttgcatgcgtatttataagaaaaatgtgaatttggtggttttattctatcggtataaaggcattgatattttagatgcacccgtgtttgtaaaaatgtagagcacaatggaattatgctggaagtctcaaataatatttttttcctattttatactcatggaagagataagctaaagaggggacaataatgagaaatgttggtgtgcttttctaagcatttaaaacataattgccaattgaaaccctaaatatgtttacataccattaagatatgattcatgtaacaatgttaaattaattataatgggattgggtttgttatctgtggtagtatatatcctagtgttcctatagtgaaataagtagggttcagccaaagctttctttgttttgtaccttaaattgttcgattacgtcatcaaaagagatgaaaggtatgtagaacaggttcacgtgattacctttttcttttggcttggattaatattcatagtagaactttataaaacgtgtttgtattgtaggtggtgtttgtattatgcttatgactatgtatggtttgaaaatattttcattatacatgaaattcaactttccaaataaaagttctacttcatgtaatccaaaaa

SEQ ID NO: 116032 - DNA, 5235 bp, Homo sapiens
  Payload ID: 2638
  Gene Symbol: CHL1
  Gene Name: cell adhesion molecule L1-like
  Uniprot ID: O00533
  ENST ID: ENST00000397491
  CDS Start-End: 468-4094
caggaagggagcagaggcgagagccagcctccggcaggagggcgtagaccccggtgccagccagaacggctccagccttcccgcggccagagagccagcggcgggaggggacgggcgggacctccgcggacagccccgggtgcggaccagcgggcagcggccggcgagaccctccctggatccgcccagagcttaccggaccctgcgcgcccccgtcccggctcccggccggctcgggggagaaggcgcccgaggggaggcgccggacagatcgcgtttcggaggcggcgcaggtgctgtaaactgcaaaccataatcctgtcttaatactgcaaacaaatcatagtggaactaaggggaacttaatttactgtttccaggttaactaaggtctcagctgtaaaccaaaagtgagaggagacattaagattttcattcttaccgggttgtcttcttcctgaagagcaatggagccgcttttacttggaagaggactaatcgtatatctaatgttcctcctgttaaaattctcaaaagcaattgaaataccatcttcagttcaacaggttccaacaatcataaaacagtcaaaagtccaagttgcctttcccttcgatgagtattttcaaattgaatgtgaagctaaaggaaatccagaaccaacattttcgtggactaaggatggcaaccctttttatttcactgaccatcggataattccatcgaacaattcaggaacattcaggatcccaaacgaggggcacatatctcactttcaagggaaataccgctgctttgcttcaaataaactgggaatcgctatgtcagaagaaatagaatttatagttccaagtgttccaaaattcccaaaagaaaaaattgaccctcttgaagtggaggagggagatccaattgtcctcccatgcaatcctcccaaaggcctcccacctttacacatttattggatgaatattgaattagaacacatcgaacaagatgaaagagtatacatgagccaaaagggagatctatacttcgcaaacgtggaagaaaaggacagtcgcaatgactactgttgctttgctgcatttccaagattaaggactattgtacagaaaatgccaatgaaactaacagttaacagttcaaattccatcaagcaaagaaaacccaaactgctgttgcctcccactgagagtggcagtgagtcttcaattaccatcctcaaaggggaaatcttgctgcttgagtgttttgctgaaggcttgccaactccacaggttgattggaacaaaattggtggtgacttaccaaaggggagagaaacaaaagaaaattatggcaagactttgaagatagagaatgtctcctaccaggacaaaggaaattatcgctgcacagccagcaatttcttgggaacagccactcacgattttcacgttatagtagaagagcctcctcgctggacaaagaagcctcagagtgctgtgtatagcaccggaagcaatggcatcttgttatgtgaggctgaaggagaacctcaacccacaatcaagtggagagtcaatggctccccagttgacaatcatccatttgctggtgatgttgtcttccccagggaaatcagttttaccaaccttcaaccaaatcatactgctgtgtaccagtgtgaagcctcaaatgtccatggaactatccttgccaatgccaatattgatgttgtggatgtccgtccattgatacaaaccaaagatggagaaaattacgctacagtggttgggtacagtgctttcttacattgcgagttctttgcttcacctgaggcagtcgtgtcctggcagaaggtggaagaagtgaaacccctggagggcaggcggtatcatatctatgaaaatggcacattgcagatcaacagaaccaccgaagaagatgctgggtcttactcatgttgggtagaaaatgctataggaaaaactgcagtcacagccaatttggatattagaaatgctacaaaacttagagtttctcctaagaatcctcgtatccccaaattgcatatgcttgaattacattgtgaaagcaaatgtgactcacatttgaaacacagtttgaagttgtcctggagtaaagatggagaagcctttgaaattaatggcacagaagatggcaggataattattgatggagctaatttgaccatatctaatgtaactttagaggaccaaggtatttactgctgttcagctcatactgctctagacagtgctgccgatataactcaagtaactgttcttgatgttccggatccaccagaaaaccttcacttgtctgaaagacagaacaggagtgttcggctgacctgggaagctggagctgaccacaacagcaatattagcgagtatattgttgaatttgaaggaaacaaagaagagcctggaaggtgggaggaactgaccagagtccaaggaaagaaaaccacagttatcttacctttggctccatttgtgagataccagttcagggtcatagccgtgaacgaagtagggagaagtcagcctagccagccgtcagaccatcatgaaacaccaccagcagctccagataggaatccacaaaacataagggttcaagcctctcaacccaaggaaatgattataaagtgggagcctttgaaatccatggagcagaatggaccaggcctagagtacagagtgacctggaagccacagggagccccagtggagtgggaagaagaaacagtcacaaaccacacattgcgggtgatgacgcctgctgtctatgccccttatgatgtcaaggtccaggctatcaatcaactaggatctgggcctgaccctcagtcagtgactctctattctggagaagactatcctgatacagctccagtgatccatggggtggacgttataaacagtacattagttaaagttacctggtcaacagttccaaaggacagagtacatggacgtctgaaaggctatcagataaattggtggaaaacaaaaagtctgttggatggaagaacacatcccaaagaagtgaacattctaagattttcaggacaaagaaactctggaatggttccttccttagatgcctttagtgaatttcatttaacagtcttagcctataactctaaaggagctggtcctgaaagtgagccttatatatttcaaacaccagaaggagtacctgaacagccaacttttctaaaggtcatcaaagttgataaagacactgccactttatcttggggactacctaagaaattaaatggaaacttaactggctatcttttgcaatatcagataataaatgacacctacgagattggagaattaaatgatattaacattacaactccatcaaagcccagctggcacctctcaaacctgaatgcaactaccaagtacaaattctacttgagggcttgcacttcacagggctgtggaaaaccgatcacggaggaaagctccaccttaggagaagggagtaaaggtatcgggaagatatcaggagtaaatcttactcaaaagactcacccaatagaggtatttgagccgggagctgaacatatagttcgcctaatgactaagaattggggcgataatgatagcatttttcaagatgtaattgagacaagagggagagaatatgctggtttatatgatgacatctccactcaaggctggtttattggactgatgtgtgcgattgctcttctcacactactattattaactgtttgctttgtgaagaggaatagaggtggaaagtactcagttaaagaaaaggaagatttgcatccagacccagaaattcagtcagtaaaagatgaaacctttggtgaatacagtgacagtgatgaaaagcctctcaaaggaagccttcggtcccttaatagggatatgcagcctactgaaagtgctgacagcttagtcgaatacggagagggagaccatggtctcttcagtgaagatggatcatttattggtgcctacgctggatctaaggagaagggatctgttgaaagcaatggaagttctacagcaacttttccccttcgggcataaacacaacatatgtaagcaacgctactggttcaccccaaccttccatatttatctgttcaaaggagcaagaactttcatataggaatagaaacatgctggccgaagatttcatccagaagtcaacatcctgcaattatgttgaaaagagtagtactttcttcaaaatataaaatgccaagcacttcaggcctatgttttgcttatattgttttcaggtgctcaaaatgcaaaacacaaaacaaatcctgcatttagatacacctcaactaaatccaaagtccccattcagtatattccatatttgcctgattttactattcggtgtgtttgcatagatgttgctacttggtgggtttttctccgtatgcacattggtatacagtctctgagaactggcttggtgactttgcttcactacaggttaaaagaccataagcaaactggttatttaaaatgtaaaaaggaatatgaaagtcttattaaaacacttcattgaaaatatacagtctaaatttattatttaaattttactagcaaaagtcttaggtgaacaatcaactagtatttgttgagctcctatttgcccagagatggtcatatttaaacagaagtatacgtttttcagtttcaacatgaatttttttatttctgtcagttatgacatccacaagcatcactttttgtgtctgttttttttttttttcttggactaaattcaactgcatggaagcggtggtcagaaggttgttttatacgagaacaggcagaaagtgcccattgttcaggattctaatagctacatctacttaatatcttcatttctaaattgactgcttttacctttttctcatgtttatataatggtatgcttgcatatatttcatgaatacattgtacatattatgttaatatttacacaatttaaaatatagatgtgttttattttgaagtgagaaaatgaacattaacaggcatgtttgtacagctagaatatattagtaagatactgtttttcgtcattccagagctacaactaataacacgaggttccaaagctgaagactttgtataaagtatttgggttttgttcttgtattgctttctttcaacagtttcaaaataaaatatcatataaatattg

SEQ ID NO: 116033 - DNA, 594 bp, Homo sapiens
  Payload ID: 2638
  Gene Symbol: CHL1
  Gene Name: cell adhesion molecule L1-like
  ENST ID: ENST00000449294
  CDS Start-End: 341-594
agaaagggaagaaggcaaacaggaaaagagccagaagagcagagttcccagcagaggggaagcaagtggagaggcggtgtggaggaatcaatttggccccatctggaatggacagaaggctagaacctgcagtgcagtgagtgtgggagaaaccagctggcacaaggtgctgtaaactgcaaaccataatcctgtcttaatactgcaaacaaatcatagtggaactaaggggaacttaatttactgtttccaggttaactaaggtctcagctgtaaaccaaaagtgagaggagacattaagattttcattcttaccgggttgtcttcttcctgaagagcaatggagccgcttttacttggaagaggactaatcgtatatctaatgttcctcctgttaaaattctcaaaagcaattgaaataccatcttcagttcaacaggttccaacaatcataaaacagtcaaaagtccaagttgcctttcccttcgatgagtattttcaaattgaatgtgaagctaaaggaaatccagaaccaacattttcgtggactaaggatggcaaccctttttatttcactgaccatcggataattcc

SEQ ID NO: 116034 - DNA, 1104 bp, Homo sapiens
  Payload ID: 2638
  Gene Symbol: CHL1
  Gene Name: cell adhesion molecule L1-like
  ENST ID: ENST00000445697
  CDS Start-End: 1-1076
agtcagtgactctctattctggagaagactatcctgatacagctccagtgatccatggggtggacgttataaacagtacattagttaaagttacctggtcaacagttccaaaggacagagtacatggacgtctgaaaggctatcagataaattggtggaaaacaaaaagtctgttggatggaagaacacatcccaaagaagtgaacattctaagattttcaggacaaagaaactctggaatggttccttccttagatgcctttagtgaatttcatttaacagtcttagcctataactctaaaggagctggtcctgaaagtgagccttatatatttcaaacaccagaaggagtacctgaacagccaacttttctaaaggtcatcaaagttgataaagacactgccactttatcttggggactacctaagaaattaaatggaaacttaactggctatcttttgcaatatcagataataaatgacacctacgagattggagaattaaatgatattaacattacaactccatcaaagcccagctggcacctctcaaacctgaatgcaactaccaagtacaaattctacttgagggcttgcacttcacagggctgtggaaaaccgatcacggaggaaagctccaccttaggagaagggaaatatgctggtttatatgatgacatctccactcaaggctggtttattggactgatgtgtgcgattgctcttctcacactactattattaactgtttgctttgtgaagaggaatagaggtggaaagtactcagttaaagaaaaggaagatttgcatccagacccagaaattcagtcagtaaaagatgaaacctttggtgaatacagtgacagtgatgaaaagcctctcaaaggaagccttcggtcccttaatagggatatgcagcctactgaaagtgctgacagcttagtcgaatacggagagggagaccatggtctcttcagtgaagatggatcatttattggtgcctacgctggatctaaggagaagggatctgttgaaagcaatggaagttctacagcaacttttccccttcgggcataaacacaacatatgtaagcaacgctactgg

SEQ ID NO: 116035 - DNA, 723 bp, Homo sapiens
  Payload ID: 2638
  Gene Symbol: CHL1
  Gene Name: cell adhesion molecule L1-like
  ENST ID: ENST00000435603
  CDS Start-End: 181-723
gagccacagtgtctcagccaggggcagggccggggaactcctgcgaaaaaccacgggccggaggagcagcagccgcgcgggcccagtttccaggttaactaaggtctcagctgtaaaccaaaagtgagaggagacattaagattttcattcttaccgggttgtcttcttcctgaagagcaatggagccgcttttacttggaagaggactaatcgtatatctaatgttcctcctgttaaaattctcaaaagcaattgaaataccatcttcagttcaacaggttccaacaatcataaaacagtcaaaagtccaagttgcctttcccttcgatgagtattttcaaattgaatgtgaagctaaaggaaatccagaaccaacattttcgtggactaaggatggcaaccctttttatttcactgaccatcggataattccatcgaacaattcaggaacattcaggatcccaaacgaggggcacatatctcactttcaagggaaataccgctgctttgcttcaaataaactgggaatcgctatgtcagaagaaatagaatttatagttccaagtgttccaaaattcccaaaagaaaaaattgaccctcttgaagtggaggagggagatccaattgtcctcccatgcaatcctcccaaaggcctcccacctttacacatttattggatgaatattgaattagaacacatcgaacaagatgaaagagtatac

SEQ ID NO: 116036 - DNA, 572 bp, Homo sapiens
  Payload ID: 2638
  Gene Symbol: CHL1
  Gene Name: cell adhesion molecule L1-like
  ENST ID: ENST00000427688
  CDS Start-End: 376-572
agaggcgagagccagcctccggcaggagggcgtagaccccggtgccagccagaacggctccagccttcccgcggccagagagccagcggcgggaggggacgggcgggacctccgcggacagccccgggtgcggaccagcgggcagcggccggcgagaccctccctggatccgcccagagcttaccggaccctgcgcgcccccgtcccggctcccggccggctcgggggagaaggcgcccgaggggaggcgccggacagatcgcgtttcggaggcggcgcagtttccaggttaactaaggtctcagctgtaaaccaaaagtgagaggagacattaagattttcattcttaccgggttgtcttcttcctgaagagcaatggagccgcttttacttggaagaggactaatcgtatatctaatgttcctcctgttaaaattctcaaaagcaattgaaataccatcttcagttcaacaggttccaacaatcataaaacagtcaaaagtccaagttgcctttcccttcgatgagtattttcaaattgaatgtgaagctaaaggaaatccagaaccaac

SEQ ID NO: 116037 - DNA, 3960 bp, Homo sapiens
  Payload ID: 2638
  Gene Symbol: CHL1
  Gene Name: cell adhesion molecule L1-like
  ENST ID: ENST00000453040
  CDS Start-End: 4-285
aaaatgccgccagcctggagcggggaatccatggaccgtggggttgtggggttggggagcacgaaaacccagagaggggctagagctccacctccccagaccgccgaggggcgagagggcgcgccgggggccgtggttgccatggctcctggtagcggagcccggggggctggagatgccggtcgcggatggtcccttcttcctctttgtgcctctctctttctctcgctttttttttttttttggagtgtgagtgtgcgtggggaggcagcacggagaaagtgattaatttggggagcagggattggagccgggaggctggggaaagccagcccctccgttcccactctccgggctcgctgcgagccacagtgtctcagccaggggcagggccggggaactcctgcgaaaaaccacgggccggaggagcagcagccgcgcgggcccaggtgctgtaaactgcaaaccataatcctgtcttaatactgcaaacaaatcatagtggaactaaggggaacttaatttactgtttccaggttaactaaggtctcagctgtaaaccaaaagtgagaggagacattaagattttcattcttaccgggttgtcttcttcctgaagagcaatggagccgcttttacttggaagaggactaatcgtatatctaatgttcctcctgttaaaattctcaaaagcaattgaaataccatcttcagttcaacaggttccaacaatcataaaacagtcaaaagtccaagttgcctttcccttcgatgagtattttcaaattgaatgtgaagctaaaggaaatccagaaccaacattttcgtggactaaggatggcaaccctttttatttcactgaccatcggataattccatcgaacaattcaggaacattcaggatcccaaacgaggggcacatatctcactttcaagggaaataccgctgctttgcttcaaataaactgggaatcgctatgtcagaagaaatagaatttatagttccaagtgttccaaaattcccaaaagaaaaaattgaccctcttgaagtggaggagggagatccaattgtcctcccatgcaatcctcccaaaggcctcccacctttacacatttattggatgaatattgaattagaacacatcgaacaagatgaaagagtatacatgagccaaaagggagatctatacttcgcaaacgtggaagaaaaggacagtcgcaatgactactgttgctttgctgcatttccaagattaaggactattgtacagaaaatgccaatgaaactaacagttaacagttcaaattccatcaagcaaagaaaacccaaactgctgttgcctcccactgagagtggcagtgagtcttcaattaccatcctcaaaggggaaatcttgctgcttgagtgttttgctgaaggcttgccaactccacaggttgattggaacaaaattggtggtgacttaccaaaggggagagaaacaaaagaaaattatggcaagactttgaagatagagaatgtctcctaccaggacaaaggaaattatcgctgcacagccagcaatttcttgggaacagccactcacgattttcacgttatagtagaagagcctcctcgctggacaaagaagcctcagagtgctgtgtatagcaccggaagcaatggcatcttgttatgtgaggctgaaggagaacctcaacccacaatcaagtggagagtcaatggctccccagttgacaatcatccatttgctggtgatgttgtcttccccagggaaatcagttttaccaaccttcaaccaaatcatactgctgtgtaccagtgtgaagcctcaaatgtccatggaactatccttgccaatgccaatattgatgttgtggatgtccgtccattgatacaaaccaaagatggagaaaattacgctacagtggttgggtacagtgctttcttacattgcgagttctttgcttcacctgaggcagtcgtgtcctggcagaaggtggaagaagtgaaacccctggagggcaggcggtatcatatctatgaaaatggcacattgcagatcaacagaaccaccgaagaagatgctgggtcttactcatgttgggtagaaaatgctataggaaaaactgcagtcacagccaatttggatattagaaatgctacaaaacttagagtttctcctaagaatcctcgtatccccaaattgcatatgcttgaattacattgtgaaagcaaatgtgactcacatttgaaacacagtttgaagttgtcctggagtaaagatggagaagcctttgaaattaatggcacagaagatggcaggataattattgatggagctaatttgaccatatctaatgtaactttagaggaccaaggtatttactgctgttcagctcatactgctctagacagtgctgccgatataactcaagtaactgttcttgatgttccggatccaccagaaaaccttcacttgtctgaaagacagaacaggagtgttcggctgacctgggaagctggagctgaccacaacagcaatattagcgagtatattgttgaatttgaaggaaacaaagaagagcctggaaggtgggaggaactgaccagagtccaaggaaagaaaaccacagttatcttacctttggctccatttgtgagataccagttcagggtcatagccgtgaacgaagtagggagaagtcagcctagccagccgtcagaccatcatgaaacaccaccagcagctccagataggaatccacaaaacataagggttcaagcctctcaacccaaggaaatgattataaagtgggagcctttgaaatccatggagcagaatggaccaggcctagagtacagagtgacctggaagccacagggagccccagtggagtgggaagaagaaacagtcacaaaccacacattgcgggtgatgacgcctgctgtctatgccccttatgatgtcaaggtccaggctatcaatcaactaggatctgggcctgaccctcagtcagtgactctctattctggagaagactatcctgatacagctccagtgatccatggggtggacgttataaacagtacattagttaaagttacctggtcaacagttccaaaggacagagtacatggacgtctgaaaggctatcagataaattggtggaaaacaaaaagtctgttggatggaagaacacatcccaaagaagtgaacattctaagattttcaggacaaagaaactctggaatggttccttccttagatgcctttagtgaatttcatttaacagtcttagcctataactctaaaggagctggtcctgaaagtgagccttatatatttcaaacaccagaaggagtacctgaacagccaacttttctaaaggtcatcaaagttgataaagacactgccactttatcttggggactacctaagaaattaaatggaaacttaactggctatcttttgcaatatcagataataaatgacacctacgagattggagaattaaatgatattaacattacaactccatcaaagcccagctggcacctctcaaacctgaatgcaactaccaagtacaaattctacttgagggcttgcacttcacagggctgtggaaaaccgatcacggaggaaagctccaccttaggagaagggagtaaaggtatcgggaagatatcaggagtaaatcttactcaaaagactcacccaatagaggtatttgagccgggagctgaacatatagttcgcctaatgactaagaattggggcgataatgatagcatttttcaagatgtaattgagacaagagggagagaatatgctggtttatatgatgacatctccactcaaggctggtttattggactgatgtgtgcgattgctcttctcacactactattattaactgtttgctttgtgaagaggaatagaggtggaaagtactcag

SEQ ID NO: 116038 - DNA, 543 bp, Homo sapiens
  Payload ID: 2638
  Gene Symbol: CHL1
  Gene Name: cell adhesion molecule L1-like
  ENST ID: ENST00000421198
  CDS Start-End: 254-543
tcggacagctcggggtcagtcgacggagcacaccgggcgcccgaatccgccgggtcccactcacgcccgccggccgccggtgctgtaaactgcaaaccataatcctgtcttaatactgcaaacaaatcatagtggaactaaggggaacttaatttactgtttccaggttaactaaggtctcagctgtaaaccaaaagtgagaggagacattaagattttcattcttaccgggttgtcttcttcctgaagagcaatggagccgcttttacttggaagaggactaatcgtatatctaatgttcctcctgttaaaattctcaaaagcaattgaaataccatcttcagttcaacaggttccaacaatcataaaacagtcaaaagtccaagttgcctttcccttcgatgagtattttcaaattgaatgtgaagctaaaggaaatccagaaccaacattttcgtggactaaggatggcaaccctttttatttcactgaccatcggataattccatcgaacaattcaggaacattcaggatcccaaacga

SEQ ID NO: 116039 - DNA, 7311 bp, Homo sapiens
  Payload ID: 2638
  Gene Symbol: CHL1
  Gene Name: cell adhesion molecule L1-like
  ENST ID: ENST00000620033
  CDS Start-End: 95-3610
tttccaggttaactaaggtctcagctgtaaaccaaaagtgagaggagacattaagattttcattcttaccgggttgtcttcttcctgaagagcaatggagccgcttttacttggaagaggactaatcgtatatctaatgttcctcctgttaaaattctcaaaagcaattgaaataccatcttcagttcaacaggttccaacaatcataaaacagtcaaaagtccaagttgcctttcccttcgatgagtattttcaaattgaatgtgaagctaaaggaaatccagaaccaacattttcgtggactaaggatggcaaccctttttatttcactgaccatcggataattccatcgaacaattcaggaacattcaggatcccaaacgaggggcacatatctcactttcaagggaaataccgctgctttgcttcaaataaactgggaatcgctatgtcagaagaaatagaatttatagttccaagtgttccaaaattcccaaaagaaaaaattgaccctcttgaagtggaggagggagatccaattgtcctcccatgcaatcctcccaaaggcctcccacctttacacatttattggatgaatattgaattagaacacatcgaacaagatgaaagagtatacatgagccaaaagggagatctatacttcgcaaacgtggaagaaaaggacagtcgcaatgactactgttgctttgctgcatttccaagattaaggactattgtacagaaaatgccaatgaaactaacagttaacagtttaaagcatgctaatgactcaagttcatccacagaaattggttccaaggcaaattccatcaagcaaagaaaacccaaactgctgttgcctcccactgagagtggcagtgagtcttcaattaccatcctcaaaggggaaatcttgctgcttgagtgttttgctgaaggcttgccaactccacaggttgattggaacaaaattggtggtgacttaccaaaggggagagaaacaaaagaaaattatggcaagactttgaagatagagaatgtctcctaccaggacaaaggaaattatcgctgcacagccagcaatttcttgggaacagccactcacgattttcacgttatagtagaagagcctcctcgctggacaaagaagcctcagagtgctgtgtatagcaccggaagcaatggcatcttgttatgtgaggctgaaggagaacctcaacccacaatcaagtggagagtcaatggctccccagttgacaatcatccatttgctggtgatgttgtcttccccagggaaatcagttttaccaaccttcaaccaaatcatactgctgtgtaccagtgtgaagcctcaaatgtccatggaactatccttgccaatgccaatattgatgttgtggatgtccgtccattgatacaaaccaaagatggagaaaattacgctacagtggttgggtacagtgctttcttacattgcgagttctttgcttcacctgaggcagtcgtgtcctggcagaaggtggaagaagtgaaacccctggagggcaggcggtatcatatctatgaaaatggcacattgcagatcaacagaaccaccgaagaagatgctgggtcttactcatgttgggtagaaaatgctataggaaaaactgcagtcacagccaatttggatattagaaatgctacaaaacttagagtttctcctaagaatcctcgtatccccaaattgcatatgcttgaattacattgtgaaagcaaatgtgactcacatttgaaacacagtttgaagttgtcctggagtaaagatggagaagcctttgaaattaatggcacagaagatggcaggataattattgatggagctaatttgaccatatctaatgtaactttagaggaccaaggtatttactgctgttcagctcatactgctctagacagtgctgccgatataactcaagtaactgttcttgatgttccggatccaccagaaaaccttcacttgtctgaaagacagaacaggagtgttcggctgacctgggaagctggagctgaccacaacagcaatattagcgagtatattgttgaatttgaaggaaacaaagaagagcctggaaggtgggaggaactgaccagagtccaaggaaagaaaaccacagttatcttacctttggctccatttgtgagataccagttcagggtcatagccgtgaacgaagtagggagaagtcagcctagccagccgtcagaccatcatgaaacaccaccagcagctccagataggaatccacaaaacataagggttcaagcctctcaacccaaggaaatgattataaagtgggagcctttgaaatccatggagcagaatggaccaggcctagagtacagagtgacctggaagccacagggagccccagtggagtgggaagaagaaacagtcacaaaccacacattgcgggtgatgacgcctgctgtctatgccccttatgatgtcaaggtccaggctatcaatcaactaggatctgggcctgaccctcagtcagtgactctctattctggagaagactatcctgatacagctccagtgatccatggggtggacgttataaacagtacattagttaaagttacctggtcaacagttccaaaggacagagtacatggacgtctgaaaggctatcagataaattggtggaaaacaaaaagtctgttggatggaagaacacatcccaaagaagtgaacattctaagattttcaggacaaagaaactctggaatggttccttccttagatgcctttagtgaatttcatttaacagtcttagcctataactctaaaggagctggtcctgaaagtgagccttatatatttcaaacaccagaaggagtacctgaacagccaacttttctaaaggtcatcaaagttgataaagacactgccactttatcttggggactacctaagaaattaaatggaaacttaactggctatcttttgcaatatcagataataaatgacacctacgagattggagaattaaatgatattaacattacaactccatcaaagcccagctggcacctctcaaacctgaatgcaactaccaagtacaaattctacttgagggcttgcacttcacagggctgtggaaaaccgatcacggaggaaagctccaccttaggagaagggaaatatgctggtttatatgatgacatctccactcaaggctggtttattggactgatgtgtgcgattgctcttctcacactactattattaactgtttgctttgtgaagaggaatagaggtggaaagtactcagttaaagaaaaggaagatttgcatccagacccagaaattcagtcagtaaaagatgaaacctttggtgaatacagtgacagtgatgaaaagcctctcaaaggaagccttcggtcccttaatagggatatgcagcctactgaaagtgctgacagcttagtcgaatacggagagggagaccatggtctcttcagtgaagatggatcatttattggtgcctacgctggatctaaggagaagggatctgttgaaagcaatggaagttctacagcaacttttccccttcgggcataaacacaacatatgtaagcaacgctactggttcaccccaaccttccatatttatctgttcaaaggagcaagaactttcatataggaatagaaacatgctggccgaagatttcatccagaagtcaacatcctgcaattatgttgaaaagagtagtactttcttcaaaatataaaatgccaagcacttcaggcctatgttttgcttatattgttttcaggtgctcaaaatgcaaaacacaaaacaaatcctgcatttagatacacctcaactaaatccaaagtccccattcagtatattccatatttgcctgattttactattcggtgtgtttgcatagatgttgctacttggtgggtttttctccgtatgcacattggtatacagtctctgagaactggcttggtgactttgcttcactacaggttaaaagaccataagcaaactggttatttaaaatgtaaaaaggaatatgaaagtcttattaaaacacttcattgaaaatatacagtctaaatttattatttaaattttactagcaaaagtcttaggtgaacaatcaactagtatttgttgagctcctatttgcccagagatggtcatatttaaacagaagtatacgtttttcagtttcaacatgaatttttttatttctgtcagttatgacatccacaagcatcactttttgtgtctgttttttttttttttcttggactaaattcaactgcatggaagcggtggtcagaaggttgttttatacgagaacaggcagaaagtgcccattgttcaggattctaatagctacatctacttaatatcttcatttctaaattgactgcttttacctttttctcatgtttatataatggtatgcttgcatatatttcatgaatacattgtacatattatgttaatatttacacaatttaaaatatagatgtgttttattttgaagtgagaaaatgaacattaacaggcatgtttgtacagctagaatatattagtaagatactgtttttcgtcattccagagctacaactaataacacgaggttccaaagctgaagactttgtataaagtatttgggttttgttcttgtattgctttctttcaacagtttcaaaataaaatatcatataaatattgagggaaatgttttcatatttttcaaaataggtttttattgttgaatgtacatctaccccagcccctcaaaagaaaaactgtttacatagaaattcctacacatacgtttgcgtatatgttattttaaacatctttgtggtgagaattttttccccgatattctccttctgtcaaagtcagaacaaattcagggaatttattttctggcagttgtgctccagtccttttaaaattgtacatgaacatgttttagaaacaatatggaggatgatgcatacatgtcggtcaagttcagcgctcgacattttatggaaagatttttttaaccttaccacgaaatacttaactactgtttaagtgaattgacttatttcactttagtttttgaactgtgattattggtatactgttatatcctcaacttggatttatggtaaccccttatagttcatggagaccaaaatttggggtatttataatagtcagcgcaggaatgcacatggaatatctacttgtccttttgaacctcacgagtcatccagaatgtatagacaggaaaagcatgtcttatttaaaactgtaatttatgggctcaggatctgaccgcagtcccgggagtaagcatttcaaagggggaaggcagtgtggtccctaccctgtgtgaatgtgaggatgtagacatccatcagtgcaactcgagctccatcctcctccgatttctaaggttccagttttctggagggacagtcatcatgttttgatttatctgggagaaaactgtggtgcacagcttgtgaggagggcaaggttgtgacgttcgagcttagttctggtgttattctgtctcctcttctttgtcatcagccaaaacgtggtttttaaagagagtcatgcaggttagaaataatgtcaaaaatatttaggaatttaataacctttaagtcagaaactaaaacaaatactgaaatattagctcttcctacacttcgtgttcccctttagctgcctgaaaatcaagattgctcctgctcagatcttctgagtggctaaaacttatggatatgaaaaatgagattgaatgatgactatgctttgctatcattgttacctttcctcaatactatttggcaactactgggactcttcagcacaaaaggaatagatctatgattgaccctgattttaattgtgaaattatatgattcatatattttatgaatcagaataaccttcaaataaaataaatctaagtcggttaaaatggatttcatgattttccctcagaaaatgagtaacagagtccacggcgtgcaatggtaattataaattggtgatgcttgtttgcaaattgcccactcgtgataagtcaacagccaatatttaaaactttgttcgttactggctttaccctaactttctctagtctactgtcaatatcattttaatgtaattgattgtatatagtctcaagaatggttggtgggcatgagttcctagagaactgtccaagggttgggaaaatccaaattctcttcctggttccagcactgattttgtacataaacattaggcaggttgcttaacctttttatttcaaactctctcaactctaaagtgctaataataatctcagttaccttatctttgtcacagggtgttcttttttatgaagaaaaatttgaaaatgataaaagctaagatgccttctaacttcataagcaaacctttaactaattatgtatctgaaagtcacccccacataccaactcaacttttttcctgtgaacacataaatatatttttatagaaaaacaaatctacataaaataaatctactgtttagtgagcagtatgatttgtacatgccattgaaaattattaatcagaagaaaattaagcagggtctttgctatacaaaagtgttttccactaattttgcatgcgtatttataagaaaaatgtgaatttggtggttttattctatcggtataaaggcattgatattttagatgcacccgtgtttgtaaaaatgtagagcacaatggaattatgctggaagtctcaaataatatttttttcctattttatactcatggaagagataagctaaagaggggacaataatgagaaatgttggtgtgcttttctaagcatttaaaacataattgccaattgaaaccctaaatatgtttacataccattaagatatgattcatgtaacaatgttaaattaattataatgggattgggtttgttatctgtggtagtatatatcctagtgttcctatagtgaaataagtagggttcagccaaagctttctttgttttgtaccttaaattgttcgattacgtcatcaaaagagatgaaaggtatgtagaacaggttcacgtgattacctttttcttttggcttggattaatattcatagtagaactttataaaacgtgtttgtattgtaggtggtgtttgtattatgcttatgactatgtatggtttgaaaatattttcattatacatgaaattcaactttccaaataaaagttctacttcatgtaatcc

SEQ ID NO: 116040 - DNA, 4853 bp, Homo sapiens
  Payload ID: 2639
  Gene Symbol: CCAR2
  Gene Name: cell cycle and apoptosis regulator 2
  Uniprot ID: Q8N163
  ENST ID: ENST00000308511
  CDS Start-End: 250-3021
gcacttccgctccccagttgccgcgggatggcaagccggcgtgggggaagggagaggtcggcggagacgagggagggaccatatccgggagagcggcagcttccgaccagtggtcgcgcttccggagaggcgcttccggtggcggcggcagcagcggctgtggtggttccgggtgtctttgtccccccggtgtcgctgccctggcccgcagccttttccccacgactctgaaagaggacagcgttcccaatgtcccagtttaagcgccagcggatcaacccgcttccagggggacgcaacttctcaggcacagcttcaacatctcttctgggccctcctcctggtttgctcactcctcctgtggccacagaactgtcccagaatgccaggcaccttcagggtggggagaaacagcgggtcttcactggtattgttaccagcttgcatgactactttggggttgtggatgaagaggtcttttttcagctaagtgtggtgaagggccgtctgccccagctgggtgagaaggtgctggtgaaggctgcatacaacccaggccaggcagtgccctggaatgctgtcaaggtgcaaacgctctccaaccagcccctactgaagtccccagcacctcctcttctgcatgtagcagccctgggccagaagcaagggatcctgggagctcagcctcagttgatcttccagcctcaccggattcccccactctttcctcagaagcctctgagtctcttccaaacatcccacacacttcacctgagccacctgaacagatttcctgcccggggccctcatggacggttggatcagggccgaagtgatgactatgactccaagaaacgcaaacagcgggctggtggagagccctggggtgctaagaagccaaggcatgacctgcctccttaccgggtccacctcactccttacactgtggacagccccatctgtgacttcctagaactccagcgccgttaccgcagcctcctggtcccctcagattttctgtccgtgcatctgagttggctatcagccttccccctgagccagcccttttccctccatcatccaagccggatccaggtctcttctgaaaaggaggcagctccagacgctggtgctgagcccatcactgcagacagtgaccccgcttatagttcgaaggtactgctgctctcttccccggggttggaggaattgtatcgttgttgcatgctctttgtggatgacatggctgagccaagggagacgccagagcatcctctgaagcagattaagtttttgctgggcaggaaagaagaggaggcagtgctggttgggggtgaatggtctccttccctggatggcctcgacccccaggctgacccgcaggtgctggtgcgtaccgccatccgctgtgcgcaggcccagactggcattgatttgagcggctgtaccaagtggtggcgctttgccgagtttcagtacctgcagccgggacccccccggcggcttcagacagtggtggtgtacctgccggatgtctggaccatcatgcctactttggaggagtgggaggccctgtgccagcagaaagctgcagaggcagctcccccaacccaggaggcacaaggggaaacggagcctactgaacaggcacctgatgccttggagcaagcagcagacacttctagacggaacgcagaaactccagaggccaccacacagcaggaaacggacactgatctcccagaggcccctccaccccccctagaacctgctgtcatcgcacgccctggctgtgtaaacctgtccctccatgggattgtggaggatcggaggccaaaggaaaggatctcttttgaggtgatggtgctggccgagctgtttctggagatgctccagagggattttggctatagagtttataagatgctactgagccttcctgaaaaggtcgtgtccccacctgaacctgagaaggaggaggcggccaaggaagaagccaccaaggaggaagaagccatcaaagaggaggtggtcaaggagcccaaggatgaggcacagaatgagggcccggctacagagtcagaggccccgctgaaggaggatgggcttttgcccaaaccactctcttctgggggagaggaagaagaaaaaccccggggcgaggcttctgaggacctgtgtgagatggccctggacccagaactgttgcttctgagggatgatggagaggaggagtttgcaggagcaaagctggaggattcggaggtccggtccgttgcctcaaaccagtcagagatggagttctcttcacttcaggacatgcccaaggagctggatccctctgctgtgctccccttagactgtctgcttgcttttgtgttctttgatgccaactggtgtggctacttgcaccggcgagacttagagaggatcctccttacccttgggatccggctcagtgcagagcaggccaagcagctggtcagcagggtggtgacccagaacatctgccagtaccggagccttcagtacagccgccaggagggcctggatggtggccttcccgaggaggtgctcttcggaaacctggacctgctgccccctcctgggaaaagcacgaagccaggtgctgcccccacagaacacaaagccttggtgtcccacaatggcagcctgattaacgtggggagcctgctgcagcgcgcggagcagcaggacagcggccggctctacctagagaacaagatccacacactggagctgaagctggaggagagccataaccgtttctcagccactgaagtaaccaataagacgctggcggcagagatgcaggagctgcgagtccggctggcggaggccgaggagaccgcccggacggcggagcgacagaagagccagctccagcggctgctgcaggagctccgcaggcgtctgacccccctgcagctggagatccagcgggtggtggaaaaggctgacagctgggtggagaaggaggagccggcacctagcaactgacggcctcgcacggaactgccatcctgtgagggcagcggtggcgcccggcaaagttggagcccttgcggtaccagaaagcagcgagagcgagacctgggagccagggcaggggtggctgaccccatgctcagcctctaggggacggcaggccatcaggctgggggctgtgctatgtgggatggatgtgtgaggaaccccggttccacttaacaactaaatacaacatcttttgcacccctagaatgtcattttgccctcaaccttggtatttctcctggggcccttttagtcttgtgctgactttctcctgtcctcttccagtttagaataagacaggggagaaaaaggcttttcgagtgtgggacaaggtctgatgtcagtgaacggaactgaagagcaagacatggagcctggctggggctaagcagccccctcctccggatggcacaggctctgctaggttccggacacaggcttctgggggaagggtctcccttggccatcacgggaatggagtccatgctagaaagagctcagtgttgggctgggtttgccagtagaacactgcgttccagtcaccccggtcttgccagaagaaaccagcacctctttcccgtggctcctgtgttcagaatgtggtattggctctggcccagccttctcccctgttacccataattcttgcctctttccataatccgtggtttcagtttgactttgtatataaagttggggttttttttttttttttttggcttgttttttaaataaaccaaagtcaaaaacaaactgagagtgtgtcctccacagctcttcctactctcctaggcttgcccgcgtgccctcccacccagcgcctctgctggaccacggtgcagttcgctccagaaggtgggccagggccggggaggtgcgcacacacccctggcatgctgggctgcctgctggagggtgctgctgctccgtggagggcagcaggcccaggaaggggtttcctctgctcgcctaagttacagcacaatactatgtggacgtttcattgaaaattttacttgaaaaaataaaattccagatactcaggtgagacacaaacccactgttcctgctttgagacctgtgaattcttgtgggacagttccactgacagcttgcgttcccgaggtaccagtcctcagtgacctcgggaaccccaaccacttaggtcccaaagccacaagggtgccctttgtcttgctgggaagctggctgagggcctgccagggctggaggaccagctctcccgcacagggttcagggcctctcccagaaaaaagaggttttgaagtgaaaaggcaacgaggggccagagggctccccaggatgggtcttttggaggtagatttgatgcccacaacgcatgcaaggctaagacccccaacttagccaacgaagcccatggcctcagaagggctgcagcttgctcaggccgtgggccaggatgcatgctggacggttctccaaataaaaaagccccaagggtttgtctacactgcttacctgctggggctgtgagtggggagacggcggcctgcctagggctcctggtgccaggctcaggaagagtcattcattgcaaagggccggcaagtgaaccagggccacctctgtccccagcctgtgagaggagcagctagccctgagaagggcaaggatgaatgaggctgaccacgtcacaggagtcctccaagagtgacggggattcagtcatcggccacaatggagagggcccggagctcactgagtttggcctcgttctcccgctcccgctgctcatcggagtggcctggctggtc

SEQ ID NO: 116041 - DNA, 3980 bp, Homo sapiens
  Payload ID: 2639
  Gene Symbol: CCAR2
  Gene Name: cell cycle and apoptosis regulator 2
  Uniprot ID: Q8N163
  ENST ID: ENST00000389279
  CDS Start-End: 420-3191
cctcagtcctcccttggtggcctcgccgcggctctgctgggagacccggcgctggcggctgctgaggccggagcggagggcccgggagcgtgggagcaggagggtggcgcgcagccggtttcgcgtttggtcggccagggagctgccttcccaccagccggtcgaggaaacaacgggtcgggcttccggggagagggcccacacagtctcctcgccggcaccggcctcctccatttttccgggccttgcgtggagggttttggcggatgtttttgaacgaaggaatgtcatcggggctctctcgagcccctcaccccgccagctactctgggggtggcgtggcatagtgagaggagcgctaagttgttgggaggcctgggtccttttccccacgactctgaaagaggacagcgttcccaatgtcccagtttaagcgccagcggatcaacccgcttccagggggacgcaacttctcaggcacagcttcaacatctcttctgggccctcctcctggtttgctcactcctcctgtggccacagaactgtcccagaatgccaggcaccttcagggtggggagaaacagcgggtcttcactggtattgttaccagcttgcatgactactttggggttgtggatgaagaggtcttttttcagctaagtgtggtgaagggccgtctgccccagctgggtgagaaggtgctggtgaaggctgcatacaacccaggccaggcagtgccctggaatgctgtcaaggtgcaaacgctctccaaccagcccctactgaagtccccagcacctcctcttctgcatgtagcagccctgggccagaagcaagggatcctgggagctcagcctcagttgatcttccagcctcaccggattcccccactctttcctcagaagcctctgagtctcttccaaacatcccacacacttcacctgagccacctgaacagatttcctgcccggggccctcatggacggttggatcagggccgaagtgatgactatgactccaagaaacgcaaacagcgggctggtggagagccctggggtgctaagaagccaaggcatgacctgcctccttaccgggtccacctcactccttacactgtggacagccccatctgtgacttcctagaactccagcgccgttaccgcagcctcctggtcccctcagattttctgtccgtgcatctgagttggctatcagccttccccctgagccagcccttttccctccatcatccaagccggatccaggtctcttctgaaaaggaggcagctccagacgctggtgctgagcccatcactgcagacagtgaccccgcttatagttcgaaggtactgctgctctcttccccggggttggaggaattgtatcgttgttgcatgctctttgtggatgacatggctgagccaagggagacgccagagcatcctctgaagcagattaagtttttgctgggcaggaaagaagaggaggcagtgctggttgggggtgaatggtctccttccctggatggcctcgacccccaggctgacccgcaggtgctggtgcgtaccgccatccgctgtgcgcaggcccagactggcattgatttgagcggctgtaccaagtggtggcgctttgccgagtttcagtacctgcagccgggacccccccggcggcttcagacagtggtggtgtacctgccggatgtctggaccatcatgcctactttggaggagtgggaggccctgtgccagcagaaagctgcagaggcagctcccccaacccaggaggcacaaggggaaacggagcctactgaacaggcacctgatgccttggagcaagcagcagacacttctagacggaacgcagaaactccagaggccaccacacagcaggaaacggacactgatctcccagaggcccctccaccccccctagaacctgctgtcatcgcacgccctggctgtgtaaacctgtccctccatgggattgtggaggatcggaggccaaaggaaaggatctcttttgaggtgatggtgctggccgagctgtttctggagatgctccagagggattttggctatagagtttataagatgctactgagccttcctgaaaaggtcgtgtccccacctgaacctgagaaggaggaggcggccaaggaagaagccaccaaggaggaagaagccatcaaagaggaggtggtcaaggagcccaaggatgaggcacagaatgagggcccggctacagagtcagaggccccgctgaaggaggatgggcttttgcccaaaccactctcttctgggggagaggaagaagaaaaaccccggggcgaggcttctgaggacctgtgtgagatggccctggacccagaactgttgcttctgagggatgatggagaggaggagtttgcaggagcaaagctggaggattcggaggtccggtccgttgcctcaaaccagtcagagatggagttctcttcacttcaggacatgcccaaggagctggatccctctgctgtgctccccttagactgtctgcttgcttttgtgttctttgatgccaactggtgtggctacttgcaccggcgagacttagagaggatcctccttacccttgggatccggctcagtgcagagcaggccaagcagctggtcagcagggtggtgacccagaacatctgccagtaccggagccttcagtacagccgccaggagggcctggatggtggccttcccgaggaggtgctcttcggaaacctggacctgctgccccctcctgggaaaagcacgaagccaggtgctgcccccacagaacacaaagccttggtgtcccacaatggcagcctgattaacgtggggagcctgctgcagcgcgcggagcagcaggacagcggccggctctacctagagaacaagatccacacactggagctgaagctggaggagagccataaccgtttctcagccactgaagtaaccaataagacgctggcggcagagatgcaggagctgcgagtccggctggcggaggccgaggagaccgcccggacggcggagcgacagaagagccagctccagcggctgctgcaggagctccgcaggcgtctgacccccctgcagctggagatccagcgggtggtggaaaaggctgacagctgggtggagaaggaggagccggcacctagcaactgacggcctcgcacggaactgccatcctgtgagggcagcggtggcgcccggcaaagttggagcccttgcggtaccagaaagcagcgagagcgagacctgggagccagggcaggggtggctgaccccatgctcagcctctaggggacggcaggccatcaggctgggggctgtgctatgtgggatggatgtgtgaggaaccccggttccacttaacaactaaatacaacatcttttgcacccctagaatgtcattttgccctcaaccttggtatttctcctggggcccttttagtcttgtgctgactttctcctgtcctcttccagtttagaataagacaggggagaaaaaggcttttcgagtgtgggacaaggtctgatgtcagtgaacggaactgaagagcaagacatggagcctggctggggctaagcagccccctcctccggatggcacaggctctgctaggttccggacacaggcttctgggggaagggtctcccttggccatcacgggaatggagtccatgctagaaagagctcagtgttgggctgggtttgccagtagaacactgcgttccagtcaccccggtcttgccagaagaaaccagcacctctttcccgtggctcctgtgttcagaatgtggtattggctctggcccagccttctcccctgttacccataattcttgcctctttccataatccgtggtttcagtttgactttgtatataaagttggggttttttttttttttttttggcttgttttttaaataaaccaaagtcaaaaacaaa

SEQ ID NO: 116042 - DNA, 2633 bp, Homo sapiens
  Payload ID: 2639
  Gene Symbol: CCAR2
  Gene Name: cell cycle and apoptosis regulator 2
  ENST ID: ENST00000520738
  CDS Start-End: 1-1847
aggtactgctgctctcttccccggggttggaggaattgtatcgttgttgcatgctctttgtggatgacatggctgagccaagggagacgccagagcatcctctgaagcagattaagtttttgctgggcaggaaagaagaggaggcagtgctggttgggggtgaatggtctccttccctggatggcctcgacccccaggctgacccgcaggtgctggtgcgtaccgccatccgctgtgcgcaggcccagactggcattgatttgagcggctgtaccaagtggtggcgctttgccgagtttcagtacctgcagccgggacccccccggcggcttcagacagtggtggtgtacctgccggatgtctggaccatcatgcctactttggaggagtgggaggccctgtgccagcagaaagctgcagaggcagctcccccaacccaggaggcacaaggggaaacggagcctactgaacaggcacctgatgccttggagcaagcagcagacacttctagacggaacgcagaaactccagaggccaccacacagcaggaaacggacactgatctcccagaggcccctccaccccccctagaacctgctgtcatcgcacgccctggctgtgtaaacctgtccctccatgggattgtggaggatcggaggccaaaggaaaggatctcttttgaggtgatggtgctggccgagctgtttctggagatgctccagagggattttggctatagagtttataagatgctactgagccttcctgaaaaggtcgtgtccccacctgaacctgagaaggaggaggcggccaaggaagaagccaccaaggaggaagaagccatcaaagaggaggtggtcaaggagcccaaggatgaggcacagaatgagggcccggctacagagtcagaggccccgctgaaggaggatgggcttttgcccaaaccactctcttctgggggagaggaagaagaaaaaccccggggcgaggcttctgaggacctgtgtgagatggccctggacccagaactgttgcttctgagggatgatggagaggaggagtttgcaggagcaaagctggaggattcggaggtccggtccgttgcctcaaaccagtcagagatggagttctcttcacttcaggacatgcccaaggagctggatccctctgctgtgctccccttagactgtctgcttgcttttgtgttctttgatgccaactggtgtggctacttgcaccggcgagacttagagaggatcctccttacccttgggatccggctcagtgcagagcaggccaagcagctggtcagcagggtggtgacccagaacatctgccagtaccggagccttcagtacagccgccaggagggcctggatggtggccttcccgaggaggtgctcttcggaaacctggacctgctgccccctcctgggaaaagcacgaagccaggtgctgcccccacagaacacaaagccttggtgtcccacaatggcagcctgattaacgtggggagcctgctgcagcgcgcggagcagcaggacagcggccggctctacctagagaacaagatccacacactggagctgaagctggaggagagccataaccgtttctcagccactgaagtaaccaataagacgctggcggcagagatgcaggagctgcgagtccggctggcggaggccgaggagaccgcccggacggcggagcgacagaagagccagctccagcggctgctgcaggagctccgcaggcgtctgacccccctgcagctggagatccagcgggtggtggaaaaggctgacagctgggtggagaaggaggagccggcacctagcaactgacggcctcgcacggaactgccatcctgtgagggcagcggtggcgcccggcaaagttggagcccttgcggtaccagaaagcagcgagagcgagacctgggagccagggcaggggtggctgaccccatgctcagcctctaggggacggcaggccatcaggctgggggctgtgctatgtgggatggatgtgtgaggaaccccggttccacttaacaactaaatacaacatcttttgcacccctagaatgtcattttgccctcaaccttggtatttctcctggggcccttttagtcttgtgctgactttctcctgtcctcttccagtttagaataagacaggggagaaaaaggcttttcgagtgtgggacaaggtctgatgtcagtgaacggaactgaagagcaagacatggagcctggctggggctaagcagccccctcctccggatggcacaggctctgctaggttccggacacaggcttctgggggaagggtctcccttggccatcacgggaatggagtccatgctagaaagagctcagtgttgggctgggtttgccagtagaacactgcgttccagtcaccccggtcttgccagaagaaaccagcacctctttcccgtggctcctgtgttcagaatgtggtattggctctggcccagccttctcccctgttacccataattcttgcctctttccataatccgtggtttcagtttgactttgtatataaagttggggttttttttttttttttttggcttgttttttaaataaaccaaagtcaaaaac

SEQ ID NO: 116043 - DNA, 542 bp, Homo sapiens
  Payload ID: 2639
  Gene Symbol: CCAR2
  Gene Name: cell cycle and apoptosis regulator 2
  ENST ID: ENST00000523349
  CDS Start-End: 56-542
ttctttttggattgaagccttttccccacgactctgaaagaggacagcgttcccaatgtcccagtttaagcgccagcggatcaacccgcttccagggggacgcaacttctcaggcacagcttcaacatctcttctgggccctcctcctggtttgctcactcctcctgtggccacagaactgtcccagaatgccaggcaccttcagggtggggagaaacagcgggtcttcactggtattgttaccagcttgcatgactactttggggttgtggatgaagaggtcttttttcagctaagtgtggtgaagggccgtctgccccagctgggtgagaaggtgctggtgaaggctgcatacaacccaggccaggcagtgccctggaatgctgtcaaggtgcaaacgctctccaaccagcccctactgaagtccccagcacctcctcttctgcatgtagcagccctgggccagaagcaagggatcctgggagctcagcctcagttgatcttccagcctcaccggattcccccactctttcctcagaagc

SEQ ID NO: 116044 - DNA, 1107 bp, Homo sapiens
  Payload ID: 2639
  Gene Symbol: CCAR2
  Gene Name: cell cycle and apoptosis regulator 2
  ENST ID: ENST00000522599
  CDS Start-End: 277-1107
taagctttccagaggcttccatcattaatattttatttcctttcagtcttctaaagttgtttttgcagtagctgaggcctactgtgtatacaatgttgcagagtgtgctttttgcttaacaggaatgtttattaaaacagtaaatatccattttaatatctttataacattctgtcatatggctgttagcatggattctttttccatttattgaatgtgagggatttcgattgtttccagttcttttagttcagtttgtattgaatacatataacaatgtggtttcttactgttggtgatgggtcaacctctagtgatgactatgactccaagaaacgcaaacagcgggctggtggagagccctggggtgctaagaagccaaggcatgacctgcctccttaccgggtccacctcactccttacactgtggacagccccatctgtgacttcctagaactccagcgccgttaccgcagcctcctggtcccctcagattttctgtccgtgcatctgagttggctatcagccttccccctgagccagcccttttccctccatcatccaagccggatccaggtctcttctgaaaaggaggcagctccagacgctggtgctgagcccatcactgcagacagtgaccccgcttatagttcgaaggtactgctgctctcttccccggggttggaggaattgtatcgttgttgcatgctctttgtggatgacatggctgagccaagggagacgccagagcatcctctgaagcagattaagtttttgctgggcaggaaagaagaggaggcagtgctggttgggggtgaatggtctccttccctggatggcctcgacccccaggctgacccgcaggtgctggtgcgtaccgccatccgctgtgcgcaggcccagactggcattgatttgagcggctgtaccaagtggtggcgctttgccgagtttcagtacctgcagccgggacccccccggcggcttcagacagtggtggtgtacctgccggatgtctggaccatcatgcctactttggaggagtgggaggccctgtgccagcagaaagctgcagaggcagctcccccaacccaggaggcacaaggg

SEQ ID NO: 116045 - DNA, 337 bp, Homo sapiens
  Payload ID: 2639
  Gene Symbol: CCAR2
  Gene Name: cell cycle and apoptosis regulator 2
  ENST ID: ENST00000521301
  CDS Start-End: 91-336
gtggtggttccgggtgtctttgtccccccggtgtcgctgccctggcccgcagccttttccccacgactctgaaagaggacagcgttcccaatgtcccagtttaagcgccagcggatcaacccgcttccagggggacgcaacttctcaggcacagcttcaacatctcttctgggccctcctcctggtttgctcactcctcctgtggccacagaactgtcccagaatgccaggcaccttcagggtggggagaaacagcgggtcttcactggtattgttaccagcttgcatgactactttggggttgtggatgaagaggtcttttttcagctaaggtagg

SEQ ID NO: 116046 - DNA, 3560 bp, Homo sapiens
  Payload ID: 2639
  Gene Symbol: CCAR2
  Gene Name: cell cycle and apoptosis regulator 2
  ENST ID: ENST00000520861
  CDS Start-End: 696-2492
agtgtggtgaagggccgtctgccccagctgggtgagaaggtgctggtgaaggctgcatacaacccaggccaggcagtgccctggaatgctgtcaaggtgcaaacgctctccaaccagcagccctgggccagaagcaagggatcctgggagctcagcctcagttgatcttccagcctcaccggattcccccactctttcctcagaagcctctgagtctcttccaaacatcccacacacttcacctgagccacctgaacagatttcctgcccggggccctcatggacggttggatcagggccgaagtgatgactatgactccaagaaacgcaaacagcgggctggtggagagccctggggtgctaagaagccaaggcatgacctgcctccttaccgggtccacctcactccttacactgtggacagccccatctgtgacttcctagaactccagcgccgttaccgcagcctcctggtcccctcagattttctgtccgtgcatctgagttggctatcagccttccccctgagccagcccttttccctccatcatccaagccggatccaggtctcttctgaaaaggaggcagctccagacgctggtgctgagcccatcactgcagacagtgaccccgcttatagttcgaaggtactgctgctctcttccccggggttggaggaattgtatcgttgttgcatgctctttgtggatgacatggctgagccaagggagacgccagagcatcctctgaagcagattaagtttttgctgggcaggaaagaagaggaggcagtgctggttgggggtgaatggtctccttccctggatggcctcgacccccaggctgacccgcaggtgctggtgcgtaccgccatccgctgtgcgcaggcccagactggcattgatttgagcggctgtaccaagtggtggcgctttgccgagtttcagtacctgcagccgggacccccccggcggcttcagacagtggtggtgtacctgccggatgtctggaccatcatgcctactttggaggagtgggaggccctgtgccagcagaaagctgcagaggcagctcccccaacccaggaggcacaaggggaaacggagcctactgaacaggcacctgatgccttggagcaagcagcagacacttctagacggaacgcagaaactccagaggccaccacacagcaggaaacggacactgatctcccagaggcccctccaccccccctagaacctgctgtcatcgcacgccctggctgtgtaaacctgtccctccatgggattgtggaggatcggaggccaaaggaaaggatctcttttgaggtgatggtgctggccgagctgtttctggagatgctccagagggattttggctatagagtttataagatgctactgagccttcctgaaaaggtcgtgtccccacctgaacctgagaaggaggaggcggccaaggaagaagccaccaaggaggaagaagccatcaaagaggaggtggtcaaggagcccaaggatgaggcacagaatgagggcccggctacagagtcagaggccccgctgaaggaggatgggcttttgcccaaaccactctcttctgggggagaggaagaagaaaaaccccggggcgaggcttctgaggacctgtgtgagatggccctggacccagaactgttgcttctgagggatgatggagaggaggagtttgcaggagcaaagctggaggattcggaggtccggtccgttgcctcaaaccagtcagagatggagttctcttcacttcaggacatgcccaaggagctggatccctctgctgtgctccccttagactgtctgcttgcttttgtgttctttgatgccaactggtgtggctacttgcaccggcgagacttagagaggatcctccttacccttgggatccggctcagtgcagagcaggccaagcagctggtcagcagggtggtgacccagaacatctgccagtaccggagccttcagtacagccgccaggagggcctggatggtggccttcccgaggaggtgctcttcggaaacctggacctgctgccccctcctgggaaaagcacgaagccaggtgctgcccccacagaacacaaagccttggtgtcccacaatggcagcctgattaacgtggggagcctgctgcagcgcgcggagcagcaggacagcggccggctctacctagagaacaagatccacacactggagctgaagctggaggagagccataaccgtttctcagccactgaagtaaccaataagacgctggcggcagagatgcaggagctgcgagtccggctggcggaggccgaggagaccgcccggacggcggagcgacagaagagccagctccagcggctgctgcaggagctccgcaggcgtctgacccccctgcagctggagatccagcgggtggtggaaaaggtaaggtgggggtggaccaggaggcagcacagctcctttccctgagctccaaaagtccccagaagggcgcttgcccgtgtcgggagtgaccagagggccagcaggcaccggcttcgtctttccatcgcttgccaggcagtgtgcccctggttgcaggttctctgggaattgagcagtcagcagcgtgcagtgggagcttcccagcaggaggcagtccgcagtccgcagtcctcagatcaccttgccaggcccgattctgggtacatcatctgtttcaaacaggctgacagctgggtggagaaggaggagccggcacctagcaactgacggcctcgcacggaactgccatcctgtgagggcagcggtggcgcccggcaaagttggagcccttgcggtaccagaaagcagcgagagcgagacctgggagccagggcaggggtggctgaccccatgctcagcctctaggggacggcaggccatcaggctgggggctgtgctatgtgggatggatgtgtgaggaaccccggttccacttaacaactaaatacaacatcttttgcacccctagaatgtcattttgccctcaaccttggtatttctcctggggcccttttagtcttgtgctgactttctcctgtcctcttccagtttagaataagacaggggagaaaaaggcttttcgagtgtgggacaaggtctgatgtcagtgaacggaactgaagagcaagacatggagcctggctggggctaagcagccccctcctccggatggcacaggctctgctaggttccggacacaggcttctgggggaagggtctcccttggccatcacgggaatggagtccatgctagaaagagctcagtgttgggctgggtttgccagtagaacactgcgttccagtcaccccggtcttgccagaagaaaccagcacctctttcccgtggctcctgtgttcagaatgtggtattggctctggcccagccttctcccctgttacccataattcttgcctctttccataatccgtggtttcagtttgactttgtatataaagttggggttttttttttttttttttggcttgttttttaaataaaccaaagtcaaaaac

SEQ ID NO: 116047 - DNA, 549 bp, Homo sapiens
  Payload ID: 2639
  Gene Symbol: CCAR2
  Gene Name: cell cycle and apoptosis regulator 2
  ENST ID: ENST00000523801
  CDS Start-End: 1-549
gcttccggtggcggcggcagcagcggctgtggtggttccgggtgtctttgtccccccggtgtcgctgccctggcccgcaggcacagcttcaacatctcttctgggccctcctcctggtttgctcactcctcctgtggccacagaactgtcccagaatgccaggcaccttcagggtggggagaaacagcgggtcttcactggtattgttaccagcttgcatgactactttggggttgtggatgaagaggtcttttttcagctaagtgtggtgaagggccgtctgccccagctgggtgagaaggtgctggtgaaggctgcatacaacccaggccaggcagtgccctggaatgctgtcaaggtgcaaacgctctccaaccagcccctactgaagtccccagcacctcctcttctgcatgtagcagccctgggccagaagcaagggatcctgggagctcagcctcagttgatcttccagcctcaccggattcccccactctttcctcagaagcctctgagtctcttccaaacatcccacacacttcacctgag

SEQ ID NO: 116048 - DNA, 549 bp, Homo sapiens
  Payload ID: 2639
  Gene Symbol: CCAR2
  Gene Name: cell cycle and apoptosis regulator 2
  ENST ID: ENST00000521837
  CDS Start-End: 99-549
gtaaaacagcatgacagtatcatgcaccactaggttattgtcagggcaaactggaacaatccttttccccacgactctgaaagaggacagcgttcccaatgtcccagtttaagcgccagcggatcaacccgcttccagggggacgcaacttctcaggcacagcttcaacatctcttctgggccctcctcctggtttgctcactcctcctgtggccacagaactgtcccagaatgccaggcaccttcagggtggggagaaacagcgggtcttcactggtattgttaccagcttgcatgactactttggggttgtggatgaagaggtcttttttcagctaagtgtggtgaagggccgtctgccccagctgggtgagaaggtgctggtgaaggctgcatacaacccaggccaggcagtgccctggaatgctgtcaaggtgcaaacgctctccaaccagcccctactgaagtccccagcacctcctcttctgcatgtagcagccctgggccagaagcaagggatcctgggagctcagcctcagttgatcttcc

SEQ ID NO: 116049 - DNA, 453 bp, Homo sapiens
  Payload ID: 2639
  Gene Symbol: CCAR2
  Gene Name: cell cycle and apoptosis regulator 2
  ENST ID: ENST00000518989
  CDS Start-End: 1-445
cttacagggtggggagaaacagcgggtcttcactggtattgttaccagcttgcatgactactttggggttgtggatgaagaggtcttttttcagctaagtgtggtgaagggccgtctgccccagctgggtgagaaggtgctggtgaaggctgcatacaacccaggccaggcagtgccctggaatgctgtcaaggtgcaaacgctctccaaccagcccctactgaagtccccagcacctcctcttctgcatgtagcagccctgggccagaagcaagggatcctgggagctcagcctcagttgatcttccagcctcaccggattcccccactctttcctcagaagcctctgagtctcttccaaacatcccacacacttcacctgagccacctgaacagatttcctgcccggggccctcatggacggttggatcagggccgaaggtaagaggatga

SEQ ID NO: 116050 - DNA, 1421 bp, Homo sapiens
  Payload ID: 2639
  Gene Symbol: CCAR2
  Gene Name: cell cycle and apoptosis regulator 2
  ENST ID: ENST00000613179
  CDS Start-End: 299-1117
gtgggaggccctgtgccagcagaaagctgcagaggcagctcccccaacccaggaggcacaaggggaaacggagcctactgaacaggcacctgatgccttggagcaagcagcagacacttctagacggaacgcagaaactccagaggccaccacacagcaggaaacggacactgatctcccagaggcccctccaccccccctagaacctgctgtcatcgcacgccctggctgtgtaaacctgtccctccatgggattgtggaggatcggaggccaaaggaaaggatctcttttgaggtgatggtgctggccgagctgtttctggagatgctccagagggattttggctatagagtttataagatgctactgagccttcctgaaaaggtcgtgtccccacctgaacctgagaaggaggaggcggccaaggaagaagccaccaaggaggaagaagccatcaaagaggaggtggtcaaggagcccaaggatgaggcacagaatgagggcccggctacagactttgtctgcctcgtagaaggaggatgggcttttgccaaaccactctcttctgggggagaggaagaagaaaaaccccggggcgaggcttctgaggacctgtgtgagatggccctggacccagaactgttgcttctgagggatgatggagaggaggagtttgcaggagcaaagctggaggattcggaggtccggtccgttgcctcaaaccagtcagagatggagttctcttcacttcaggacatgcccaaggagctggatccctctgctgtgctccccttagactgtctgcttgcttttgtgttctttgatgccaactggtgtggctacttgcaccggcgagacttagagaggatcctccttacccttgggatccggctcagtgcagagcaggccaagcagctggtcagcagggtggtgacccagaacatctgccagtaccggagccttcagtacagccgccaggagggcctggatggtggccttcccgaggaggtgctcttcggaaacctggacctgctgccccctcctgggaaaagcacgaagccaggttgcccccacagaacacaaagccttggtgtcccacaatggcagcctgattaacgtggggagcctgctgcagcgcgcggagcagcaggacagcggccggctctacctagagaacaagatccacacactggagctgaagctggaggagagccataaccgtttctcagccactgaagtaaccaataagacgctggcggcagagatgcaggagctgcgagtccggctggcggaggccgaggagaccgcccggacggcggagcgacagaagagccagctccagcggctgctgcaggagctccgcaggcgtctgacccccctgcagctggagatccagcgggtggtggaaaaggtaaggtgg

SEQ ID NO: 116051 - DNA, 4108 bp, Homo sapiens
  Payload ID: 2640
  Gene Symbol: CAPRIN1
  Gene Name: cell cycle associated protein 1
  Uniprot ID: Q14444
  ENST ID: ENST00000341394
  CDS Start-End: 190-2319
cagagggctgctggctggctaagtccctcccgctcccggctctcgcctcactaggagcggctctcggtgcagcgggacagggcgaagcggcctgcgcccacggagcgcgcgacactgcccggaagggaccaccacccttgccccctcagctgcccactcgtgatttccagcggcctccgcgcgcgcacgatgccctcggccaccagccacagcgggagcggcagcaagtcgtccggaccgccaccgccgtcgggttcctccgggagtgaggcggccgcgggagccggggccgccgcgccggcttctcagcaccccgcaaccggcaccggcgctgtccagaccgaggccatgaagcagattctcggggtgatcgacaagaaacttcggaacctggagaagaaaaagggtaagcttgatgattaccaggaacgaatgaacaaaggggaaaggcttaatcaagatcagctggatgccgtttctaagtaccaggaagtcacaaataatttggagtttgcaaaagaattacagaggagtttcatggcactaagtcaagatattcagaaaacaataaagaagacagcacgtcgggagcagcttatgagagaagaagctgaacagaaacgtttaaaaactgtacttgagctacagtatgttttggacaaattgggagatgatgaagtgcggactgacctgaaacaaggtttgaatggagtgccaatattgtccgaagaggagttgtcattgttggatgaattctataagctagtagaccctgaacgggacatgagcttgaggttgaatgaacagtatgaacatgcctccattcacctgtgggacctgctggaagggaaggaaaaacctgtatgtggaaccacctataaagttctaaaggaaattgttgagcgtgtttttcagtcaaactactttgacagcacccacaaccaccagaatgggctgtgtgaggaagaagaggcagcctcagcacctgcagttgaagaccaggtacctgaagctgaacctgagccagcagaagagtacactgagcaaagtgaagttgaatcaacagagtatgtaaatagacagttcatggcagaaacacagttcaccagtggtgaaaaggagcaggtagatgagtggacagttgaaacggttgaggtggtaaattcactccagcagcaacctcaggctgcatccccttcagtaccagagccccactctttgactccagtggctcaggcagatccccttgtgagaagacagcgagtacaagaccttatggcacaaatgcagggtccctataatttcatacaggattcaatgctggattttgaaaatcagacacttgatcctgccattgtatctgcacagcctatgaatccaacacaaaacatggacatgccccagctggtttgccctccagttcattctgaatctagacttgctcagcctaatcaagttcctgtacaaccagaagcgacacaggttcctttggtatcatccacaagtgaggggtacacagcatctcaacccttgtaccagccttctcatgctacagagcaacgaccacagaaggaaccaattgatcagattcaggcaacaatctctttaaatacagaccagactacagcatcatcatcccttcctgctgcgtctcagcctcaagtatttcaggctgggacaagcaaacctttacatagcagtggaatcaatgtaaatgcagctccattccaatccatgcaaacggtgttcaatatgaatgccccagttcctcctgttaatgaaccagaaactttaaaacagcaaaatcagtaccaggccagttataaccagagcttttctagtcagcctcaccaagtagaacaaacagagcttcagcaagaacagcttcaaacagtggttggcacttaccatggttccccagaccagtcccatcaagtgactggtaaccaccagcagcctcctcagcagaacactggatttccacgtagcaatcagccctattacaatagtcgtggtgtgtctcgtggaggctcccgtggtgctagaggcttgatgaatggataccggggccctgccaatggattcagaggaggatatgatggttaccgcccttcattctctaacactccaaacagtggttatacacagtctcagttcagtgctccccgggattactctggctatcaacgggatggatatcagcagaatttcaagcgaggctctgggcagagtggaccacggggagccccacgaggtcgtggagggcccccaagacccaacagagggatgccgcaaatgaacactcagcaagtgaattaatctgattcacaggattatgtttaatcgccaaaaacacactggccagtgtaccataatatgttaccagaagagttattatctatttgttctccctttcaggaaacttattgtaaagggactgttttcatcccataaagacaggactacaattgtcagctttctattacctggatatggaaggaaactatttttactctgcatgttctgtcctaagcgtcatcttgagccttgcacatgatactcagattcctcacccttgcttaggagtaaaacaatatactttacagggtgataataatctccatagttatttgaagtggcttgaaaaaggcaagattgacttttatgacattggataaaatctacaaatcagccctcgagttattcaatgataactgacaaactaaattatttccctagaaaggaagatgaaaggagtggagtgtggtttggcagaacaactgcatttcacagcttttccagttaaattggagcactgaacgttcagatgcataccaaattatgcatgggtcctaatcacacatataaggctggctaccagctttgacacagcactgttcatctggccaaacaactgtggttaaaaacacatgtaaaatgctttttaacagctgatactgtataagacaaagccaagatgcaaaattaggctttgattggcactttttgaaaaatatgcaacaaatatgggatgtaatccggatggccgcttctgtacttaatgtgaaatatttagatacctttttgaacacttaacagtttctttgagacaatgacttttgtaaggattggtactatctatcattccttatgacatgtacattgtctgtcactaatccttggattttgctgtattgtcacctaaattggtacaggtactgatgaaaatctctagtggataatcataacactctcggtcacatgtttttccttcagcttgaaagcttttttttaaaaggaaaagataccaaatgcctgctgctaccacccttttcaattgctatcttttgaaaggcaccagtatgtgttttagattgatttccctgtttcagggaaatcacggacagtagtttcagttctgatggtataagcaaaacaaataaaacgtttataaaagttgtatcttgaaacactggtgttcaacagctagcagcttatgtgattcaccccatgccacgttagtgtcacaaattttatggtttatctccagcaacatttctctagtacttgcacttattatcttttgtctaatttaaccttaactgaattctccgtttctcctggaggcatttatattcagtgataattccttcccttagatgcatagggagagtctctaaatttgatggaaatggacacttgagtagtgacttagccttatgtactctgttggaatttgtgctagcagtttgagcactagttctgtgtgcctaggaagttaatgctgcttattgtctcattctgacttcatggagaattaatcccacctttaagcaaaggctactaagttaatggtattttctgtgcagaaattaaattttattttcagcatttagcccaggaattcttccagtaggtgctcagctatttaaaaacaaaactattctcaaacattcatcattagacaactggagtttttgctggttttgtaacctaccaaaatggataggctgttgaacattccacattcaaaagttttgtagggtggtgggaaatgggggatcttcaatgtttattttaaaataaaataaaataagttcttgacttt

SEQ ID NO: 116052 - DNA, 3498 bp, Homo sapiens
  Payload ID: 2640
  Gene Symbol: CAPRIN1
  Gene Name: cell cycle associated protein 1
  Uniprot ID: Q14444
  ENST ID: ENST00000389645
  CDS Start-End: 141-2225
actaggagcggctctcggtgcagcgggacagggcgaagcggcctgcgcccacggagcgcgcgacactgcccggaagggaccaccacccttgccccctcagctgcccactcgtgatttccagcggcctccgcgcgcgcacgatgccctcggccaccagccacagcgggagcggcagcaagtcgtccggaccgccaccgccgtcgggttcctccgggagtgaggcggccgcgggagccggggccgccgcgccggcttctcagcaccccgcaaccggcaccggcgctgtccagaccgaggccatgaagcagattctcggggtgatcgacaagaaacttcggaacctggagaagaaaaagggtaagcttgatgattaccaggaacgaatgaacaaaggggaaaggcttaatcaagatcagctggatgccgtttctaagtaccaggaagtcacaaataatttggagtttgcaaaagaattacagaggagtttcatggcactaagtcaagatattcagaaaacaataaagaagacagcacgtcgggagcagcttatgagagaagaagctgaacagaaacgtttaaaaactgtacttgagctacagtatgttttggacaaattgggagatgatgaagtgcggactgacctgaaacaaggtttgaatggagtgccaatattgtccgaagaggagttgtcattgttggatgaattctataagctagtagaccctgaacgggacatgagcttgaggttgaatgaacagtatgaacatgcctccattcacctgtgggacctgctggaagggaaggaaaaacctgtatgtggaaccacctataaagttctaaaggaaattgttgagcgtgtttttcagtcaaactactttgacagcacccacaaccaccagaatgggctgtgtgaggaagaagaggcagcctcagcacctgcagttgaagaccaggtacctgaagctgaacctgagccagcagaagagtacactgagcaaagtgaagttgaatcaacagagtatgtaaatagacagttcatggcagaaacacagttcaccagtggtgaaaaggagcaggtagatgagtggacagttgaaacggttgaggtggtaaattcactccagcagcaacctcaggctgcatccccttcagtaccagagccccactctttgactccagtggctcaggcagatccccttgtgagaagacagcgagtacaagaccttatggcacaaatgcagggtccctataatttcatacaggattcaatgctggattttgaaaatcagacacttgatcctgccattgtatctgcacagcctatgaatccaacacaaaacatggacatgccccagctggtttgccctccagttcattctgaatctagacttgctcagcctaatcaagttcctgtacaaccagaagcgacacaggttcctttggtatcatccacaagtgaggggtacacagcatctcaacccttgtaccagccttctcatgctacagagcaacgaccacagaaggaaccaattgatcagattcaggcaacaatctctttaaatacagaccagactacagcatcatcatcccttcctgctgcgtctcagcctcaagtatttcaggctgggacaagcaaacctttacatagcagtggaatcaatgtaaatgcagctccattccaatccatgcaaacggtgttcaatatgaatgccccagttcctcctgttaatgaaccagaaactttaaaacagcaaaatcagtaccaggccagttataaccagagcttttctagtcagcctcaccaagtagaacaaacagagcttcagcaagaacagcttcaaacagtggttggcacttaccatggttccccagaccagtcccatcaagtgactggtaaccaccagcagcctcctcagcagaacactggatttccacgtagcaatcagccctattacaatagtcgtggtgtgtctcgtggaggctcccgtggtgctagaggcttgatgaatggataccggggccctgccaatggattcagaggaggatatgatggttaccgcccttcattctctaacactccaaacagtggttatacacagtctcagttcagtgctccccgggattactctggctatcaacgggatggatatcagcagaatttcaagcgaggctctgggcagagtggaccacggggagccccacgaggtaatattttgtggtggtgatcctagctcctaagtggagcttctgttctggccttggaagagctgttaatagtctgcatgttaggaatacatttatcctttccagacttgttgctagggattaaatgaaatgctctgtttctaaaacttaatcttggacccaaattttaatttttgaatgatttaattttccctgttactatataaactgtcttgaaaactagaacatattctcttctcagaaaaagtgtttttccaactgaaaattatttttcaggtcctaaaacctgctaaatgtttttaggaagtacttactgaaacatttttgtaagacatttttggaatgagattgaacatttatataaatttattattcctctttcatttttttgaaacatgcctattatattttagggccagacaccctttaatggccggataagccatagttaacatttagagaaccatttagaagtgatagaactaatggaatttgcaatgccttttggacctctattagtgatataaatatcaagttatttctgacttttaaacaaaactcccaaattcctaacttattgagctatacttaaaaaaaattacaggtttagagagttttttgtttttcttttactgttggaaaactacttcccattttggcaggaagttaacctatttaacaattagagctagcatttcatgtagtctgaaattctaaatggttctctgatttgagggaggttaaacatcaaacaggtttcctctattggccataacatgtataaaatgtgtgttaaggaggaattacaacgtactttgatttgaatactagtagaaactggccaggaaaaaggtacatttttctaaaaattaatggatcacttgggaattactgacttgactagaagtatcaaaggatgtttgcatgtgaatgtgggttatgttctttcccaccttgtagcatattcgatgaaagttgagttaactgatagctaaaaatctgttttaacagcatgtaaaaagttattttatctgttaaaagtcattatacagttttgaatgttatgtagtttctttttaacagtttaggtaataaggtctgttttcattctggtgcttttattaattttgatagtatgatgttacttactactgaaatgtaagctagagtgtacactagaatgtaagctccatgagagcaggtaccttgtctgtcttctctgctgtatctattcccaacgcttgatgatggtgcctggcacatagtaggcactcaataaatatttgttgaatg

SEQ ID NO: 116053 - DNA, 668 bp, Homo sapiens
  Payload ID: 2640
  Gene Symbol: CAPRIN1
  Gene Name: cell cycle associated protein 1
  ENST ID: ENST00000534825
  CDS Start-End: 109-668
ggaagccggcaaaagccggccctccccggtagggaccgttgcagtggccgttggcggccggcgcggcgatgccccgcctccggcgcgagcctcggagcccccgggctgatgccctcggccaccagccacagcgggagcggcagcaagtcgtccggaccgccaccgccgtcgggttcctccgggagtgaggcggccgcgggagccggggccgccgcgccggcttctcagcaccccgcaaccggcaccggcgctgtccagaccgaggccatgaagcagattctcggggtgatcgacaagaaacttcggaacctggagaagaaaaagggtaagcttgatgattaccaggaacgaatgaacaaaggggaaaggcttaatcaagatcagctggatgccgtttctaagtaccaggaagtcacaaataatttggagtttgcaaaagaattacagaggagtttcatggcactaagtcaagatattcagaaaacaataaagaagacagcacgtcgggagcagcttatgagagaagaagctgaacagaaacgtttaaaaactgtacttgagctacagtatgttttggacaaattgggagatgatgaagtgcggactgacctgaaacaaggtttgaatggagtgccaatattgtccgaagaggagttgtcattgttgga

SEQ ID NO: 116054 - DNA, 2266 bp, Homo sapiens
  Payload ID: 2640
  Gene Symbol: CAPRIN1
  Gene Name: cell cycle associated protein 1
  ENST ID: ENST00000529307
  CDS Start-End: 233-2119
gtctctgaggcccgatttctctgacgagggcccaaaatgaagaggtccctgcgcggggggctccgggttcaaccgaccgcctcgtggagttggggcggcctgcgtcctgcagccttggggtctgtccgctcggttaccatgcactcgagacctgtcgagcgtcccctcttcttccgtaggagagaagtgtgtttagaatcttaagggtaagcttgatgattaccaggaacgaatgaacaaaggggaaaggcttaatcaagatcagctggatgccgtttctaagtaccaggaagtcacaaataatttggagtttgcaaaagaattacagaggagtttcatggcactaagtcaagatattcagaaaacaataaagaagacagcacgtcgggagcagcttatgagagaagaagctgaacagaaacgtttaaaaactgtacttgagctacagtatgttttggacaaattgggagatgatgaagtgcggactgacctgaaacaaggtttgaatggagtgccaatattgtccgaagaggagttgtcattgttggatgaattctataagctagtagaccctgaacgggacatgagcttgaggttgaatgaacagtatgaacatgcctccattcacctgtgggacctgctggaagggaaggaaaaacctgtatgtggaaccacctataaagttctaaaggaaattgttgagcgtgtttttcagtcaaactactttgacagcacccacaaccaccagaatgggctgtgtgaggaagaagaggcagcctcagcacctgcagttgaagaccaggtacctgaagctgaacctgagccagcagaagagtacactgagcaaagtgaagttgaatcaacagagtatgtaaatagacagttcatggcagaaacacagttcaccagtggtgaaaaggagcaggtagatgagtggacagttgaaacggttgaggtggtaaattcactccagcagcaacctcaggctgcatccccttcagtaccagagccccactctttgactccagtggctcaggcagatccccttgtgagaagacagcgagtacaagaccttatggcacaaatgcagggtccctataatttcatacaggattcaatgctggattttgaaaatcagacacttgatcctgccattgtatctgcacagcctatgaatccaacacaaaacatggacatgccccagctggtttgccctccagttcattctgaatctagacttgctcagcctaatcaagttcctgtacaaccagaagcgacacaggttcctttggtatcatccacaagtgaggggtacacagcatctcaacccttgtaccagccttctcatgctacagagcaacgaccacagaaggaaccaattgatcagattcaggcaacaatctctttaaatacagaccagactacagcatcatcatcccttcctgctgcgtctcagcctcaagtatttcaggctgggacaagcaaacctttacatagcagtggaatcaatgtaaatgcagctccattccaatccatgcaaacggtgttcaatatgaatgccccagttcctcctgttaatgaaccagaaactttaaaacagcaaaatcagtaccaggccagttataaccagagcttttctagtcagcctcaccaagtagaacaaacagagcttcagcaagaacagcttcaaacagtggttggcacttaccatggttccccagaccagtcccatcaagtgactggtaaccaccagcagcctcctcagcagaacactggatttccacgtagcaatcagccctattacaatagtcgtggtgtgtctcgtggaggctcccgtggtgctagaggcttgatgaatggataccggggccctgccaatggattcagaggaggatatgatggttaccgcccttcattctctaacactccaaacagtggttatacacagtctcagttcagtgctccccgggattactctggctatcaacgggatggatatcagcagaatttcaagcgaggctctgggcagagtggaccacggggagccccacgaggtcgtggagggcccccaagacccaacagagggatgccgcaaatgaacactcagcaagtgaattaatctgattcacaggattatgtttaatcgccaaaaacacactggccagtgtaccataatatgttaccagaagagttattatctatttgttctccctttcaggaaacttattgtaaagggactgttttcatcccataaagacaggactac

SEQ ID NO: 116055 - DNA, 3438 bp, Homo sapiens
  Payload ID: 2640
  Gene Symbol: CAPRIN1
  Gene Name: cell cycle associated protein 1
  Uniprot ID: Q14444
  ENST ID: ENST00000532820
  CDS Start-End: 212-2341
gtgcgaggcccagccgggcgccccgctggcgggtcgcgcgcgcgcccgcgcactcttcctgccctcgaggcgcgccgcgccccctcccccacccgctcgcgtaggctaccgctcgctgcgcgttttgtcccgcgtctcgccccgtccgtctcctgactggccgctcttgtccttcctcccgctttttcttctctctccttgcggtctgaagatgccctcggccaccagccacagcgggagcggcagcaagtcgtccggaccgccaccgccgtcgggttcctccgggagtgaggcggccgcgggagccggggccgccgcgccggcttctcagcaccccgcaaccggcaccggcgctgtccagaccgaggccatgaagcagattctcggggtgatcgacaagaaacttcggaacctggagaagaaaaagggtaagcttgatgattaccaggaacgaatgaacaaaggggaaaggcttaatcaagatcagctggatgccgtttctaagtaccaggaagtcacaaataatttggagtttgcaaaagaattacagaggagtttcatggcactaagtcaagatattcagaaaacaataaagaagacagcacgtcgggagcagcttatgagagaagaagctgaacagaaacgtttaaaaactgtacttgagctacagtatgttttggacaaattgggagatgatgaagtgcggactgacctgaaacaaggtttgaatggagtgccaatattgtccgaagaggagttgtcattgttggatgaattctataagctagtagaccctgaacgggacatgagcttgaggttgaatgaacagtatgaacatgcctccattcacctgtgggacctgctggaagggaaggaaaaacctgtatgtggaaccacctataaagttctaaaggaaattgttgagcgtgtttttcagtcaaactactttgacagcacccacaaccaccagaatgggctgtgtgaggaagaagaggcagcctcagcacctgcagttgaagaccaggtacctgaagctgaacctgagccagcagaagagtacactgagcaaagtgaagttgaatcaacagagtatgtaaatagacagttcatggcagaaacacagttcaccagtggtgaaaaggagcaggtagatgagtggacagttgaaacggttgaggtggtaaattcactccagcagcaacctcaggctgcatccccttcagtaccagagccccactctttgactccagtggctcaggcagatccccttgtgagaagacagcgagtacaagaccttatggcacaaatgcagggtccctataatttcatacaggattcaatgctggattttgaaaatcagacacttgatcctgccattgtatctgcacagcctatgaatccaacacaaaacatggacatgccccagctggtttgccctccagttcattctgaatctagacttgctcagcctaatcaagttcctgtacaaccagaagcgacacaggttcctttggtatcatccacaagtgaggggtacacagcatctcaacccttgtaccagccttctcatgctacagagcaacgaccacagaaggaaccaattgatcagattcaggcaacaatctctttaaatacagaccagactacagcatcatcatcccttcctgctgcgtctcagcctcaagtatttcaggctgggacaagcaaacctttacatagcagtggaatcaatgtaaatgcagctccattccaatccatgcaaacggtgttcaatatgaatgccccagttcctcctgttaatgaaccagaaactttaaaacagcaaaatcagtaccaggccagttataaccagagcttttctagtcagcctcaccaagtagaacaaacagagcttcagcaagaacagcttcaaacagtggttggcacttaccatggttccccagaccagtcccatcaagtgactggtaaccaccagcagcctcctcagcagaacactggatttccacgtagcaatcagccctattacaatagtcgtggtgtgtctcgtggaggctcccgtggtgctagaggcttgatgaatggataccggggccctgccaatggattcagaggaggatatgatggttaccgcccttcattctctaacactccaaacagtggttatacacagtctcagttcagtgctccccgggattactctggctatcaacgggatggatatcagcagaatttcaagcgaggctctgggcagagtggaccacggggagccccacgaggtcgtggagggcccccaagacccaacagagggatgccgcaaatgaacactcagcaagtgaattaatctgattcacaggattatgtttaatcgccaaaaacacactggccagtgtaccataatatgttaccagaagagttattatctatttgttctccctttcaggaaacttattgtaaagggactgttttcatcccataaagacaggactacaattgtcagctttctattacctggatatggaaggaaactatttttactctgcatgttctgtcctaagcgtcatcttgagccttgcacatgatactcagattcctcacccttgcttaggagtaaaacaatatactttacagggtgataataatctccatagttatttgaagtggcttgaaaaaggcaagattgacttttatgacattggataaaatctacaaatcagccctcgagttattcaatgataactgacaaactaaattatttccctagaaaggaagatgaaaggagtggagtgtggtttggcagaacaactgcatttcacagcttttccagttaaattggagcactgaacgttcagatgcataccaaattatgcatgggtcctaatcacacatataaggctggctaccagctttgacacagcactgttcatctggccaaacaactgtggttaaaaacacatgtaaaatgctttttaacagctgatactgtataagacaaagccaagatgcaaaattaggctttgattggcactttttgaaaaatatgcaacaaatatgggatgtaatccggatggccgcttctgtacttaatgtgaaatatttagatacctttttgaacacttaacagtttctttgagacaatgacttttgtaaggattggtactatctatcattccttatgacatgtacattgtctgtcactaatccttggattttgctgtattgtcacctaaattggtacaggtactgatgaaaatctctagtggataatcataacactctcggtcacatgtttttccttcagcttgaaagcttttttttaaaaggaaaagataccaaatgcctgctgctaccacccttttcaattgctatcttttgaaaggcaccagtatgtgttttagattgatttccctgtttcagggaaatcacggacagtagtttcag

SEQ ID NO: 116056 - DNA, 3454 bp, Homo sapiens
  Payload ID: 2640
  Gene Symbol: CAPRIN1
  Gene Name: cell cycle associated protein 1
  Uniprot ID: Q14444
  ENST ID: ENST00000530820
  CDS Start-End: 93-2177
gcgttttgtcccgcgtctcgccccgtccgtctcctgactggccgctcttgtccttcctcccgctttttcttctctctccttgcggtctgaagatgccctcggccaccagccacagcgggagcggcagcaagtcgtccggaccgccaccgccgtcgggttcctccgggagtgaggcggccgcgggagccggggccgccgcgccggcttctcagcaccccgcaaccggcaccggcgctgtccagaccgaggccatgaagcagattctcggggtgatcgacaagaaacttcggaacctggagaagaaaaagggtaagcttgatgattaccaggaacgaatgaacaaaggggaaaggcttaatcaagatcagctggatgccgtttctaagtaccaggaagtcacaaataatttggagtttgcaaaagaattacagaggagtttcatggcactaagtcaagatattcagaaaacaataaagaagacagcacgtcgggagcagcttatgagagaagaagctgaacagaaacgtttaaaaactgtacttgagctacagtatgttttggacaaattgggagatgatgaagtgcggactgacctgaaacaaggtttgaatggagtgccaatattgtccgaagaggagttgtcattgttggatgaattctataagctagtagaccctgaacgggacatgagcttgaggttgaatgaacagtatgaacatgcctccattcacctgtgggacctgctggaagggaaggaaaaacctgtatgtggaaccacctataaagttctaaaggaaattgttgagcgtgtttttcagtcaaactactttgacagcacccacaaccaccagaatgggctgtgtgaggaagaagaggcagcctcagcacctgcagttgaagaccaggtacctgaagctgaacctgagccagcagaagagtacactgagcaaagtgaagttgaatcaacagagtatgtaaatagacagttcatggcagaaacacagttcaccagtggtgaaaaggagcaggtagatgagtggacagttgaaacggttgaggtggtaaattcactccagcagcaacctcaggctgcatccccttcagtaccagagccccactctttgactccagtggctcaggcagatccccttgtgagaagacagcgagtacaagaccttatggcacaaatgcagggtccctataatttcatacaggattcaatgctggattttgaaaatcagacacttgatcctgccattgtatctgcacagcctatgaatccaacacaaaacatggacatgccccagctggtttgccctccagttcattctgaatctagacttgctcagcctaatcaagttcctgtacaaccagaagcgacacaggttcctttggtatcatccacaagtgaggggtacacagcatctcaacccttgtaccagccttctcatgctacagagcaacgaccacagaaggaaccaattgatcagattcaggcaacaatctctttaaatacagaccagactacagcatcatcatcccttcctgctgcgtctcagcctcaagtatttcaggctgggacaagcaaacctttacatagcagtggaatcaatgtaaatgcagctccattccaatccatgcaaacggtgttcaatatgaatgccccagttcctcctgttaatgaaccagaaactttaaaacagcaaaatcagtaccaggccagttataaccagagcttttctagtcagcctcaccaagtagaacaaacagagcttcagcaagaacagcttcaaacagtggttggcacttaccatggttccccagaccagtcccatcaagtgactggtaaccaccagcagcctcctcagcagaacactggatttccacgtagcaatcagccctattacaatagtcgtggtgtgtctcgtggaggctcccgtggtgctagaggcttgatgaatggataccggggccctgccaatggattcagaggaggatatgatggttaccgcccttcattctctaacactccaaacagtggttatacacagtctcagttcagtgctccccgggattactctggctatcaacgggatggatatcagcagaatttcaagcgaggctctgggcagagtggaccacggggagccccacgaggtaatattttgtggtggtgatcctagctcctaagtggagcttctgttctggccttggaagagctgttaatagtctgcatgttaggaatacatttatcctttccagacttgttgctagggattaaatgaaatgctctgtttctaaaacttaatcttggacccaaattttaatttttgaatgatttaattttccctgttactatataaactgtcttgaaaactagaacatattctcttctcagaaaaagtgtttttccaactgaaaattatttttcaggtcctaaaacctgctaaatgtttttaggaagtacttactgaaacatttttgtaagacatttttggaatgagattgaacatttatataaatttattattcctctttcatttttttgaaacatgcctattatattttagggccagacaccctttaatggccggataagccatagttaacatttagagaaccatttagaagtgatagaactaatggaatttgcaatgccttttggacctctattagtgatataaatatcaagttatttctgacttttaaacaaaactcccaaattcctaacttattgagctatacttaaaaaaaattacaggtttagagagttttttgtttttcttttactgttggaaaactacttcccattttggcaggaagttaacctatttaacaattagagctagcatttcatgtagtctgaaattctaaatggttctctgatttgagggaggttaaacatcaaacaggtttcctctattggccataacatgtataaaatgtgtgttaaggaggaattacaacgtactttgatttgaatactagtagaaactggccaggaaaaaggtacatttttctaaaaattaatggatcacttgggaattactgacttgactagaagtatcaaaggatgtttgcatgtgaatgtgggttatgttctttcccaccttgtagcatattcgatgaaagttgagttaactgatagctaaaaatctgttttaacagcatgtaaaaagttattttatctgttaaaagtcattatacagttttgaatgttatgtagtttctttttaacagtttaggtaataaggtctgttttcattctggtgcttttattaattttgatagtatgatgttacttactactgaaatgtaagctagagtgtacactagaatgtaagctccatgagagcaggtaccttgtctgtcttctctgctgtatctattcccaacgcttgatgatggtgcctggcacatagtaggcactcaataaatatttgttgaatgaatg

SEQ ID NO: 116057 - DNA, 3266 bp, Homo sapiens
  Payload ID: 2640
  Gene Symbol: CAPRIN1
  Gene Name: cell cycle associated protein 1
  ENST ID: ENST00000618582
  CDS Start-End: 200-2149
cttcctcccgctttttcttctctctccttgcggtctgaagatgccctcggccaccagccacagcgggagcggcagcaagtcgtccggaccgccaccgccgtcgggttcctccgggagtgaggcggccgcgggagccggggccgccgcgccggcttctcagcaccccgcaaccggcaccggcgctgtccagaccgaggccatgaagcagattctcggggtgatcgacaagaaacttcggaacctggagaagaaaaagggtaagcttgatgattaccaggaacgaatgaacaaaggggaaaggcttaatcaagatcagctggatgccgtttctaagtaccaggaagtcacaaataatttggagtttgcaaaagaattacagaggagtttcatggcactaagtcaagatattcagaaaacaataaagaagacagcacgtcgggagcagcttatgagagaagaagctgaacagaaacgtttaaaaactgtacttgagctacagtatgttttggacaaattgggagatgatgaagtgcggactgacctgaaacaaggtttgaatggagtgccaatattgtccgaagaggagttgtcattgttggatgaattctataagctagtagaccctgaacgggacatgagcttgaggttgaatgaacagtatgaacatgcctccattcacctgtgggacctgctggaagggaaggaaaaacctgtatgtggaaccacctataaagttctaaaggaaattgttgagcgtgtttttcagtcaaactactttgacagcacccacaaccaccagaatgggctgtgtgaggaagaagaggcagcctcagcacctgcagttgaagaccaggtacctgaagctgaacctgagccagcagaagagtacactgagcaaagtgaagttgaatcaacagagtatgtaaatagacagttcatggcagaaacacagttcaccagtggtgaaaaggagcaggtagatgagtggacagttgaaacggttgaggtggtaaattcactccagcagcaacctcaggctgcatccccttcagtaccagagccccactctttgactccagtggctcaggcagatccccttgtgagaagacagcgagtacaagaccttatggcacaaatgcagggtccctataatttcatacaggattcaatgctggattttgaaaatcagacacttgatcctgccattgtatctgcacagcctatgaatccaacacaaaacatggacatgccccagctggtttgccctccagttcattctgaatctagacttgctcagcctaatcaagttcctgtacaaccagaagcgacacaggttcctttggtatcatccacaagtgaggggtacacagcatctcaacccttgtaccagccttctcatgctacagagcaacgaccacagaaggaaccaattgatcagattcaggcaacaatctctttaaatacagaccagactacagcatcatcatcccttcctgctgcgtctcagcctcaagtatttcaggctgggacaagcaaacctttacatagcagtggaatcaatgtaaatgcagctccattccaatccatgcaaacggtgttcaatatgaatgccccagttcctcctgttaatgaaccagaaactttaaaacagcaaaatcagtaccaggccagttataaccagagcttttctagtcagcctcaccaagtagaacaaacagagcttcagcaagaacagcttcaaacagtggttggcacttaccatggttccccagaccagtcccatcaagtgactggtaaccaccagcagcctcctcagcagaacactggatttccacgtagcaatcagccctattacaatagtcgtggtgtgtctcgtggaggctcccgtggtgctagaggcttgatgaatggataccggggccctgccatggattcagaggaggatatgatggttaccgcccttcattctctaacactccaaacagtggttatacacagtctcagttcagtgctccccgggattactctggctatcaacgggatggatatcagcagaatttcaagcgaggctctgggcagagtggaccacggggagccccacgaggtcgtggagggcccccaagacccaacagagggatgccgcaaatgaacactcagcaagtgaattaatctgattcacaggattatgtttaatcgccaaaaacacactggccagtgtaccataatatgttaccagaagagttattatctatttgttctccctttcaggaaacttattgtaaagggactgttttcatcccataaagacaggactacaattgtcagctttctattacctggatatggaaggaaactatttttactctgcatgttctgtcctaagcgtcatcttgagccttgcacatgatactcagattcctcacccttgcttaggagtaaaacaatatactttacagggtgataataatctccatagttatttgaagtggcttgaaaaaggcaagattgacttttatgacattggataaaatctacaaatcagccctcgagttattcaatgataactgacaaactaaattatttccctagaaaggaagatgaaaggagtggagtgtggtttggcagaacaactgcatttcacagcttttccagttaaattggagcactgaacgttcagatgcataccaaattatgcatgggtcctaatcacacatataaggctggctaccagctttgacacagcactgttcatctggccaaacaactgtggttaaaaacacatgtaaaatgctttttaacagctgatactgtataagacaaagccaagatgcaaaattaggctttgattggcactttttgaaaaatatgcaacaaatatgggatgtaatccggatggccgcttctgtacttaatgtgaaatatttagatacctttttgaacacttaacagtttctttgagacaatgacttttgtaaggattggtactatctatcattccttatgacatgtacattgtctgtcactaatccttggattttgctgtattgtcacctaaattggtacaggtactgatgaaaatctctagtggataatcataacactctcggtcacatgtttttccttcagcttgaaagcttttttttaaaaggaaaagataccaaatgcctgctgctaccacccttttcaattgctatcttttgaaaggcaccagtatgtgttttagattgatttccctgtttcagggaaatcacggacagtagtttcag

SEQ ID NO: 116058 - DNA, 1649 bp, Homo sapiens
  Payload ID: 2641
  Gene Symbol: CEND1
  Gene Name: cell cycle exit and neuronal differentiation 1
  Uniprot ID: Q8N111
  ENST ID: ENST00000330106
  CDS Start-End: 177-626
agtgcattgtgggaaactcccgagctctcctccgcgttcgcagccgccgtcatcccgcggaggagcgcgcagccccggggaggccggaggacgcgcccatagaatgcccaggggcgacaaactgtcctgagcccctctggtgcagccacctgcctgtcccatacgccccgcccaccatggagtccagagggaagtcagccagcagccccaagcccgacaccaaggtgccccaggtcaccaccgaggccaaggtacccccggcagccgatgggaaagcccccttgaccaagccctcgaagaaggaggccccggccgagaagcagcagccgccagcagcccccaccacggcacctgccaagaagacctcggccaaggccgaccctgcccttctcaacaaccacagcaacctgaagccagcccccacggtccccagcagtcccgatgcaaccccggagcccaagggtcctggggacggggcggaggaagatgaggctgccagtggggggcctgggggccgaggtccctggtcctgtgagaacttcaaccccctgctggtggctgggggtgtggccgtggcagccatagccctgattctcggtgtggccttcctggtccggaaaaaataatacctgggggccaggcggggggcacggagccacttcctgtacagacccgaggaagccagtgcatgcagagttcacccttacctattcgtacacacgcacattcattacacacctacatacgcccccaacacacgcgcacggtgaagaggacgcccgagcccacccctgctgacccaggacttccccaacctccagggcagaaagagcccaggctccggggtccacagcacaggatgtggggcgagggcacagctggggaacggcaagaaaggaatggaccctgtgtgtggccccccccacccctggcggctgggtgatcctgggcccccagggctggtctgagtgcaggtgggggtgccgggatgggttgggcctgggcccggccctcgtggggacattaaagggcgcggtggctccactcgccccatttctgctctttgcgtaccccccgggggtctgcctgggcgaatgcagtgggacggacctggggtgggcactcacctcagcagagcctcaatgccacctccccacaccacccaagcctagctgggtgggaagacggagccctgaagcctgcgtgtggagggggtgctgcccaagggtcgccttccccagcttgtgctccaggggagccccgacgccggcggggaggcagggatgtcgagggcccctcacagctgtgcccgccctgccccgctagactgcccctccagcttgcacccagcaccacctgagtctaaccagcgtataatgcaataacaggtagagtagaactgcttttggcggcgaccgtcacacactgtcctcagcccactgcacctggggaagcccctcgtgcagcccctccttagcacatccagtcccagcgtggcccttggcgcgcagcagcaggcgaactcccagaaggtggtggtgggcactgtgagaacgtggcctgccctcactggccagtggccacaggaaccccgggcctgagtggaggctgagtctgaaataaactctgtcgtctgaaggctgctcttg

SEQ ID NO: 116059 - DNA, 6822 bp, Homo sapiens
  Payload ID: 2642
  Gene Symbol: CCPG1
  Gene Name: cell cycle progression 1
  Uniprot ID: Q9ULG6
  ENST ID: ENST00000310958
  CDS Start-End: 300-2573
ggatgttgtggggatctgcggccgcctggcccagcttcccgcagccgcccggcggcggcctgcgctccacttcgggagtggtagttcttctcttcaccgctgccgggcaggaggcgcaggcgggactacgcgtcacggcatgcactgcggcgcccagccggtcaccgcctgccggctgcagacgcctgcgagcaggttgtttttataagaggcgtcattggcgcccgagctgtgaccgccgccactggggcagccagcacaatcgggcggaggtggcgctgccccttcagacctgaaagatgtctgaaaattccagtgacagtgattcatcttgtggttggactgtcatcagtcatgaggggtcagatatagaaatgttgaattctgtgacccccactgacagctgtgagcccgccccagaatgttcatctttagagcaagaggagcttcaagcattgcagatagagcaaggagaaagcagccaaaatggcacagtgcttatggaagaaactgcttatccagctttggaggaaaccagctcaacaattgaggcagaggaacaaaagatacccgaagacagtatctatattggaactgccagtgatgattctgatattgttacccttgagccacctaagttagaagaaattggaaatcaagaagttgtcattgttgaagaagcacagagttcagaagactttaacatgggctcttcctctagcagccagtatactttctgtcagccagaaactgtattttcatctcagcctagtgacgatgaatcaagtagtgatgaaaccagtaatcagcccagtcctgcctttagacgacgccgtgctaggaagaagaccgtttctgcttcagaatctgaagaccggctagttgctgaacaagaaactgaaccttctaaggagttgagtaaacgtcagttcagtagtggtctcaataagtgtgttatacttgctttggtgattgcaatcagcatgggatttggccatttctatggcacaattcagattcagaagcgtcaacagttagtcagaaagatacatgaagatgaattgaatgatatgaaggattatctttcccagtgtcaacaggaacaagaatcttttatagattataagtcattgaaagaaaatcttgcaaggtgttggacacttactgaagcagagaagatgtcctttgaaactcagaaaacgaaccttgctacagaaaatcagtatttaagagtatccttggagaaggaagaaaaagccttatcctcattacaggaagagttaaacaaactaagagaacagattagaatattggaagataaagggacaagtactgaattagttaaagaaaatcagaaacttaagcagcatttggaagaggaaaagcagaaaaaacacagctttcttagtcaaagggagactctgttgacagaagcaaagatgctaaagagagaactggagagagaacgactagtaactacggctttaaggggggaactccagcagttaagtggtagtcagttacatggcaagtcagattctcccaatgtatatactgaaaaaaaggaaatagcaatcttacgggaaagactcactgagctggaacggaagctaaccttcgaacagcagcgttctgatttgtgggaaagattgtatgttgaggcaaaagatcaaaatggaaaacaaggaacagatggaaaaaagaaagggggcagaggaagccacagggctaaaaataagtcaaaggaaacatttttgggttcagttaaggaaacatttgatgccatgaagaattctaccaaggagtttgtaaggcatcataaagagaaaattaagcaggctaaagaagctgtgaaggaaaatctgaaaaaattctcagattcagttaaatccactttcagacactttaaagataccaccaagaatatctttgatgaaaagggtaataaaagatttggtgctacaaaagaagcagctgaaaaaccaagaacagtttttagtgactatttacatccacagtataaggcacctacagaaaaccatcataatagaggccctactatgcaaaatgatggaaggaaagaaaagccagttcactttaaagaattcagaaaaaatacaaattcaaagaaatgcagtcctgggcatgattgtagagaaaattctcattctttcagaaaggcttgttctggtgtatttgattgtgctcaacaagagtccatgagcctttttaacacagtggtgaatcctataaggatggatgaatttagacagataattcaaaggtacatgttaaaagaactggatactttttgtcactggaacgaacttgatcagttcatcaataagtttttcctaaacggtgtctttatacatgatcagaagctcttcactgactttgttaatgatgttaaagattatcttagaaacatgaaggaatatgaagtagataatgatggagtatttgagaagttggatgaatatatatatagacacttctttggtcacactttttcccctccatatggacccaggtcggtttacataaaaccgtgtcattacagtagtttgtaacatttgtagattggatagcatttttatgatttgatgagtttcttgtaaggttaccgtttctaagagttgtgctttatggccactgagagaattcagaataaattgaaagatggagtctaaaaattattagctgttacaaatggaacatttcattataacgtgatcactttgacttgagcaaatggtttaatttttatcttaaaaatcagttaagaatatataaaatcctactttggccaagtttgtttcttttcattatagtttatatgaaaagatcaccttaagtgaaattattttcctttaatcttttatgtatttattcacttttggaagctaggaatgagcaacacaaattttactctgaagtcagaagagctcatatataataattctaatgtcccacctattttcacttgtccattccatgtaccagcttagttatgatacttagtcacataattatctttgataaaggtagaggcacaaagaggcaaactaagcaagtcaaattctaatgtgtgtacttcataataattttttatccattttcatctttatattctgtaacatgaaacttacctaatcttcaaatgttagcttcattttttacctttgaaatacttaatctttctgaataaatataatgtgtctataaaataatgagactgattctggtgtctttagtcattaagctggtatctagtcctataatgaacaaaggtgaagctgccttgaggagacaagtgaaaaatttttgcttcaaaggagctcacaagctaagtaaataaatgaaattaaggtatggggcatggtggcctcaggctgtctggaggtgtttggaaaggcttcttgagtgaggtggcctttgaactgaacttagtttttaaagtagcttttggaagagaaatgaggatttgctatgcagacagggaagggaatttcacttaaaaggaaggtcatttggagatgtgaagatacactgctttaaggaagcagggtagagctggaggataagagatgcagaccatgaagggccccattttatgctaaaggttttgtcctgtaggacatggagaacttctgaagaattttcaaggcgggtgggataagattatattgtattttagattacagtagtccccccttatcttcaggatatatgttccaagacccccagtggatgctggaaaccagggatagaacataattctatatatactatgcatgaatttctttttccttctttacaatctcacacataggtttgttcttactatagatcttaccaatctcagcatacttttatttctcttgagaaccttcaccctttcacttaaaggaggcgctttatagcttctctttggcatatccaaatgccagcatcactgttgtattttggggtcattattaagttacttaatcatccttaatccttatcttagggatacttgaacacaaacactgtggtaggataacagtatatctgattaacagactgctactaggtgattaatgggtgggtagtgtaaatacacaagaaaaggatgattcacatcccatgtgggatggagcagaactgcattatttcattacattactcagaacaggcatataattgaaaacttatgaattatttttttttaattatttgagatggaatcttgctttgtcagccaggctggagtgcagtgacacgatctcagctcactgcaacctctgtctcctgggttcaggtgattctcctccctagtctcccaagtagctgggactataggcacgtgccaccacacccggctaattttcatatttttagtagagatggggtttcaccatgttggccaggctgttcttgaaatcctgacctcaagtgatccacacatgtctacctcccaaagtgctgggattacagtcgtgagccactgtaccccgcctaaaactgatgaattatttctgaaattttctatttaacattttcagaccacagttgaccacaggtaacggaaacctcaatcacagaaagtaaagccgtggatacggtgggactaatgtattggtagcagcctagaggattgatgggaaaggtatgaagctagaaggtggtcaatataatacagacatgagctgatgaacatctaaactgggactatactagtaggagaggaaaggaaaaaacatttggaaaatagtaacattgatatttcttgtgaaggagaagtagaaagtaacagtgacttctagatttctgggttgggtcatcttgttggatagtagtaccactgagatagggaattcaaggtttggggcaagggtaattggagatgagaattgtgtttggaggtaactactgacattcaagtggagagggttagttggcagttagttctatggtcatctcttttgccgagactgtatatttatcagactcctgggagaacaccaacatccatggggttgtagggaaggctaaggacaggagtggggagtggtaccttgaaaatccaaaagccatctcaagtaaaaggaataaatgtgtcatgctttttaaaaagttgatgtgcggaaaatgttttcttggcttggaaactgggcggccaggggatgacagtatggacttccagtgaagtagtgacggaagcctgatcatagacattaaggaaagcggtgtaggtgttgtgagcttttgctgtaagaaaaagttgagacttttgttttgctttgtttgtgagagatgtgtatgtatttctgctgagtgataaagccagcggggagggactgatttttataggaaaggaggaaaaataatggaaacacatctcattattttattgtcacatttcttttctttgttatcttttgagtgtttcccttttttgccagtagagttattgtctattttttctttctataggacaaaaaaactaatacagactcctttatttttatatggatatactaggattgtaattcagatatttaatatcttttatcagtgttcagatcatagattaatggagaaaacatttaaaattgttttaaatttaaatacattgaactctaacatagatgaaaaatgtgtttactgctttcagtcgacctgataaaaagcaacgtatggtaaatattgaaaactccaggcatcgaaaacaagagcagaagcaccttcagccacagccttataaaagggaaggtaaatggcataaatatggtcgcactaatggaagacaaatggcaaatcttgaaatagaattggggcaattaccttttgatcctcaatactgattcacaattgagttaaattagacaactgtaagagaaaaatttatgctttgtataatgtttggtattgaaactaatgaaattaccaagatgacaatgtcttttcttttgtttctaagtatcagtttgataactttatattattcctcagaagcattagttaaaagtctactaacctgcattttcctgtagtttagcttcgttgaattttttttgacactggaaatgttcaactgtagttttattaaggaagccaggcatgcaacagattttgtgcatgaaatgagacttcctttcagtgtaagagcttaaagcaagctcagtcatacatgacaaagtgtaattaacactgatgtttgtgttaaatttgcagcagagcttgagaaaagtacattgttctggaatttcatcattaacattttataatcttacactcacttcttgtctttttgtgggttcaagagccctctgacttgtgaagaatttgctgccctcttaagagcttgctgacttgttttcttgtgaaattttttgcacatctgaatatcgtggaagaaacaataaaactacaccatgaggaaaactaaaggtctttatttaaaatctggcattgtattaacatgtaattttatactatgtggtattttatacatttcctcagtagtgatatttggtaaagcagttcatacagcttttttctaagttccatgaatcttacccagtgtttaccgaagtatttaagcagcatctgaatatttccacccagcaatgttaatttatctaggaaagttcagaatttcatcttcatgttgaatttcccttttaacttccgttcatagacatatatgtgacttccaattcgaccctctggcaagtgagtgtggaagaaaacagcagttcttttataattgcttgaaattaggaaagcgcttatttcctagaagcaaataaatgtttaagtaaataaaggcta

SEQ ID NO: 116060 - DNA, 3453 bp, Homo sapiens
  Payload ID: 2642
  Gene Symbol: CCPG1
  Gene Name: cell cycle progression 1
  Uniprot ID: Q9ULG6
  ENST ID: ENST00000442196
  CDS Start-End: 49-2472
agccagcacaatcgggcggaggtggcgctgccccttcagacctgaaagatgtctgaaaattccagtgacagtgattcatcttgtggttggactgtcatcagtcatgaggggtcagatatagaaatgttgaattctgtgacccccactgacagctgtgagcccgccccagaatgttcatctttagagcaagaggagcttcaagcattgcagatagagcaaggagaaagcagccaaaatggcacagtgcttatggaagaaactgcttatccagctttggaggaaaccagctcaacaattgaggcagaggaacaaaagatacccgaagacagtatctatattggaactgccagtgatgattctgatattgttacccttgagccacctaagttagaagaaattggaaatcaagaagttgtcattgttgaagaagcacagagttcagaagactttaacatgggctcttcctctagcagccagtatactttctgtcagccagaaactgtattttcatctcagcctagtgacgatgaatcaagtagtgatgaaaccagtaatcagcccagtcctgcctttagacgacgccgtgctaggaagaagaccgtttctgcttcagaatctgaagaccggctagttgctgaacaagaaactgaaccttctaaggagttgagtaaacgtcagttcagtagtggtctcaataagtgtgttatacttgctttggtgattgcaatcagcatgggatttggccatttctatggcacaattcagattcagaagcgtcaacagttagtcagaaagatacatgaagatgaattgaatgatatgaaggattatctttcccagtgtcaacaggaacaagaatcttttatagattataagtcattgaaagaaaatcttgcaaggtgttggacacttactgaagcagagaagatgtcctttgaaactcagaaaacgaaccttgctacagaaaatcagtatttaagagtatccttggagaaggaagaaaaagccttatcctcattacaggaagagttaaacaaactaagagaacagattagaatattggaagataaagggacaagtactgaattagttaaagaaaatcagaaacttaagcagcatttggaagaggaaaagcagaaaaaacacagctttcttagtcaaagggagactctgttgacagaagcaaagatgctaaagagagaactggagagagaacgactagtaactacggctttaaggggggaactccagcagttaagtggtagtcagttacatggcaagtcagattctcccaatgtatatactgaaaaaaaggaaatagcaatcttacgggaaagactcactgagctggaacggaagctaaccttcgaacagcagcgttctgatttgtgggaaagattgtatgttgaggcaaaagatcaaaatggaaaacaaggaacagatggaaaaaagaaagggggcagaggaagccacagggctaaaaataagtcaaaggaaacatttttgggttcagttaaggaaacatttgatgccatgaagaattctaccaaggagtttgtaaggcatcataaagagaaaattaagcaggctaaagaagctgtgaaggaaaatctgaaaaaattctcagattcagttaaatccactttcagacactttaaagataccaccaagaatatctttgatgaaaagggtaataaaagatttggtgctacaaaagaagcagctgaaaaaccaagaacagtttttagtgactatttacatccacagtataaggcacctacagaaaaccatcataatagaggccctactatgcaaaatgatggaaggaaagaaaagccagttcactttaaagaattcagaaaaaatacaaattcaaagaaatgcagtcctgggcatgattgtagagaaaattctcattctttcagaaaggcttgttctggtgtatttgattgtgctcaacaagagtccatgagcctttttaacacagtggtgaatcctataaggatggatgaatttagacagataattcaaaggtacatgttaaaagaactggatactttttgtcactggaacgaacttgatcagttcatcaataagtttttcctaaacggtgtctttatacatgatcagaagctcttcactgactttgttaatgatgttaaagattatcttagaaacatgaaggaatatgaagtagataatgatggagtatttgagaagttggatgaatatatatatagacacttctttggtcacactttttcccctccatatggacccagtcgacctgataaaaagcaacgtatggtaaatattgaaaactccaggcatcgaaaacaagagcagaagcaccttcagccacagccttataaaagggaaggtaaatggcataaatatggtcgcactaatggaagacaaatggcaaatcttgaaatagaattggggcaattaccttttgatcctcaatactgattcacaattgagttaaattagacaactgtaagagaaaaatttatgctttgtataatgtttggtattgaaactaatgaaattaccaagatgacaatgtcttttcttttgtttctaagtatcagtttgataactttatattattcctcagaagcattagttaaaagtctactaacctgcattttcctgtagtttagcttcgttgaattttttttgacactggaaatgttcaactgtagttttattaaggaagccaggcatgcaacagattttgtgcatgaaatgagacttcctttcagtgtaagagcttaaagcaagctcagtcatacatgacaaagtgtaattaacactgatgtttgtgttaaatttgcagcagagcttgagaaaagtacattgttctggaatttcatcattaacattttataatcttacactcacttcttgtctttttgtgggttcaagagccctctgacttgtgaagaatttgctgccctcttaagagcttgctgacttgttttcttgtgaaattttttgcacatctgaatatcgtggaagaaacaataaaactacaccatgaggaaaactaaaggtctttatttaaaatctggcattgtattaacatgtaattttatactatgtggtattttatacatttcctcagtagtgatatttggtaaagcagttcatacagcttttttctaagttccatgaatcttacccagtgtttaccgaagtatttaagcagcatctgaatatttccacccagcaatgttaatttatctaggaaagttcagaatttcatcttcatgttgaatttcccttttaacttccgttcatagacatatatgtgacttccaattcgaccctctggcaagtgagtgtggaagaaaacagcagttcttttataattgcttgaaattaggaaagcgcttatttcctagaagcaaataaatgtttaagtaaataaaggctacattttgctga

SEQ ID NO: 116061 - DNA, 1945 bp, Homo sapiens
  Payload ID: 2642
  Gene Symbol: CCPG1
  Gene Name: cell cycle progression 1
  Uniprot ID: Q9ULG6
  ENST ID: ENST00000425574
  CDS Start-End: 96-1370
ataagaggcgtcattggcgcccgagctgtgaccgccgccactggggcagccagcacaatcgggcggaggtggcgctgccccttcagacctgaaagatgtctgaaaattccagtgacagtgattcatcttgtggttggactgtcatcagtcatgaggggtcagatatagaaatgttgaattctgtgacccccactgacagctgtgagcccgccccagaatgttcatctttagagcaagaggagcttcaagcattgcagatagagcaaggagaaagcagccaaaatggcacagtgcttatggaagaaactgcttatccagctttggaggaaaccagctcaacaattgaggcagaggaacaaaagatacccgaagacagtatctatattggaactgccagtgatgattctgatattgttacccttgagccacctaagttagaagaaattggaaatcaagaagttgtcattgttgaagaagcacagagttcagaagactttaacatgggctcttcctctagcagccagtatactttctgtcagccagaaactgtattttcatctcagcctagtgacgatgaatcaagtagtgatgaaaccagtaatcagcccagtcctgcctttagacgacgccgtgctaggaagaagaccgtttctgcttcagaatctgaagaccggctagttgctgaacaagaaactgaaccttctaaggagttgagtaaacgtcagttcagtagtggtctcaataagtgtgttatacttgctttggtgattgcaatcagcatgggatttggccatttctatggcacaattcagattcagaagcgtcaacagttagtcagaaagatacatgaagatgaattgaatgatatgaaggattatctttcccagtgtcaacaggaacaagaatcttttatagattataagtcattgaaagaaaatcttgcaaggtgttggacacttactgaagcagagaagatgtcctttgaaactcagaaaacgaaccttgctacagaaaatcagtatttaagaaagctcttcactgactttgttaatgatgttaaagattatcttagaaacatgaaggaatatgaagtagataatgatggagtatttgagaagttggatgaatatatatatagacacttctttggtcacactttttcccctccatatggacccagtcgacctgataaaaagcaacgtatggtaaatattgaaaactccaggcatcgaaaacaagagcagaagcaccttcagccacagccttataaaagggaaggtaaatggcataaatatggtcgcactaatggaagacaaatggcaaatcttgaaatagaattggggcaattaccttttgatcctcaatactgattcacaattgagttaaattagacaactgtaagagaaaaatttatgctttgtataatgtttggtattgaaactaatgaaattaccaagatgacaatgtcttttcttttgtttctaagtatcagtttgataactttatattattcctcagaagcattagttaaaagtctactaacctgcattttcctgtagtttagcttcgttgaattttttttgacactggaaatgttcaactgtagttttattaaggaagccaggcatgcaacagattttgtgcatgaaatgagacttcctttcagtgtaagagcttaaagcaagctcagtcatacatgacaaagtgtaattaacactgatgtttgtgttaaatttgcagcagagcttgagaaaagtacattgttctggaatttcatcattaacattttataatcttacactcacttcttgtctttttgtgggttcaagagccctctgacttgtgaagaatttgctgccctcttaagagcttgctgacttgttttcttgtgaaattttttgcacatctgaatatcgtggaagaaacaataaaactacaccatgag

SEQ ID NO: 116062 - DNA, 2970 bp, Homo sapiens
  Payload ID: 2642
  Gene Symbol: CCPG1
  Gene Name: cell cycle progression 1
  Uniprot ID: Q9ULG6
  ENST ID: ENST00000569205
  CDS Start-End: 216-2489
tcctcgggccgtgcgcgagtgcacagctccggaggcccgagccgaccctggggcgtccggtccggtggtcttgcagcctccaaaccccgagtgctataccgaactgcgcgccaagggtgggagagctgacggcctgggccacccttcttccttcactgggcaggctttgaggtgcttgtcggtctggactgatgaaaatccatatgacctgaaagatgtctgaaaattccagtgacagtgattcatcttgtggttggactgtcatcagtcatgaggggtcagatatagaaatgttgaattctgtgacccccactgacagctgtgagcccgccccagaatgttcatctttagagcaagaggagcttcaagcattgcagatagagcaaggagaaagcagccaaaatggcacagtgcttatggaagaaactgcttatccagctttggaggaaaccagctcaacaattgaggcagaggaacaaaagatacccgaagacagtatctatattggaactgccagtgatgattctgatattgttacccttgagccacctaagttagaagaaattggaaatcaagaagttgtcattgttgaagaagcacagagttcagaagactttaacatgggctcttcctctagcagccagtatactttctgtcagccagaaactgtattttcatctcagcctagtgacgatgaatcaagtagtgatgaaaccagtaatcagcccagtcctgcctttagacgacgccgtgctaggaagaagaccgtttctgcttcagaatctgaagaccggctagttgctgaacaagaaactgaaccttctaaggagttgagtaaacgtcagttcagtagtggtctcaataagtgtgttatacttgctttggtgattgcaatcagcatgggatttggccatttctatggcacaattcagattcagaagcgtcaacagttagtcagaaagatacatgaagatgaattgaatgatatgaaggattatctttcccagtgtcaacaggaacaagaatcttttatagattataagtcattgaaagaaaatcttgcaaggtgttggacacttactgaagcagagaagatgtcctttgaaactcagaaaacgaaccttgctacagaaaatcagtatttaagagtatccttggagaaggaagaaaaagccttatcctcattacaggaagagttaaacaaactaagagaacagattagaatattggaagataaagggacaagtactgaattagttaaagaaaatcagaaacttaagcagcatttggaagaggaaaagcagaaaaaacacagctttcttagtcaaagggagactctgttgacagaagcaaagatgctaaagagagaactggagagagaacgactagtaactacggctttaaggggggaactccagcagttaagtggtagtcagttacatggcaagtcagattctcccaatgtatatactgaaaaaaaggaaatagcaatcttacgggaaagactcactgagctggaacggaagctaaccttcgaacagcagcgttctgatttgtgggaaagattgtatgttgaggcaaaagatcaaaatggaaaacaaggaacagatggaaaaaagaaagggggcagaggaagccacagggctaaaaataagtcaaaggaaacatttttgggttcagttaaggaaacatttgatgccatgaagaattctaccaaggagtttgtaaggcatcataaagagaaaattaagcaggctaaagaagctgtgaaggaaaatctgaaaaaattctcagattcagttaaatccactttcagacactttaaagataccaccaagaatatctttgatgaaaagggtaataaaagatttggtgctacaaaagaagcagctgaaaaaccaagaacagtttttagtgactatttacatccacagtataaggcacctacagaaaaccatcataatagaggccctactatgcaaaatgatggaaggaaagaaaagccagttcactttaaagaattcagaaaaaatacaaattcaaagaaatgcagtcctgggcatgattgtagagaaaattctcattctttcagaaaggcttgttctggtgtatttgattgtgctcaacaagagtccatgagcctttttaacacagtggtgaatcctataaggatggatgaatttagacagataattcaaaggtacatgttaaaagaactggatactttttgtcactggaacgaacttgatcagttcatcaataagtttttcctaaacggtgtctttatacatgatcagaagctcttcactgactttgttaatgatgttaaagattatcttagaaacatgaaggaatatgaagtagataatgatggagtatttgagaagttggatgaatatatatatagacacttctttggtcacactttttcccctccatatggacccaggtcggtttacataaaaccgtgtcattacagtagtttgtaacatttgtagattggatagcatttttatgatttgatgagtttcttgtaaggttaccgtttctaagagttgtgctttatggccactgagagaattcagaataaattgaaagatggagtctaaaaattattagctgttacaaatggaacatttcattataacgtgatcactttgacttgagcaaatggtttaatttttatcttaaaaatcagttaagaatatataaaatcctactttggccaagtttgtttcttttcattatagtttatatgaaaagatcaccttaagtgaaattattttcctttaatcttttatgtatttattcacttttggaagctaggaatgagcaacacaaattttactctgaagtcagaagagctcatatataataattctaatgtcccacctattttcacttgtccattccatgtaccagcttagttatgatacttagtcacataattatctttgataaaggtagagg

SEQ ID NO: 116063 - DNA, 702 bp, Homo sapiens
  Payload ID: 2642
  Gene Symbol: CCPG1
  Gene Name: cell cycle progression 1
  ENST ID: ENST00000568592
  CDS Start-End: 1-610
gaaaaaattctcagattcagttaaatccactttcagacactttaaagataccaccaagaatatctttgatgaaaagggtaataaaagatttggtgctacaaaagaagcagctgaaaaaccaagaacagtttttagtgactatttacatccacagtataaggcacctacagaaaaccatcataatagaggccctactatgcaaaatgatggaaggaaagaaaagccagttcactttaaagaattcagaaaaaatacaaattcaaagaaatgcagtcctgggcatgattgtagagaaaattctcattctttcagaaaggcttgttctggtgtatttgattgtgctcaacaagagtccatgagcctttttaacacagtggtgaatcctataaggatggatgaatttagacagataattcaaagtcgacctgataaaaagcaacgtatggtaaatattgaaaactccaggcatcgaaaacaagagcagaagcaccttcagccacagccttataaaagggaaggtaaatggcataaatatggtcgcactaatggaagacaaatggcaaatcttgaaatagaattggggcaattaccttttgatcctcaatactgattcacaattgagttaaattagacaactgtaagagaaaaatttatgctttgtataatgtttggtattgaaactaatgaaattaccaagatgac

SEQ ID NO: 116064 - DNA, 790 bp, Homo sapiens
  Payload ID: 2642
  Gene Symbol: CCPG1
  Gene Name: cell cycle progression 1
  ENST ID: ENST00000563171
  CDS Start-End: 69-790
gtgaccgccgccactggggcagccagcacaatcgggcggaggtggcgctgccccttcagacctgaaagatgtctgaaaattccagtgacagtgattcatcttgtggttggactgtcatcagtcatgaggggtcagatatagaaatgttgaattctgtgacccccactgacagctgtgagcccgccccagaatgttcatctttagagcaagaggagcttcaagcattgcagatagagcaaggagaaagcagccaaaatggcacagtgcttatggaagaaactgcttatccagctttggaggaaaccagctcaacaattgaggcagaggaacaaaagatacccgaagacagtatctatattggaactgccagtgatgattctgatattgttacccttgagccacctaagttagaagaaattggaaatcaagaagttgtcattgttgaagaagcacagagttcagaagactttaacatgggctcttcctctagcagccagtatactttctgtcagccagaaactgaaaggtggtgggagaagctgtggaagattcctgagtgcatatggggatgggatgatcagctgaaacaccatgttcctagccaactcgctttccaagtattttcatctcagcctagtgacgatgaatcaagtagtgatgaaaccagtaatcagcccagtcctgcctttagacgacgccgtgctaggaagaagaccgtttctgcttcagaatctgaagaccggctagttgctgaacaagaaactgaaccttctaaggagttgagtaaacg

SEQ ID NO: 116065 - DNA, 721 bp, Homo sapiens
  Payload ID: 2642
  Gene Symbol: CCPG1
  Gene Name: cell cycle progression 1
  ENST ID: ENST00000568543
  CDS Start-End: 1-98
tcagaaagatacatgaagatgaattgaatgatatgaaggattatctttcccagtgtcaacaggaacaagaatcttttatagattataagtcgacctgataaaaagcaacgtatggtaaatattgaaaactccaggcatcgaaaacaagagcagaagcaccttcagccacagccttataaaagggaaggtaaatggcataaatatggtcgcactaatggaagacaaatggcaaatcttgaaatagaattggggcaattaccttttgatcctcaatactgattcacaattgagttaaattagacaactgtaagagaaaaatttatgctttgtataatgtttggtattgaaactaatgaaattaccaagatgacaatgtcttttcttttgtttctaagtatcagtttgataactttatattattcctcagaagcattagttaaaagtctactaacctgcattttcctgtagtttagcttcgttgaattttttttgacactggaaatgttcaactgtagttttattaaggaagccaggcatgcaacagattttgtgcatgaaatgagacttcctttcagtgtaagagcttaaagcaagctcagtcatacatgacaaagtgtaattaacactgatgtttgtgttaaatttgcagcagagcttgagaaaagtacattgttctggaatttcatcattaacattttataatcttacactcacttcttgt

SEQ ID NO: 116066 - DNA, 2866 bp, Homo sapiens
  Payload ID: 2642
  Gene Symbol: CCPG1
  Gene Name: cell cycle progression 1
  ENST ID: ENST00000568808
  CDS Start-End: 69-527
gtgaccgccgccactggggcagccagcacaatcgggcggaggtggcgctgccccttcagacctgaaagatgtctgaaaattccagtgacagtgattcatcttgtggttggactgtcatcagtcatgaggggtcagatatagaaatgttgaattctgtgacccccactgacagctgtgagcccgccccagaatgttcatctttagagcaagaggagcttcaagcattgcagatagagcaaggagaaagcagccaaaatggcacagtgcttatggaagaaactgcttatccagctttggaggaaaccagctcaacaattgaggcagaggaacaaaagatacccgaagacagtatctatattggaactgccagtgatgattctgatattgttacccttgagccacctaagttagaagaaattggaaatcaagaagttgtcattgttgaagaagcacagagttcagaagactttaacatgggctcttcctctagcagccagtatactttctgtcagccagaaactgcctagtgacgatgaatcaagtagtgatgaaaccagtaatcagcccagtcctgcctttagacgacgccgtgctaggaagaagaccgtttctgcttcagaatctgaagaccggctagttgctgaacaagaaactgaaccttctaaggagttgagtaaacgtcagttcagtagtggtctcaataagtgtgttatacttgctttggtgattgcaatcagcatgggatttggccatttctatgtcattgaaagaaaatcttgcaaggtgttggacacttactgaagcagagaagatgtcctttgaaactcagaaaacgaaccttgctacagaaaatcagtatttaagagtatccttggagaaggaagaaaaagccttatcctcattacaggaagagttaaacaaactaagagaacagattagaatattggaagataaagggacaagtactgaattagttaaagaaaatcagaaacttaagcagcatttggaagaggaaaagcagaaaaaacacagctttcttagtcaaagggagactctgttgacagaagcaaagatgctaaagagagaactggagagagaacgactagtaactacggctttaaggggggaactccagcagttaagtggtagtcagttacatggcaagtcagattctcccaatgtatatactgaaaaaaaggaaatagcaatcttacgggaaagactcactgagctggaacggaagctaaccttcgaacagcagcgttctgatttgtgggaaagattgtatgttgaggcaaaagatcaaaatggaaaacaaggaacagatggaaaaaagaaagggggcagaggaagccacagggctaaaaataagtcaaaggaaacatttttgggttcagttaaggaaacatttgatgccatgaagaattctaccaaggagtttgtaaggcatcataaagagaaaattaagcaggctaaagaagctgtgaaggaaaatctgaaaaaattctcagattcagttaaatccactttcagacactttaaagataccaccaagaatatctttgatgaaaagggtaataaaagatttggtgctacaaaagaagcagctgaaaaaccaagaacagtttttagtgactatttacatccacagtataaggcacctacagaaaaccatcataatagaggccctactatgcaaaatgatggaaggaaagaaaagccagttcactttaaagaattcagaaaaaatacaaattcaaagaaatgcagtcctgggcatgattgtagagaaaattctcattctttcagaaaggcttgttctggtgtatttgattgtgctcaacaagagtccatgagcctttttaacacagtggtgaatcctataaggatggatgaatttagacagataattcaaaggtacatgttaaaagaactggatactttttgtcactggaacgaacttgatcagttcatcaataagtttttcctaaacggtgtctttatacatgatcagaagctcttcactgactttgttaatgatgttaaagattatcttagaaacatgaaggaatatgaagtagataatgatggagtatttgagaagttggatgaatatatatatagacacttctttggtcacactttttcccctccatatggacccaggtcggtttacataaaaccgtgtcattacagtagtttgtaacatttgtagattggatagcatttttatgatttgatgagtttcttgtaaggttaccgtttctaagagttgtgctttatggccactgagagaattcagaataaattgaaagatggagtctaaaaattattagctgttacaaatggaacatttcattataacgtgatcactttgacttgagcaaatggtttaatttttatcttaaaaatcagttaagaatatataaaatcctactttggccaagtttgtttcttttcattatagtttatatgaaaagatcaccttaagtgaaattattttcctttaatcttttatgtatttattcacttttggaagctaggaatgagcaacacaaattttactctgaagtcagaagagctcatatataataattctaatgtcccacctattttcacttgtccattccatgtaccagcttagttatgatacttagtcacataattatctttgataaaggtagaggcacaaagaggcaaactaagcaagtcaaattctaatgtgtgtacttcataataattttttatccattttcatctttatattctgtaacatgaaacttacctaatcttcaaatgttagcttcattttttacctttgaaatacttaatctttctgaataaatataatgtgtctataaaataa

SEQ ID NO: 116067 - DNA, 578 bp, Homo sapiens
  Payload ID: 2642
  Gene Symbol: CCPG1
  Gene Name: cell cycle progression 1
  ENST ID: ENST00000564092
  CDS Start-End: 303-578
atgcactgcggcgcccagccggtcaccgcctgccggctgcagacgcctgcgagcaggttgtttttataagaggcgtcattggcgcccgagctgtgaccgccgccactggggcagccagcacaatcgggcggaggtggcgctgccccttcagagatgggtcttcaccatgttgcccaggctggtctcaaactcgtgagttcaagcgatttgcctgccttggcctcccaaagtattggaattacagacgtgagccaacgggcccggcctgtggcttttcgtggagttcttagaacacctgaaagatgtctgaaaattccagtgacagtgattcatcttgtggttggactgtcatcagtcatgaggggtcagatatagaaatgttgaattctgtgacccccactgacagctgtgagcccgccccagaatgttcatctttagagcaagaggagcttcaagcattgcagatagagcaaggagaaagcagccaaaatggcacagtgcttatggaagaaactgcttatccagctttggaggaaaccagctcaacaattgaggcagaggaacaaaagatacccgaa

SEQ ID NO: 116068 - DNA, 570 bp, Homo sapiens
  Payload ID: 2642
  Gene Symbol: CCPG1
  Gene Name: cell cycle progression 1
  ENST ID: ENST00000570272
  CDS Start-End: 59-570
atagtaaaatgtagctacccaggaatgatgaggggcaccatcatatcagacctgaaagatgtctgaaaattccagtgacagtgattcatcttgtggttggactgtcatcagtcatgaggggtcagatatagaaatgttgaattctgtgacccccactgacagctgtgagcccgccccagaatgttcatctttagagcaagaggagcttcaagcattgcagatagagcaaggagaaagcagccaaaatggcacagtgcttatggaagaaactgcttatccagctttggaggaaaccagctcaacaattgaggcagaggaacaaaagatacccgaagacagtatctatattggaactgccagtgatgattctgatattgttacccttgagccacctaagttagaagaaattggaaatcaagaagttgtcattgttgaagaagcacagagttcagaagactttaacatgggctcttcctctagcagccagtatactttctgtcagccagaaactgtattttcatctcagcctagtgacgatgaatcaagtagtgatgaaaccagtaatcagcc

SEQ ID NO: 116069 - DNA, 663 bp, Homo sapiens
  Payload ID: 2642
  Gene Symbol: CCPG1
  Gene Name: cell cycle progression 1
  ENST ID: ENST00000564663
  CDS Start-End: 1-352
cactgactttgttaatgatgttaaagattatcttagaaacatgaaggaatatgaagtagataatgatggagtatttgagaagttggatgaatatatatatagacacttctttggtcacactttttcccctccatatggacccagtcgacctgataaaaagcaacgtatggtaaatattgaaaactccaggcatcgaaaacaagagcagaagcaccttcagccacagccttataaaagggaagatggagtcttgctctgtcgcccaggctggagtgcagtggcgcgatctcggctcactgcaagctccgcctcgcgggttcacgccattctcctgcctcagcctcccgagtagctgggactacaggcgcccgctaccacgcccggctaattttttctatttttagtagagacggggtttcaccatgttagccaggatggtctcaatctcctgacctcgtgatctgcctgcctcggcctcccaaagtgctgcgattataggtgtgagccaccatgcctggcctaataattttaattaatgactgtatgaaatccttcttaactgttattttttcttctttaagtattaatgtgttccttgttaatttgtaaaactagatttttgagattcaaagtgagaatcaaacttatattttggcagtctaa

SEQ ID NO: 116070 - DNA, 828 bp, Homo sapiens
  Payload ID: 2643
  Gene Symbol: CIDEA
  Gene Name: cell death-inducing DFFA-like effector a
  Uniprot ID: O60543
  ENST ID: ENST00000320477
  CDS Start-End: 66-725
ggccgccgcactttaagaggctgtgcaggcagacagacctccaggcccgctaggggatccgcgccatggaggccgcccgggactatgcaggagccctcatcaggcccctgacatttatgggatcacagactaagcgagtcctgttcaccccgctcatgcatccagctcgccctttccgggtctccaaccatgacaggagcagccggcgtggggtgatggcaagcagcctgcaggagctcatcagcaagactctggatgccctcgtcatcgctaccggactggtcactctggtgctggaggaagatggcaccgtggtggacacagaagagttctttcagaccttgggagacaacacgcatttcatgatcttggaaaaaggacagaagtggatgccgggcagccagcacgtccccacttgctcgccgccgaagaggtcgggaatagcgagagtcaccttcgacttgtacaggctgaaccccaaggacttcatcggctgccttaacgtgaaggccaccatgtatgagatgtactccgtgtcctacgacatccggtgcacgggactcaagggcctgctgaggagtctgctgcggttcctgtcctactccgcccaggtgacgggacagtttctcatctatctgggcacatacatgctccgggtgctggatgacaaggaagagcggccatccctccggtcacaagccaagggcaggttcacgtgtggatagggatgcaggctgtcgccggctcttgagccaaacactgtgtttcgtttggctcaatgacgaatgttgaagatgcttttatgttctgagccacatgcacttggag

SEQ ID NO: 116071 - DNA, 1808 bp, Homo sapiens
  Payload ID: 2643
  Gene Symbol: CIDEA
  Gene Name: cell death-inducing DFFA-like effector a
  ENST ID: ENST00000522713
  CDS Start-End: 24-626
aggcccgctaggggatccgcgccatggaggccgcccgggactatgcaggagccctcatcaggcgagtgccccgcgtccccctgattgccgtgcgcttccaatcgccttgcgttcggtggcctcatattcccctgtgcgcctctagtaccgtaccccgctcccttcagccccctgctccccgcattctcttgcgctccgcgaccccgcgcacacacccatccgccccactggtgcccaagccgtccagccgcgcccgcgggcagagcccaatcccgtcccgcgcctcctcaccctcttgcagctgggcacaggtaccaggtgtggctcttgcgaggtgcgcgggcgtctgcaaaccaggtgacagctggcgagtggctgcatgcatctctggccgctgctgcagtcgcgggcgcagaagagggtccggtcccaggaaccccgagcaaagcttccgcgatgcgaggggaccgggcttctgggggtcctggaaatcacaacgggagctgggcgcgggaggggcccaggcttggcccctcctggaagcgcgggctctggtctccgaggggaggccccaaccgtccggcggagccctccaggcccctgacatttatgggatcacagactaagcgagtcctgttcaccccgctcatgcatccagctcgccctttccgggtctccaaccatgacaggagcagccggcgtggggtgatggcaagcagcctgcaggagctcatcagcaagggaggatgcagggatggagccgactttggaagtctgggtttggttgtaaaggccaggatctagaacagtgtcctagaccaccaaataaggaagaatcccagcctctcagagaagcataactcagactcaggcacccatggaaacaagaaacaagcatccaacatgcagtctctgaagcaagagagacactcagctacgcacacgaggctgtggctcttacagcagcaaacatgcaagagctttctttttattcatctaaataaatagactctggatgccctcgtcatcgctaccggactggtcactctggtgctggaggaagatggcaccgtggtggacacagaagagttctttcagaccttgggagacaacacgcatttcatgatcttggaaaaaggacagaagtggatgccgggcagccagcacgtccccacttgctcgccgccgaagaggtcgggaatagcgagagtcaccttcgacttgtacaggctgaaccccaaggacttcatcggctgccttaacgtgaaggccaccatgtatgagatgtactccgtgtcctacgacatccggtgcacgggactcaagggcctgctgaggagtctgctgcggttcctgtcctactccgcccaggtgacgggacagtttctcatctatctgggcacatacatgctccgggtgctggatgacaaggaagagcggccatccctccggtcacaagccaagggcaggttcacgtgtggatagggatgcaggctgtcgccggctcttgagccaaacactgtgtttcgtttggctcaatgacgaatgttgaagatgcttttatgttctgagccacatgcacttggaggccgctggtcacgctgctcaggagtggtgcccagaaaaggaaagggcttggtggtacatgaagtgggggcagtgggcagggtgccctgggggggaggcatagagggccctgggggtcatgggaagcgagcacgcagcaggcgtgcccaggagcgtgtgcatgtgtcagagccatttggtccatcatctcctgcaataaacccatcgcaagaatgaccttc

SEQ ID NO: 116072 - DNA, 2294 bp, Homo sapiens
  Payload ID: 2644
  Gene Symbol: CIDEB
  Gene Name: cell death-inducing DFFA-like effector b
  Uniprot ID: Q9UHD4
  ENST ID: ENST00000258807
  CDS Start-End: 1189-1848
gccagcgctgcgaccgcctgcagaaggttgactgcgtggtagggggcccagagcaagccgaaggcaagcacgatggcgctcaccagccggcccacccgcgccccgtgccgcccggagccccagcgggcgccccgcagccgtgccagcgtcacgctgtagcagccgagcatcagcccgaaaggaagcacgaaagcggtcagagtctccaggctcaggtgggcggcggcgtggaccggcgacgggtggcacagctggcatacgcggtccctccacaggtggcggtagacggcggccgggacggcgagcaacagggcggccagccagaccgccagcagcaggcggcgggccagggccgggctgcgcagccgaggcgccaggaaggggcgggtgactgcgaggcagcgctgcaggctgagcaggccggtgagcagcacgctggcgtacatgctgagcgcgcacacgtagtacaccgccttgcagcccgcctggcccagcggccaggcctgccgggtcaggaaggccacaaagagcggcgtgagcagcagcaccgcgccgtcggccagcgccaggtgcagcacaagcgtggccgccagcggtcgcccccgtgcaggccgccagcccgccaagctccacaccacgaagccgttgccaggcagccccagcagcgccgccagcagcaggaaggctgtgcctgtggcccgcgaagtcttccagctcagcagtgtctcgttccctgggggacggtagcagaccgacatccttctgggcctacaggacacagaaaaaaagtggggaagctgggggaccctacaaggatccttggcaggaaagcagggattgtgttcatttgagggtttcactgtcagtgagagtctcagcttccatgcaactgtccatcacggctgcaactgaaatcagagctgggacacagcgcaccagaagctaaagtcttgatgccatcaaaggacatccctgccccattcacatctctgtcacgtccactaatcggcaaaaggagaaaagtgagagaagatgacctaagtgtgactgcagcaggcagctctggaaaatgaagccagagcagtgagccagcccctcctccgaccaaggaggaaggaaagagcagccccagcacaggagagaaccacccagcccagaagttccagggaaggaactctccggtccaccatggagtacctctcagctctgaaccccagtgacttactcaggtcagtatctaatataagctcggagtttggacggagggtctggacctcagctccaccaccccagcgacctttccgtgtctgtgatcacaagcggaccatccggaaaggcctgacagctgccacccgccaggagctgctagccaaagcattggagaccctactgctgaatggagtgctaaccctggtgctagaggaggatggaactgcagtggacagtgaggacttcttccagctgctggaggatgacacgtgcctgatggtgttgcagtctggtcagagctggagccctacaaggagtggagtgctgtcatatggcctgggacgggagaggcccaagcacagcaaggacatcgcccgattcacctttgacgtgtacaagcaaaaccctcgagacctctttggcagcctgaatgtcaaagccacattctacgggctctactctatgagttgtgactttcaaggacttggcccaaagaaagtactcagggagctccttcgttggacctccacactgctgcaaggcctgggccatatgttgctgggaatttcctccacccttcgtcatgcagtggagggggctgagcagtggcagcagaagggccgcctccattcctactaaggggctctgagcttctgcccccagaatcattccaaccgacccactgcaaagactatgacagcatcaaatttcaggacctgcagacagtacaggctagataacccacccaatttccccactgtcctctgatcccctcgtgacagaacctttcagcataacgcctcacatcccaagtctatacccttacctgaagaatgctgttctttcctagccacctttctggcctcccacttgccctgaaaggccaagatcaagatgtcccccaggcatcttgatcccagcctgactgctgctacatctaatcccctaccaatgcctcctgtccctaaactccccagcatactgatgacagccctctctgactttaccttgagatctgtcttcatacccttcccctcaaactaacaaaaacatttccaataaaaatatcaaatatttaccactaa

SEQ ID NO: 116073 - DNA, 2409 bp, Homo sapiens
  Payload ID: 2644
  Gene Symbol: CIDEB
  Gene Name: cell death-inducing DFFA-like effector b
  Uniprot ID: Q9UHD4
  ENST ID: ENST00000336557
  CDS Start-End: 1304-1963
ttgactgcgtggtagggggcccagagcaagccgaaggcaagcacgatggcgctcaccagccggcccacccgcgccccgtgccgcccggagccccagcgggcgccccgcagccgtgccagcgtcacgctgtagcagccgagcatcagcccgaaaggaagcacgaaagcggtcagagtctccaggctcaggtgggcggcggcgtggaccggcgacgggtggcacagctggcatacgcggtccctccacaggtggcggtagacggcggccgggacggcgagcaacagggcggccagccagaccgccagcagcaggcggcgggccagggccgggctgcgcagccgaggcgccaggaaggggcgggtgactgcgaggcagcgctgcaggctgagcaggccggtgagcagcacgctggcgtacatgctgagcgcgcacacgtagtacaccgccttgcagcccgcctggcccagcggccaggcctgccgggtcaggaaggccacaaagagcggcgtgagcagcagcaccgcgccgtcggccagcgccaggtgcagcacaagcgtggccgccagcggtcgcccccgtgcaggccgccagcccgccaagctccacaccacgaagccgttgccaggcagccccagcagcgccgccagcagcaggaaggctgtgcctgtggcccgcgaagtcttccagctcagcagtgtctcgttccctgggggacggtagcagaccgacatccttctgggcctacagcctgcctcttttctgcctgggagtcctgacttccacgaggacccagaccccacctcaaacacaactccttcttggaacccagatcccctgctcccagtcagttgacctgccccactcctggcctccttcccagagctcagtggacacagaaaaaaagtggggaagctgggggaccctacaaggatccttggcaggaaagcagggattgtgttcatttgagggtttcactgtcagtgagagtctcagcttccatgcaactgtccatcacggctgcaactgaaatcagagctgggacacagcgcaccagaagctaaagtcttgatgccatcaaaggacatccctgccccattcacatctctgtcacgtccactaatcggcaaaaggagaaaagtgagagaagatgacctaagtgtgactgcagcaggcagctctggaaaatgaagccagagcagtgagccagcccctcctccgaccaaggaggaaggaaagagcagccccagcacaggagagaaccacccagcccagaagttccagggaaggaactctccggtccaccatggagtacctctcagctctgaaccccagtgacttactcaggtcagtatctaatataagctcggagtttggacggagggtctggacctcagctccaccaccccagcgacctttccgtgtctgtgatcacaagcggaccatccggaaaggcctgacagctgccacccgccaggagctgctagccaaagcattggagaccctactgctgaatggagtgctaaccctggtgctagaggaggatggaactgcagtggacagtgaggacttcttccagctgctggaggatgacacgtgcctgatggtgttgcagtctggtcagagctggagccctacaaggagtggagtgctgtcatatggcctgggacgggagaggcccaagcacagcaaggacatcgcccgattcacctttgacgtgtacaagcaaaaccctcgagacctctttggcagcctgaatgtcaaagccacattctacgggctctactctatgagttgtgactttcaaggacttggcccaaagaaagtactcagggagctccttcgttggacctccacactgctgcaaggcctgggccatatgttgctgggaatttcctccacccttcgtcatgcagtggagggggctgagcagtggcagcagaagggccgcctccattcctactaaggggctctgagcttctgcccccagaatcattccaaccgacccactgcaaagactatgacagcatcaaatttcaggacctgcagacagtacaggctagataacccacccaatttccccactgtcctctgatcccctcgtgacagaacctttcagcataacgcctcacatcccaagtctatacccttacctgaagaatgctgttctttcctagccacctttctggcctcccacttgccctgaaaggccaagatcaagatgtcccccaggcatcttgatcccagcctgactgctgctacatctaatcccctaccaatgcctcctgtccctaaactccccagcatactgatgacagccctctctgactttaccttgagatctgtcttcatacccttcccctcaaactaacaaaaacatttccaataaaaatatcaaatatttaccactaa

SEQ ID NO: 116074 - DNA, 1602 bp, Homo sapiens
  Payload ID: 2644
  Gene Symbol: CIDEB
  Gene Name: cell death-inducing DFFA-like effector b
  Uniprot ID: Q9UHD4
  ENST ID: ENST00000554411
  CDS Start-End: 406-1065
gagccactcataaactgcagcttctcagagcctgagagccagaaaccgtccccagaaattccctccatagaaataaaaaaacaccagaagtcacatttcatccttttacatggttcccatctaccctcacaacacatgtcatcaccaaagacacacatacaagctccaatggcttttgccaggcaattcttcctccaggaccccatctggcccctccctcatccctccccttggactttgcccttcttactggccaggcaggggggccagagtccaggcttgactcattcccaccttgtcctgggctgagatcccaggtttgtaacagaaaacaccactaaagccccagcacaggagagaaccacccagcccagaagttccagggaaggaactctccggtccaccatggagtacctctcagctctgaaccccagtgacttactcaggtcagtatctaatataagctcggagtttggacggagggtctggacctcagctccaccaccccagcgacctttccgtgtctgtgatcacaagcggaccatccggaaaggcctgacagctgccacccgccaggagctgctagccaaagcattggagaccctactgctgaatggagtgctaaccctggtgctagaggaggatggaactgcagtggacagtgaggacttcttccagctgctggaggatgacacgtgcctgatggtgttgcagtctggtcagagctggagccctacaaggagtggagtgctgtcatatggcctgggacgggagaggcccaagcacagcaaggacatcgcccgattcacctttgacgtgtacaagcaaaaccctcgagacctctttggcagcctgaatgtcaaagccacattctacgggctctactctatgagttgtgactttcaaggacttggcccaaagaaagtactcagggagctccttcgttggacctccacactgctgcaaggcctgggccatatgttgctgggaatttcctccacccttcgtcatgcagtggagggggctgagcagtggcagcagaagggccgcctccattcctactaaggggctctgagcttctgcccccagaatcattccaaccgacccactgcaaagactatgacagcatcaaatttcaggacctgcagacagtacaggctagataacccacccaatttccccactgtcctctgatcccctcgtgacagaacctttcagcataacgcctcacatcccaagtctatacccttacctgaagaatgctgttctttcctagccacctttctggcctcccacttgccctgaaaggccaagatcaagatgtcccccaggcatcttgatcccagcctgactgctgctacatctaatcccctaccaatgcctcctgtccctaaactccccagcatactgatgacagccctctctgactttaccttgagatctgtcttcatacccttcccctcaaactaacaaaaacatttccaataaaaatatcaaatatttaccactaagacttctgactccaatttaaaccaggaaagggatggggtggataccccattttgccctcccccatcaacacccagtcccagatccaaagcc

SEQ ID NO: 116075 - DNA, 248 bp, Homo sapiens
  Payload ID: 2644
  Gene Symbol: CIDEB
  Gene Name: cell death-inducing DFFA-like effector b
  ENST ID: ENST00000556756
  CDS Start-End: 1-184
agtggacagtgaggacttcttccagctgctggaggatgacacgtgcctgatggtgttgcagtctggtcagagctggagccctacaaggggagctccttcgttggacctccacactgctgcaaggcctgggccatatgttgctgggaatttcctccacccttcgtcatgcagtggagggggctgagcagtggcagcagaagggccgcctccattcctactaaggggctctgagcttctgcccccagaat

SEQ ID NO: 116076 - DNA, 1277 bp, Homo sapiens
  Payload ID: 2645
  Gene Symbol: CIDEC
  Gene Name: cell death-inducing DFFA-like effector c
  Uniprot ID: Q96AQ7
  ENST ID: ENST00000336832
  CDS Start-End: 141-857
agaatgttcttttggccactgtgaagcctcaggaaggggctcggattgctcaaggacccatgggagagaggaggctttgactgggctgcctgcctgtgaggtctctggactagaggtccaacgcagtccagctgacaaggatggaatacgccatgaagtcccttagccttctctaccccaagtccctctccaggcatgtgtcagtgcgtacctctgtggtgacccagcagctgctgtcggagcccagccccaaggcccccagggcccggccctgccgcgtaagcacggcggatcgaagcgtgaggaagggcatcatggcttacagtcttgaggacctcctcctcaaggtccgggacactctgatgctggcagacaagcccttcttcctggtgctggaggaagatggcacaactgtagagacagaagagtacttccaagccctggcaggggatacagtgttcatggtcctccagaaggggcagaaatggcagcccccatcagaacaggggacaaggcacccactgtccctctcccataagcctgccaagaagattgatgtggcccgtgtaacgtttgatctgtacaagctgaacccacaggacttcattggctgcctgaacgtgaaggcgactttttatgatacatactccctttcctatgatctgcactgctgtggggccaagcgcatcatgaaggaagctttccgctgggccctcttcagcatgcaggccacaggccacgtactgcttggcacctcctgttacctgcagcagctcctcgatgctacggaggaagggcagccccccaagggcaaggcctcatcccttatcccgacctgtctgaagatactgcagtgaaagcccaagtccttggaagctttccccagtgaaggactgactgggggcctcacgcttaactggtagtgcccacaagcctggcagctgtagagccgcgaacctccccacacctccctcaccgcgcaggaccctgagtgaggaggaggagctggaaacctggggtgggttggccaaaggagaacctcaagctcctggcctgatccagctccttcctgcccaaggcagcttagcccatccagactggtcctgaagtctgtccctccattggcatgaagtctgccccttagcaatctggcctcgcaggctgtactttcatggtgctctctaccttctggcccccatcccggaacattcctgagtgaattcgcaagcgcactagcatgtgatattagggagtttgcaataaattattgaggctga

SEQ ID NO: 116077 - DNA, 1199 bp, Homo sapiens
  Payload ID: 2645
  Gene Symbol: CIDEC
  Gene Name: cell death-inducing DFFA-like effector c
  ENST ID: ENST00000383817
  CDS Start-End: 21-776
agtgtgaccagagccaggggatgagaaacatggagtccaacgcagtccagctgacaaggatggaatacgccatgaagtcccttagccttctctaccccaagtccctctccaggcatgtgtcagtgcgtacctctgtggtgacccagcagctgctgtcggagcccagccccaaggcccccagggcccggccctgccgcgtaagcacggcggatcgaagcgtgaggaagggcatcatggcttacagtcttgaggacctcctcctcaaggtccgggacactctgatgctggcagacaagcccttcttcctggtgctggaggaagatggcacaactgtagagacagaagagtacttccaagccctggcaggggatacagtgttcatggtcctccagaaggggcagaaatggcagcccccatcagaacaggggacaaggcacccactgtccctctcccataagcctgccaagaagattgatgtggcccgtgtaacgtttgatctgtacaagctgaacccacaggacttcattggctgcctgaacgtgaaggcgactttttatgatacatactccctttcctatgatctgcactgctgtggggccaagcgcatcatgaaggaagctttccgctgggccctcttcagcatgcaggccacaggccacgtactgcttggcacctcctgttacctgcagcagctcctcgatgctacggaggaagggcagccccccaagggcaaggcctcatcccttatcccgacctgtctgaagatactgcagtgaaagcccaagtccttggaagctttccccagtgaaggactgactgggggcctcacgcttaactggtagtgcccacaagcctggcagctgtagagccgcgaacctccccacacctccctcaccgcgcaggaccctgagtgaggaggaggagctggaaacctggggtgggttggccaaaggagaacctcaagctcctggcctgatccagctccttcctgcccaaggcagcttagcccatccagactggtcctgaagtctgtccctccattggcatgaagtctgccccttagcaatctggcctcgcaggctgtactttcatggtgctctctaccttctggcccccatcccggaacattcctgagtgaattcgcaagcgcactagcatgtgatattagggagtttgcaataaattattgaggctgatgt

SEQ ID NO: 116078 - DNA, 1123 bp, Homo sapiens
  Payload ID: 2645
  Gene Symbol: CIDEC
  Gene Name: cell death-inducing DFFA-like effector c
  Uniprot ID: Q96AQ7
  ENST ID: ENST00000455015
  CDS Start-End: 209-703
agaatgttcttttggccactgtgaagcctcaggaaggggctcggattgctcaaggacccatgggagagaggaggctttgactgggctgcctgcctgtgaggtctctggactagaggtccaacgcagtccagctgacaaggatggaatacgccatgaagtcccttagccttctctaccccaagtccctctccaggtccgggacactctgatgctggcagacaagcccttcttcctggtgctggaggaagatggcacaactgtagagacagaagagtacttccaagccctggcaggggatacagtgttcatggtcctccagaaggggcagaaatggcagcccccatcagaacaggggacaaggcacccactgtccctctcccataagcctgccaagaagattgatgtggcccgtgtaacgtttgatctgtacaagctgaacccacaggacttcattggctgcctgaacgtgaaggcgactttttatgatacatactccctttcctatgatctgcactgctgtggggccaagcgcatcatgaaggaagctttccgctgggccctcttcagcatgcaggccacaggccacgtactgcttggcacctcctgttacctgcagcagctcctcgatgctacggaggaagggcagccccccaagggcaaggcctcatcccttatcccgacctgtctgaagatactgcagtgaaagcccaagtccttggaagctttccccagtgaaggactgactgggggcctcacgcttaactggtagtgcccacaagcctggcagctgtagagccgcgaacctccccacacctccctcaccgcgcaggaccctgagtgaggaggaggagctggaaacctggggtgggttggccaaaggagaacctcaagctcctggcctgatccagctccttcctgcccaaggcagcttagcccatccagactggtcctgaagtctgtccctccattggcatgaagtctgccccttagcaatctggcctcgcaggctgtactttcatggtgctctctaccttctggcccccatcccggaacattcctgagtgaattcgcaagcgcactagcatgtgatattagggagtttgcaataaattattgaggctga

SEQ ID NO: 116079 - DNA, 1036 bp, Homo sapiens
  Payload ID: 2645
  Gene Symbol: CIDEC
  Gene Name: cell death-inducing DFFA-like effector c
  Uniprot ID: Q96AQ7
  ENST ID: ENST00000423850
  CDS Start-End: 122-616
agtatttccaggaggctgtgagggggaggtccaacgcagtccagctgacaaggatggaatacgccatgaagtcccttagccttctctaccccaagtccctctccaggtccgggacactctgatgctggcagacaagcccttcttcctggtgctggaggaagatggcacaactgtagagacagaagagtacttccaagccctggcaggggatacagtgttcatggtcctccagaaggggcagaaatggcagcccccatcagaacaggggacaaggcacccactgtccctctcccataagcctgccaagaagattgatgtggcccgtgtaacgtttgatctgtacaagctgaacccacaggacttcattggctgcctgaacgtgaaggcgactttttatgatacatactccctttcctatgatctgcactgctgtggggccaagcgcatcatgaaggaagctttccgctgggccctcttcagcatgcaggccacaggccacgtactgcttggcacctcctgttacctgcagcagctcctcgatgctacggaggaagggcagccccccaagggcaaggcctcatcccttatcccgacctgtctgaagatactgcagtgaaagcccaagtccttggaagctttccccagtgaaggactgactgggggcctcacgcttaactggtagtgcccacaagcctggcagctgtagagccgcgaacctccccacacctccctcaccgcgcaggaccctgagtgaggaggaggagctggaaacctggggtgggttggccaaaggagaacctcaagctcctggcctgatccagctccttcctgcccaaggcagcttagcccatccagactggtcctgaagtctgtccctccattggcatgaagtctgccccttagcaatctggcctcgcaggctgtactttcatggtgctctctaccttctggcccccatcccggaacattcctgagtgaattcgcaagcgcactagcatgtgatattagggagtttgcaataaattattgaggctga

SEQ ID NO: 116080 - DNA, 877 bp, Homo sapiens
  Payload ID: 2645
  Gene Symbol: CIDEC
  Gene Name: cell death-inducing DFFA-like effector c
  Uniprot ID: Q96AQ7
  ENST ID: ENST00000430427
  CDS Start-End: 26-772
gtccaacgcagtccagctgacaaggatggaatacgccatgaagtcccttagccttctctaccccaagtccctctccaggcatgtgtcagtgcgtacctctgtggtgacccagcagctgctgtcggagcccagccccaaggcccccagggcccggccctgccgcgtaagcacggcggatcgaagcgtgaggaagggcatcatggcttacagtcttgaggacctcctcctcaagactaggaaccctgaagccaggagccaagaggtccgggacactctgatgctggcagacaagcccttcttcctggtgctggaggaagatggcacaactgtagagacagaagagtacttccaagccctggcaggggatacagtgttcatggtcctccagaaggggcagaaatggcagcccccatcagaacaggggacaaggcacccactgtccctctcccataagcctgccaagaagattgatgtggcccgtgtaacgtttgatctgtacaagctgaacccacaggacttcattggctgcctgaacgtgaaggcgactttttatgatacatactccctttcctatgatctgcactgctgtggggccaagcgcatcatgaaggaagctttccgctgggccctcttcagcatgcaggccacaggccacgtactgcttggcacctcctgttacctgcagcagctcctcgatgctacggaggaagggcagccccccaagggcaaggcctcatcccttatcccgacctgtctgaagatactgcagtgaaagcccaagtccttggaagctttccccagtgaaggactgactgggggcctcacgcttaactggtagtgcccacaagcctggcagctgtagagccgcgaacctccc

SEQ ID NO: 116081 - DNA, 443 bp, Homo sapiens
  Payload ID: 2645
  Gene Symbol: CIDEC
  Gene Name: cell death-inducing DFFA-like effector c
  ENST ID: ENST00000443115
  CDS Start-End: 3-404
ggatggaatacgccatgaagtcccttagccttctctaccccaagtccctctccaggcatgtgtcagtgcgtacctctgtggtgacccagcagctgctgtcggagcccagccccaaggcccccagggcccggccctgccgcgtaagcacggcggatcgaagcgtgaggaagggcatcatggcttacagtcttgaggacctcctcctcaagggaagctttccgctgggccctcttcagcatgcaggccacaggccacgtactgcttggcacctcctgttacctgcagcagctcctcgatgctacggaggaagggcagccccccaagggcaaggcctcatcccttatcccgacctgtctgaagatactgcagtgaaagcccaagtccttggaagctttccccagtgaaggactgactgggggcctcacgcttaactggtagtgccc

SEQ ID NO: 116082 - DNA, 1226 bp, Homo sapiens
  Payload ID: 2645
  Gene Symbol: CIDEC
  Gene Name: cell death-inducing DFFA-like effector c
  Uniprot ID: Q96AQ7
  ENST ID: ENST00000618572
  CDS Start-End: 57-803
ggcagtatttccaggaggctgtgagggggaggtccaacgcagtccagctgacaaggatggaatacgccatgaagtcccttagccttctctaccccaagtccctctccaggcatgtgtcagtgcgtacctctgtggtgacccagcagctgctgtcggagcccagccccaaggcccccagggcccggccctgccgcgtaagcacggcggatcgaagcgtgaggaagggcatcatggcttacagtcttgaggacctcctcctcaagactaggaaccctgaagccaggagccaagaggtccgggacactctgatgctggcagacaagcccttcttcctggtgctggaggaagatggcacaactgtagagacagaagagtacttccaagccctggcaggggatacagtgttcatggtcctccagaaggggcagaaatggcagcccccatcagaacaggggacaaggcacccactgtccctctcccataagcctgccaagaagattgatgtggcccgtgtaacgtttgatctgtacaagctgaacccacaggacttcattggctgcctgaacgtgaaggcgactttttatgatacatactccctttcctatgatctgcactgctgtggggccaagcgcatcatgaaggaagctttccgctgggccctcttcagcatgcaggccacaggccacgtactgcttggcacctcctgttacctgcagcagctcctcgatgctacggaggaagggcagccccccaagggcaaggcctcatcccttatcccgacctgtctgaagatactgcagtgaaagcccaagtccttggaagctttccccagtgaaggactgactgggggcctcacgcttaactggtagtgcccacaagcctggcagctgtagagccgcgaacctccccacacctccctcaccgcgcaggaccctgagtgaggaggaggagctggaaacctggggtgggttggccaaaggagaacctcaagctcctggcctgatccagctccttcctgcccaaggcagcttagcccatccagactggtcctgaagtctgtccctccattggcatgaagtctgccccttagcaatctggcctcgcaggctgtactttcatggtgctctctaccttctggcccccatcccggaacattcctgagtgaattcgcaagcgcactagcatgtgatattagggagtttgcaataaattattgaggctgatgt

SEQ ID NO: 116083 - DNA, 3009 bp, Homo sapiens
  Payload ID: 2646
  Gene Symbol: CDIP1
  Gene Name: cell death-inducing p53 target 1
  Uniprot ID: Q9H305
  ENST ID: ENST00000399599
  CDS Start-End: 550-1176
gatgctaagtaagagcaaaagcttcccacctttctgagctgtgctcagagagtttggtgacagaaatgagggaaaagatttcacttgactcttcttccccctgacccccacctcaacaaacaaaccagaagggcacaggccagagcacagcttgcctggcagtccagtcctcatgcatgggagctcaggcctggtgggaggggaggcagagggcccagccgtggcccttgggtgccagcagtcctgggggagggaggaagcagacctgcgacgggaccgaggaatggaggggtggtcgggtgtgtggatggcagagtgacagctagggagaagccggatgtggaaggggaggaactgtgtggtatgcccaggcccctgggcccagccctggcttggcagcccttgctccctgctgagggccctgcctttccttcccctgaaacagctcccggagccctgcctgttccctgtccatccaggccagcagctgaaggagcctcacctgcctcccttctctgagtagcacggatttgaggagaagcagcgaagatgtccagcgagcctccccctccttatcctgggggccccacagccccacttctggaagagaaaagtggagccccgcccaccccaggccgttcctccccagctgtgatgcagccccctccaggcatgccactgccccctgcggacattggccccccaccctatgagccgccgggtcacccaatgccccagcctggcttcatcccaccacacatgagtgcagatggcacctacatgcctccgggtttctaccctcctccaggcccccacccacccatgggctactaccccccagggccctacacgccagggccctaccctggccctgggggccacacagccacagtcctggtcccttcaggagctgccaccacggtgacagtgctgcagggagagatctttgagggagcgcctgtgcagacggtgtgtccccactgccagcaggccatcaccaccaagatctcctacgagattggcttgatgaatttcgtgctgggtttcttctgttgcttcatgggatgtgatctgggctgctgcctgatcccctgcctcatcaatgacttcaaggatgtgacgcacacatgccccagctgcaaagcctacatctacacgtacaagcgcctgtgctaacggagctgggactcgggactcccccgcctgtcagtctggccccctgtgctttgctccctgtgctcagtggtcactttcccgctcccacttggggctgggagccgtgccaccatcccctagaagtcctgtcctcttcaccctgccctacctgagccgctgactcttctggcaaaaattctgttgggatttaaggccaagggtcagtgggtggcagggggctgacaatgagcttgtgtgttgttggtctgcttggtgtgtgtgatcgggaagataagctgggaggggtctcctgctggggtcctgatgcctctgtttccaaacaaggtacaggttcagtccagactctttccccctgggaccaacagcagccagagcagttagccagttagtccccaggcctgtggccacaggcgtttctgacctgctgggccgagaatgggtaagttgtctggagtcaggtgggcccacgtaggacagggtcacaaagcctgggtttgtttctgggtactttgcgcctctggggtgctagaggtggggcatggtggctggaagtaaaactgccaactctggccctcagaactctcaggtatagaagcccaggatgtctaataccctgtcccagtgcccgagagctgcctggtgtcaggtagagaggacactgtacctgggtgaatgatcagaccctggtagctaagaaggaacttgtccctttgagtcagtgtgcagaccccctttcaggccatgcctctgtgaaccctgtattgctggggccggaaggagcccctgagcctagccccttcccgtctgccctgtgtcctcactgcgtgtgggtatgacctctgcctggtggctggtgtatcccaactgggcaagagatggcagagggtcccccttgtgggtgcgcttggatgtgcagagccttctccatggattttcttccctgtaagtgccgggcccctcaccccagctgacaggctgttgctgtgcctgctcacacctgctcctgcaggcacactgggctagggacgaggaaggagcagccacaagtggtagaactgccttggtggacaccagcctcgccctgtctttatttcctgaatggtttgtgaacttgctcacctggaccactgtatcctgccactgtccttcctggtctcgcactgccactgcatggcctcctgtcactgtgaatcgtggcccagtctcagtttgtagtttctcattaaattggccctttcactcccccgccctgggcctctgctctcttgcctggcttccttcttttttgagggaaagagggtggggctgcaggcagtctactggcaggacgggaggctgagtcctcagggtctcacaccctcagtgctgatgccatgccaactgcctgggacaacaccaacacgtaaggacctaattaaaccaaaccagagtcgggtgtagaccagccctgggatttccagctgtgactgggccagggcacacgttggtctcggcagtggctgtaaggtcaccttccttcctctgatgctggtttcaaccatctatatatggcatccacgcatgggatctgcaagctggagccctcctacccgcaggcttgagcacagcatcatccagccctggggaggcgcacccttaagcaacacagactgggctgaggctgacaggcagaagactaacagagcgcagtctgcacacgcaggttctgggcgacctctggccctggccatctctgcactaactcatctgaattatgaaggtggcagtcttggtcagtagtttaaagagtttccctactttttaaccctttttgaaataaaacttttacaggta

SEQ ID NO: 116084 - DNA, 2774 bp, Homo sapiens
  Payload ID: 2646
  Gene Symbol: CDIP1
  Gene Name: cell death-inducing p53 target 1
  Uniprot ID: Q9H305
  ENST ID: ENST00000563332
  CDS Start-End: 251-877
ctctgggcggtggggtgggcggtgggttggggggtttcgttgtgcgcgcaaagccgcgcggggctgagggtcttgttctgccggcgcctgtccggacccgggcccctctccgctttcggccggcctcgggcaccgggcttctggagctcccggagccctgcctgttccctgtccatccaggccagcagctgaaggagcctcacctgcctcccttctctgagtagcacggatttgaggagaagcagcgaagatgtccagcgagcctccccctccttatcctgggggccccacagccccacttctggaagagaaaagtggagccccgcccaccccaggccgttcctccccagctgtgatgcagccccctccaggcatgccactgccccctgcggacattggccccccaccctatgagccgccgggtcacccaatgccccagcctggcttcatcccaccacacatgagtgcagatggcacctacatgcctccgggtttctaccctcctccaggcccccacccacccatgggctactaccccccagggccctacacgccagggccctaccctggccctgggggccacacagccacagtcctggtcccttcaggagctgccaccacggtgacagtgctgcagggagagatctttgagggagcgcctgtgcagacggtgtgtccccactgccagcaggccatcaccaccaagatctcctacgagattggcttgatgaatttcgtgctgggtttcttctgttgcttcatgggatgtgatctgggctgctgcctgatcccctgcctcatcaatgacttcaaggatgtgacgcacacatgccccagctgcaaagcctacatctacacgtacaagcgcctgtgctaacggagctgggactcgggactcccccgcctgtcagtctggccccctgtgctttgctccctgtgctcagtggtcactttcccgctcccacttggggctgggagccgtgccaccatcccctagaagtcctgtcctcttcaccctgccctacctgagccgctgactcttctggcaaaaattctgttgggatttaaggccaagggtcagtgggtggcagggggctgacaatgagcttgtgtgttgttggtctgcttggtgtgtgtgatcgggaagataagctgggaggggtctcctgctggggtcctgatgcctctgtttccaaacaaggtacaggttcagtccagactctttccccctgggaccaacagcagccagagcagttagccagttagtccccaggcctgtggccacaggcgtttctgacctgctgggccgagaatgggtaagttgtctggagtcaggtgggcccacgtaggacagggtcacaaagcctgggtttgtttctgggtactttgcgcctctggggtgctagaggtggggcatggtggctggaagtaaaactgccaactctggccctcagaactctcaggtatagaagcccaggatgtctaataccctgtcccagtgcccgagagctgcctggtgtcaggtagagaggacactgtacctgggtgaatgatcagaccctggtagctaagaaggaacttgtccctttgagtcagtgtgcagaccccctttcaggccatgcctctgtgaaccctgtattgctggggccggaaggagcccctgagcctagccccttcccgtctgccctgtgtcctcactgcgtgtgggtatgacctctgcctggtggctggtgtatcccaactgggcaagagatggcagagggtcccccttgtgggtgcgcttggatgtgcagagccttctccatggattttcttccctgtaagtgccgggcccctcaccccagctgacaggctgttgctgtgcctgctcacacctgctcctgcaggcacactgggctagggacgaggaaggagcagccacaagtggtagaactgccttggtggacaccagcctcgccctgtctttatttcctgaatggtttgtgaacttgctcacctggaccactgtatcctgccactgtccttcctggtctcgcactgccactgcatggcctcctgtcactgtgaatcgtggcccagtctcagtttgtagtttctcattaaattggccctttcactcccccgccctgggcctctgctctcttgcctggcttccttcttttttgagggaaagagggtggggctgcaggcagtctactggcaggacgggaggctgagtcctcagggtctcacaccctcagtgctgatgccatgccaactgcctgggacaacaccaacacgtaaggacctaattaaaccaaaccagagtcgggtgtagaccagccctgggatttccagctgtgactgggccagggcacacgttggtctcggcagtggctgtaaggtcaccttccttcctctgatgctggtttcaaccatctatatatggcatccacgcatgggatctgcaagctggagccctcctacccgcaggcttgagcacagcatcatccagccctggggaggcgcacccttaagcaacacagactgggctgaggctgacaggcagaagactaacagagcgcagtctgcacacgcaggttctgggcgacctctggccctggccatctctgcactaactcatctgaattatgaaggtggcagtcttggtcagtagtttaaagagtttccctactttttaaccctttttgaaataaaacttttacaggtagtagattcctattaataaaattatttaagttcatgtttctcttttagagaatgaattgtttaaa

SEQ ID NO: 116085 - DNA, 1205 bp, Homo sapiens
  Payload ID: 2646
  Gene Symbol: CDIP1
  Gene Name: cell death-inducing p53 target 1
  Uniprot ID: Q9H305
  ENST ID: ENST00000562334
  CDS Start-End: 177-566
agaagtgcgactgccagctgccgaggcgttcggtcctgctgttgcggccgctgccccagggctgcggggacgctcccggagccctgcctgttccctgtccatccaggccagcagctgaaggagcctcacctgcctcccttctctgagtagcacggatttgaggagaagcagcgaagatgtccagcgagcctccccctccttatcctgggggccccacagccccacttctggaagagaaaagtggagccccgcccaccccaggccgttcctccccagctgtgatgcagccccctccaggagctgccaccacggtgacagtgctgcagggagagatctttgagggagcgcctgtgcagacggtgtgtccccactgccagcaggccatcaccaccaagatctcctacgagattggcttgatgaatttcgtgctgggtttcttctgttgcttcatgggatgtgatctgggctgctgcctgatcccctgcctcatcaatgacttcaaggatgtgacgcacacatgccccagctgcaaagcctacatctacacgtacaagcgcctgtgctaacggagctgggactcgggactcccccgcctgtcagtctggccccctgtgctttgctccctgtgctcagtggtcactttcccgctcccacttggggctgggagccgtgccaccatcccctagaagtcctgtcctcttcaccctgccctacctgagccgctgactcttctggcaaaaattctgttgggatttaaggccaagggtcagtgggtggcagggggctgacaatgagcttgtgtgttgttggtctgcttggtgtgtgtgatcgggaagataagctgggaggggtctcctgctggggtcctgatgcctctgtttccaaacaaggtacaggttcagtccagactctttccccctgggaccaacagcagccagagcagttagccagttagtccccaggcctgtggccacaggcgtttctgacctgctgggccgagaatgggtaagttgtctggagtcaggtgggcccacgtaggacagggtcacaaagcctgggtttgtttctgggtactttgcgcctctggggtgctagaggtggggcatggtggctggaagtaaaactgccaactctggccctcagaactctcaggtatagaagcccaggatgtctaataccctgtcccagtgcccgagagctgcctg

SEQ ID NO: 116086 - DNA, 1463 bp, Homo sapiens
  Payload ID: 2646
  Gene Symbol: CDIP1
  Gene Name: cell death-inducing p53 target 1
  Uniprot ID: Q9H305
  ENST ID: ENST00000563507
  CDS Start-End: 188-697
ctccttgtgacagaagtgcgactgccagctgccgaggcgttcggtcctgctgttgcggccgctgccccagggctgcggggacgctcccggagccctgcctgttccctgtccatccaggccagcagctgaaggagcctcacctgcctcccttctctgagtagcacggatttgaggagaagcagcgaagatgtccagcgagcctccccctccttatcctgggggccccacagccccacttctggaagagaaaagtggagccccgcccaccccaggccgttcctccccagctgtgatgcagccccctccaggcatgccactgccccctgcggacattggccccccaccctatgagccgccgggtcacccaatgccccagcctggcttcatcccaccacacatgagtgcagatggcacctacatgcctccgggagctgccaccacggtgacagtgctgcagggagagatctttgagggagcgcctgtgcagacggtgtgtccccactgccagcaggccatcaccaccaagatctcctacgagattggcttgatgaatttcgtgctgggtttcttctgttgcttcatgggatgtgatctgggctgctgcctgatcccctgcctcatcaatgacttcaaggatgtgacgcacacatgccccagctgcaaagcctacatctacacgtacaagcgcctgtgctaacggagctgggactcgggactcccccgcctgtcagtctggccccctgtgctttgctccctgtgctcagtggtcactttcccgctcccacttggggctgggagccgtgccaccatcccctagaagtcctgtcctcttcaccctgccctacctgagccgctgactcttctggcaaaaattctgttgggatttaaggccaagggtcagtgggtggcagggggctgacaatgagcttgtgtgttgttggtctgcttggtgtgtgtgatcgggaagataagctgggaggggtctcctgctggggtcctgatgcctctgtttccaaacaaggtacaggttcagtccagactctttccccctgggaccaacagcagccagagcagttagccagttagtccccaggcctgtggccacaggcgtttctgacctgctgggccgagaatgggtaagttgtctggagtcaggtgggcccacgtaggacagggtcacaaagcctgggtttgtttctgggtactttgcgcctctggggtgctagaggtggggcatggtggctggaagtaaaactgccaactctggccctcagaactctcaggtatagaagcccaggatgtctaataccctgtcccagtgcccgagagctgcctggtgtcaggtagagaggacactgtacctgggtgaatgatcagaccctggtagctaagaaggaacttgtccctttgagtcagtgtgcagaccccctttcaggccatgcctctgtgaaccctgtattgct

SEQ ID NO: 116087 - DNA, 1636 bp, Homo sapiens
  Payload ID: 2646
  Gene Symbol: CDIP1
  Gene Name: cell death-inducing p53 target 1
  ENST ID: ENST00000564828
  CDS Start-End: 238-396
accgtgacgtcccgggcctcggccctggtccaaagtctacccgcctccttgtgacagaagtgcgactgccagctgccgaggcgttcggtcctgctgttgcggccgctgccccagggctgcggggacgctcccggagccctgcctgttccctgtccatccaggccagcagctgaaggagcctcacctgcctcccttctctgagtagcacggatttgaggccgttcctccccagctgtgatgcagccccctccaggcatgccactgccccctgcggacattggccccccaccctatgagccgccgggtcacccaatgccccagcctggcttcatcccaccacacatgagtgcagatggcacctacatgcctccggatgtgatctgggctgctgcctgatcccctgcctcatcaatgacttcaaggatgtgacgcacacatgccccagctgcaaagcctacatctacacgtacaagcgcctgtgctaacggagctgggactcgggactcccccgcctgtcagtctggccccctgtgctttgctccctgtgctcagtggtcactttcccgctcccacttggggctgggagccgtgccaccatcccctagaagtcctgtcctcttcaccctgccctacctgagccgctgactcttctggcaaaaattctgttgggatttaaggccaagggtcagtgggtggcagggggctgacaatgagcttgtgtgttgttggtctgcttggtgtgtgtgatcgggaagataagctgggaggggtctcctgctggggtcctgatgcctctgtttccaaacaaggtacaggttcagtccagactctttccccctgggaccaacagcagccagagcagttagccagttagtccccaggcctgtggccacaggcgtttctgacctgctgggccgagaatgggtaagttgtctggagtcaggtgggcccacgtaggacagggtcacaaagcctgggtttgtttctgggtactttgcgcctctggggtgctagaggtggggcatggtggctggaagtaaaactgccaactctggccctcagaactctcaggtatagaagcccaggatgtctaataccctgtcccagtgcccgagagctgcctggtgtcaggtagagaggacactgtacctgggtgaatgatcagaccctggtagctaagaaggaacttgtccctttgagtcagtgtgcagaccccctttcaggccatgcctctgtgaaccctgtattgctggggccggaaggagcccctgagcctagccccttcccgtctgccctgtgtcctcactgcgtgtgggtatgacctctgcctggtggctggtgtatcccaactgggcaagagatggcagagggtcccccttgtgggtgcgcttggatgtgcagagccttctccatggattttcttccctgtaagtgccgggcccctcaccccagctgacaggctgttgctgtgcctgctcacacctgctcctgcaggcacactgggctagggacgaggaaggagcagccacaagtggtagaactgccttggtggacaccagcctcgccctgtctttatttcctgaatggtttgtgaacttgctcacctggaccactgtatcctgccactgtccttcct

SEQ ID NO: 116088 - DNA, 577 bp, Homo sapiens
  Payload ID: 2646
  Gene Symbol: CDIP1
  Gene Name: cell death-inducing p53 target 1
  ENST ID: ENST00000562579
  CDS Start-End: 179-577
acagaagtgcgactgccagctgccgaggcgttcggtcctgctgttgcggccgctgccccagggctgcggggacgctcccggagccctgcctgttccctgtccatccaggccagcagctgaaggagcctcacctgcctcccttctctgagtagcacggatttgaggagaagcagcgaagatgtccagcgagcctccccctccttatcctgggggccccacagccccacttctggaagagaaaagtggagccccgcccaccccaggccgttcctccccagctgtgatgcagccccctccaggcatgccactgccccctgcggacattggccccccaccctatgagccgccgggtcacccaatgccccagcctggcttcatcccaccacacatgagtgcagatggcacctacatgcctccggctgcaaagcctacatctacacgtacaagcgcctgtgctaacggagctgggactcgggactcccccgcctgtcagtctggccccctgtgctttgctccctgtgctcagtggtcactttcccgctcccacttggggctgggagccgtgccaccatcccct

SEQ ID NO: 116089 - DNA, 444 bp, Homo sapiens
  Payload ID: 2646
  Gene Symbol: CDIP1
  Gene Name: cell death-inducing p53 target 1
  ENST ID: ENST00000563186
  CDS Start-End: 111-444
ctcccggagccctgcctgttccctgtccatccaggccagcagctgaaggagcctcacctgcctcccttctctgagtagcacggatttgaggccgttcctccccagctgtgatgcagccccctccaggcatgccactgccccctgcggacattggccccccaccctatgagccgccgggtcacccaatgccccagcctggcttcatcccaccacacatgagtgcagatggcacctacatgcctccgggtttctaccctcctccaggcccccacccacccatgggctactaccccccagggccctacacgccagggccctaccctggccctgggggccacacagccacagtcctggtcccttcaggagctgccaccacggtgacagtgctgcagggagagatctttgagggagcgcctgtgcagacggtgtgtccccactgccagc

SEQ ID NO: 116090 - DNA, 2062 bp, Homo sapiens
  Payload ID: 2646
  Gene Symbol: CDIP1
  Gene Name: cell death-inducing p53 target 1
  Uniprot ID: Q9H305
  ENST ID: ENST00000567695
  CDS Start-End: 188-814
ctccttgtgacagaagtgcgactgccagctgccgaggcgttcggtcctgctgttgcggccgctgccccagggctgcggggacgctcccggagccctgcctgttccctgtccatccaggccagcagctgaaggagcctcacctgcctcccttctctgagtagcacggatttgaggagaagcagcgaagatgtccagcgagcctccccctccttatcctgggggccccacagccccacttctggaagagaaaagtggagccccgcccaccccaggccgttcctccccagctgtgatgcagccccctccaggcatgccactgccccctgcggacattggccccccaccctatgagccgccgggtcacccaatgccccagcctggcttcatcccaccacacatgagtgcagatggcacctacatgcctccgggtttctaccctcctccaggcccccacccacccatgggctactaccccccagggccctacacgccagggccctaccctggccctgggggccacacagccacagtcctggtcccttcaggagctgccaccacggtgacagtgctgcagggagagatctttgagggagcgcctgtgcagacggtgtgtccccactgccagcaggccatcaccaccaagatctcctacgagattggcttgatgaatttcgtgctgggtttcttctgttgcttcatgggatgtgatctgggctgctgcctgatcccctgcctcatcaatgacttcaaggatgtgacgcacacatgccccagctgcaaagcctacatctacacgtacaagcgcctgtgctaacggagctgggactcgggactcccccgcctgtcagtctggccccctgtgctttgctccctgtgctcagtggtcactttcccgctcccacttggggctgggagccgtgccaccatcccctagaagtcctgtcctcttcaccctgccctacctgagccgctgactcttctggcaaaaattctgttgggatttaaggccaagggtcagtgggtggcagggggctgacaatgagcttgtgtgttgttggtctgcttggtgtgtgtgatcgggaagataagctgggaggggtctcctgctggggtcctgatgcctctgtttccaaacaaggtacaggttcagtccagactctttccccctgggaccaacagcagccagagcagttagccagttagtccccaggcctgtggccacaggcgtttctgacctgctgggccgagaatgggtaagttgtctggagtcaggtgggcccacgtaggacagggtcacaaagcctgggtttgtttctgggtactttgcgcctctggggtgctagaggtggggcatggtggctggaagtaaaactgccaactctggccctcagaactctcaggtatagaagcccaggatgtctaataccctgtcccagtgcccgagagctgcctggtgtcaggtagagaggacactgtacctgggtgaatgatcagaccctggtagctaagaaggaacttgtccctttgagtcagtgtgcagaccccctttcaggccatgcctctgtgaaccctgtattgctggggccggaaggagcccctgagcctagccccttcccgtctgccctgtgtcctcactgcgtgtgggtatgacctctgcctggtggctggtgtatcccaactgggcaagagatggcagagggtcccccttgtgggtgcgcttggatgtgcagagccttctccatggattttcttccctgtaagtgccgggcccctcaccccagctgacaggctgttgctgtgcctgctcacacctgctcctgcaggcacactgggctagggacgaggaaggagcagccacaagtggtagaactgccttggtggacaccagcctcgccctgtctttatttcctgaatggtttgtgaacttgctcacctggaccactgtatcctgccactgtccttcctggtctcgcactgccactgcatggcctcctgtcactgtgaatcgtggcccagtctcagtttgtagtttctcattaaattggccctttcactcccccgc

SEQ ID NO: 116091 - DNA, 484 bp, Homo sapiens
  Payload ID: 2646
  Gene Symbol: CDIP1
  Gene Name: cell death-inducing p53 target 1
  ENST ID: ENST00000588381
  CDS Start-End: 200-484
tctgggcggtggggtgggcggtgggttggggggtttcgttgtgcgcgcaaagccgcgcggggctgagggtcttgttctgccggcgcctgtccggacccgggcccctctccgctttcggccggcctcgggcaccgggcttctggagctcccggagccctgcctgttccctgtccatccaggccgttcctccccagctgtgatgcagccccctccaggcatgccactgccccctgcggacattggccccccaccctatgagccgccgggtcacccaatgccccagcctggcttcatcccaccacacatgagtgcagatggcacctacatgcctccgggtttctaccctcctccaggcccccacccacccatgggctactaccccccagggccctacacgccagggccctaccctggccctgggggccacacagccacagtcctggtcccttcaggagctgccaccacggtgacagtgctgcaggga

SEQ ID NO: 116092 - DNA, 476 bp, Homo sapiens
  Payload ID: 2646
  Gene Symbol: CDIP1
  Gene Name: cell death-inducing p53 target 1
  ENST ID: ENST00000589890
  CDS Start-End: 20-476
tccaggagaagcagcgaagatgtccagcgagcctccccctccttatcctgggggccccacagccccacttctggaagagaaaagtggagccccgcccaccccaggccgttcctccccagctgtgatgcagccccctccaggcatgccactgccccctgcggacattggccccccaccctatgagccgccgggtcacccaatgccccagcctggcttcatcccaccacacatgagtgcagatggcacctacatgcctccggggccctacacgccagggccctaccctggccctgggggccacacagccacagtcctggtcccttcaggagctgccaccacggtgacagtgctgcagggagagatctttgagggagcgcctgtgcagacggtgtgtccccactgccagcaggccatcaccaccaagatctcctacgagattggcttgatgaatttcgtgctgggtttcttctgttgct

SEQ ID NO: 116093 - DNA, 838 bp, Homo sapiens
  Payload ID: 2646
  Gene Symbol: CDIP1
  Gene Name: cell death-inducing p53 target 1
  ENST ID: ENST00000589159
  CDS Start-End: 210-477
ctcccggagccctgcctgttccctgtccatccaggccagcagctgaaggagcctcacctgcctcccttctctgagtagcacggatttgaggagaagcagcgaagatgtccagcgagcctccccctccttatcctgggggccccacagccccacttctggaagagaaaagtggagccccgcccaccccaggccgttcctccccagctgtgatgcagccccctccaggcatgccactgccccctgcggacattggccccccaccctatgagccgccgggtcacccaatgccccagcctggcttcatcccaccacacatgagtgcagatggcacctacatgcctccggggccctaccctggccctgggggccacacagccacagtcctggtcccttcaggagctgccaccacggtgacagtgctgcagggagagatctttgagggagcgcctgtgcagacggtgtgtccccactgccagcaggccatcaccaccaagatctcctacgagattggcttgatgaatttcgtgctgggtttcttctgttgcttcatgggatgtgatctgggctgctgcctgatcccctgcctcatcaatgacttcaaggatgtgacgcacacatgccccagctgcaaagcctacatctacacgtacaagcgcctgtgctaacggagctgggactcgggactcccccgcctgtcagtctggccccctgtgctttgctccctgtgctcagtggtcactttcccgctcccacttggggctgggagccgtgccaccatcccctagaagtcctgtcctcttcaccctgccctacctgagccgctgactcttctggcaaa

SEQ ID NO: 116094 - DNA, 299 bp, Homo sapiens
  Payload ID: 2646
  Gene Symbol: CDIP1
  Gene Name: cell death-inducing p53 target 1
  ENST ID: ENST00000566234
  CDS Start-End: 214-299
agcaaagcagaaagccctgttcctggctggatgcctgggacctgcctcctggggacagaggagcccctctgaggccagctggcgtcctgacgccatggctgccacgtggctcccggagccctgcctgttccctgtccatccaggccagcagctgaaggagcctcacctgcctcccttctctgagtagcacggatttgaggagaagcagcgaagatgtccagcgagcctccccctccttatcctgggggccccacagccccacttctggaagagaaaagtggagccccgcccaccccagg

SEQ ID NO: 116095 - DNA, 756 bp, Homo sapiens
  Payload ID: 2646
  Gene Symbol: CDIP1
  Gene Name: cell death-inducing p53 target 1
  ENST ID: ENST00000586728
  CDS Start-End: 514-756
agggtcttgttctgccggcgcctgtccggacccgggcccctctccgctttcggccggcctcgggcaccgggcttctggagagatggcatgtcattattttgcccagctggtctctaactcctgggctcaagtgatcctcttgcctcaccctcccaaagtgctgggattacaggcaggagctaccgtgcccaagttcttacaaggatttaagagcagccagccgtggttctagaatcaccataagagcagaacattgactgtatgatgtaaagtaatacttcagggaacaaaattgttttgagaaggagctaacggaatgcgtcccgaaggccagcttgccccagcagatcacgttggcaataattgaagctagtcatcagcttgcaactccctgtcggctctttacactctcccggagccctgcctgttccctgtccatccaggccagcagctgaaggagcctcacctgcctcccttctctgagtagcacggatttgaggagaagcagcgaagatgtccagcgagcctccccctccttatcctgggggccccacagccccacttctggaagagaaaagtggagccccgcccaccccaggccgttcctccccagctgtgatgcagccccctccaggcatgccactgccccctgcggacattggccccccaccctatgagccgccgggtcacccaatgccccagcctggcttcatcccaccacacatgagtgcagatggcacctacatgcctccgggt

SEQ ID NO: 116096 - DNA, 3009 bp, Homo sapiens; identical to SEQ ID NO: 116083
  Payload ID: 2646
  Gene Symbol: CDIP1
  Gene Name: cell death-inducing p53 target 1
  Uniprot ID: Q9H305
  ENST ID: ENST00000611166
  CDS Start-End: 550-1176

SEQ ID NO: 116097 - DNA, 838 bp, Homo sapiens; identical to SEQ ID NO: 116093
  Payload ID: 2646
  Gene Symbol: CDIP1
  Gene Name: cell death-inducing p53 target 1
  ENST ID: ENST00000634209
  CDS Start-End: 210-477

SEQ ID NO: 116098 - DNA, 1380 bp, Homo sapiens
  Payload ID: 2646
  Gene Symbol: CDIP1
  Gene Name: cell death-inducing p53 target 1
  Uniprot ID: Q9H305
  ENST ID: ENST00000633324
  CDS Start-End: 105-614
ctcccggagccctgcctgttccctgtccatccaggccagcagctgaaggagcctcacctgcctcccttctctgagtagcacggatttgaggagaagcagcgaagatgtccagcgagcctccccctccttatcctgggggccccacagccccacttctggaagagaaaagtggagccccgcccaccccaggccgttcctccccagctgtgatgcagccccctccaggcatgccactgccccctgcggacattggccccccaccctatgagccgccgggtcacccaatgccccagcctggcttcatcccaccacacatgagtgcagatggcacctacatgcctccgggagctgccaccacggtgacagtgctgcagggagagatctttgagggagcgcctgtgcagacggtgtgtccccactgccagcaggccatcaccaccaagatctcctacgagattggcttgatgaatttcgtgctgggtttcttctgttgcttcatgggatgtgatctgggctgctgcctgatcccctgcctcatcaatgacttcaaggatgtgacgcacacatgccccagctgcaaagcctacatctacacgtacaagcgcctgtgctaacggagctgggactcgggactcccccgcctgtcagtctggccccctgtgctttgctccctgtgctcagtggtcactttcccgctcccacttggggctgggagccgtgccaccatcccctagaagtcctgtcctcttcaccctgccctacctgagccgctgactcttctggcaaaaattctgttgggatttaaggccaagggtcagtgggtggcagggggctgacaatgagcttgtgtgttgttggtctgcttggtgtgtgtgatcgggaagataagctgggaggggtctcctgctggggtcctgatgcctctgtttccaaacaaggtacaggttcagtccagactctttccccctgggaccaacagcagccagagcagttagccagttagtccccaggcctgtggccacaggcgtttctgacctgctgggccgagaatgggtaagttgtctggagtcaggtgggcccacgtaggacagggtcacaaagcctgggtttgtttctgggtactttgcgcctctggggtgctagaggtggggcatggtggctggaagtaaaactgccaactctggccctcagaactctcaggtatagaagcccaggatgtctaataccctgtcccagtgcccgagagctgcctggtgtcaggtagagaggacactgtacctgggtgaatgatcagaccctggtagctaagaaggaacttgtccctttgagtcagtgtgcagaccccctttcaggccatgcctctgtgaaccctgtattgct

SEQ ID NO: 116099 - DNA, 503 bp, Homo sapiens
  Payload ID: 2646
  Gene Symbol: CDIP1
  Gene Name: cell death-inducing p53 target 1
  ENST ID: ENST00000631926
  CDS Start-End: 105-503
ctcccggagccctgcctgttccctgtccatccaggccagcagctgaaggagcctcacctgcctcccttctctgagtagcacggatttgaggagaagcagcgaagatgtccagcgagcctccccctccttatcctgggggccccacagccccacttctggaagagaaaagtggagccccgcccaccccaggccgttcctccccagctgtgatgcagccccctccaggcatgccactgccccctgcggacattggccccccaccctatgagccgccgggtcacccaatgccccagcctggcttcatcccaccacacatgagtgcagatggcacctacatgcctccggctgcaaagcctacatctacacgtacaagcgcctgtgctaacggagctgggactcgggactcccccgcctgtcagtctggccccctgtgctttgctccctgtgctcagtggtcactttcccgctcccacttggggctgggagccgtgccaccatcccct

SEQ ID NO: 116100 - DNA, 1979 bp, Homo sapiens
  Payload ID: 2646
  Gene Symbol: CDIP1
  Gene Name: cell death-inducing p53 target 1
  Uniprot ID: Q9H305
  ENST ID: ENST00000632937
  CDS Start-End: 105-731
ctcccggagccctgcctgttccctgtccatccaggccagcagctgaaggagcctcacctgcctcccttctctgagtagcacggatttgaggagaagcagcgaagatgtccagcgagcctccccctccttatcctgggggccccacagccccacttctggaagagaaaagtggagccccgcccaccccaggccgttcctccccagctgtgatgcagccccctccaggcatgccactgccccctgcggacattggccccccaccctatgagccgccgggtcacccaatgccccagcctggcttcatcccaccacacatgagtgcagatggcacctacatgcctccgggtttctaccctcctccaggcccccacccacccatgggctactaccccccagggccctacacgccagggccctaccctggccctgggggccacacagccacagtcctggtcccttcaggagctgccaccacggtgacagtgctgcagggagagatctttgagggagcgcctgtgcagacggtgtgtccccactgccagcaggccatcaccaccaagatctcctacgagattggcttgatgaatttcgtgctgggtttcttctgttgcttcatgggatgtgatctgggctgctgcctgatcccctgcctcatcaatgacttcaaggatgtgacgcacacatgccccagctgcaaagcctacatctacacgtacaagcgcctgtgctaacggagctgggactcgggactcccccgcctgtcagtctggccccctgtgctttgctccctgtgctcagtggtcactttcccgctcccacttggggctgggagccgtgccaccatcccctagaagtcctgtcctcttcaccctgccctacctgagccgctgactcttctggcaaaaattctgttgggatttaaggccaagggtcagtgggtggcagggggctgacaatgagcttgtgtgttgttggtctgcttggtgtgtgtgatcgggaagataagctgggaggggtctcctgctggggtcctgatgcctctgtttccaaacaaggtacaggttcagtccagactctttccccctgggaccaacagcagccagagcagttagccagttagtccccaggcctgtggccacaggcgtttctgacctgctgggccgagaatgggtaagttgtctggagtcaggtgggcccacgtaggacagggtcacaaagcctgggtttgtttctgggtactttgcgcctctggggtgctagaggtggggcatggtggctggaagtaaaactgccaactctggccctcagaactctcaggtatagaagcccaggatgtctaataccctgtcccagtgcccgagagctgcctggtgtcaggtagagaggacactgtacctgggtgaatgatcagaccctggtagctaagaaggaacttgtccctttgagtcagtgtgcagaccccctttcaggccatgcctctgtgaaccctgtattgctggggccggaaggagcccctgagcctagccccttcccgtctgccctgtgtcctcactgcgtgtgggtatgacctctgcctggtggctggtgtatcccaactgggcaagagatggcagagggtcccccttgtgggtgcgcttggatgtgcagagccttctccatggattttcttccctgtaagtgccgggcccctcaccccagctgacaggctgttgctgtgcctgctcacacctgctcctgcaggcacactgggctagggacgaggaaggagcagccacaagtggtagaactgccttggtggacaccagcctcgccctgtctttatttcctgaatggtttgtgaacttgctcacctggaccactgtatcctgccactgtccttcctggtctcgcactgccactgcatggcctcctgtcactgtgaatcgtggcccagtctcagtttgtagtttctcattaaattggccctttcactcccccgc

SEQ ID NO: 116101 - DNA, 347 bp, Homo sapiens
  Payload ID: 2646
  Gene Symbol: CDIP1
  Gene Name: cell death-inducing p53 target 1
  ENST ID: ENST00000633564
  CDS Start-End: 105-347
ctcccggagccctgcctgttccctgtccatccaggccagcagctgaaggagcctcacctgcctcccttctctgagtagcacggatttgaggagaagcagcgaagatgtccagcgagcctccccctccttatcctgggggccccacagccccacttctggaagagaaaagtggagccccgcccaccccaggccgttcctccccagctgtgatgcagccccctccaggcatgccactgccccctgcggacattggccccccaccctatgagccgccgggtcacccaatgccccagcctggcttcatcccaccacacatgagtgcagatggcacctacatgcctccgggt

SEQ ID NO: 116102 - DNA, 299 bp, Homo sapiens; identical to SEQ ID NO: 116094
  Payload ID: 2646
  Gene Symbol: CDIP1
  Gene Name: cell death-inducing p53 target 1
  ENST ID: ENST00000632367
  CDS Start-End: 214-299

SEQ ID NO: 116103 - DNA, 444 bp, Homo sapiens; identical to SEQ ID NO: 116089
  Payload ID: 2646
  Gene Symbol: CDIP1
  Gene Name: cell death-inducing p53 target 1
  ENST ID: ENST00000634168
  CDS Start-End: 111-444

SEQ ID NO: 116104 - DNA, 476 bp, Homo sapiens; identical to SEQ ID NO: 116092
  Payload ID: 2646
  Gene Symbol: CDIP1
  Gene Name: cell death-inducing p53 target 1
  ENST ID: ENST00000632554
  CDS Start-End: 20-476

SEQ ID NO: 116105 - DNA, 2628 bp, Homo sapiens
  Payload ID: 2646
  Gene Symbol: CDIP1
  Gene Name: cell death-inducing p53 target 1
  Uniprot ID: Q9H305
  ENST ID: ENST00000632680
  CDS Start-End: 105-731
ctcccggagccctgcctgttccctgtccatccaggccagcagctgaaggagcctcacctgcctcccttctctgagtagcacggatttgaggagaagcagcgaagatgtccagcgagcctccccctccttatcctgggggccccacagccccacttctggaagagaaaagtggagccccgcccaccccaggccgttcctccccagctgtgatgcagccccctccaggcatgccactgccccctgcggacattggccccccaccctatgagccgccgggtcacccaatgccccagcctggcttcatcccaccacacatgagtgcagatggcacctacatgcctccgggtttctaccctcctccaggcccccacccacccatgggctactaccccccagggccctacacgccagggccctaccctggccctgggggccacacagccacagtcctggtcccttcaggagctgccaccacggtgacagtgctgcagggagagatctttgagggagcgcctgtgcagacggtgtgtccccactgccagcaggccatcaccaccaagatctcctacgagattggcttgatgaatttcgtgctgggtttcttctgttgcttcatgggatgtgatctgggctgctgcctgatcccctgcctcatcaatgacttcaaggatgtgacgcacacatgccccagctgcaaagcctacatctacacgtacaagcgcctgtgctaacggagctgggactcgggactcccccgcctgtcagtctggccccctgtgctttgctccctgtgctcagtggtcactttcccgctcccacttggggctgggagccgtgccaccatcccctagaagtcctgtcctcttcaccctgccctacctgagccgctgactcttctggcaaaaattctgttgggatttaaggccaagggtcagtgggtggcagggggctgacaatgagcttgtgtgttgttggtctgcttggtgtgtgtgatcgggaagataagctgggaggggtctcctgctggggtcctgatgcctctgtttccaaacaaggtacaggttcagtccagactctttccccctgggaccaacagcagccagagcagttagccagttagtccccaggcctgtggccacaggcgtttctgacctgctgggccgagaatgggtaagttgtctggagtcaggtgggcccacgtaggacagggtcacaaagcctgggtttgtttctgggtactttgcgcctctggggtgctagaggtggggcatggtggctggaagtaaaactgccaactctggccctcagaactctcaggtatagaagcccaggatgtctaataccctgtcccagtgcccgagagctgcctggtgtcaggtagagaggacactgtacctgggtgaatgatcagaccctggtagctaagaaggaacttgtccctttgagtcagtgtgcagaccccctttcaggccatgcctctgtgaaccctgtattgctggggccggaaggagcccctgagcctagccccttcccgtctgccctgtgtcctcactgcgtgtgggtatgacctctgcctggtggctggtgtatcccaactgggcaagagatggcagagggtcccccttgtgggtgcgcttggatgtgcagagccttctccatggattttcttccctgtaagtgccgggcccctcaccccagctgacaggctgttgctgtgcctgctcacacctgctcctgcaggcacactgggctagggacgaggaaggagcagccacaagtggtagaactgccttggtggacaccagcctcgccctgtctttatttcctgaatggtttgtgaacttgctcacctggaccactgtatcctgccactgtccttcctggtctcgcactgccactgcatggcctcctgtcactgtgaatcgtggcccagtctcagtttgtagtttctcattaaattggccctttcactcccccgccctgggcctctgctctcttgcctggcttccttcttttttgagggaaagagggtggggctgcaggcagtctactggcaggacgggaggctgagtcctcagggtctcacaccctcagtgctgatgccatgccaactgcctgggacaacaccaacacgtaaggacctaattaaaccaaaccagagtcgggtgtagaccagccctgggatttccagctgtgactgggccagggcacacgttggtctcggcagtggctgtaaggtcaccttccttcctctgatgctggtttcaaccatctatatatggcatccacgcatgggatctgcaagctggagccctcctacccgcaggcttgagcacagcatcatccagccctggggaggcgcacccttaagcaacacagactgggctgaggctgacaggcagaagactaacagagcgcagtctgcacacgcaggttctgggcgacctctggccctggccatctctgcactaactcatctgaattatgaaggtggcagtcttggtcagtagtttaaagagtttccctactttttaaccctttttgaaataaaacttttacaggtagtagattcctattaataaaattatttaagttcatgtttctcttttagagaatgaattgtttaaa

SEQ ID NO: 116106 - DNA, 1509 bp, Homo sapiens
  Payload ID: 2646
  Gene Symbol: CDIP1
  Gene Name: cell death-inducing p53 target 1
  ENST ID: ENST00000633395
  CDS Start-End: 111-269
ctcccggagccctgcctgttccctgtccatccaggccagcagctgaaggagcctcacctgcctcccttctctgagtagcacggatttgaggccgttcctccccagctgtgatgcagccccctccaggcatgccactgccccctgcggacattggccccccaccctatgagccgccgggtcacccaatgccccagcctggcttcatcccaccacacatgagtgcagatggcacctacatgcctccggatgtgatctgggctgctgcctgatcccctgcctcatcaatgacttcaaggatgtgacgcacacatgccccagctgcaaagcctacatctacacgtacaagcgcctgtgctaacggagctgggactcgggactcccccgcctgtcagtctggccccctgtgctttgctccctgtgctcagtggtcactttcccgctcccacttggggctgggagccgtgccaccatcccctagaagtcctgtcctcttcaccctgccctacctgagccgctgactcttctggcaaaaattctgttgggatttaaggccaagggtcagtgggtggcagggggctgacaatgagcttgtgtgttgttggtctgcttggtgtgtgtgatcgggaagataagctgggaggggtctcctgctggggtcctgatgcctctgtttccaaacaaggtacaggttcagtccagactctttccccctgggaccaacagcagccagagcagttagccagttagtccccaggcctgtggccacaggcgtttctgacctgctgggccgagaatgggtaagttgtctggagtcaggtgggcccacgtaggacagggtcacaaagcctgggtttgtttctgggtactttgcgcctctggggtgctagaggtggggcatggtggctggaagtaaaactgccaactctggccctcagaactctcaggtatagaagcccaggatgtctaataccctgtcccagtgcccgagagctgcctggtgtcaggtagagaggacactgtacctgggtgaatgatcagaccctggtagctaagaaggaacttgtccctttgagtcagtgtgcagaccccctttcaggccatgcctctgtgaaccctgtattgctggggccggaaggagcccctgagcctagccccttcccgtctgccctgtgtcctcactgcgtgtgggtatgacctctgcctggtggctggtgtatcccaactgggcaagagatggcagagggtcccccttgtgggtgcgcttggatgtgcagagccttctccatggattttcttccctgtaagtgccgggcccctcaccccagctgacaggctgttgctgtgcctgctcacacctgctcctgcaggcacactgggctagggacgaggaaggagcagccacaagtggtagaactgccttggtggacaccagcctcgccctgtctttatttcctgaatggtttgtgaacttgctcacctggaccactgtatcctgccactgtccttcct

SEQ ID NO: 116107 - DNA, 339 bp, Homo sapiens
  Payload ID: 2646
  Gene Symbol: CDIP1
  Gene Name: cell death-inducing p53 target 1
  ENST ID: ENST00000633690
  CDS Start-End: 55-339
ctcccggagccctgcctgttccctgtccatccaggccgttcctccccagctgtgatgcagccccctccaggcatgccactgccccctgcggacattggccccccaccctatgagccgccgggtcacccaatgccccagcctggcttcatcccaccacacatgagtgcagatggcacctacatgcctccgggtttctaccctcctccaggcccccacccacccatgggctactaccccccagggccctacacgccagggccctaccctggccctgggggccacacagccacagtcctggtcccttcaggagctgccaccacggtgacagtgctgcaggga

SEQ ID NO: 116108 - DNA, 1133 bp, Homo sapiens
  Payload ID: 2646
  Gene Symbol: CDIP1
  Gene Name: cell death-inducing p53 target 1
  Uniprot ID: Q9H305
  ENST ID: ENST00000631859
  CDS Start-End: 105-494
ctcccggagccctgcctgttccctgtccatccaggccagcagctgaaggagcctcacctgcctcccttctctgagtagcacggatttgaggagaagcagcgaagatgtccagcgagcctccccctccttatcctgggggccccacagccccacttctggaagagaaaagtggagccccgcccaccccaggccgttcctccccagctgtgatgcagccccctccaggagctgccaccacggtgacagtgctgcagggagagatctttgagggagcgcctgtgcagacggtgtgtccccactgccagcaggccatcaccaccaagatctcctacgagattggcttgatgaatttcgtgctgggtttcttctgttgcttcatgggatgtgatctgggctgctgcctgatcccctgcctcatcaatgacttcaaggatgtgacgcacacatgccccagctgcaaagcctacatctacacgtacaagcgcctgtgctaacggagctgggactcgggactcccccgcctgtcagtctggccccctgtgctttgctccctgtgctcagtggtcactttcccgctcccacttggggctgggagccgtgccaccatcccctagaagtcctgtcctcttcaccctgccctacctgagccgctgactcttctggcaaaaattctgttgggatttaaggccaagggtcagtgggtggcagggggctgacaatgagcttgtgtgttgttggtctgcttggtgtgtgtgatcgggaagataagctgggaggggtctcctgctggggtcctgatgcctctgtttccaaacaaggtacaggttcagtccagactctttccccctgggaccaacagcagccagagcagttagccagttagtccccaggcctgtggccacaggcgtttctgacctgctgggccgagaatgggtaagttgtctggagtcaggtgggcccacgtaggacagggtcacaaagcctgggtttgtttctgggtactttgcgcctctggggtgctagaggtggggcatggtggctggaagtaaaactgccaactctggccctcagaactctcaggtatagaagcccaggatgtctaataccctgtcccagtgcccgagagctgcctg

SEQ ID NO: 116109 - DNA, 1542 bp, Homo sapiens
  Payload ID: 2647
  Gene Symbol: CDC123
  Gene Name: cell division cycle 123
  Uniprot ID: O75794
  ENST ID: ENST00000281141
  CDS Start-End: 281-1291
tgcgtttagggcgaagacggagttgtaaacttcttaaaattcctctctcgacacttcggtaattcctctttcgagactaaagctctttttgtatgcgtgtgtgtcaagcgtatgccccgggattctcctccgcttccttttctcggtcttccttcttgctttagggaccggaagagtccttgaaccaaaatagctcggcgggcacttccggggccggcgcccagagttccgggagggtgcaggcaggagagggaaaggcagcagcggcggcagctggaggatgaagaaggagcatgtgcttcactgccagttctccgcgtggtacccgttcttccgaggcgttaccatcaagagtgtcattcttccacttcctcagaatgtgaaggattatttactcgatgatggaactctggtggtttcaggaagggatgatccaccaacacattctcagccagacagtgatgatgaagcagaagaaatacagtggtctgatgatgagaacacagccacgcttacggcaccagaatttcctgagtttgccactaaagtccaggaagctatcaattccctcgggggcagtgtctttcctaagcttaattggagtgccccaagggatgcgtattggatagcaatgaatagttctctgaaatgtaaaaccctcagcgacatctttctgcttttcaagagttccgatttcatcactcgtgacttcactcagccgtttattcattgtactgatgattctccagatccatgtatagaatatgagctcgttctccgaaaatggtgtgaattgattcctggggctgagtttcgatgttttgtcaaggaaaacaagcttattggtatttctcaaagagactacacacaatactatgatcatatttctaaacaaaaggaagaaattcgcagatgcatacaagactttttcaagaaacacatacagtacaaattcttagatgaagactttgtgttcgatatatacagagacagtagggggaaggtgtggctcattgactttaatccatttggtgaagtcacagattcactgctgttcacctgggaagaactgatatctgagaacaacttaaacggcgattttagtgaagttgacgctcaagagcaggattccccagctttccgttgcacaaacagtgaagtgacagtccagcccagcccctatttgagttaccggctacccaaggactttgtagacctctctactggggaggacgctcacaagctaatagacttccttaagctgaagagaaatcagcaggaggacgactgatgagcgtactggaactggagaagaggaggccccgccccaccgctccgggagctgctcatcagccgcaacttcctgccgaccctgatgcgggtgggccgagcagtgtggacatcagccactttttatattcatgtacattcacctggggaaaaaaacggagggactttgctacttgtaaaaataacataataaatagatcttaaacataggaaaaccatactgttctgataataaaatgctttctatgaaat

SEQ ID NO: 116110 - DNA, 933 bp, Homo sapiens
  Payload ID: 2647
  Gene Symbol: CDC123
  Gene Name: cell division cycle 123
  ENST ID: ENST00000378900
  CDS Start-End: 24-911
gcagcagcggcggcagctggaggatgaagaaggagcatgtgcttcactgccagttctccgcgtggtacccgttcttccgaggcgttaccatcaagagtgtcattcttccacttcctcagaatgtgaaggattatttactcgatgatggaactctggtggtttcaggaagggatgatccaccaacacattctcagccagacagtgatgatgaagcagaagaaatacagtggtctgatgatgagaacacagccacgcttacggcaccagaatttcctgagtttgccactaaagtccaggaagctatcaattccctcgggggcagtgtctttcctaagcttaattggagtgccccaagggatgcgtattggatagcaatgaatagttctctgaaatgtaaaaccctcagcgacatctttctgcttttcaagagttccgatttcatcactcgtgacttcactcagccgtttattcattgtactgatgattctccagatccatgtatagaatatgagctcgttctccgaaaatggtgtgaattgattcctggggctgagtttcgatgttttgtcaaggaaaacaagcttattgttgtgttcgatatatacagagacagtagggggaaggtgtggctcattgactttaatccatttggtgaagtcacagattcactgctgttcacctgggaagaactgatatctgagaacaacttaaacggcgattttagtgaagttgacgctcaagagcaggattccccagctttccgttgcacaaacagtgaagtgacagtccagcccagcccctatttgagttaccggctacccaaggactttgtagacctctctactggggaggacgctcacaagctaatagacttccttaagctgaagagaaatcagcaggaggacgactgatgagcgtactggaactggagaa

SEQ ID NO: 116111 - DNA, 685 bp, Homo sapiens
  Payload ID: 2647
  Gene Symbol: CDC123
  Gene Name: cell division cycle 123
  ENST ID: ENST00000440613
  CDS Start-End: 1-433
gtttattcattgtactgatgattctccagatccatgtatagaatatgagctcgttctccgaaaatggtgtgaattgattcctggggctgagtttcgatgttttgtcaaggaaaacaagcttattggtatttctcaaagagactacacacaatactatgatcatatttctaaacaaaaggaagaaattcgcagatgcatacaagactttttcaagaaacacatacagtacaaattcttagatgaagactttgtgttcgatatatacagagacagtagggggaaggtgtggctcattgactttaatccatttggtgaagtcacagattcactgctgttcacctgggaagaactgatatctgagaacaacttaaacggcgattttagtgaagttgacgctcaagagcagaagagaaatcagcaggaggacgactgatgagcgtactggaactggagaagaggaggccccgccccaccgctccgggagctgctcatcagccgcaacttcctgccgaccctgatgcgggtgggccgagcagtgtggacatcagccactttttatattcatgtacattcacctggggaaaaaaacggagggactttgctacttgtaaaaataacataataaatagatcttaaacataggaaaaccatactgttctgataataaaatgctttctatgaaata

SEQ ID NO: 116112 - DNA, 564 bp, Homo sapiens
  Payload ID: 2647
  Gene Symbol: CDC123
  Gene Name: cell division cycle 123
  ENST ID: ENST00000442050
  CDS Start-End: 15-564
gcggcagctggaggatgaagaaggagcatgtgcttcactgccagttctccgcgtggtacccgttcttccgaggcgttaccatcaagagtgtcattcttccacttcctcagaatgtgaaggattatttactcgatgatggaactctggtggtttcaggaagggatgatccaccaacacattctcagccagacagtgatgatgaagcagaagaaatacagtggtctgatgatgagaacacagccacgcttacggatgcgtattggatagcaatgaatagttctctgaaatgtaaaaccctcagcgacatctttctgcttttcaagagttccgatttcatcactcgtgacttcactcagccgtttattcattgtactgatgattctccagatccatgtatagaatatgagctcgttctccgaaaatggtgtgaattgattcctggggctgagtttcgatgttttgtcaaggaaaacaagcttattggtatttctcaaagagactacacacaatactatgatcatatttctaaacaaaaggaagaaattcgcagatgcatacaagact

SEQ ID NO: 116113 - DNA, 646 bp, Homo sapiens
  Payload ID: 2647
  Gene Symbol: CDC123
  Gene Name: cell division cycle 123
  ENST ID: ENST00000429258
  CDS Start-End: 176-646
gtgcgtttagggcgaagacggagttgtaaacttcttaaaattcctctctcgacacttcgggaccggaagagtccttgaaccaaaatagctcggcgggcacttccggggccggcgcccagagttccgggagggtgcaggcaggagagggaaaggcagcagcggcggcagctggaggatgaagaaggagcatgtgcttcactgccagttctccgcgtggtacccgttcttccgaggcgttaccatcaagagtgtcattcttccacttcctcagaatgtgaaggattatttactcgatgatggaactctggtggtttcaggaagggatgatccaccaacacattctcagccagacagtgatgatgaagcagaagaaatacagtggtctgatgatgagaacacagccacgcttacggcaccagaatttcctgagtttgccactaaagtccaggaagctatcaattccctcgggggcagtgtctttcctaagcttaattggagtgccccaagggatgcgtattggatagcaatgaatagttctctgaaatgtaaaaccctcagcgacatctttctgcttttcaagagttccgatttcatcactcgtgacttcactcagccgtttattcattgtactgatgattctccagat

SEQ ID NO: 116114 - DNA, 4137 bp, Homo sapiens
  Payload ID: 2648
  Gene Symbol: CDC14A
  Gene Name: cell division cycle 14A
  Uniprot ID: Q9UNH5
  ENST ID: ENST00000336454
  CDS Start-End: 356-2140
atcactttggaagccgggggaagactttgccctgccctgagagctggtctgcgtttcccaggcgcggcggcggcggagcagcagctgcagcagccgagtccaaataggagcggccacagccaggggcgtgagcgccccgcgcggagcgagctcgggttcccctcggaatgtccccggggcgcccggcgcgctgaccccgaagccgcctccgccttcggcgcctgctgcctccctcggccaggcttgttgttcgggactgtgagcttcctggctcctgggcagtggggaagcccccgggggcgagtgacttcagctggccacgacccagccctcccccgtgcgtatctcgcttaagatggcagcggagtcaggggaactaatcggggcttgtgagttcatgaaagatcggttatattttgctactttaaggaatagaccaaaaagcacagtaaatacccactatttctccatcgatgaggagctggtctatgaaaatttctatgcagattttggaccgctgaacttggcaatggtgtacagatattgctgcaaactaaacaagaaactaaaatcatacagtttgtcaagaaagaaaatagtgcactacacctgttttgaccaacggaaaagagcaaatgcagcatttttgataggtgcctatgcagtaatctatttaaagaagacaccagaagaagcctacagagcactcctgtctggctcaaaccccccctatcttccattcagggatgcttcctttggaaattgcacttacaatctcaccattctcgactgtttgcagggaatcagaaagggattacaacatggattttttgactttgagacatttgatgtggatgaatatgaacattatgagcgagttgaaaatggtgacttcaactggattgttccaggaaaatttttagcatttagtggaccacatcctaaaagcaaaattgagaatggttatcctcttcacgcccctgaagcctactttccttatttcaaaaagcataatgtgactgcagttgtgaggctaaacaaaaagatttatgaggcaaagcgcttcacagacgctggcttcgagcactatgacctcttcttcatagatggcagcacacccagtgacaacatcgtgcgaaggttcctgaacatctgtgagaacaccgaaggggccatcgccgttcactgcaaagctggtcttggaagaacagggacattgatagcctgttatgtaatgaaacactacaggtttacacatgctgaaataattgcttggattagaatatgccggccaggctctattataggaccccagcagcacttcctggaagaaaaacaagcatcgttgtgggtccaaggagacattttccgatccaaactgaaaaatcgaccatccagtgaaggaagtattaataaaattctttctggcctagatgatatgtctattggtggaaatctttcaaaaacacaaaacatggaacgatttggagaggataacttagaagatgatgatgtggaaatgaaaaatggtataacccagggagacaaactacgtgccttaaaaagtcagagacagccacgtacctcaccatcctgtgcatttaggtcagatgatacaaaaggacatccaagagcagtgtcccagcctttcagattaagttcatccctgcaaggatctgcagttactttgaagacatcaaaaatggcactgtccccttcagcaacggccaagaggatcaacagaacttctttgtcttcgggtgccactgtaagaagcttttccataaactcccggctagccagttctctagggaacttgaatgctgcaacagatgatccagagaacaaaaagacctcctcatcctctaaggcaggcttcacagccagcccgtttaccaacctcttgaatggcagctcccagccaactaccagaaattaccctgagctcaacaataatcagtacaacagaagcagcaacagcaacgggggcaacctgaacagccccccaggcccccacagcgccaagacagaggagcacaccaccatcctccgaccctcctacaccgggctttcttcttcttcagcgagattcctgagccgttctatcccttcccttcagtctgaatatgttcattactaaggccttgccactccagtgaaagctgttcttctcttagacacaatttcttcatctggacgagcagtggagagggaaagcaacttcttgctggaagaatatctctgccttcttaccttaaattaaaaagagcactaagataacaccttcaagagacttgaaaacagaaaactggttaatgactactataaatgcactgaaactatgtttatggagatttccatacttttaaagacagttttaatgttgaatttggtattttgaagggttatttttaatgtattttggtaatacatttattattatatttacatgtacagtgttacattatatatgtattgtgaactttaaaagactattttgataaatttataaatatataaaattatgtaaaaactacactatattttgatttagattttcctgctgtttgctaccaaaaatttgtattttaaatctgtttagttttagtatggttttgtctctaatgaataaataattccttcttattaagaagaagtaagggagaaagtttttagaaagtgatttttatgctcgcactataaatatggcaggtcagttcattcttttgggaagtcagtttagttacactgagtttatccaagtttatctctaccaagagtataatggcatgggatggcttatttaggacaattccctttcctattgtttttgttgctgagccaatttgagttagttttgcatcctggggggctttaaaatacagcatgcagtgaaagatcagaattcactgaatatttcttctgagagcatggtttcatggtttttctctatgaaatgactcaatattccaaatgtttttttttccttcctcctttcaaaagagttcttaacccaattaggatatcctgctttgggtatgaggttgttgttgcctgtaatcacacatggtttgacatcagttttaaatcaatggagagaaaaaactgaaaaagatgctgctaagtagttctctgtattaaaggagatatttttaaaacagggtacaaccccctgctgcacacgctagcatatctggaacctactatgaaaatgaaaggacccttataggtactcacagccctttcatgtaagtatgatctgatatttaggtcttcagaagcctgtaggtttcatttctatgaggaatcgaggagcgttacatcctgatatccttccaggctgcttaagaatggactgcttcgacactgaaagtgctagttaaatggattcatatgaagtgctttactcccaaccattgagttatttataatgtatttattaggggagggtaccttgagtctattatatatgcttcatcaaaacatcttgttcatgttttatgtttttaaaaaaggcatttgaatgaatgtttgactcaggtttgttaaattaaccttcagtaactgcagtaccaaaaattacactcaactgatgaaaaaaacgaattgtatgatttaggaatcaaaaactaaaataagtggaattatgtatcttttctaaagttaaaaaagtaaaatattttattatgagttattataaaaattggttaattgtataggaagatgacagtatttttttcaagttatcataaaaagtaattcagatgacatttgagaagtaggggaaagggaatcatgttgacagttttagttctgtgaacactaatttgtgtgaagctattaaaatgattgtaaagttgactactgtaaatttcccataattatgtgtgtatatgtgtcatatgtatgtacatgtatatgtctaaaaattactttacacatgtgcctacatagacacaccaagaagtggatgtatataatatagaaagtatatagcaaagtaattttactctgataataaaaattgtttgacatgtattttgttatgaatagtttatcttccaaaagatattttgctctattttaaagtgtagaagaatacactgctaataaataataaaagttttattcaattta

SEQ ID NO: 116115 - DNA, 2417 bp, Homo sapiens
  Payload ID: 2648
  Gene Symbol: CDC14A
  Gene Name: cell division cycle 14A
  Uniprot ID: Q9UNH5
  ENST ID: ENST00000361544
  CDS Start-End: 465-2336
cgaaggaggatccggagcagctgctgccagcccgcgggcactgaagtcctcccggctgccgctcgagtagccacgggcgcgatcgggaccagaagtctcctcctccatgatcactttggaagccgggggaagactttgccctgccctgagagctggtctgcgtttcccaggcgcggcggcggcggagcagcagctgcagcagccgagtccaaataggagcggccacagccaggggcgtgagcgccccgcgcggagcgagctcgggttcccctcggaatgtccccggggcgcccggcgcgctgaccccgaagccgcctccgccttcggcgcctgctgcctccctcggccaggcttgttgttcgggactgtgagcttcctggctcctgggcagtggggaagcccccgggggcgagtgacttcagctggccacgacccagccctcccccgtgcgtatctcgcttaagatggcagcggagtcaggggaactaatcggggcttgtgagttcatgaaagatcggttatattttgctactttaaggaatagaccaaaaagcacagtaaatacccactatttctccatcgatgaggagctggtctatgaaaatttctatgcagattttggaccgctgaacttggcaatggtgtacagatattgctgcaaactaaacaagaaactaaaatcatacagtttgtcaagaaagaaaatagtgcactacacctgttttgaccaacggaaaagagcaaatgcagcatttttgataggtgcctatgcagtaatctatttaaagaagacaccagaagaagcctacagagcactcctgtctggctcaaaccccccctatcttccattcagggatgcttcctttggaaattgcacttacaatctcaccattctcgactgtttgcagggaatcagaaagggattacaacatggattttttgactttgagacatttgatgtggatgaatatgaacattatgagcgagttgaaaatggtgacttcaactggattgttccaggaaaatttttagcatttagtggaccacatcctaaaagcaaaattgagaatggttatcctcttcacgcccctgaagcctactttccttatttcaaaaagcataatgtgactgcagttgtgaggctaaacaaaaagatttatgaggcaaagcgcttcacagacgctggcttcgagcactatgacctcttcttcatagatggcagcacacccagtgacaacatcgtgcgaaggttcctgaacatctgtgagaacaccgaaggggccatcgccgttcactgcaaagctggtcttggaagaacagggacattgatagcctgttatgtaatgaaacactacaggtttacacatgctgaaataattgcttggattagaatatgccggccaggctctattataggaccccagcagcacttcctggaagaaaaacaagcatcgttgtgggtccaaggagacattttccgatccaaactgaaaaatcgaccatccagtgaaggaagtattaataaaattctttctggcctagatgatatgtctattggtggaaatctttcaaaaacacaaaacatggaacgatttggagaggataacttagaagatgatgatgtggaaatgaaaaatggtataacccagggagacaaactacgtgccttaaaaagtcagagacagccacgtacctcaccatcctgtgcatttaggtcagatgatacaaaaggacatccaagagcagtgtcccagcctttcagattaagttcatccctgcaaggatctgcagttactttgaagacatcaaaaatggcactgtccccttcagcaacggccaagaggatcaacagaacttctttgtcttcgggtgccactgtaagaagcttttccataaactcccggctagccagttctctagggaacttgaatgctgcaacagatgatccagagaacaaaaagacctcctcatcctctaaggcaggcttcacagccagcccgtttaccaacctcttgaatggcagctcccagccaactaccagaaattaccctgagctcaacaataatcagtacaacagaagcagcaacagcaacgggggcaacctgaacagccccccaggcccccacagcgccaagacagaggagcacaccaccatcctccgaccctcctacaccgggctttcttcttcttcagcgagattcctgagccgttctatccctgtaagtgcgcagacaccacctcctggtcctcagaaccctgaatgcaacttctgtgccttgccttcccagccgaggctgccaccaaagaaatttaatagtgccaaggaagccttctgagcgatgccttccctctgtgctgtgaaactgtctatgcactacattctgctagctcctcttcaagtaaacgccaagtcacaa

SEQ ID NO: 116116 - DNA, 1883 bp, Homo sapiens
  Payload ID: 2648
  Gene Symbol: CDC14A
  Gene Name: cell division cycle 14A
  Uniprot ID: Q9UNH5
  ENST ID: ENST00000370124
  CDS Start-End: 454-1605
ccggagcagctgctgccagcccgcgggcactgaagtcctcccggctgccgctcgagtagccacgggcgcgatcgggaccagaagtctcctcctccatgatcactttggaagccgggggaagactttgccctgccctgagagctggtctgcgtttcccaggcgcggcggcggcggagcagcagctgcagcagccgagtccaaataggagcggccacagccaggggcgtgagcgccccgcgcggagcgagctcgggttcccctcggaatgtccccggggcgcccggcgcgctgaccccgaagccgcctccgccttcggcgcctgctgcctccctcggccaggcttgttgttcgggactgtgagcttcctggctcctgggcagtggggaagcccccgggggcgagtgacttcagctggccacgacccagccctcccccgtgcgtatctcgcttaagatggcagcggagtcaggggaactaatcggggcttgtgagttcatgaaagatcggttatattttgctactttaaggaatagaccaaaaagcacagtaaatacccactatttctccatcgatgaggagctggtctatgaaaatttctatgcagattttggaccgctgaacttggcaatggtgtacagatattgctgcaaactaaacaagaaactaaaatcatacagtttgtcaagaaagaaaatagtgcactacacctgttttgaccaacggaaaagagcaaatgcagcatttttgataggtgcctatgcagtaatctatttaaagaagacaccagaagaagcctacagagcactcctgtctggctcaaaccccccctatcttccattcagggatgcttcctttggaaattgcacttacaatctcaccattctcgactgtttgcagggaatcagaaagggattacaacatggattttttgactttgagacatttgatgtggatgaatatgaacattatgagcgagttgaaaatggtgacttcaactggattgttccaggaaaatttttagcatttagtggaccacatcctaaaagcaaaattgagaatggttatcctcttcacgcccctgaagcctactttccttatttcaaaaagcataatgtgactgcagttgtgaggctaaacaaaaagatttatgaggcaaagcgcttcacagacgctggcttcgagcactatgacctcttcttcatagatggcagcacacccagtgacaacatcgtgcgaaggttcctgaacatctgtgagaacaccgaaggggccatcgccgttcactgcaaagctggtcttggaagaacagggacattgatagcctgttatgtaatgaaacactacaggtttacacatgctgaaataattgcttggattagaatatgccggccaggctctattataggaccccagcagcacttcctggaagaaaaacaagcatcgttgtgggtccaaggagacattttccgatccaaactgaaaaatcgaccatccagtgaaggaagtattaataaaattctttctggcctagatgatatgtctattggtggaaatctttcaaaaacacaaaacatggaacgatttggagaggtaagttttccctaggagattctatcttcttaaaactgatgttctgcatttgtttctcagttggacctatataacatagcagtgtcttttctctggatgccacgagtaccaagtttttagaagtagagccatccgtctatatagcaagaagcagaggaaagaaaccaattgcccttaaaaaaaaaaaagctataatttaaggagtaaattataaaggaggctactctggtaaggggtaatatttatagaaaggaaacagaaaagcaaactttctatttgaaaattaaaataaa

SEQ ID NO: 116117 - DNA, 841 bp, Homo sapiens
  Payload ID: 2648
  Gene Symbol: CDC14A
  Gene Name: cell division cycle 14A
  ENST ID: ENST00000455467
  CDS Start-End: 24-841
gatgagagggcgtggagaaccagatgggaaactttttgtcccgtgagaacaaagtacaagttatatcagagtctgatcggttatattttgctactttaaggaatagaccaaaaagcacagtaaatacccactatttctccatcgatgaggagctggtctatgaaaatttctatgcagattttggaccgctgaacttggcaatggtgtacagatattgctgcaaactaaacaagaaactaaaatcatacagtttgtcaagaaagaaaatagtgcactacacctgttttgaccaacggaaaagagcaaatgcagcatttttgataggtgcctatgcagtaatctatttaaagaagacaccagaagaagcctacagagcactcctgtctggctcaaaccccccctatcttccattcagggatgcttcctttggaaattgcacttacaatctcaccattctcgactgtttgcagggaatcagaaagggattacaacatggattttttgactttgagacatttgatgtggatgaatatgaacattatgagcgagttgaaaatggtgacttcaactggattgttccaggaaaatttttagcatttagtggaccacatcctaaaagcaaaattgagaatggttatcctcttcacgcccctgaagcctactttccttatttcaaaaagcataatgtgactgcagttgtgaggctaaacaaaaagatttatgaggcaaagcgcttcacagacgctggcttcgagcactatgacctcttcttcatagatggcagcacacccagtgacaacatcgtgcgaaggttcctgaacatctgtgagaacaccgaagg

SEQ ID NO: 116118 - DNA, 2056 bp, Homo sapiens
  Payload ID: 2648
  Gene Symbol: CDC14A
  Gene Name: cell division cycle 14A
  ENST ID: ENST00000635056
  CDS Start-End: 285-1982
agcaggggaatttaggaatccattgaggatgcctgaatggggttgttggccctgatcacactctagagacaggcatatcatcacaggcaatcagaaatgaagaaggacattaacttgtaccctgtggaattgtcttcagttgataaaaaggacttctctatcggttatattttgctactttaaggaatagaccaaaaagcacagtaaatacccactatttctccatcgatgaggagctggtctatgaaaatttctatgcagattttggaccgctgaacttggcaatggtgtacagatattgctgcaaactaaacaagaaactaaaatcatacagtttgtcaagaaagaaaatagtgcactacacctgttttgaccaacggaaaagagcaaatgcagcatttttgataggtgcctatgcagtaatctatttaaagaagacaccagaagaagcctacagagcactcctgtctggctcaaaccccccctatcttccattcagggatgcttcctttggaaattgcacttacaatctcaccattctcgactgtttgcagggaatcagaaagggattacaacatggattttttgactttgagacatttgatgtggatgaatatgaacattatgagcgagttgaaaatggtgacttcaactggattgttccaggaaaatttttagcatttagtggaccacatcctaaaagcaaaattgagaatggttatcctcttcacgcccctgaagcctactttccttatttcaaaaagcataatgtgactgcagttgtgaggctaaacaaaaagatttatgaggcaaagcgcttcacagacgctggcttcgagcactatgacctcttcttcatagatggcagcacacccagtgacaacatcgtgcgaaggttcctgaacatctgtgagaacaccgaaggggccatcgccgttcactgcaaagctggtcttggaagaacagggacattgatagcctgttatgtaatgaaacactacaggtttacacatgctgaaataattgcttggattagaatatgccggccaggctctattataggaccccagcagcacttcctggaagaaaaacaagcatcgttgtgggtccaaggagacattttccgatccaaactgaaaaatcgaccatccagtgaaggaagtattaataaaattctttctggcctagatgatatgtctattggtggaaatctttcaaaaacacaaaacatggaacgatttggagaggataacttagaagatgatgatgtggaaatgaaaaatggtataacccagggagacaaactacgtgccttaaaaagtcagagacagccacgtacctcaccatcctgtgcatttaggtcagatgatacaaaaggacatccaagagcagtgtcccagcctttcagattaagttcatccctgcaaggatctgcagttactttgaagacatcaaaaatggcactgtccccttcagcaacggccaagaggatcaacagaacttctttgtcttcgggtgccactgtaagaagcttttccataaactcccggctagccagttctctagggaacttgaatgctgcaacagatgatccagagaacaaaaagacctcctcatcctctaaggcaggcttcacagccagcccgtttaccaacctcttgaatggcagctcccagccaactaccagaaattaccctgagctcaacaataatcagtacaacagaagcagcaacagcaacgggggcaacctgaacagccccccaggcccccacagcgccaagacagaggagcacaccaccatcctccgaccctcctacaccgggctttcttcttcttcagcgagattcctgagccgttctatccctgtaagtgcgcagacaccacctcctggtcctcagaaccctgaatgcaacttctgtgccttgccttcccagccgaggctgccaccaaagaaatttaatagtgccaaggaagccttctgagcgatgccttccctctgtgctgtgaaactgtctatgcactacattctgctagctcctcttcaagtaaacgccaa

SEQ ID NO: 116119 - DNA, 2547 bp, Homo sapiens
  Payload ID: 2649
  Gene Symbol: CDC14B
  Gene Name: cell division cycle 14B
  Uniprot ID: O60729
  ENST ID: ENST00000375240
  CDS Start-End: 1-1380
atgaagcggaaaagcgagcggcggtcgagctgggccgccgcgcccccctgctcgcggcgctgctcgtcgacctcgccgggtgtgaagaagatccgcagctccacgcagcaagacccgcgccgccgggacccccaggacgacgtgtacctggacatcaccgatcgcctttgttttgccattctctacagcagaccaaagagtgcatcaaatgtacattatttcagcatagataatgaacttgaatatgagaacttctacgcagattttggaccactcaatctggcaatggtttacagatattgttgcaagatcaataagaaattaaagtccattacaatgttaaggaagaaaattgttcattttactggctctgatcagagaaaacaagcaaatgctgccttccttgttggatgctacatggttatatatttggggagaaccccagaagaagcatatagaatattaatctttggagagacatcctatattcctttcagagatgctgcctatggaagttgcaatttctacattacacttcttgactgttttcatgcagtaaagaaggcaatgcagtatggcttccttaatttcaactcatttaaccttgatgaatatgaacactatgaaaaagcagaaaatggagatttaaattggataataccagaccgatttattgccttctgtggacctcattcaagagccagacttgaaagtggttaccaccaacattctcctgagacttatattcaatattttaagaatcacaatgttactaccattattcgtctgaataaaaggatgtatgatgccaaacgctttacggatgctggcttcgatcaccatgatcttttctttgcggatggcagcacccctactgatgccattgtcaaagaattcctagatatctgtgaaaatgctgagggtgccattgcagtacattgcaaagctggccttggtcgcacgggcactctgatagcctgctacatcatgaagcattacaggatgacagcagccgagaccattgcgtgggtcaggatctgcagacctggctcggtgattgggcctcagcagcagtttttggtgatgaagcaaaccaacctctggctggaaggggactattttcgtcagaagttaaaggggcaggagaatggacaacacagagcagccttctccaaacttctctctggcgttgatgacatttccataaatggggtcgagaatcaagatcagcaagaacccgaaccgtacagtgatgatgacgaaatcaatggagtgacacaaggtgatagacttcgggccttgaaaagcagaagacaatccaaaacaaacgctattcctctcactctctccatttcaaggactaaaacagtcttgcgttaagtaaaaacctgtgaccagagctgaaggaagactctaggactgaaaactgcaacagaaattagcacaatttgaaaacaaaacaaaattgcaaaagccttagttgctttttccacctaagaagttgatcaatggagaaaatgtccactggagtttgaataatgaactttgagtttgggtgcaagcaaatgactcagagaagggtccagctctcaagctgaatgacaaacatgctgttgtaaatttagtctcaggtgtaaatacccaagccctctggtacccagggagctggctggtctgtggtgcatgtgtgtccctgtgatggcaatcattgtagttgctggccttcagaagaattgaggatctgatggaggttttttatgtatttattttctgttcaccttgtgaccctgtgtcaaaatttataaagatacaaaaggcattactgaaatggtactttctgtaatttgatactatttggcttaatcatcttcacttgactatttgtaatactgttgtaatgttaactctgttaagtacccaagctgcttgtcttccaccaaagagtgctttattaacaagaatctgtgaaaatcacatttaaacactgttgcatgttgtaagaccaggtggtaccttagtaacctaaaacttgcaagagaatattaatggtagctttagaagactcaggaggagaaactgacttcagagttggaagatgttgcaagtcgttcctttttctgtccttcagggactgaagaactgggaggctgcccattgtttggttgccagtcatacaaattaaaatcatatttccttccatgaatggaagaaacacactattggtttttccccttggaaacagcaatcccaaataatgtcggcttacaaaaaaaaaaagttaccacttttttagagtccttccctgtaacattggattttttttttcccttatgagatccacctaaggccattgacgtggcctgcgatctcagtgacaatgatctgcttctggatctcactgttgcctttggttagggaacacaactagtaactctgcagagtgccttctcccgcagccctactggaacacagcagagtctgtgccatgaagcagttacagaaacagaattgatgtgctgctaaaaaaaaaaaaaaaaatggggcccg

SEQ ID NO: 116120 - DNA, 5589 bp, Homo sapiens
  Payload ID: 2649
  Gene Symbol: CDC14B
  Gene Name: cell division cycle 14B
  Uniprot ID: O60729
  ENST ID: ENST00000375241
  CDS Start-End: 453-1949
cacggaacagccctcctggggtccccacgagccgcgtcctgctgtgccccggcgcctacgcagcagcggccgcggccgcggtgggcacgcacggttaccccgggcagctccggccgccagctgcagccccgtcgcctcggccgcgccagccggctgcgggcacctgggggcgggctgggggcgccggccgcggcaggaggcgctgtagcgagggctgcggcgccggtcctgcggcggccgcgggaggcagcggggcaggcgctgtgggccgggctcctcctccggctcctgcgcgaccgcctcccgccgggctctgccggcgcccgccgtccccgcagcgccgctctgcgcccgccgccccgagcgcccgcgcggggctggcgggagcctcggcgggcgcgcgggcgcgcggggccatggtcgtggccccctgacgggccgcggccgcctccatgaagcggaaaagcgagcggcggtcgagctgggccgccgcgcccccctgctcgcggcgctgctcgtcgacctcgccgggtgtgaagaagatccgcagctccacgcagcaagacccgcgccgccgggacccccaggacgacgtgtacctggacatcaccgatcgcctttgttttgccattctctacagcagaccaaagagtgcatcaaatgtacattatttcagcatagataatgaacttgaatatgagaacttctacgcagattttggaccactcaatctggcaatggtttacagatattgttgcaagatcaataagaaattaaagtccattacaatgttaaggaagaaaattgttcattttactggctctgatcagagaaaacaagcaaatgctgccttccttgttggatgctacatggttatatatttggggagaaccccagaagaagcatatagaatattaatctttggagagacatcctatattcctttcagagatgctgcctatggaagttgcaatttctacattacacttcttgactgttttcatgcagtaaagaaggcaatgcagtatggcttccttaatttcaactcatttaaccttgatgaatatgaacactatgaaaaagcagaaaatggagatttaaattggataataccagaccgatttattgccttctgtggacctcattcaagagccagacttgaaagtggttaccaccaacattctcctgagacttatattcaatattttaagaatcacaatgttactaccattattcgtctgaataaaaggatgtatgatgccaaacgctttacggatgctggcttcgatcaccatgatcttttctttgcggatggcagcacccctactgatgccattgtcaaagaattcctagatatctgtgaaaatgctgagggtgccattgcagtacattgcaaagctggccttggtcgcacgggcactctgatagcctgctacatcatgaagcattacaggatgacagcagccgagaccattgcgtgggtcaggatctgcagacctggctcggtgattgggcctcagcagcagtttttggtgatgaagcaaaccaacctctggctggaaggggactattttcgtcagaagttaaaggggcaggagaatggacaacacagagcagccttctccaaacttctctctggcgttgatgacatttccataaatggggtcgagaatcaagatcagcaagaacccgaaccgtacagtgatgatgacgaaatcaatggagtgacacaaggtgatagacttcgggccttgaaaagcagaagacaatccaaaacaaacgctattcctctcacagtaattcttcaatccagtgttcagagctgtaaaacatctgaacctaacatttctggcagtgcaggcattactaaaagaaccaccagatctgcttcaaggaaaagcagtgttaaaagtctctccatttcaaggactaaaacagtcttgcgttaagtaaaaacctgtgaccagagctgaaggaagactctaggactgaaaactgcaacagaaattagcacaatttgaaaacaaaacaaaattgcaaaagccttagttgctttttccacctaagaagttgatcaatggagaaaatgtccactggagtttgaataatgaactttgagtttgggtgcaagcaaatgactcagagaagggtccagctctcaagctgaatgacaaacatgctgttgtaaatttagtctcaggtgtaaatacccaagccctctggtacccagggagctggctggtctgtggtgcatgtgtgtccctgtgatggcaatcattgtagttgctggccttcagaagaattgaggatctgatggaggttttttatgtatttattttctgttcaccttgtgaccctgtgtcaaaatttataaagatacaaaaggcattactgaaatggtactttctgtaatttgatactatttggcttaatcatcttcacttgactatttgtaatactgttgtaatgttaactctgttaagtacccaagctgcttgtcttccaccaaagagtgctttattaacaagaatctgtgaaaatcacatttaaacactgttgcatgttgtaagaccaggtggtaccttagtaacctaaaacttgcaagagaatattaatggtagctttagaagactcaggaggagaaactgacttcagagttggaagatgttgcaagtcgttcctttttctgtccttcagggactgaagaactgggaggctgcccattgtttggttgccagtcatacaaattaaaatcatatttccttccatgaatggaagaaacacactattggtttttccccttggaaacagcaatcccaaataatgtcggcttacaaaaaaaaaaagttaccacttttttagagtccttccctgtaacattggattttttttttcccttatgagatccacctaaggccattgacgtggcctgcgatctcagtgacaatgatctgcttctggatctcactgttgcctttggttagggaacacaactagtaactctgcagagtgccttctcccgcagccctactggaacacagcagagtctgtgccatgaagcagttacagaaacagaattgatgtgctgctaaaaaaaaaaaaaaaaatggggcccgaaataaaagaatatatagtactcacctcagttccttccataagaagtgggtggtttaatgattgttaagccatttttgcctgtgccgggagcatggagggctgagatgtcgacaggcagtgggaaacaaatgccctcctaagccacaaggcgtgcgccagattagtaggcaactccattttaagaagctgcctttttcacaaaactggaagaaataaaagcggttggaataaacaagttaaaagtctttaatgcaaaaagtaattgaaaggcagtgcctccattttggtgtactttcttggaagaaagtataaaattgaccggcatcatgagagacggaagatgccgtgttctcagccaaacaagcaactctttccccgccaggcactgtcgggtggggtcaggccagcttttaaacactggggactggatcacagaaaaacagtggttttctgtccctggaaatgaataggcacaaagacccacttggctgtgggcagactactcttcaataagatttgggtgggaggaggaacattccttttgctattttgagctgagacaatataaatattcaaactgtgccatgcataaagcattgaattctcagggcacctcttcttccccttaccccttttaaggccatcccctccattaataataatccaggtagttgtgaaaatcgtgcttctatctgatcccttcttagtttggcttttcatcccatcagaacaagtaaacgtaggcgccacagctcttgtgagtactgtctccctcacggtgaatgagcctcctggtgtttcgtccaagaaaagaaagggtgtcactggaaccacagccctttttcattttataaactgcctcttcatgttgcctgctcaagtttccacctagaattgctatcactgtggctctttctaaaaatctttctatttaactggttcactgaaattagtcatagaaaacttgtgatttggtgaagaggcattccttgtaataaccaaatgacttgggatggtgtgcatagcaagggcagtgttacacttatgaggactgtctctagcatccaggaagtctctgggtctgagggatggaaagttcttcctgctatgaatgagagtggactcttcccctcacccccaactgaaaccacaaacaaccagaatcttctggaattctgacttagagtcgttgttatagaagaccttgttgctatggaacatgaaactgtgtgtcagatggagagatccccttaacctaagagccttaaatagccctgaaagtacactgggacggtttgcgatggaattaaaattggaagtgaatatttttaggtgctcttgaagctttctggggactcaaaattatcaaaagtcagggacagtccggaggaagagcgtctgcaaaactgggttcctagaagtatagacggacttagctttttgtagaatttggtgaggagcagcgcctcgtgagagcagaatggcctggcgtggccagtgcttcccggcagcacgcagctctgcggcctccagaattcccctgttctgagcttgatgcccctagcctgtcccctacctacttcctcccctcctctctagccctctcacaggggtgattgctacctctctgttttcttgggcctaggcaagttttagaggagttcccaagcattgttatgaggccagtgtgctcgctgggctgggcgggatggcctgggcttgtgtgtggcctgagggctctcctggggccttctcttttcccagtcacctttggagccacagaagcagtgcactcattggatgtctgttcttaacacagcttctctttctacattaaaaaaaatcattattgcattttggaaagcagtgctcatcaaaagcaacttttaaaacctattttattgttcctttaaatgttctctcccgctgaaactgccctggagaggctatctgctgctcttccatttacccacatcaggttattctccatgtcactcagtggagatgactccagatgtgtttaaagactggacaattcacctatactgtgtaggaaattacctccttaattacctggtagaattgtcagcagacatgttcatccgatgatagtactgcagttttctattaataatttgcagacttttatctaacctgcactcatgtacagattattaaaagttttaaaatgtaactgatcagtattgatcaatcattgtcttgatttttttttacagcgtatatttctaatcatattttttaaagccaagagaactggttgaatgaatgtttattttcctgaaggtatttttaagataaagcttcctaatggcgtgtaaactttgcatatgtatgtagtttgatacatattgtcacatttgaaaatcttgtgggttgtaactggttttatacaaaatatcgaatagtggaaattgtataattacaatcatgtaattaaaagtattaacccaa

SEQ ID NO: 116121 - DNA, 2965 bp, Homo sapiens
  Payload ID: 2649
  Gene Symbol: CDC14B
  Gene Name: cell division cycle 14B
  Uniprot ID: O60729
  ENST ID: ENST00000375242
  CDS Start-End: 439-1824
ccttttgctcgaagtcctttaatcgctaaggagctttcccagactcttccctctgcaggcccgctggcctctgacgcatgtcccctctgcggagcgtttgggcactggaggagccctggttggcacaggccgccccgcgttcccagctggggaaggaaggcgggcggccaggcggggggaaagaaagcgggaggtggggcggggtgctgtccgtccccacggcctcgtcgcgcgcggggctttttccaggacttggggacttccggggttgcgctgtcgtgtcaggccgttgggccgccgaggggtgtcgctgcgcccgctgccccgcgcggccctttaaactttgttttttaaacttcgggggtgtggtcgcggcgcctcccctctcggcggctggcagtccttgcctctgccccgccttccagatgctttggagtcatgagccgggagggcgcgggggcagctttggtagccgaggtgatcaaagatcgcctttgttttgccattctctacagcagaccaaagagtgcatcaaatgtacattatttcagcatagataatgaacttgaatatgagaacttctacgcagattttggaccactcaatctggcaatggtttacagatattgttgcaagatcaataagaaattaaagtccattacaatgttaaggaagaaaattgttcattttactggctctgatcagagaaaacaagcaaatgctgccttccttgttggatgctacatggttatatatttggggagaaccccagaagaagcatatagaatattaatctttggagagacatcctatattcctttcagagatgctgcctatggaagttgcaatttctacattacacttcttgactgttttcatgcagtaaagaaggcaatgcagtatggcttccttaatttcaactcatttaaccttgatgaatatgaacactatgaaaaagcagaaaatggagatttaaattggataataccagaccgatttattgccttctgtggacctcattcaagagccagacttgaaagtggttaccaccaacattctcctgagacttatattcaatattttaagaatcacaatgttactaccattattcgtctgaataaaaggatgtatgatgccaaacgctttacggatgctggcttcgatcaccatgatcttttctttgcggatggcagcacccctactgatgccattgtcaaagaattcctagatatctgtgaaaatgctgagggtgccattgcagtacattgcaaagctggccttggtcgcacgggcactctgatagcctgctacatcatgaagcattacaggatgacagcagccgagaccattgcgtgggtcaggatctgcagacctggctcggtgattgggcctcagcagcagtttttggtgatgaagcaaaccaacctctggctggaaggggactattttcgtcagaagttaaaggggcaggagaatggacaacacagagcagccttctccaaacttctctctggcgttgatgacatttccataaatggggtcgagaatcaagatcagcaagaacccgaaccgtacagtgatgatgacgaaatcaatggagtgacacaaggtgatagacttcgggccttgaaaagcagaagacaatccaaaacaaacgctattcctctcacagtaattcttcaatccagtgttcagagctgtaaaacatctgaacctaacatttctggcagtgcaggcattactaaaagaaccaccagatctgcttcaaggaaaagcagtgttaaaagtctctccatttcaaggactaaaacagtcttgcgttaagtaaaaacctgtgaccagagctgaaggaagactctaggactgaaaactgcaacagaaattagcacaatttgaaaacaaaacaaaattgcaaaagccttagttgctttttccacctaagaagttgatcaatggagaaaatgtccactggagtttgaataatgaactttgagtttgggtgcaagcaaatgactcagagaagggtccagctctcaagctgaatgacaaacatgctgttgtaaatttagtctcaggtgtaaatacccaagccctctggtacccagggagctggctggtctgtggtgcatgtgtgtccctgtgatggcaatcattgtagttgctggccttcagaagaattgaggatctgatggaggttttttatgtatttattttctgttcaccttgtgaccctgtgtcaaaatttataaagatacaaaaggcattactgaaatggtactttctgtaatttgatactatttggcttaatcatcttcacttgactatttgtaatactgttgtaatgttaactctgttaagtacccaagctgcttgtcttccaccaaagagtgctttattaacaagaatctgtgaaaatcacatttaaacactgttgcatgttgtaagaccaggtggtaccttagtaacctaaaacttgcaagagaatattaatggtagctttagaagactcaggaggagaaactgacttcagagttggaagatgttgcaagtcgttcctttttctgtccttcagggactgaagaactgggaggctgcccattgtttggttgccagtcatacaaattaaaatcatatttccttccatgaatggaagaaacacactattggtttttccccttggaaacagcaatcccaaataatgtcggcttacaaaaaaaaaaagttaccacttttttagagtccttccctgtaacattggattttttttttcccttatgagatccacctaaggccattgacgtggcctgcgatctcagtgacaatgatctgcttctggatctcactgttgcctttggttagggaacacaactagtaactctgcagagtgccttctcccgcagccctactggaacacagcagagtctgtgccatgaagcagttacagaaacagaattgatgtgctgct

SEQ ID NO: 116122 - DNA, 804 bp, Homo sapiens
  Payload ID: 2649
  Gene Symbol: CDC14B
  Gene Name: cell division cycle 14B
  ENST ID: ENST00000452280
  CDS Start-End: 1-804
gatgctttggagtcatgagccgggagggcgcgggggcagctttggtagccgaggtgatcaaaggaaggaacattgcaatttttccatttcagatcgcctttgttttgccattctctacagcagaccaaagagtgcatcaaatgtacattatttcagcatagataatgaacttgaatatgagaacttctacgcagattttggaccactcaatctggcaatggtttacagatattgttgcaagatcaataagaaattaaagtccattacaatgttaaggaagaaaattgttcattttactggctctgatcagagaaaacaagcaaatgctgccttccttgttggatgctacatggttatatatttggggagaaccccagaagaagcatatagaatattaatctttggagagacatcctatattcctttcagagatgctgcctatggaagttgcaatttctacattacacttcttgactgttttcatgcagtaaagaaggcaatgcagtatggcttccttaatttcaactcatttaaccttgatgaatatgaacactatgaaaaagcagaaaatggagatttaaattggataataccagaccgatttattgccttctgtggacctcattcaagagccagacttgaaagtggttaccaccaacattctcctgagacttatattcaatattttaagaatcacaatgttactaccattattcgtctgaataaaaggatgtatgatgccaaacgctttacggatgctggcttcgatcaccatgatcttttctttgcggatggcagcacccc

SEQ ID NO: 116123 - DNA, 684 bp, Homo sapiens
  Payload ID: 2649
  Gene Symbol: CDC14B
  Gene Name: cell division cycle 14B
  ENST ID: ENST00000415608
  CDS Start-End: 1-684
gctccccgccggggcctcgagaaggaaggtgtcacgttggtggcattcgagccagccggcaagacgaatgtccgggttgtcacttttgagaaatcccagccagccagagcagatcgcctttgttttgccattctctacagcagaccaaagagtgcatcaaatgtacattatttcagcatagataatgaacttgaatatgagaacttctacgcagattttggaccactcaatctggcaatggtttacagatattgttgcaagatcaataagaaattaaagtccattacaatgttaaggaagaaaattgttcattttactggctctgatcagagaaaacaagcaaatgctgccttccttgttggatgctacatggttatatatttggggagaaccccagaagaagcatatagaatattaatctttggagagacatcctatattcctttcagagatgctgcctatggaagttgcaatttctacattacacttcttgactgttttcatgcagtaaagaaggcaatgcagtatggcttccttaatttcaactcatttaaccttgatgaatatgaacactatgaaaaagcagaaaatggagatttaaattggataataccagaccgatttattgccttctgtggacctcattcaagagccagacttgaaagtggttaccaccaacattct

SEQ ID NO: 116124 - DNA, 5271 bp, Homo sapiens
  Payload ID: 2649
  Gene Symbol: CDC14B
  Gene Name: cell division cycle 14B
  ENST ID: ENST00000412285
  CDS Start-End: 1-1443
gagcggcggtcgagctgggccgccgcgcccccctgctcgcggcgctgctcgtcgacctcgccgggtgtgaagaagatccgcagctccacgcagcaagacccgcgccgccgggacccccaggacgacgtgtacctggacatcaccgatcgcctttgttttgccattctctacagcagaccaaagagtgcatcaaatgtacattatttcagcatagataatgaacttgaatatgagaacttctacgcagattttggaccactcaatctggcaatggtttacagatattgttgcaagatcaataagaaattaaagtccattacaatgttaaggaagaaaattgttcattttactggctctgatcagagaaaacaagcaaatgctgccttccttgttggatgctacatggttatatatttggggagaaccccagaagaagcatatagaatattaatctttggagagacatcctatattcctttcagagatgctgcctatggaagttgcaatttctacattacacttcttgactgttttcatgcagtaaagaaggcaatgcagtatggcttccttaatttcaactcatttaaccttgatgaatatgaacactatgaaaaagcagaaaatggagatttaaattggataataccagaccgatttattgccttctgtggacctcattcaagagccagacttgaaagtggttaccaccaacattctcctgagacttatattcaatattttaagaatcacaatgttactaccattattcgtctgaataaaaggatgtatgatgccaaacgctttacggatgctggcttcgatcaccatgatcttttctttgcggatggcagcacccctactgatgccattgtcaaagaattcctagatatctgtgaaaatgctgagggtgccattgcagtacattgcaaagctggccttggtcgcacgggcactctgatagcctgctacatcatgaagcattacaggatgacagcagccgagaccattgcgtgggtcaggatctgcagacctggctcggtgattgggcctcagcagcagtttttggtgatgaagcaaaccaacctctggctggaaggggactattttcgtcagaagttaaaggggcaggagaatggacaacacagagcagccttctccaaacttctctctggcgttgatgacatttccataaatggggtcgagaatcaagatcagcaagaacccgaaccgtacagtgatgatgacgaaatcaatggagtgacacaaggtgatagacttcgggccttgaaaagcagaagacaatccaaaacaaacgctattcctctcacatgtcccctagctgtgctgacctctgcactgtgtagtgttgtcatctggtggattgtttgtgactacattcttcccatcctgctattctgtctcgatggtttcagaacacagtagccatcaggaccccctgacagatagctgctagtaattcttcaatccagtgttcagagctgtaaaacatctgaacctaacatttctggcagtgcaggcattactaaaagaaccaccagatctgcttcaaggaaaagcagtgttaaaagtctctccatttcaaggactaaaacagtcttgcgttaagtaaaaacctgtgaccagagctgaaggaagactctaggactgaaaactgcaacagaaattagcacaatttgaaaacaaaacaaaattgcaaaagccttagttgctttttccacctaagaagttgatcaatggagaaaatgtccactggagtttgaataatgaactttgagtttgggtgcaagcaaatgactcagagaagggtccagctctcaagctgaatgacaaacatgctgttgtaaatttagtctcaggtgtaaatacccaagccctctggtacccagggagctggctggtctgtggtgcatgtgtgtccctgtgatggcaatcattgtagttgctggccttcagaagaattgaggatctgatggaggttttttatgtatttattttctgttcaccttgtgaccctgtgtcaaaatttataaagatacaaaaggcattactgaaatggtactttctgtaatttgatactatttggcttaatcatcttcacttgactatttgtaatactgttgtaatgttaactctgttaagtacccaagctgcttgtcttccaccaaagagtgctttattaacaagaatctgtgaaaatcacatttaaacactgttgcatgttgtaagaccaggtggtaccttagtaacctaaaacttgcaagagaatattaatggtagctttagaagactcaggaggagaaactgacttcagagttggaagatgttgcaagtcgttcctttttctgtccttcagggactgaagaactgggaggctgcccattgtttggttgccagtcatacaaattaaaatcatatttccttccatgaatggaagaaacacactattggtttttccccttggaaacagcaatcccaaataatgtcggcttacaaaaaaaaaaagttaccacttttttagagtccttccctgtaacattggattttttttttcccttatgagatccacctaaggccattgacgtggcctgcgatctcagtgacaatgatctgcttctggatctcactgttgcctttggttagggaacacaactagtaactctgcagagtgccttctcccgcagccctactggaacacagcagagtctgtgccatgaagcagttacagaaacagaattgatgtgctgctaaaaaaaaaaaaaaaaatggggcccgaaataaaagaatatatagtactcacctcagttccttccataagaagtgggtggtttaatgattgttaagccatttttgcctgtgccgggagcatggagggctgagatgtcgacaggcagtgggaaacaaatgccctcctaagccacaaggcgtgcgccagattagtaggcaactccattttaagaagctgcctttttcacaaaactggaagaaataaaagcggttggaataaacaagttaaaagtctttaatgcaaaaagtaattgaaaggcagtgcctccattttggtgtactttcttggaagaaagtataaaattgaccggcatcatgagagacggaagatgccgtgttctcagccaaacaagcaactctttccccgccaggcactgtcgggtggggtcaggccagcttttaaacactggggactggatcacagaaaaacagtggttttctgtccctggaaatgaataggcacaaagacccacttggctgtgggcagactactcttcaataagatttgggtgggaggaggaacattccttttgctattttgagctgagacaatataaatattcaaactgtgccatgcataaagcattgaattctcagggcacctcttcttccccttaccccttttaaggccatcccctccattaataataatccaggtagttgtgaaaatcgtgcttctatctgatcccttcttagtttggcttttcatcccatcagaacaagtaaacgtaggcgccacagctcttgtgagtactgtctccctcacggtgaatgagcctcctggtgtttcgtccaagaaaagaaagggtgtcactggaaccacagccctttttcattttataaactgcctcttcatgttgcctgctcaagtttccacctagaattgctatcactgtggctctttctaaaaatctttctatttaactggttcactgaaattagtcatagaaaacttgtgatttggtgaagaggcattccttgtaataaccaaatgacttgggatggtgtgcatagcaagggcagtgttacacttatgaggactgtctctagcatccaggaagtctctgggtctgagggatggaaagttcttcctgctatgaatgagagtggactcttcccctcacccccaactgaaaccacaaacaaccagaatcttctggaattctgacttagagtcgttgttatagaagaccttgttgctatggaacatgaaactgtgtgtcagatggagagatccccttaacctaagagccttaaatagccctgaaagtacactgggacggtttgcgatggaattaaaattggaagtgaatatttttaggtgctcttgaagctttctggggactcaaaattatcaaaagtcagggacagtccggaggaagagcgtctgcaaaactgggttcctagaagtatagacggacttagctttttgtagaatttggtgaggagcagcgcctcgtgagagcagaatggcctggcgtggccagtgcttcccggcagcacgcagctctgcggcctccagaattcccctgttctgagcttgatgcccctagcctgtcccctacctacttcctcccctcctctctagccctctcacaggggtgattgctacctctctgttttcttgggcctaggcaagttttagaggagttcccaagcattgttatgaggccagtgtgctcgctgggctgggcgggatggcctgggcttgtgtgtggcctgagggctctcctggggccttctcttttcccagtcacctttggagccacagaagcagtgcactcattggatgtctgttcttaacacagcttctctttctacattaaaaaaaatcattattgcattttggaaagcagtgctcatcaaaagcaacttttaaaacctattttattgttcctttaaatgttctctcccgctgaaactgccctggagaggctatctgctgctcttccatttacccacatcaggttattctccatgtcactcagtggagatgactccagatgtgtttaaagactggacaattcacctatactgtgtaggaaattacctccttaattacctggtagaattgtcagcagacatgttcatccgatgatagtactgcagttttctattaataatttgcagacttttatctaacctgcactcatgtacagattattaaaagttttaaaatgtaactgatcagtattgatcaatcattgtcttgatttttttttacagcgtatatttctaatcatattttttaaagccaagagaactggttgaatgaatgtttattttcctgaaggtatttttaagataaagcttcctaatggcgtgtaaactttgcatatgtatgtagtttgatacatattgtcacatttgaaaatcttgtgggttgtaactggttttatacaaaatatcgaatagtggaaattgtataattacaatcatgtaattaaaagtattaacccaacagcc

SEQ ID NO: 116125 - DNA, 4960 bp, Homo sapiens
  Payload ID: 2649
  Gene Symbol: CDC14B
  Gene Name: cell division cycle 14B
  Uniprot ID: O60729
  ENST ID: ENST00000474602
  CDS Start-End: 453-1868
cacggaacagccctcctggggtccccacgagccgcgtcctgctgtgccccggcgcctacgcagcagcggccgcggccgcggtgggcacgcacggttaccccgggcagctccggccgccagctgcagccccgtcgcctcggccgcgccagccggctgcgggcacctgggggcgggctgggggcgccggccgcggcaggaggcgctgtagcgagggctgcggcgccggtcctgcggcggccgcgggaggcagcggggcaggcgctgtgggccgggctcctcctccggctcctgcgcgaccgcctcccgccgggctctgccggcgcccgccgtccccgcagcgccgctctgcgcccgccgccccgagcgcccgcgcggggctggcgggagcctcggcgggcgcgcgggcgcgcggggccatggtcgtggccccctgacgggccgcggccgcctccatgaagcggaaaagcgagcggcggtcgagctgggccgccgcgcccccctgctcgcggcgctgctcgtcgacctcgccgggtgtgaagaagatccgcagctccacgcagcaagacccgcgccgccgggacccccaggacgacgtgtacctggacatcaccgatcgcctttgttttgccattctctacagcagaccaaagagtgcatcaaatgtacattatttcagcatagataatgaacttgaatatgagaacttctacgcagattttggaccactcaatctggcaatggtttacagatattgttgcaagatcaataagaaattaaagtccattacaatgttaaggaagaaaattgttcattttactggctctgatcagagaaaacaagcaaatgctgccttccttgttggatgctacatggttatatatttggggagaaccccagaagaagcatatagaatattaatctttggagagacatcctatattcctttcagagatgctgcctatggaagttgcaatttctacattacacttcttgactgttttcatgcagtaaagaaggcaatgcagtatggcttccttaatttcaactcatttaaccttgatgaatatgaacactatgaaaaagcagaaaatggagatttaaattggataataccagaccgatttattgccttctgtggacctcattcaagagccagacttgaaagtggttaccaccaacattctcctgagacttatattcaatattttaagaatcacaatgttactaccattattcgtctgaataaaaggatgtatgatgccaaacgctttacggatgctggcttcgatcaccatgatcttttctttgcggatggcagcacccctactgatgccattgtcaaagaattcctagatatctgtgaaaatgctgagggtgccattgcagtacattgcaaagctggccttggtcgcacgggcactctgatagcctgctacatcatgaagcattacaggatgacagcagccgagaccattgcgtgggtcaggatctgcagacctggctcggtgattgggcctcagcagcagtttttggtgatgaagcaaaccaacctctggctggaaggggactattttcgtcagaagttaaaggggcaggagaatggacaacacagagcagccttctccaaacttctctctggcgttgatgacatttccataaatggggtcgagaatcaagatcagcaagaacccgaaccgtacagtgatgatgacgaaatcaatggagtgacacaaggtgatagacttcgggccttgaaaagcagaagacaatccaaaacaaacgctattcctctcaccgatggttggctgtcccaggctgtcacctttctagaccggcttctgatctggctcgggatccacaaggactagacctgcggggaaggtctctcctggacacgcccgttgcccactgcaagttctctccaggtgcaattgaagcctctcagcagcggaggccgccatgtggagagagcaggcaggcccactgctgctgagaacagggcaggcacgggcagctcctgttctgcctttcccagcttcggagacgcaggctcagctgctccgaagcacctgccagcaccgcacagtacagtttcagaggacagcagtctccttcccgtgaagctcccatgtgctggaatggcatggacttgctgatcaacagaaggaaatggtctgaagtctgaccagcacaaggaaggaggctggctggctcagaggggcccaccttgcgtggaatgaaaacgccaaaggctcatgagcaacattaggctagaggggtcttgttcaaagcatccaactctgacttcggaggcattcccagccggcagcagtgtgtccagcctgcctcttcccaggctggtctgacatgcagcttaggctttcatcccaagttaggtactgacccctccctcttgggcagcacctccctttttaaaaaaatttttttttcttccaaagacagagtcttgctcttgttgtccaggctggagtgcagtggcgcgatctaggctcactgcaacctccttctcccaggttcaagcgactctcctgcctcagcctcctgagtagctgggattataggcgtctgccaccacgcccggctaatttctgtatttttagtagagacagggtttcaccatgttggccaggctggtctcgaactcctgacctcaagtgatctgcctgccttggcctcccaaagtgctgggattacaggtgtcagccaccgcacccagccaagcacccctatctctagaggatctggccccccagcccagttactgcagggcagctttccccacctggtgacaggctgtgcgcagcagccccaggacctcaccctgagctgagtcttcaggagccgccctggtggcacaactcagacacccctgaggcctagcagtcaactcctgattcagacatgatccagtccagcctgggcttggctataaccagctcaaacttgcttgacctccacttttcaggagacttggggacgacagccctcatcggcgtctttcatggggttaatctgcttgagtctaagtcgccagccagaaacgtggtgcccagggtgccctgcctcaggacatgtccacacccacgtcacaagcacctgaggagtccggccggggcactgtggtccaaaaggtcctgccgcctccgcatctgactgtcccaacggcatgctggtgacacccccctgcccttcgcttctgtcctccctggcttctctggggcacttggggctatgtacaacctggcacgatccagaaagggtgcaaacaaaatgcctacatccaggcacacgaccaagtcagcgagagctagccctggtaagcaaacatagcccattacaggttcagaacgtgcaccgggttccccaaaactgtcttcaaccacatgactcaacagctctatgggataggaactgtcagtgtttttgcaactgcaacattaaaccaagtgctgtgggcttttcaagtattattcacaacactaaaggaaagtttcttcaaagggctctctggctaatcttcaaagccgcagttaggcaaaatgacagtgtgacagcttcaaagccactgactcatgacacagccctgatgttgtaccggctaggttcagatttcagaaatcagggcacttgcatccattgccttttccaggaaagggaagaaaacactcagttgataaaccttagtactcagataataaataagagaccaaaagtaggctatcacccaaagcaaacatccttaactgaccctaacgtgtatggattcaactttgattattcaacaaaatcatgaccgactgctgtggcctggagtaaccaaaggactgttttctctacacaaagtcaggagcgaataccaacctttatttgcacttgggttccagttcaaagccaccttagacagtgtggcaaagtgggaaaaagcacagatcctgggaccaaggttcagattccatctcaagcgagcatatgaactgtgtgacaacaggcagacagtacctctgtgtctatgagaaagcggggagagcaacaccccagcttctagcagctctacagctgcctggacctgcaggccctcctaggcccacttcctccccagcacagtgtgtgttcccgggcgtgtgtggctctgggtccagctctgttcagggtgggactccaggtgaattactgaacctctgaggtgtacccccaaccccaaactttcaccaaaagcaataaagaggaactctagaactggagccaggactaagtgagaaaaactgcttataagtgcttaataaatactagttatttacaacttttgctcaagccgagggcagaggcctttgtacgcagctgccgaactctgactctagttctgcggaagaaaaggatgcggtatttgcttttgccatgatccctttccatttgattggcaggttaaataacatggtttttgaagtcacatacttaatattcttcctaaaaaccacccaaacactagatgtgtgtgtgcacacacacagaaaccacgaggtagtttaaatcaccattaaaaatcaacgctttctctgattctgtgtcacagagtggtggccagtggctacacaatagcgatttttaaatgattggttaagtgaaaaccagaactcaaaatattccaggagagaagataacatttacaagtaaacagtaagtgcaattgtattttaatttcttggtctccgaaaactcagctgtgactgctttccattaacagttccagctctatgtgtttcctctaacgctaaaggcacagcccccgggaatctactgcttcctaagagtctccatggagtctattttacaacctcctttccctccatgcttccgcggaggagtctatactatctctatatacacattttaaacattattcttcatttgaaattccttcaataaaaacacagtcaccatt

SEQ ID NO: 116126 - DNA, 1734 bp, Homo sapiens
  Payload ID: 2649
  Gene Symbol: CDC14B
  Gene Name: cell division cycle 14B
  Uniprot ID: O60729
  ENST ID: ENST00000463569
  CDS Start-End: 23-1480
ctgacgggccgcggccgcctccatgaagcggaaaagcgagcggcggtcgagctgggccgccgcgcccccctgctcgcggcgctgctcgtcgacctcgccgggtgtgaagaagatccgcagctccacgcagcaagacccgcgccgccgggacccccaggacgacgtgtacctggacatcaccgatcgcctttgttttgccattctctacagcagaccaaagagtgcatcaaatgtacattatttcagcatagataatgaacttgaatatgagaacttctacgcagattttggaccactcaatctggcaatggtttacagatattgttgcaagatcaataagaaattaaagtccattacaatgttaaggaagaaaattgttcattttactggctctgatcagagaaaacaagcaaatgctgccttccttgttggatgctacatggttatatatttggggagaaccccagaagaagcatatagaatattaatctttggagagacatcctatattcctttcagagatgctgcctatggaagttgcaatttctacattacacttcttgactgttttcatgcagtaaagaaggcaatgcagtatggcttccttaatttcaactcatttaaccttgatgaatatgaacactatgaaaaagcagaaaatggagatttaaattggataataccagaccgatttattgccttctgtggacctcattcaagagccagacttgaaagtggttaccaccaacattctcctgagacttatattcaatattttaagaatcacaatgttactaccattattcgtctgaataaaaggatgtatgatgccaaacgctttacggatgctggcttcgatcaccatgatcttttctttgcggatggcagcacccctactgatgccattgtcaaagaattcctagatatctgtgaaaatgctgagggtgccattgcagtacattgcaaagctggccttggtcgcacgggcactctgatagcctgctacatcatgaagcattacaggatgacagcagccgagaccattgcgtgggtcaggatctgcagacctggctcggtgattgggcctcagcagcagtttttggtgatgaagcaaaccaacctctggctggaaggggactattttcgtcagaagttaaaggggcaggagaatggacaacacagagcagccttctccaaacttctctctggcgttgatgacatttccataaatggggtcgagaatcaagatcagcaagaacccgaaccgtacagtgatgatgacgaaatcaatggagtgacacaaggtgatagacttcgggccttgaaaagcagaagacaatccaaaacaaacgctattcctctcacatgtcccctagctgtgctgacctctgcactgtgtagtgttgtcatctggtggattgtttgtgactacattcttcccatcctgctattctgtctcgatggtttcagaacacagtagccatcaggaccccctgacagatagctgcttctctccatttcaaggactaaaacagtcttgcgttaagtaaaaacctgtgaccagagctgaaggaagactctaggactgaaaactgcaacagaaattagcacaatttgaaaacaaaacaaaattgcaaaagccttagttgctttttccacctaagaagttgatcaatggagaaaatgtccactggagtttgaataatgaactttgagtttgggtgcaagcaaatg

SEQ ID NO: 116127 - DNA, 2034 bp, Homo sapiens
  Payload ID: 2650
  Gene Symbol: CDC16
  Gene Name: cell division cycle 16
  Uniprot ID: Q13042
  ENST ID: ENST00000252457
  CDS Start-End: 25-1884
gcgtgaggccgggcccgcgccgccatgaacctagagcggctgcggaagcgcgtccggcagtacctcgaccagcaacagtatcaaagtgctctattttgggcagataaagtagcttcactctctcgtgaaccccaggacatctattggttggctcagtgtctttacctgacagcacaatatcacagagccgcccatgcacttcggtcacgaaaactggacaaattgtatgaagcatgtcgttaccttgcagctaggtgccattatgctgcaaaagagcaccagcaggcccttgatgttcttgacatggaagagcccatcaataaaagattatttgaaaaatacttgaaggacgaaagtggcttcaaagatccttccagcgactgggaaatgtcacagtcttcaataaagagttctatctgtcttctacgcgggaaaatctatgatgctctagataaccgaaccctggctacctacagctacaaagaagctttgaagcttgatgtctactgttttgaagcgttcgatcttttaacatcacatcacatgctgacagcacaagaagaaaaagaacttcttgaatcactaccccttagcaagctgtgtaatgaagaacaggaattgctgcgttttctatttgagaacaaattgaaaaaatataataagcctagtgaaacggtcatccctgaatctgtagatggcttgcaagagaatctggatgtggtagtgtctttagctgagagacattattataactgtgattttaaaatgtgctacaagcttacttctgtagtaatggagaaagatcctttccatgcaagttgtttacctgtacatatagggacgcttgtagagctgaataaagccaatgaacttttctatctttctcataaactggtggatttatatcctagtaatcctgtgtcttggtttgcagtgggatgttactatctcatggtcggtcataaaaatgaacatgccagaagatatctcagcaaagccacaacacttgagaaaacctatggacctgcatggatagcctatggacattcatttgcggtggagagtgagcacgaccaagcgatggctgcttacttcacagcagcacagctgatgaaagggtgtcatttgcctatgctgtatattggattagaatatggtttgaccaataactcaaaactagctgaaaggttcttcagccaagctctgagcattgcaccggaagacccttttgttatgcatgaggtcggcgtggttgcatttcagaatggagaatggaaaacagccgaaaaatggtttcttgatgctttggaaaaaattaaagcaattgggaacgaggtaacagttgacaaatgggaacctttgttgaacaacttggggcatgtctgcagaaaacttaaaaagtatgctgaggccttggattaccaccgtcaggcactggtgttgattcctcagaacgcatccacctactctgctattggatatatccacagtctgatgggcaactttgaaaatgctgtggactacttccacacagcccttggtcttaggcgagatgatacattttctgttacaatgcttggtcattgcatcgaaatgtacattggtgattctgaagcttatattggagcagacattaaagacaaattaaaatgttatgactttgatgtgcatacaatgaagacactaaaaaacattatttcacctccgtgggatttcagggaatttgaagtagaaaaacagactgcagaagaaacggggcttacgccattggaaacctcaaggaaaactccagattccagaccttccttggaagaaacctttgaaattgaaatgaatgaaagtgacatgatgttagagacatctatgtcagaccacagcacgtgactccagtcagtggtcctggtcccactgtcccagtgtaggaacagagacccgccttaagagactggatcgcacacctttgcaacagatgtgttctgattctctgaacctacaaaatagttatacatagtggaataaagaaggtaaaccatc

SEQ ID NO: 116128 - DNA, 1991 bp, Homo sapiens
  Payload ID: 2650
  Gene Symbol: CDC16
  Gene Name: cell division cycle 16
  ENST ID: ENST00000252458
  CDS Start-End: 284-1711
cgccatgaacctagagcggctgcggaagcgcgtccggcagtacctcgaccagcaacagtatcaaagtgctctattttgggcagataaagtagcttcactctctcgtgaaccccaggacatctattggttggctcagtgtctttacctgacagcacaatatcacagagccgcccatgcacttcggtcacgaaaactggacaaattgtatgaagcatgtcgttaccttgcagctaggtgccattatgctgcaaaagagcaccagcaggcccttgatgttcttgacatggaagagcccatcaataaaagattatttgaaaaatacttgaaggacgaaagtggcttcaaagatccttccagcgactgggaaatgtcacagtcttcaataaagagttctatctgtcttctacgcgggaaaatctatgatgctctagataaccgaaccctggctacctacagctacaaagaagctttgaagcttgatgtctactgttttgaagcgttcgatcttttaacatcacatcacatgctgacagcacaagaagaaaaagaacttcttgaatcactaccccttagcaagctgtgtaatgaagaacaggaattgctgcgttttctatttgagaacaaattgaaaaaatataataagcctagtgaaacggtcatccctgaatctgtagatggcttgcaagagaatctggatgtggtagtgtctttagctgagagacattattataactgtgattttaaaatgtgctacaagcttacttctgtagtaatggagaaagatcctttccatgcaagttgtttacctgtacatatagggacgcttgtagagctgaataaagccaatgaacttttctatctttctcataaactggtggatttatatcctagtaatcctgtgtcttggtttgcagtgggatgttactatctcatggtcggtcataaaaatgaacatgccagaagatatctcagcaaagccacaacacttgagaaaacctatggacctgcatggatagcctatggacattcatttgcggtggagagtgagcacgaccaagcgatggctgcttacttcacagcagcacagctgatgaaaggatggaaaacagccgaaaaatggtttcttgatgctttggaaaaaattaaagcaattgggaacgaggtaacagttgacaaatgggaacctttgttgaacaacttggggcatgtctgcagaaaacttaaaaagtatgctgaggccttggattaccaccgtcaggcactggtgttgattcctcagaacgcatccacctactctgctattggatatatccacagtctgatgggcaactttgaaaatgctgtggactacttccacacagcccttggtcttaggcgagatgatacattttctgttacaatgcttggtcattgcatcgaaatgtacattggtgattctgaagcttatattggagcagacattaaagacaaattaaaatgttatgactttgatgtgcatacaatgaagacactaaaaaacattatttcacctccgtgggatttcagggaatttgaagtagaaaaacagactgcagaagaaacggggcttacgccattggaaacctcaaggaaaactccagattccagaccttccttggaagaaacctttgaaattgaaatgaatgaaagtgacatgatgttagagacatctatgtcagaccacagcacgtgactccagtcagtggtcctggtcccactgtcccagtgtaggttagtattccttcacatcctctccatggcttaagaatgtcccacttcctaacgtgactccaaactgcatctctacatttaggaacagagacccgccttaagagactggatcgcacacctttgcaacagatgtgttctgattctctgaacctacaaaatagttatacatagtggaataaagaaggtaaaccatctgttatgtctttttttttcttttccaataaacttttattttggactaa

SEQ ID NO: 116129 - DNA, 2203 bp, Homo sapiens
  Payload ID: 2650
  Gene Symbol: CDC16
  Gene Name: cell division cycle 16
  Uniprot ID: Q13042
  ENST ID: ENST00000356221
  CDS Start-End: 109-1971
cggcggcggcggctgcaggcacgggcacgggcacggggcggggtgcttagggtgcaggaggcgcgcgcctagcggcggagtgtggcgtgaggccgggcccgcgccgccatgaacctagagcggctgcggaagcgcgtccggcagtacctcgaccagcaacagtatcaaagtgctctattttgggcagataaagtagcttcactctctcgtgaagaaccccaggacatctattggttggctcagtgtctttacctgacagcacaatatcacagagccgcccatgcacttcggtcacgaaaactggacaaattgtatgaagcatgtcgttaccttgcagctaggtgccattatgctgcaaaagagcaccagcaggcccttgatgttcttgacatggaagagcccatcaataaaagattatttgaaaaatacttgaaggacgaaagtggcttcaaagatccttccagcgactgggaaatgtcacagtcttcaataaagagttctatctgtcttctacgcgggaaaatctatgatgctctagataaccgaaccctggctacctacagctacaaagaagctttgaagcttgatgtctactgttttgaagcgttcgatcttttaacatcacatcacatgctgacagcacaagaagaaaaagaacttcttgaatcactaccccttagcaagctgtgtaatgaagaacaggaattgctgcgttttctatttgagaacaaattgaaaaaatataataagcctagtgaaacggtcatccctgaatctgtagatggcttgcaagagaatctggatgtggtagtgtctttagctgagagacattattataactgtgattttaaaatgtgctacaagcttacttctgtagtaatggagaaagatcctttccatgcaagttgtttacctgtacatatagggacgcttgtagagctgaataaagccaatgaacttttctatctttctcataaactggtggatttatatcctagtaatcctgtgtcttggtttgcagtgggatgttactatctcatggtcggtcataaaaatgaacatgccagaagatatctcagcaaagccacaacacttgagaaaacctatggacctgcatggatagcctatggacattcatttgcggtggagagtgagcacgaccaagcgatggctgcttacttcacagcagcacagctgatgaaagggtgtcatttgcctatgctgtatattggattagaatatggtttgaccaataactcaaaactagctgaaaggttcttcagccaagctctgagcattgcaccggaagacccttttgttatgcatgaggtcggcgtggttgcatttcagaatggagaatggaaaacagccgaaaaatggtttcttgatgctttggaaaaaattaaagcaattgggaacgaggtaacagttgacaaatgggaacctttgttgaacaacttggggcatgtctgcagaaaacttaaaaagtatgctgaggccttggattaccaccgtcaggcactggtgttgattcctcagaacgcatccacctactctgctattggatatatccacagtctgatgggcaactttgaaaatgctgtggactacttccacacagcccttggtcttaggcgagatgatacattttctgttacaatgcttggtcattgcatcgaaatgtacattggtgattctgaagcttatattggagcagacattaaagacaaattaaaatgttatgactttgatgtgcatacaatgaagacactaaaaaacattatttcacctccgtgggatttcagggaatttgaagtagaaaaacagactgcagaagaaacggggcttacgccattggaaacctcaaggaaaactccagattccagaccttccttggaagaaacctttgaaattgaaatgaatgaaagtgacatgatgttagagacatctatgtcagaccacagcacgtgactccagtcagtggtcctggtcccactgtcccagtgtaggttagtattccttcacatcctctccatggcttaagaatgtcccacttcctaacgtgactccaaactgcatctctacatttaggaacagagacccgccttaagagactggatcgcacacctttgcaacagatgtgttctgattctctgaacctacaaaatagttatacatagtggaataaagaaggtaaaccatc

SEQ ID NO: 116130 - DNA, 2211 bp, Homo sapiens
  Payload ID: 2650
  Gene Symbol: CDC16
  Gene Name: cell division cycle 16
  Uniprot ID: Q13042
  ENST ID: ENST00000360383
  CDS Start-End: 199-2061
gagcctgggcagtgcacggggcctgggtggggggtgcgggtgtgggtggggacctgcggccttcgagtccgcggccttcgagtcctggggcggcggcggcggctgcaggcacgggcacgggcacggggcggggtgcttagggtgcaggaggcgcgcgcctagcggcggagtgtggcgtgaggccgggcccgcgccgccatgaacctagagcggctgcggaagcgcgtccggcagtacctcgaccagcaacagtatcaaagtgctctattttgggcagataaagtagcttcactctctcgtgaagaaccccaggacatctattggttggctcagtgtctttacctgacagcacaatatcacagagccgcccatgcacttcggtcacgaaaactggacaaattgtatgaagcatgtcgttaccttgcagctaggtgccattatgctgcaaaagagcaccagcaggcccttgatgttcttgacatggaagagcccatcaataaaagattatttgaaaaatacttgaaggacgaaagtggcttcaaagatccttccagcgactgggaaatgtcacagtcttcaataaagagttctatctgtcttctacgcgggaaaatctatgatgctctagataaccgaaccctggctacctacagctacaaagaagctttgaagcttgatgtctactgttttgaagcgttcgatcttttaacatcacatcacatgctgacagcacaagaagaaaaagaacttcttgaatcactaccccttagcaagctgtgtaatgaagaacaggaattgctgcgttttctatttgagaacaaattgaaaaaatataataagcctagtgaaacggtcatccctgaatctgtagatggcttgcaagagaatctggatgtggtagtgtctttagctgagagacattattataactgtgattttaaaatgtgctacaagcttacttctgtagtaatggagaaagatcctttccatgcaagttgtttacctgtacatatagggacgcttgtagagctgaataaagccaatgaacttttctatctttctcataaactggtggatttatatcctagtaatcctgtgtcttggtttgcagtgggatgttactatctcatggtcggtcataaaaatgaacatgccagaagatatctcagcaaagccacaacacttgagaaaacctatggacctgcatggatagcctatggacattcatttgcggtggagagtgagcacgaccaagcgatggctgcttacttcacagcagcacagctgatgaaagggtgtcatttgcctatgctgtatattggattagaatatggtttgaccaataactcaaaactagctgaaaggttcttcagccaagctctgagcattgcaccggaagacccttttgttatgcatgaggtcggcgtggttgcatttcagaatggagaatggaaaacagccgaaaaatggtttcttgatgctttggaaaaaattaaagcaattgggaacgaggtaacagttgacaaatgggaacctttgttgaacaacttggggcatgtctgcagaaaacttaaaaagtatgctgaggccttggattaccaccgtcaggcactggtgttgattcctcagaacgcatccacctactctgctattggatatatccacagtctgatgggcaactttgaaaatgctgtggactacttccacacagcccttggtcttaggcgagatgatacattttctgttacaatgcttggtcattgcatcgaaatgtacattggtgattctgaagcttatattggagcagacattaaagacaaattaaaatgttatgactttgatgtgcatacaatgaagacactaaaaaacattatttcacctccgtgggatttcagggaatttgaagtagaaaaacagactgcagaagaaacggggcttacgccattggaaacctcaaggaaaactccagattccagaccttccttggaagaaacctttgaaattgaaatgaatgaaagtgacatgatgttagagacatctatgtcagaccacagcacgtgactccagtcagtggtcctggtcccactgtcccagtgtaggaacagagacccgccttaagagactggatcgcacacctttgcaacagatgtgttctgattctctgaacctacaaaatagttatacatagtggaataaagaaggtaaaccatc

SEQ ID NO: 116131 - DNA, 2034 bp, Homo sapiens; identical to SEQ ID NO: 116127
  Payload ID: 2650
  Gene Symbol: CDC16
  Gene Name: cell division cycle 16
  Uniprot ID: Q13042
  ENST ID: ENST00000375308
  CDS Start-End: 304-1884

SEQ ID NO: 116132 - DNA, 2156 bp, Homo sapiens
  Payload ID: 2650
  Gene Symbol: CDC16
  Gene Name: cell division cycle 16
  Uniprot ID: Q13042
  ENST ID: ENST00000375310
  CDS Start-End: 426-2006
gcggcggcggctgcaggcacgggcacgggcacggggcggggtgcttagggtgcaggaggcgcgcgcctagcggcggagtgtggcgtgaggccgggcccgcgccgccatgaacctagagcggctgcggaagcgcgtccggcagtacctcgaccagcaacagtatcaaagtgctctattttgggcagataaagtagcttcactctctcgtgaaccccaggacatctattggttggctcagtgtctttacctgacagcacaatatcacagagccgcccatgcacttcggtcacgaaaactggacaaattgtatgaagcatgtcgttaccttgcagctaggtgccataagtcgtgagtgatgagcggcacttctgttttccacgtagtatgctgcaaaagagcaccagcaggcccttgatgttcttgacatggaagagcccatcaataaaagattatttgaaaaatacttgaaggacgaaagtggcttcaaagatccttccagcgactgggaaatgtcacagtcttcaataaagagttctatctgtcttctacgcgggaaaatctatgatgctctagataaccgaaccctggctacctacagctacaaagaagctttgaagcttgatgtctactgttttgaagcgttcgatcttttaacatcacatcacatgctgacagcacaagaagaaaaagaacttcttgaatcactaccccttagcaagctgtgtaatgaagaacaggaattgctgcgttttctatttgagaacaaattgaaaaaatataataagcctagtgaaacggtcatccctgaatctgtagatggcttgcaagagaatctggatgtggtagtgtctttagctgagagacattattataactgtgattttaaaatgtgctacaagcttacttctgtagtaatggagaaagatcctttccatgcaagttgtttacctgtacatatagggacgcttgtagagctgaataaagccaatgaacttttctatctttctcataaactggtggatttatatcctagtaatcctgtgtcttggtttgcagtgggatgttactatctcatggtcggtcataaaaatgaacatgccagaagatatctcagcaaagccacaacacttgagaaaacctatggacctgcatggatagcctatggacattcatttgcggtggagagtgagcacgaccaagcgatggctgcttacttcacagcagcacagctgatgaaagggtgtcatttgcctatgctgtatattggattagaatatggtttgaccaataactcaaaactagctgaaaggttcttcagccaagctctgagcattgcaccggaagacccttttgttatgcatgaggtcggcgtggttgcatttcagaatggagaatggaaaacagccgaaaaatggtttcttgatgctttggaaaaaattaaagcaattgggaacgaggtaacagttgacaaatgggaacctttgttgaacaacttggggcatgtctgcagaaaacttaaaaagtatgctgaggccttggattaccaccgtcaggcactggtgttgattcctcagaacgcatccacctactctgctattggatatatccacagtctgatgggcaactttgaaaatgctgtggactacttccacacagcccttggtcttaggcgagatgatacattttctgttacaatgcttggtcattgcatcgaaatgtacattggtgattctgaagcttatattggagcagacattaaagacaaattaaaatgttatgactttgatgtgcatacaatgaagacactaaaaaacattatttcacctccgtgggatttcagggaatttgaagtagaaaaacagactgcagaagaaacggggcttacgccattggaaacctcaaggaaaactccagattccagaccttccttggaagaaacctttgaaattgaaatgaatgaaagtgacatgatgttagagacatctatgtcagaccacagcacgtgactccagtcagtggtcctggtcccactgtcccagtgtaggaacagagacccgccttaagagactggatcgcacacctttgcaacagatgtgttctgattctctgaacctacaaaatagttatacatagtggaataaagaaggtaaaccatc

SEQ ID NO: 116133 - DNA, 2058 bp, Homo sapiens
  Payload ID: 2650
  Gene Symbol: CDC16
  Gene Name: cell division cycle 16
  ENST ID: ENST00000628084
  CDS Start-End: 481-1908
gagcctgggcagtgcacggggcctgggtggggggtgcgggtgtgggtggggacctgcggccttcgagtccgcggccttcgagtcctggggcggcggcggcggctgcaggcacgggcacgggcacggggcggggtgcttagggtgcaggaggcgcgcgcctagcggcggagtgtggcgtgaggccgggcccgcgccgccatgaacctagagcggctgcggaagcgcgtccggcagtacctcgaccagcaacagtatcaaagtgctctattttgggcagataaagtagcttcactctctcgtgaagaaccccaggacatctattggttggctcagtgtctttacctgacagcacaatatcacagagccgcccatgcacttcggtcacgaaaactggacaaattgtatgaagcatgtcgttaccttgcagctaggtgccattatgctgcaaaagagcaccagcaggcccttgatgttcttgacatggaagagcccatcaataaaagattatttgaaaaatacttgaaggacgaaagtggcttcaaagatccttccagcgactgggaaatgtcacagtcttcaataaagagttctatctgtcttctacgcgggaaaatctatgatgctctagataaccgaaccctggctacctacagctacaaagaagctttgaagcttgatgtctactgttttgaagcgttcgatcttttaacatcacatcacatgctgacagcacaagaagaaaaagaacttcttgaatcactaccccttagcaagctgtgtaatgaagaacaggaattgctgcgttttctatttgagaacaaattgaaaaaatataataagcctagtgaaacggtcatccctgaatctgtagatggcttgcaagagaatctggatgtggtagtgtctttagctgagagacattattataactgtgattttaaaatgtgctacaagcttacttctgtagtaatggagaaagatcctttccatgcaagttgtttacctgtacatatagggacgcttgtagagctgaataaagccaatgaacttttctatctttctcataaactggtggatttatatcctagtaatcctgtgtcttggtttgcagtgggatgttactatctcatggtcggtcataaaaatgaacatgccagaagatatctcagcaaagccacaacacttgagaaaacctatggacctgcatggatagcctatggacattcatttgcggtggagagtgagcacgaccaagcgatggctgcttacttcacagcagcacagctgatgaaaggatggaaaacagccgaaaaatggtttcttgatgctttggaaaaaattaaagcaattgggaacgaggtaacagttgacaaatgggaacctttgttgaacaacttggggcatgtctgcagaaaacttaaaaagtatgctgaggccttggattaccaccgtcaggcactggtgttgattcctcagaacgcatccacctactctgctattggatatatccacagtctgatgggcaactttgaaaatgctgtggactacttccacacagcccttggtcttaggcgagatgatacattttctgttacaatgcttggtcattgcatcgaaatgtacattggtgattctgaagcttatattggagcagacattaaagacaaattaaaatgttatgactttgatgtgcatacaatgaagacactaaaaaacattatttcacctccgtgggatttcagggaatttgaagtagaaaaacagactgcagaagaaacggggcttacgccattggaaacctcaaggaaaactccagattccagaccttccttggaagaaacctttgaaattgaaatgaatgaaagtgacatgatgttagagacatctatgtcagaccacagcacgtgactccagtcagtggtcctggtcccactgtcccagtgtaggaacagagacccgccttaagagactggatcgcacacctttgcaacagatgtgttctgattctctgaacctacaaaatagttatacatagtggaataaagaaggtaaaccatc

SEQ ID NO: 116134 - DNA, 1675 bp, Homo sapiens
  Payload ID: 2651
  Gene Symbol: CDC20
  Gene Name: cell division cycle 20
  Uniprot ID: Q12834
  ENST ID: ENST00000310955
  CDS Start-End: 102-1601
gaggcgtaagccaggcgtgttaaagccggtcggaactgctccggagggcacgggctccgtaggcaccaactgcaaggacccctccccctgcgggcgctcccatggcacagttcgcgttcgagagtgacctgcactcgctgcttcagctggatgcacccatccccaatgcaccccctgcgcgctggcagcgcaaagccaaggaagccgcaggcccggccccctcacccatgcgggccgccaaccgatcccacagcgccggcaggactccgggccgaactcctggcaaatccagttccaaggttcagaccactcctagcaaacctggcggtgaccgctatatcccccatcgcagtgctgcccagatggaggtggccagcttcctcctgagcaaggagaaccagcctgaaaacagccagacgcccaccaagaaggaacatcagaaagcctgggctttgaacctgaacggttttgatgtagaggaagccaagatccttcggctcagtggaaaaccacaaaatgcgccagagggttatcagaacagactgaaagtactctacagccaaaaggccactcctggctccagccggaagacctgccgttacattccttccctgccagaccgtatcctggatgcgcctgaaatccgaaatgactattacctgaaccttgtggattggagttctgggaatgtactggccgtggcactggacaacagtgtgtacctgtggagtgcaagctctggtgacatcctgcagcttttgcaaatggagcagcctggggaatatatatcctctgtggcctggatcaaagagggcaactacttggctgtgggcaccagcagtgctgaggtgcagctatgggatgtgcagcagcagaaacggcttcgaaatatgaccagtcactctgcccgagtgggctccctaagctggaacagctatatcctgtccagtggttcacgttctggccacatccaccaccatgatgttcgggtagcagaacaccatgtggccacactgagtggccacagccaggaagtgtgtgggctgcgctgggccccagatggacgacatttggccagtggtggtaatgataacttggtcaatgtgtggcctagtgctcctggagagggtggctgggttcctctgcagacattcacccagcatcaaggggctgtcaaggccgtagcatggtgtccctggcagtccaatgtcctggcaacaggagggggcaccagtgatcgacacattcgcatctggaatgtgtgctctggggcctgtctgagtgccgtggatgcccattcccaggtgtgctccatcctctggtctccccattacaaggagctcatctcaggccatggctttgcacagaaccagctagttatttggaagtacccaaccatggccaaggtggctgaactcaaaggtcacacatcccgggtcctgagtctgaccatgagcccagatggggccacagtggcatccgcagcagcagatgagaccctgaggctatggcgctgttttgagttggaccctgcgcggcggcgggagcgggagaaggccagtgcagccaaaagcagcctcatccaccaaggcatccgctgaagaccaacccatcacctcagttgttttttatttttctaataaagtcatgtctcccttcatgttttttttttaaa

SEQ ID NO: 116135 - DNA, 1777 bp, Homo sapiens
  Payload ID: 2651
  Gene Symbol: CDC20
  Gene Name: cell division cycle 20
  Uniprot ID: Q12834
  ENST ID: ENST00000372462
  CDS Start-End: 204-1703
ggtggtggggctgagccgaggtggggccgtggccagggggagggggtgctaggccggaaggggctgcagccgagggtggccctgattttgtggccggccaggagcgaaggggtccctttctgtcccctgagcaccgtcgcctcctttcctccagggctccgtaggcaccaactgcaaggacccctccccctgcgggcgctcccatggcacagttcgcgttcgagagtgacctgcactcgctgcttcagctggatgcacccatccccaatgcaccccctgcgcgctggcagcgcaaagccaaggaagccgcaggcccggccccctcacccatgcgggccgccaaccgatcccacagcgccggcaggactccgggccgaactcctggcaaatccagttccaaggttcagaccactcctagcaaacctggcggtgaccgctatatcccccatcgcagtgctgcccagatggaggtggccagcttcctcctgagcaaggagaaccagcctgaaaacagccagacgcccaccaagaaggaacatcagaaagcctgggctttgaacctgaacggttttgatgtagaggaagccaagatccttcggctcagtggaaaaccacaaaatgcgccagagggttatcagaacagactgaaagtactctacagccaaaaggccactcctggctccagccggaagacctgccgttacattccttccctgccagaccgtatcctggatgcgcctgaaatccgaaatgactattacctgaaccttgtggattggagttctgggaatgtactggccgtggcactggacaacagtgtgtacctgtggagtgcaagctctggtgacatcctgcagcttttgcaaatggagcagcctggggaatatatatcctctgtggcctggatcaaagagggcaactacttggctgtgggcaccagcagtgctgaggtgcagctatgggatgtgcagcagcagaaacggcttcgaaatatgaccagtcactctgcccgagtgggctccctaagctggaacagctatatcctgtccagtggttcacgttctggccacatccaccaccatgatgttcgggtagcagaacaccatgtggccacactgagtggccacagccaggaagtgtgtgggctgcgctgggccccagatggacgacatttggccagtggtggtaatgataacttggtcaatgtgtggcctagtgctcctggagagggtggctgggttcctctgcagacattcacccagcatcaaggggctgtcaaggccgtagcatggtgtccctggcagtccaatgtcctggcaacaggagggggcaccagtgatcgacacattcgcatctggaatgtgtgctctggggcctgtctgagtgccgtggatgcccattcccaggtgtgctccatcctctggtctccccattacaaggagctcatctcaggccatggctttgcacagaaccagctagttatttggaagtacccaaccatggccaaggtggctgaactcaaaggtcacacatcccgggtcctgagtctgaccatgagcccagatggggccacagtggcatccgcagcagcagatgagaccctgaggctatggcgctgttttgagttggaccctgcgcggcggcgggagcgggagaaggccagtgcagccaaaagcagcctcatccaccaaggcatccgctgaagaccaacccatcacctcagttgttttttatttttctaataaagtcatgtctcccttcatgttttttttttaaa

SEQ ID NO: 116136 - DNA, 2946 bp, Homo sapiens
  Payload ID: 2652
  Gene Symbol: CDC20B
  Gene Name: cell division cycle 20B
  Uniprot ID: Q86Y33
  ENST ID: ENST00000296733
  CDS Start-End: 176-1723
agcggcggtgggaggagtgggggacctggagggaggtggtgaaatagaatggtcctgggggacgggactccaggggtttgacgattaggcgtcaagactgacttagacctgggaagaaaaccagaggcagtcgagcagagaggccaaacgccaggcagggcgaagtcagccggagatggagtggaaactggagcgcaccgcgcctcggagggtccgcacggaagaggagatgctgtgggaaagtatcatgcgtgtgctctccaaagacttgaagcagaagagaagtcaagattccgccaacgtactcgattcagttaatgctacgtattctgactttaagagcaactttgcgaagaggctgtccgcagaggttcctgttgcgagtagccccattaccacaaggtggcagcaaagtcaaactagggctctgtcctctgattcctttggggaagagcagtcaaccacctacctcccagaagcttccggatcagtgctgaagacaccgcctgagaaagagaccttgactctaggatcccgcaaagaacaactgaagacccccagcaaaggaatttctgaaacaagtaactctgctctccatttttgcaaggcacctcatgcaatggacagagactggaaagaaagtgttgcctcaaaagggcagaaatgcctaaaacaactctttgtaacccagaacgtggttcagcaggctaatggaaaaatgcagctctgtgagcaatccgaatgtgtttggaaaggctgcaaagatggagtcagagatgaatccttccatcttaaaagttctggtgatataaacgattccatactccaaccagaggtgaagattcatattactggtcttcgaaatgactactatctgaatatcctagattggagttttcagaatcttgttgccatagccctgggctctgctgtatacatctggaatggggagaaccacaatgggattgaaaacatagacttaagtctcacttgtaactatatctcttctgtgtcctggataaaagagggaacttgcctggcagttggcaccagcgagggagaagtgcaattatgggatgtggtaactaaaaagcggctgagaaatatgcttggtcatttgtcagtagttggggctctgagctggaatcactttatcctcagcagtgggtcaagactggggcgtgtttatcatcacgatgttcgggtagcccagcatcatgttggaacacttcgccacaagcaagctgtgtgtgctctgaagtggtcaccggatggcaggctgctttccagcggctgcagtgatggactgctgacaatatggccccacgatccaggtgccagtgcacagggccaaccgctgaaagtcataacccagtctacggcagtcaaggccatggattggtgtccctggcagtctggggtccttgccattggaggaggaatgaaggatggacgcttacacatcttggatataaatgctgggaagagcatccagaccccaagcacaaactcacagatttgttccttaatctggctacctaagacaaaggagattgcaactggtcaaggtactcccaagaatgatgtgactgtgtggacctgtcccactgtgtccaggtcaggccacaggggcagagtgctgcacctgtctttgagtccagaccagacccgggtgttttctgctgcagctgatgggacggcctctgtatggaattgctactagcacccagcccctctaggtttcagtttccttatttctgagtgaagatgatgatgttggctatgtcttctccatggggtttttatgagtatcaaacaagttgaaatactcttcttgatgtgaatgcctgttctcctgttcttcttttgcagattgctttacttgctctgcttcccagagatccgcttcttttcttctctgctttcttctttctgcccctcttcctccccctcctcttcttcctcccattcttacccctttctagagattcattttcactactttattcagaataacatctatagcaaagatttctacttctttcccgtatgacttttctccccagctccaaacctcatatttctgattgcctcaggatagttcccttttgagatactttcctgtctttagctcaatctcaacacattgaaaacacaactcattcacttgaaaaacacttactaaaatctcactatatgctaggcagtatgttaagcatgcatattgctctctctaaaaatcagttctgtaggaatccctttcccctcctgatggtctcatccttatcctggtctcccactcagggaacctcctgattattctgctctgtgcttcctcagttcaccctttgctctcttttcttttgcttcacctagtcacatcctgtgtgcctgacagccagtctgctgtaattgtcttagaactgatcctcttgactccacaccactgctaggttgaacatctaaaagtcctgtgctgatcctctcagtcccctgctcatcaactctcaaggacaacctattaccaaacacctttgacctcaacctctggagtcctcagcccaggacttgaagttaggagatctttttttgccttggctctgccataaatacaccctgtaaccttggatgtgttgcaacatctgcaaggataggaatttgatcactgctaaggttccttcaaacttgatcagttcgctgttctgtcttttgaatgttaattcacattcatctcctatattaagactttggctaagtcttgtgatttcttgccttattggagcttttcttctaatctgaattcttgcttctctctccttttcctttacacacccacacaagtcctaacctctccaggaagtgttttgaaatgatgttacctgggtttgagttcttggcattagcctgtatcatctatttggtattattatactattatagctgttt

SEQ ID NO: 116137 - DNA, 1679 bp, Homo sapiens
  Payload ID: 2652
  Gene Symbol: CDC20B
  Gene Name: cell division cycle 20B
  Uniprot ID: Q86Y33
  ENST ID: ENST00000322374
  CDS Start-End: 176-1609
agcggcggtgggaggagtgggggacctggagggaggtggtgaaatagaatggtcctgggggacgggactccaggggtttgacgattaggcgtcaagactgacttagacctgggaagaaaaccagaggcagtcgagcagagaggccaaacgccaggcagggcgaagtcagccggagatggagtggaaactggagcgcaccgcgcctcggagggtccgcacggaagaggagatgctgtgggaaagtatcatgcgtgtgctctccaaagacttgaagcagaagagaagtcaagattccgccaacgtactcgattcagttaatgctacgtattctgactttaagagcaactttgcgaagaggctgtccgcagaggttcctgttgcgagtagccccattaccacaaggtggcagcaaagtcaaactagggctctgtcctctgattcctttggggaagagcagtcaaccacctacctcccagaagcttccggatcagtgctgaagacaccgcctgagaaagagaccttgactctaggatcccgcaaagaacaactgaagacccccagcaaaggaatttctgaaacaagtaactctgctctccatttttgcaaggcacctcatgcaatggacagagactggaaagaaagtgttgcctcaaaagggcagaaatgcctaaaacaactctttgtaacccagaacgtggttcagcaggctaatggaaaaatgcagctctgtgagcaatccgaatgtgtttggaaaggctgcaaagatggagtcagagatgaatccttccatcttaaaagttctggtgatataaacgattccatactccaaccagaggtgaagattcatattactggtcttcgaaatgactactatctgaatatcctagattggagttttcagaatcttgttgccatagccctgggctctgctgtatacatctggaatggggagaaccacaatgggattgaaaacatagacttaagtctcacttgtaactatatctcttctgtgtcctggataaaagagggaacttgcctggcagttggcaccagcgagggagaagtgcaattatgggatgtggtaactaaaaagcggctgagaaatatgcttggtcatttgtcagtagttggggctctgagctggaatcactttatcctcagcagtgggtcaagactggggcgtgtttatcatcacgatgttcgggtagcccagcatcatgttggaacacttcgccacaagcaagctgtgtgtgctctgaagtggtcaccggatggcaggctgctttccagcggctgcagtgatggactgctgacaatatggccccacgatccaggtgccagtgcacagggccaaccgctgaaagtcataacccagtctacggcagtcaagatttgttccttaatctggctacctaagacaaaggagattgcaactggtcaaggtactcccaagaatgatgtgactgtgtggacctgtcccactgtgtccaggtcaggtgggttttttggccacaggggcagagtgctgcacctgtctttgagtccagaccagacccgggtgttttctgctgcagctgatgggacggcctctgtatggaattgctactagcacccagcccctctaggtttcagtttccttatttctgagtgaagatgatgatgttggctatgtcttctcc

SEQ ID NO: 116138 - DNA, 2591 bp, Homo sapiens
  Payload ID: 2652
  Gene Symbol: CDC20B
  Gene Name: cell division cycle 20B
  Uniprot ID: Q86Y33
  ENST ID: ENST00000381375
  CDS Start-End: 147-1706
agggaggtggtgaaatagaatggtcctgggggacgggactccaggggtttgacgattaggcgtcaagactgacttagacctgggaagaaaaccagaggcagtcgagcagagaggccaaacgccaggcagggcgaagtcagccggagatggagtggaaactggagcgcaccgcgcctcggagggtccgcacggaagaggagatgctgtgggaaagtatcatgcgtgtgctctccaaagacttgaagcagaagagaagtcaagattccgccaacgtactcgattcagttaatgctacgtattctgactttaagagcaactttgcgaagaggctgtccgcagaggttcctgttgcgagtagccccattaccacaaggtggcagcaaagtcaaactagggctctgtcctctgattcctttggggaagagcagtcaaccacctacctcccagaagcttccggatcagtgctgaagacaccgcctgagaaagagaccttgactctaggatcccgcaaagaacaactgaagacccccagcaaaggaatttctgaaacaagtaactctgctctccatttttgcaaggcacctcatgcaatggacagagactggaaagaaagtgttgcctcaaaagggcagaaatgcctaaaacaactctttgtaacccagaacgtggttcagcaggctaatggaaaaatgcagctctgtgagcaatccgaatgtgtttggaaaggctgcaaagatggagtcagagatgaatccttccatcttaaaagttctggtgatataaacgattccatactccaaccagaggtgaagattcatattactggtcttcgaaatgactactatctgaatatcctagattggagttttcagaatcttgttgccatagccctgggctctgctgtatacatctggaatggggagaaccacaatgggattgaaaacatagacttaagtctcacttgtaactatatctcttctgtgtcctggataaaagagggaacttgcctggcagttggcaccagcgagggagaagtgcaattatgggatgtggtaactaaaaagcggctgagaaatatgcttggtcatttgtcagtagttggggctctgagctggaatcactttatcctcagcagtgggtcaagactggggcgtgtttatcatcacgatgttcgggtagcccagcatcatgttggaacacttcgccacaagcaagctgtgtgtgctctgaagtggtcaccggatggcaggctgctttccagcggctgcagtgatggactgctgacaatatggccccacgatccaggtgccagtgcacagggccaaccgctgaaagtcataacccagtctacggcagtcaaggccatggattggtgtccctggcagtctggggtccttgccattggaggaggaatgaaggatggacgcttacacatcttggatataaatgctgggaagagcatccagaccccaagcacaaactcacagatttgttccttaatctggctacctaagacaaaggagattgcaactggtcaaggtactcccaagaatgatgtgactgtgtggacctgtcccactgtgtccaggtcaggtgggttttttggccacaggggcagagtgctgcacctgtctttgagtccagaccagacccgggtgttttctgctgcagctgatgggacggcctctgtatggaattgctactagcacccagcccctctaggtttcagtttccttatttctgagtgaagatgatgatgttggctatgtcttctccatggggtttttatgagtatcaaacaagttgaaatactcttcttgatgtgaatgcctgttctcctgttcttcttttgcagattgctttacttgctctgcttcccagagatccgcttcttttcttctctgctttcttctttctgcccctcttcctccccctcctcttcttcctcccattcttacccctttctagagattcattttcactactttattcagaataacatctatagcaaagatttctacttctttcccgtatgacttttctccccagctccaaacctcatatttctgattgcctcaggatagttcccttttgagatactttcctgtctttagctcaatctcaacacattgaaaacacaactcattcacttgaaaaacacttactaaaatctcactatatgctaggcagtatgttaagcatgcatattgctctctctaaaaatcagttctgtaggaatccctttcccctcctgatggtctcatccttatcctggtctcccactcagggaacctcctgattattctgctctgtgcttcctcagttcaccctttgctctcttttcttttgcttcacctagtcacatcctgtgtgcctgacagccagtctgctgtaattgtcttagaactgatcctcttgactccacaccactgctaggttgaacatctaaaagtcctgtgctgatcctctcagtcccctgctcatcaactctcaaggacaacctattaccaaacacctttgacctcaacctctggagtcctcagcccaggacttgaagttaggagatctttttttgccttggctctgccata

SEQ ID NO: 116139 - DNA, 2130 bp, Homo sapiens
  Payload ID: 2652
  Gene Symbol: CDC20B
  Gene Name: cell division cycle 20B
  Uniprot ID: Q86Y33
  ENST ID: ENST00000507931
  CDS Start-End: 162-740
gagtgggggacctggagggaggtggtgaaatagaatggtcctgggggacgggactccaggggtttgacgattaggcgtcaagactgacttagacctgggaagaaaaccagaggcagtcgagcagagaggccaaacgccaggcagggcgaagtcagccggagatggagtggaaactggagcgcaccgcgcctcggagggtccgcacggaagaggagatgctgtgggtactcgattcagttaatgctacgtattctgactttaagagcaactttgcgaagaggctgtccgcagaggttcctgttgcgagtagccccattaccacaaggtggcagcaaagtcaaactagggctctgtcctctgattcctttggggaagagcagtcaaccacctacctcccagaagcttccggatcagtgctgaagacaccgcctgagaaagagaccttgactctaggatcccgcaaagaacaactgaagacccccagcaaaggaatttctgaaacaagtaactctgctctccatttttgcaaggcacctcatgcaatggacagagactggaaagaaagtgttgcctcaaaagggcagaaatgcctaaaacaactctttgtaacccagaacgtggttcagcaggctaatggaaaaatgcagctctgtgagcaatccgaatgtgtttggaaagatcactttagtggcagcatgaagaaacgatttgaacaggaggatgttggtggcaaagactaattgagaggccctctgaatactctatgcaaggctctgttgttgattcttttaagggaacttaaactatgaaacagatcccacataagccaagtaattgctcatcagtggatcacggggacaaatgttatccaaatgctgtgtatataaagcaattctttatgccttgtccatatctaatgactctgaaaccttacagcaggcagcccctgtaaactttcaggtgtacctctttgccgaaagctggtaggaaactttggatggtggtgttgtgagcgttatcagggaagctctgtagccatgcagtggggagataattgcctgtggcaatttctagaaggtcctgttccatgctacatttggagctctcagtgctttctttcttttttttttttttttttgagacagagtctcgctctgttgcccaagctggagtgcagtggcgcgatctcagttcactgcaacctctgtctcccgggttcaagcgattctcctgtctcagcttgggattacaggcacacaccaccatgcccagctaatttttgtatttttagtagagaaggggtttcaccatgttggccagactggtctccaactcctgacctcagatgctccacccgcctcagccttccaaaatactgagattataggcatgagccactgtgcttggcctcccaaagtcttttgaccctgagccccatgtgttttcattcctactttctgttgccatcatggacgtttttgtgttattcatgagattattgtcatggctggaaaataattgtttgggagccagaattctgtgtgagaatcctcttgagagaactagcgtggttcatttcataaatgccaaggaaacttgcctgctacatttcccctctggaataagttctggtaagcatatccatggggtgctttggcaaggtctcaaaaataaatgtgaacaaggagacagaaatcctcaatgctaaagtagacttctatttttatggcttgtcctattttttttttttttttttgagatgaagtcttgctctatcgtccaggctggagtgcagtagtgtgatcttggctcatggcaacctccacctcccgggagaattgcttgaaccagggaggcggaagttgcagtgagctgagaccgtgccactgctctctagcttggctgacagagtgagactctgtctcaaaaaaaaaaatattttttttggaaattttcttttaaaaattatgtagataacacatagatacacacttttaacttctaaatacagaggtgtccaatcttttggcttccctgggccacattggaagaaggattgttttgggccacatatagaatacactaatactaaagatagctgatgagctaaaaaaaaaaaaaaaaaaaaaa

SEQ ID NO: 116140 - DNA, 1548 bp, Homo sapiens
  Payload ID: 2652
  Gene Symbol: CDC20B
  Gene Name: cell division cycle 20B
  Uniprot ID: Q86Y33
  ENST ID: ENST00000513180
  CDS Start-End: 16-1134
cgaagtcagccggagatggagtggaaactggagcgcaccgcgcctcggagggtccgcacggaagaggagatgctgtgggaaagtatcatgcgtgtgctctccaaagacttgaagcagaagagaagtcaagattccgccaacgtactcgattcagttaatgctacgtattctgactttaagagcaactttgcgaagaggctgtccgcagaggttcctgttgcgagtagccccattaccacaaggtggcagcaaagtcaaactagggctctgtcctctgattcctttggggaagagcagtcaaccacctacctcccagaagcttccggatcagtgctgaagacaccgcctgagaaagagaccttgactctaggatcccgcaaagaacaactgaagacccccagcaaaggaatttctgaaacaagtaactctgctctccatttttgcaaggcacctcatgcaatggacagagactggaaagaaagtgttgcctcaaaagggcagaaatgcctaaaacaactctttgtaacccagaacgtggttcagcaggctaatggaaaaatgcagctctgtgagcaatccgaatgtgtttggaaaggctgcaaagatggagtcagagatgaatccttccatcttaaaagttctggtgatataaacgattccatactccaaccagaggtgaagattcatattactggtcttcgaaatgactactatctgaatatcctagattggagttttcagaatcttgttgccatagccctgggctctgctgtatacatctggaatggggagaaccacaatgggattgaaaacatagacttaagtctcacttgtaactatatctcttctgtgtcctggataaaagagggaacttgcctggcagttggcaccagcgagggagaagtgcaattatgggatgtggtaactaaaaagcggctgagaaatatgcttggtcatttgtcagtagttggggctctgagctggaatcactttatcctcagcaggctggagttcagtggcgtgatctcagctcactgcaacctccacctcccgagtagctgggactacaggcgcccaccaccatgcctggtgggtcaagactggggcgtgtttatcatcacgatgttcgggtagcccagcatcatgttggaacacttcgccacaagcaagctgtgtgtgctctgaagtggtcaccggatggcaggctgctttccagcggctgcagtgatggactgctgacaatatggccccacgatccaggtgccagtgcacagggccaaccgctgaaagtcataacccagtctacggcagtcaaggccatggattggtgtccctggcagtctggggtccttgccattggaggaggaatgaaggatggacgcttacacatcttggatataaatgctgggaagagcatccagaccccaagcacaaactcacagatttgttccttaatctggctacctaagacaaaggagattgcaactggtcaaggtactcccaagaatgatgtgactgtgtggacctgtcccactgtgtccaggtcag

SEQ ID NO: 116141 - DNA, 1079 bp, Homo sapiens
  Payload ID: 2653
  Gene Symbol: CDC23
  Gene Name: cell division cycle 23
  Uniprot ID: Q9UJX2
  ENST ID: ENST00000394884
  CDS Start-End: 32-487
atgattggctggagtggcccgagtcgggaaaatggctgcgagtacctccatggtcccggtggctgtgacggcggcagtggcgcctgtcctgtccataaacagcgatttctcagatttgcgggaaattaaaaagcaactgctgcttattgcgggccttacccgggagcggggcctactacacagtagcaaatggtcggcggagttggctttctctctccctgcattgcctctggccgagctgcaaccgcctccgcctattacagaggaagatgcccaggatatggatgcctataccctggccaaggcctactttgacgttaaagagtatgatcgggcagcacatttcctgcatggctgcaatagcaagaaagcctattttctgtatatgtattccagatatctggtgagggccattttaaaatgtcattctgcctttagtgaaacatccatatttagaaccaatggaaaagttaaatcttttaaatagcttagcagtgggccactgaatgaatgtactttatacatagcaataataaaaaaaagatatcataaataaagttaaaaaggatggtagagaagaaaatattcttaggaatgactaacaggataagtaacaacctgattatttatttactttaggttatataaggttcttcatgcctgtgaattaatattattgtgtaagaattaagttaaaaagcctgggctgacttttaaatttataaattcatttatcatgtttatagtatatttattgtttttctttcatggctattaaaaagtatgactgtaaaggacaatgcaagtaaaccaacttaatactgtattgaataataagtacaatttattattttactttgaaacattatgaatttactttcctactttttcttagttgttatctatataaattgattaaaaaaacattttatgtacttctcatttcctagtacaggttgagtatcccttatttgaagtgcttgggaccaaaagtgtttcagatttcagatttttttcagattttggtatatttgcattatacttactggttgaaataaaaaatgctgcagtgagtgtca

SEQ ID NO: 116142 - DNA, 3155 bp, Homo sapiens
  Payload ID: 2653
  Gene Symbol: CDC23
  Gene Name: cell division cycle 23
  Uniprot ID: Q9UJX2
  ENST ID: ENST00000394886
  CDS Start-End: 32-1825
atgattggctggagtggcccgagtcgggaaaatggctgcgagtacctccatggtcccggtggctgtgacggcggcagtggcgcctgtcctgtccataaacagcgatttctcagatttgcgggaaattaaaaagcaactgctgcttattgcgggccttacccgggagcggggcctactacacagtagcaaatggtcggcggagttggctttctctctccctgcattgcctctggccgagctgcaaccgcctccgcctattacagaggaagatgcccaggatatggatgcctataccctggccaaggcctactttgacgttaaagagtatgatcgggcagcacatttcctgcatggctgcaatagcaagaaagcctattttctgtatatgtattccagatatctgtctggagaaaaaaagaaggacgatgaaacagttgatagcttaggccccctggaaaaaggacaagtgaaaaatgaggcgcttagagaattgagagtggagctcagcaaaaaacaccaagctcgagaacttgatggatttggactttatctgtatggtgtggtgcttcgaaaactggacttggttaaagaggccattgatgtgtttgtggaagctactcatgttttgcccttgcattggggagcctggttagaactctgtaacctgatcacagacaaagagatgctgaagttcctgtctttgccagacacctggatgaaagagttttttctggctcatatatacacagagttgcagttgatagaggaggccctgcaaaagtatcagaatctcattgatgtgggcttctctaagagctcgtatattgtttcccaaattgcagttgcctatcacaatatcagagatattgacaaagccctctccatttttaatgagctaaggaaacaagacccttacaggattgaaaatatggacacattctccaaccttctttatgtcaggagcatgaaatcggagttgagttatctggctcataacctctgtgagattgataaatatcgtgtagaaacgtgctgtgtaattggcaattattacagtttacgttctcagcatgagaaagcagccttatatttccagagagccctgaaattaaatcctcggtatcttggtgcctggacactaatgggacatgagtacatggagatgaagaacacgtctgctgctatccaggcttatagacatgccattgaggtcaacaaacgggactacagagcttggtatggcctcgggcagacctatgaaatccttaagatgccattttactgcctttattattatagacgggcccaccagcttcgacccaatgattctcgcatgctggttgctttaggagaatgttacgagaaactcaatcaactagtggaagccaaaaagtgttattggagagcttacgccgtgggagatgtggagaaaatggctctggtgaaactggcaaagcttcatgaacagttgactgagtcagaacaggctgcccagtgttacatcaaatatatccaagatatctattcctgtggggaaatagtagaacacttggaggaaagcactgcctttcgctatctggcccagtactattttaagtgcaaactgtgggatgaagcttcaacttgtgcacaaaagtgttgtgcatttaatgatacccgggaagaaggtaaggccttactccggcaaatcctacagcttcggaaccaaggcgagactcctaccaccgaggtgcctgctccctttttcctacctgcttcactctctgctaacaatacccccacacgcagagtttctccactcaacttgtcttctgtcacgccatagttggctactctcaagccagcacattgttagacccatcttaattaagccttacctccatgtaaagaacagcacgtctgttccaaggacctcagctcttcttgtttctacagatggcaacagctccatagggacagcttgtataattaccttcagaggccaactgacagaatcctggcaggaacagacattatcttgccagttagaagtacttctgtctcacttatgtccaaagagtggctatagatcttggccttcttccctgaatgctttttttttttggcccccaagaaagtcccttttatagcactttagcacaggcaatgctacaggaacaaagtttcaatgctgctgagagtgaaagaaaggaggaaagtctgccactctaccctgagctggcagtagggcactgagtaccctaggaagaagtcagagcaatggatacaaatgaccttgctcttggatttgctgagcatgatccctattctgatgtcagagattaggtttaaatggaatagagctatccatttgttcttactctctagggagacaatcttccaaaacagttttgggggggtcttctaaagctttcaaattggaagtaactttattcaactagagttgaataaaagaagggcaaaaataatctcacagagcttggaactgctgatagcccttactgagggcaaaagatggctatattgttagctatactcctaccaaagcaagcaaggagataggattatagataatttcacggacatttggaaataacattggtgattatacagacaagaataaactcacttcaagctggtctgttttaataaattttcaacgtaattgtctatttttttccctcccatctgcaacagaatacatttttttcagcctttatctagatgaggtaaagggaatcattcttatggtgctcttggagagtttcaggcctgtgcatgtgtgtacagcaggaggtaatatgctataatgtctgctgtaatatatttgcacagtagatgctatggatcattctgagctcagggtccagactttattcttattcccagaattttgtgttacgtttttacctcctaacatatgacacttcatcttatattaaggaaggtttagaatatctaatacgacttgaattcatttgttactaagccttctcaggcaagctgtatactagttactggtctccactgccatgccttttcaaggttcccatggtccagaatgatgtttgattcttaatttttctgtcccttttataatttgttttaatgattttgctacatttggaattcaataaaaaatgtgaacaataata

SEQ ID NO: 116143 - DNA, 549 bp, Homo sapiens
  Payload ID: 2653
  Gene Symbol: CDC23
  Gene Name: cell division cycle 23
  ENST ID: ENST00000483961
  CDS Start-End: 12-341
gagtcgggaaaatggctgcgagtacctccatggtcccggtggctgtgacggcggcagtggcgcctgtcctgtccataaacagcgatttctcagatttgcgggaaattaaaaagcaactgctgcttattgcgggccttacccgggagcggggcctactacacagtagcaaatggaagatgcccaggatatggatgcctataccctggccaaggcctactttgacgttaaagagtatgatcgggcagcacatttcctgcatggctgcaatagcaagaaagcctattttctgtatatgtattccagatatctggccccctggaaaaaggacaagtgaaaaatgaggcgcttagagaattgagagtggagctcagcaaaaaacaccaagctcgagaacttgatggatttggactttatctgtatggtgtggtgcttcgaaaactggacttggttaaagaggccattgatgtgtttgtggaagctactcatgttttgcccttgcattggggagcctggttagaactctgtaacctgatcacagacaaagagatg

SEQ ID NO: 116144 - DNA, 584 bp, Homo sapiens
  Payload ID: 2653
  Gene Symbol: CDC23
  Gene Name: cell division cycle 23
  ENST ID: ENST00000511383
  CDS Start-End: 1-403
gagtacctccatggtcccggtggctgtgacggcggcagtggcgcctgtcctgtccataaacagcgatttctcagatttgcgggaaattaaaaagcaactgctgcttattgcgggccttacccgggagcggggcctactacacagtagcaaatggtcggcggagttggctttctctctccctgcattgcctctggccgagctgcaaccgcctccgcctattacagagatgcccaggatatggatgcctataccctggccaaggcctactttgacgttaaagagtatgatcgggcagcacatttcctgcatggctgcaatagcaagaaagcctattttctgtatatgtattccagatatctgtctggagaaaaaaagaaggacgatgaaacagttgatagcttaggccccctggaaaaaggacaagtgaaaaatgaggcgcttagagaattgagagtggagctcagcaaaaaacaccaagctcgagaacttgatggatttggactttatctgtatggtgtggtgcttcgaaaactggacttggttaaagaggccattgatgtgtttgtggaagctactcatgtttt

SEQ ID NO: 116145 - DNA, 455 bp, Homo sapiens
  Payload ID: 2653
  Gene Symbol: CDC23
  Gene Name: cell division cycle 23
  ENST ID: ENST00000505120
  CDS Start-End: 12-383
gagtcgggaaaatggctgcgagtacctccatggtcccggtggctgtgacggcggcagtggcgcctgtcctgtccataaacagcgatttctcagatttgcgggaaattaaaaagcaactgctgcttattgcgggccttacccgggagcggggcctactacacagtagcaaatggtcggcggagttggctttctctctccctgcattgcctctggccgagctgcaaccgcctccgcctattacagagatgcccaggatatggatgcctataccctggccaaggcctactttgacgttaaagagtatgatcgggcagcacatttcctgcatggctgcaatagcaagaaagcctattttctgtatatgtattccagatatctggtgagggccattttaaaatgtcattctgcctttagtgaaacatccatatttagaaccaatggaaaagttaaatctt

SEQ ID NO: 116146 - DNA, 3783 bp, Homo sapiens
  Payload ID: 2654
  Gene Symbol: CDC25A
  Gene Name: cell division cycle 25A
  Uniprot ID: P30304
  ENST ID: ENST00000302506
  CDS Start-End: 410-1984
gtcggcttggttttctgctacccggagctgggcaagcgggtgggagaacagcgaagacagcgtgagcctgggccgttgcctcgaggctctcgcccggcttctcttgccgacccgccacgtttgtttggatttaatcttcaggttgccggcgcccgcccgcccgctggcctcgcggtgtgagagggaagcacccgtgcctgtggctggtggctggcgcctggagggtccgcacacccgcccggccgcgccgcttgcccgcggcagccgcgtccctgaaccgcggagtcgtgtttgtgtttgacccgcgggcgccggtggcgcgcggccgaggccggtgtcggcggggcggggcggtcgcggcggaggcagaggaagagggagcgggagctctgcgaggccgggcgccgccatggaactgggcccggagcccccgcaccgccgccgcctgctcttcgcctgcagcccccctcccgcgtcgcagcccgtcgtgaaggcgctatttggcgcttcagccgccgggggactgtcgcctgtcaccaacctgaccgtcactatggaccagctgcagggtctgggcagtgattatgagcaaccactggaggtgaagaacaacagtaatctgcagagaatgggctcctccgagtcaacagattcaggtttctgtctagattctcctgggccattggacagtaaagaaaaccttgaaaatcctatgagaagaatacattccctacctcagaagctgttgggatgtagtccagctctgaagaggagccattctgattctcttgaccatgacatctttcagctcatcgacccagatgagaacaaggaaaatgaagcctttgagtttaagaagccagtaagacctgtatctcgtggctgcctgcactctcatggactccaggagggtaaagatctcttcacacagaggcagaactctgccccagctcggatgctttcctcaaatgaaagagatagcagtgaaccagggaatttcattcctctttttacaccccagtcacctgtgacagccactttgtctgatgaggatgatggcttcgtggaccttctcgatggagagaatctgaagaatgaggaggagaccccctcgtgcatggcaagcctctggacagctcctctcgtcatgagaactacaaaccttgacaaccgatgcaagctgtttgactccccttccctgtgtagctccagcactcggtcagtgttgaagagaccagaacgatctcaagaggagtctccacctggaagtacaaagaggaggaagagcatgtctggggccagccccaaagagtcaactaatccagagaaggcccatgagactcttcatcagtctttatccctggcatcttcccccaaaggaaccattgagaacattttggacaatgacccaagggaccttataggagacttctccaagggttatctctttcatacagttgctgggaaacatcaggatttaaaatacatctctccagaaattatggcatctgttttgaatggcaagtttgccaacctcattaaagagtttgttatcatcgactgtcgatacccatatgaatacgagggaggccacatcaagggtgcagtgaacttgcacatggaagaagaggttgaagacttcttattgaagaagcccattgtacctactgatggcaagcgtgtcattgttgtgtttcactgcgagttttcttctgagagaggtccccgcatgtgccggtatgtgagagagagagatcgcctgggtaatgaataccccaaactccactaccctgagctgtatgtcctgaaggggggatacaaggagttctttatgaaatgccagtcttactgtgagccccctagctaccggcccatgcaccacgaggactttaaagaagacctgaagaagttccgcaccaagagccggacctgggcaggggagaagagcaagagggagatgtacagtcgtctgaagaagctctgagggcggcaggaccagccagcagcagcccaagcttccctccatccccctttaccctctttgctgcagagaaacttaagcaaaggggacagctgtgtgacatttggagagggggcctgggacttccatgccttaaacctacctcccacactcccaaggttggagcccagggcatcttgctggctacgcctcttctgtccctgttagacgtcctccgtccatatcagaactgtgccacaatgcagttctgagcaccgtgtcaagctgctctgagccacagtgggatgaaccagccggggccttatcgggctccagccatctcatgaggggagaggagacggaggggagtagagaagttacacagaaatgctgctggccaaatagcaaagacaacctgggaaggaaaggtctttgtgggataatccatatgtttaatttattcaacttcatcaatcactttattttatttttttttctaactcctggagacttattttactgcttcattaggttgaaatactgccattctaggtagggttttattatcccagggactacctcggcttttaatttaaaaaaaaaaaagaagtgggtaagaaaatgcaaacctgttataagttatcggacagaaagctaggtgctctgtcacccccaggaggcgctgtggtactggggctgctgctatttaagccaagaactgaggtcctggtgagagcgttggacccaggcttggctgcctgacataagctaaatctcccagacccaccactggctaccgatatctatttggtgggaggtgtggccctgttcttcctcaccccagttccatgacattggctggtataggagccacagtcaggaaagcacttgaggcagcatctgttgggccacccccggctcagtgctggaatgttgcagtgtaggtttcccagggaaggggggtgggggtaggtgggctccacaggatgggggaggagcatgtccactgagtatcttccttatgttgctgtgatattgatagcttttattttctaatttttaaaaaatggtcatattatgagtcaaagagtatcaaatcagtgttggatggaccacccaagggtgaggagaggggctggaagccctgggcattaggagaagggagtgggtgctggcatggacatgactggatagaattttctcaggagggagcttggtggattttgaaggtaaaactttctgggtttatcatgttttaattttagagacagggagtgatgaatcatcaccggttgtccccttatctaactccataaaagtgggaatttcaaaagaacacctcatccaaggagctggggcagacttcattgattctagagagacctgtttcagtgcctactcatccctgccctctggtgccagcctccttaccatcacggcttcactgaggtgtaggtgggtttttcttaaacaggagacagtctctcccctcttacctcaacttcttggggtgggaatcagtgatactggagatggctagttgctgtgttacgggtttgagttacatttggctataaaacaatcttgttgggaaaaatgtgggggagaggacttcttcctacacgcgcattgagacagattccaactggttaatgatattgtttgtaagaaagagattctgttggttgactgcctaaagagaaaggtgggatggccttcagattataccagcttagctagcattactaaccaactgttggaagctctgaaaataaaagatcttgaacccatgctctctgcctagttcttgatggatttaagga

SEQ ID NO: 116147 - DNA, 3663 bp, Homo sapiens
  Payload ID: 2654
  Gene Symbol: CDC25A
  Gene Name: cell division cycle 25A
  Uniprot ID: P30304
  ENST ID: ENST00000351231
  CDS Start-End: 410-1864
gtcggcttggttttctgctacccggagctgggcaagcgggtgggagaacagcgaagacagcgtgagcctgggccgttgcctcgaggctctcgcccggcttctcttgccgacccgccacgtttgtttggatttaatcttcaggttgccggcgcccgcccgcccgctggcctcgcggtgtgagagggaagcacccgtgcctgtggctggtggctggcgcctggagggtccgcacacccgcccggccgcgccgcttgcccgcggcagccgcgtccctgaaccgcggagtcgtgtttgtgtttgacccgcgggcgccggtggcgcgcggccgaggccggtgtcggcggggcggggcggtcgcggcggaggcagaggaagagggagcgggagctctgcgaggccgggcgccgccatggaactgggcccggagcccccgcaccgccgccgcctgctcttcgcctgcagcccccctcccgcgtcgcagcccgtcgtgaaggcgctatttggcgcttcagccgccgggggactgtcgcctgtcaccaacctgaccgtcactatggaccagctgcagggtctgggcagtgattatgagcaaccactggaggtgaagaacaacagtaatctgcagagaatgggctcctccgagtcaacagattcaggtttctgtctagattctcctgggccattggacagtaaagaaaaccttgaaaatcctatgagaagaatacattccctacctcagaagctgttgggatgtagtccagctctgaagaggagccattctgattctcttgaccatgacatctttcagctcatcgacccagatgagaacaaggaaaatctttcctcaaatgaaagagatagcagtgaaccagggaatttcattcctctttttacaccccagtcacctgtgacagccactttgtctgatgaggatgatggcttcgtggaccttctcgatggagagaatctgaagaatgaggaggagaccccctcgtgcatggcaagcctctggacagctcctctcgtcatgagaactacaaaccttgacaaccgatgcaagctgtttgactccccttccctgtgtagctccagcactcggtcagtgttgaagagaccagaacgatctcaagaggagtctccacctggaagtacaaagaggaggaagagcatgtctggggccagccccaaagagtcaactaatccagagaaggcccatgagactcttcatcagtctttatccctggcatcttcccccaaaggaaccattgagaacattttggacaatgacccaagggaccttataggagacttctccaagggttatctctttcatacagttgctgggaaacatcaggatttaaaatacatctctccagaaattatggcatctgttttgaatggcaagtttgccaacctcattaaagagtttgttatcatcgactgtcgatacccatatgaatacgagggaggccacatcaagggtgcagtgaacttgcacatggaagaagaggttgaagacttcttattgaagaagcccattgtacctactgatggcaagcgtgtcattgttgtgtttcactgcgagttttcttctgagagaggtccccgcatgtgccggtatgtgagagagagagatcgcctgggtaatgaataccccaaactccactaccctgagctgtatgtcctgaaggggggatacaaggagttctttatgaaatgccagtcttactgtgagccccctagctaccggcccatgcaccacgaggactttaaagaagacctgaagaagttccgcaccaagagccggacctgggcaggggagaagagcaagagggagatgtacagtcgtctgaagaagctctgagggcggcaggaccagccagcagcagcccaagcttccctccatccccctttaccctctttgctgcagagaaacttaagcaaaggggacagctgtgtgacatttggagagggggcctgggacttccatgccttaaacctacctcccacactcccaaggttggagcccagggcatcttgctggctacgcctcttctgtccctgttagacgtcctccgtccatatcagaactgtgccacaatgcagttctgagcaccgtgtcaagctgctctgagccacagtgggatgaaccagccggggccttatcgggctccagccatctcatgaggggagaggagacggaggggagtagagaagttacacagaaatgctgctggccaaatagcaaagacaacctgggaaggaaaggtctttgtgggataatccatatgtttaatttattcaacttcatcaatcactttattttatttttttttctaactcctggagacttattttactgcttcattaggttgaaatactgccattctaggtagggttttattatcccagggactacctcggcttttaatttaaaaaaaaaaaagaagtgggtaagaaaatgcaaacctgttataagttatcggacagaaagctaggtgctctgtcacccccaggaggcgctgtggtactggggctgctgctatttaagccaagaactgaggtcctggtgagagcgttggacccaggcttggctgcctgacataagctaaatctcccagacccaccactggctaccgatatctatttggtgggaggtgtggccctgttcttcctcaccccagttccatgacattggctggtataggagccacagtcaggaaagcacttgaggcagcatctgttgggccacccccggctcagtgctggaatgttgcagtgtaggtttcccagggaaggggggtgggggtaggtgggctccacaggatgggggaggagcatgtccactgagtatcttccttatgttgctgtgatattgatagcttttattttctaatttttaaaaaatggtcatattatgagtcaaagagtatcaaatcagtgttggatggaccacccaagggtgaggagaggggctggaagccctgggcattaggagaagggagtgggtgctggcatggacatgactggatagaattttctcaggagggagcttggtggattttgaaggtaaaactttctgggtttatcatgttttaattttagagacagggagtgatgaatcatcaccggttgtccccttatctaactccataaaagtgggaatttcaaaagaacacctcatccaaggagctggggcagacttcattgattctagagagacctgtttcagtgcctactcatccctgccctctggtgccagcctccttaccatcacggcttcactgaggtgtaggtgggtttttcttaaacaggagacagtctctcccctcttacctcaacttcttggggtgggaatcagtgatactggagatggctagttgctgtgttacgggtttgagttacatttggctataaaacaatcttgttgggaaaaatgtgggggagaggacttcttcctacacgcgcattgagacagattccaactggttaatgatattgtttgtaagaaagagattctgttggttgactgcctaaagagaaaggtgggatggccttcagattataccagcttagctagcattactaaccaactgttggaagctctgaaaataaaagatcttgaacccatgctctctgcctagttcttgatggatttaagga

SEQ ID NO: 116148 - DNA, 730 bp, Homo sapiens
  Payload ID: 2654
  Gene Symbol: CDC25A
  Gene Name: cell division cycle 25A
  ENST ID: ENST00000437972
  CDS Start-End: 302-730
ccgcgaaaggccggcctggctgcgacagcctgggttgccggcgcccgcccgcccgctggcctcgcggtgtgagagggaagcacccgtgcctgtggctggtggctggcgcctggagggtccgcacacccgcccggccgcgccgcttgcccgcggcagccgcgtccctgaaccgcggagtcgtgtttgtgtttgacccgcgggcgccggtggcgcgcggccgaggccggtgtcggcggggcggggcggtcgcggcggaggcagaggaagagggagcgggagctctgcgaggccgggcgccgccatggaactgggcccggagcccccgcaccgccgccgcctgctcttcgcctgcagcccccctcccgcgtcgcagcccgtcgtgaaggcgctatttggcgcttcagccgccgggggactgtcgcctgtcaccaacctgaccgtcactatggaccagctgcagggtctgggcagtgattatgagcaaccactggaggtgaagaacaacagtaatctgcagagaatgggctcctccgagtcaacagattcaggtttctgtctagattctcctgggccattggacagtaaagaaaaccttgaaaatcctatgagaagaatacattccctacctcagaagctgttgggatgtagtccagctctgaagaggagccattctgattctcttgaccatgacatctttcagctcatcgacccagatgagaacaaggaaaat

SEQ ID NO: 116149 - DNA, 777 bp, Homo sapiens
  Payload ID: 2654
  Gene Symbol: CDC25A
  Gene Name: cell division cycle 25A
  ENST ID: ENST00000443342
  CDS Start-End: 20-777
tgcgaggccgggcgccgccatggaactgggcccggagcccccgcaccgccgccgcctgctcttcgcctgcagcccccctcccgcgtcgcagcccgtcgtgaaggcgctatttggcgcttcagccgccgggggactgtcgcctgtcaccaacctgaccgtcactatggaccagctgcagggtctgggcagtgattatgagcaaccactggaggtgaagaacaacagtaatctgcagagaatgggctcctccgagtcaacagattcaggtttctgtctagattctcctgggccattggacagtaaagaaaaccttgaaaatcctatgagaagaatacattccctacctaagctgttgggatgtagtccagctctgaagaggagccattctgattctcttgaccatgacatctttcagctcatcgacccagatgagaacaaggaaaatgaagcctttgagtttaagaagccagtaagacctgtatctcgtggctgcctgcactctcatggactccaggagggtaaagatctcttcacacagaggcagaactctgccccagctcggatgctttcctcaaatgaaagagatagcagtgaaccagggaatttcattcctctttttacaccccagtcacctgtgacagccactttgtctgatgaggatgatggcttcgtggaccttctcgatggagagaatctgaagaatgaggaggagaccccctcgtgcatggcaagcctctggacagctcctctcgtcatgagaactacaaaccttgtgag

SEQ ID NO: 116150 - DNA, 3597 bp, Homo sapiens
  Payload ID: 2655
  Gene Symbol: CDC25B
  Gene Name: cell division cycle 25B
  Uniprot ID: P30305
  ENST ID: ENST00000245960
  CDS Start-End: 698-2440
gcgtgaccttgattgagttaatgaacttcacgcctcagcgtccaggtctgtaaaatggggtgtctaacgcagaccgtacagcccagctgggtttagcaaacttccgggagccagttggagcctctccccatccctagcggtgatcccaggtgacgacatgccgcggggggtcctgcggaggccaccctagggcgttgctgctgcctttgggagtgtggagctccaaaccatgtcgcgagaggcggattttgggaggccgggatcctcgcgccagggggatgtgcgagggtgtgggataaatcttaattcctccggcccacccaaagcctggaaatccagcctccgcgcctcttgccctgcgggccccgccctcagtcccgccctcatctaacccgctaccccattggtggcgtccggcggcgcggctgctgttatttttcgaatatataaggaggtggaagtggcagctgcaactagaggcttccctggctggtgcctgagcccggcgtccctcgccccccgccctccccgcatccctctcctccctcgcgcctggccctgtggctcttcctccctccctccttccccccccccccacccctcgcccgctgcctccctcggcccagccagctgtgccggcgtttgttggctgccctgcgcccggccctccagccagccttctgccggccccgccgcgatggaggtgccccagccggagcccgcgccaggctcggctctcagtccagcaggcgtgtgcggtggcgcccagcgtccgggccacctcccgggcctcctgctgggatctcatggcctcctggggtccccggtgcgggcggccgcttcctcgccggtcaccaccctcacccagaccatgcacgacctcgccgggctcggcagcgaaaccccaaagagtcaggtagggaccctgctcttccgcagccgcagccgcctgacgcacctatccctgtctcgacgggcatccgaatcctccctgtcgtctgaatcctccgaatcttctgatgcaggtctctgcatggattcccccagccctatggacccccacatggcggagcagacgtttgaacaggccatccaggcagccagccggatcattcgaaacgagcagtttgccatcagacgcttccagtctatgccggtgaggctgctgggccacagccccgtgcttcggaacatcaccaactcccaggcgcccgacggccggaggaagagcgaggcgggcagtggagctgccagcagctctggggaagacaaggagaatgatggatttgtcttcaagatgccatggaagcccacacatcccagctccacccatgctctggcagagtgggccagccgcagggaagcctttgcccagagacccagctcggcccccgacctgatgtgtctcagtcctgaccggaagatggaagtggaggagctcagccccctggccctaggtcgcttctctctgacccctgcagagggggatactgaggaagatgatggatttgtggacatcctagagagtgacttaaaggatgatgatgcagttcccccaggcatggagagtctcattagtgccccactggtcaagaccttggaaaaggaagaggaaaaggacctcgtcatgtacagcaagtgccagcggctcttccgctctccgtccatgccctgcagcgtgatccggcccatcctcaagaggctggagcggccccaggacagggacacgcccgtgcagaataagcggaggcggagcgtgacccctcctgaggagcagcaggaggctgaggaacctaaagcccgcgtcctccgctcaaaatcactgtgtcacgatgagatcgagaacctcctggacagtgaccaccgagagctgattggagattactctaaggccttcctcctacagacagtagacggaaagcaccaagacctcaagtacatctcaccagaaacgatggtggccctattgacgggcaagttcagcaacatcgtggataagtttgtgattgtagactgcagatacccctatgaatatgaaggcgggcacatcaagactgcggtgaacttgcccctggaacgcgacgccgagagcttcctactgaagagccccatcgcgccctgtagcctggacaagagagtcatcctcattttccactgtgaattctcatctgagcgtgggccccgcatgtgccgtttcatcagggaacgagaccgtgctgtcaacgactaccccagcctctactaccctgagatgtatatcctgaaaggcggctacaaggagttcttccctcagcacccgaacttctgtgaaccccaggactaccggcccatgaaccacgaggccttcaaggatgagctaaagaccttccgcctcaagactcgcagctgggctggggagcggagccggcgggagctctgtagccggctgcaggaccagtgaggggcctgcgccagtcctgctacctcccttgcctttcgaggcctgaagccagctgccctatgggcctgccgggctgagggcctgctggaggcctcaggtgctgtccatgggaaagatggtgtgggtgtcctgcctgtctgccccagcccagattcccctgtgtcatcccatcattttccatatcctggtgccccccacccctggaagagcccagtctgttgagttagttaagttgggttaataccagcttaaaggcagtattttgtgtcctccaggagcttcttgtttccttgttagggttaacccttcatcttcctgtgtcctgaaacgctcctttgtgtgtgtgtcagctgaggctgggggagagccgtggtccctgaggatgggtcagagctaaactccttcctggcctgagagtcagctctctgccctgtgtacttcccgggccagggctgcccctaatctctgtaggaaccgtggtatgtctgccatgttgcccctttctcttttcccctttcctgtcccaccatacgagcacctccagcctgaacagaagctcttactctttcctatttcagtgttacctgtgtgcttggtctgtttgactttacgcccatctcaggacacttccgtagactgtttaggttcccctgtcaaatatcagttacccactcggtcccagttttgttgccccagaaagggatgttattatccttgggggctcccagggcaagggttaaggcctgaatcatgagcctgctggaagcccagcccctactgctgtgaaccctggggcctgactgctcagaacttgctgctgtcttgttgcggatggatggaaggttggatggatgggtggatggccgtggatggccgtggatgcgcagtgccttgcatacccaaaccaggtgggagcgttttgttgagcatgacagcctgcagcaggaatatatgtgtgcctatttgtgtggacaaaaatatttacacttagggtttggagctattcaagaggaaatgtcacagaagcagctaaaccaaggactgagcaccctctggattctgaatctcaagatgggggcagggctgtgcttgaaggccctgctgagtcatctgttagggccttggttcaataaagcactgagcaagttgagaaacca

SEQ ID NO: 116151 - DNA, 3071 bp, Homo sapiens
  Payload ID: 2655
  Gene Symbol: CDC25B
  Gene Name: cell division cycle 25B
  ENST ID: ENST00000344256
  CDS Start-End: 361-1911
ggcgagcggggcggagcgggcggagcgggatctcgcgggaagcgcggggacgcccggcgcctcctccccgccctccgcgcccacccccttcccgccgccgggacataccgcgggggggcgctgcggcctgctggacctgcccgtgctgcggcctccggcgacccggcagcgacgcgggcggggacgcggtgcatcgctactgcgcccggcggacagcgacttgctgctcaaaaagaataagaaccagggtttttgtttgttttttttttttttaattaaggtaaaaataacgcacttttttttttgcggaacctgaaaaattcaagaagttgaaaaacgcttttcacgtcacctggagagatgcacagcgaaaccccaaagagtcaggtagggaccctgctcttccgcagccgcagccgcctgacgcacctatccctgtctcgacgggcatccgaatcctccctgtcgtctgaatcctccgaatcttctgatgcaggtctctgcatggattcccccagccctatggacccccacatggcggagcagacgtttgaacaggccatccaggcagccagccggatcattcgaaacgagcagtttgccatcagacgcttccagtctatgccggtgaggctgctgggccacagccccgtgcttcggaacatcaccaactcccaggcgcccgacggccggaggaagagcgaggcgggcagtggagctgccagcagctctggggaagacaaggagaatgatggatttgtcttcaagatgccatggaagcccacacatcccagctccacccatgctctggcagagtgggccagccgcagggaagcctttgcccagagacccagctcggcccccgacctgatgtgtctcagtcctgaccggaagatggaagtggaggagctcagccccctggccctaggtcgcttctctctgacccctgcagagggggatactgaggaagatgatggatttgtggacatcctagagagtgacttaaaggatgatgatgcagttcccccaggcatggagagtctcattagtgccccactggtcaagaccttggaaaaggaagaggaaaaggacctcgtcatgtacagcaagtgccagcggctcttccgctctccgtccatgccctgcagcgtgatccggcccatcctcaagaggctggagcggccccaggacagggacacgcccgtgcagaataagcggaggcggagcgtgacccctcctgaggagcagcaggaggctgaggaacctaaagcccgcgtcctccgctcaaaatcactgtgtcacgatgagatcgagaacctcctggacagtgaccaccgagagctgattggagattactctaaggccttcctcctacagacagtagacggaaagcaccaagacctcaagtacatctcaccagaaacgatggtggccctattgacgggcaagttcagcaacatcgtggataagtttgtgattgtagactgcagatacccctatgaatatgaaggcgggcacatcaagactgcggtgaacttgcccctggaacgcgacgccgagagcttcctactgaagagccccatcgcgccctgtagcctggacaagagagtcatcctcattttccactgtgaattctcatctgagcgtgggccccgcatgtgccgtttcatcagggaacgagaccgtgctgtcaacgactaccccagcctctactaccctgagatgtatatcctgaaaggcggctacaaggagttcttccctcagcacccgaacttctgtgaaccccaggactaccggcccatgaaccacgaggccttcaaggatgagctaaagaccttccgcctcaagactcgcagctgggctggggagcggagccggcgggagctctgtagccggctgcaggaccagtgaggggcctgcgccagtcctgctacctcccttgcctttcgaggcctgaagccagctgccctatgggcctgccgggctgagggcctgctggaggcctcaggtgctgtccatgggaaagatggtgtgggtgtcctgcctgtctgccccagcccagattcccctgtgtcatcccatcattttccatatcctggtgccccccacccctggaagagcccagtctgttgagttagttaagttgggttaataccagcttaaaggcagtattttgtgtcctccaggagcttcttgtttccttgttagggttaacccttcatcttcctgtgtcctgaaacgctcctttgtgtgtgtgtcagctgaggctgggggagagccgtggtccctgaggatgggtcagagctaaactccttcctggcctgagagtcagctctctgccctgtgtacttcccgggccagggctgcccctaatctctgtaggaaccgtggtatgtctgccatgttgcccctttctcttttcccctttcctgtcccaccatacgagcacctccagcctgaacagaagctcttactctttcctatttcagtgttacctgtgtgcttggtctgtttgactttacgcccatctcaggacacttccgtagactgtttaggttcccctgtcaaatatcagttacccactcggtcccagttttgttgccccagaaagggatgttattatccttgggggctcccagggcaagggttaaggcctgaatcatgagcctgctggaagcccagcccctactgctgtgaaccctggggcctgactgctcagaacttgctgctgtcttgttgcggatggatggaaggttggatggatgggtggatggccgtggatggccgtggatgcgcagtgccttgcatacccaaaccaggtgggagcgttttgttgagcatgacagcctgcagcaggaatatatgtgtgcctatttgtgtggacaaaaatatttacacttagggtttggagctattcaagaggaaatgtcacagaagcagctaaaccaaggactgagcaccctctggattctgaatctcaagatgggggcagggctgtgcttgaaggccctgctgagtcatctgttagggccttggttcaataaagcactgagcaagttgagaaaccagca

SEQ ID NO: 116152 - DNA, 1978 bp, Homo sapiens
  Payload ID: 2655
  Gene Symbol: CDC25B
  Gene Name: cell division cycle 25B
  Uniprot ID: P30305
  ENST ID: ENST00000340833
  CDS Start-End: 102-1721
acccctcgcccgctgcctccctcggcccagccagctgtgccggcgtttgttggctgccctgcgcccggccctccagccagccttctgccggccccgccgcgatggaggtgccccagccggagcccgcgccaggctcggctctcagtccagcaggcgtgtgcggtggcgcccagcgtccgggccacctcccgggcctcctgctgggatctcatggcctcctggggtccccggtgcgggcggccgcttcctcgccggtcaccaccctcacccagaccatgcacgacctcgccgggctcggcagcgaaaccccaaagagtcaggtagggaccctgctcttccgcagccgcagccgcctgacgcacctatccctgtctcgacgggcatccgaatcctccctgtcgtctgaatcctccgaatcttctgatgcaggtctctgcatggattcccccagccctatggacccccacatggcggagcagacgtttgaacaggccatccaggcagccagccggatcattcgaaacgagcagtttgccatcagacgcttccagtctatgccggatggatttgtcttcaagatgccatggaagcccacacatcccagctccacccatgctctggcagagtgggccagccgcagggaagcctttgcccagagacccagctcggcccccgacctgatgtgtctcagtcctgaccggaagatggaagtggaggagctcagccccctggccctaggtcgcttctctctgacccctgcagagggggatactgaggaagatgatggatttgtggacatcctagagagtgacttaaaggatgatgatgcagttcccccaggcatggagagtctcattagtgccccactggtcaagaccttggaaaaggaagaggaaaaggacctcgtcatgtacagcaagtgccagcggctcttccgctctccgtccatgccctgcagcgtgatccggcccatcctcaagaggctggagcggccccaggacagggacacgcccgtgcagaataagcggaggcggagcgtgacccctcctgaggagcagcaggaggctgaggaacctaaagcccgcgtcctccgctcaaaatcactgtgtcacgatgagatcgagaacctcctggacagtgaccaccgagagctgattggagattactctaaggccttcctcctacagacagtagacggaaagcaccaagacctcaagtacatctcaccagaaacgatggtggccctattgacgggcaagttcagcaacatcgtggataagtttgtgattgtagactgcagatacccctatgaatatgaaggcgggcacatcaagactgcggtgaacttgcccctggaacgcgacgccgagagcttcctactgaagagccccatcgcgccctgtagcctggacaagagagtcatcctcattttccactgtgaattctcatctgagcgtgggccccgcatgtgccgtttcatcagggaacgagaccgtgctgtcaacgactaccccagcctctactaccctgagatgtatatcctgaaaggcggctacaaggagttcttccctcagcacccgaacttctgtgaaccccaggactaccggcccatgaaccacgaggccttcaaggatgagctaaagaccttccgcctcaagactcgcagctgggctggggagcggagccggcgggagctctgtagccggctgcaggaccagtgaggggcctgcgccagtcctgctacctcccttgcctttcgaggcctgaagccagctgccctatgggcctgccgggctgagggcctgctggaggcctcaggtgctgtccatgggaaagatggtgtgggtgtcctgcctgtctgccccagcccagattcccctgtgtcatcccatcattttccatatcctggtgccccccacccctggaagagcccagtctgttgagttagttaagttgggttaataccagcttaaaggca

SEQ ID NO: 116153 - DNA, 2990 bp, Homo sapiens
  Payload ID: 2655
  Gene Symbol: CDC25B
  Gene Name: cell division cycle 25B
  ENST ID: ENST00000379598
  CDS Start-End: 361-1830
ggcgagcggggcggagcgggcggagcgggatctcgcgggaagcgcggggacgcccggcgcctcctccccgccctccgcgcccacccccttcccgccgccgggacataccgcgggggggcgctgcggcctgctggacctgcccgtgctgcggcctccggcgacccggcagcgacgcgggcggggacgcggtgcatcgctactgcgcccggcggacagcgacttgctgctcaaaaagaataagaaccagggtttttgtttgttttttttttttttaattaaggtaaaaataacgcacttttttttttgcggaacctgaaaaattcaagaagttgaaaaacgcttttcacgtcacctggagagatgcacagcgaaaccccaaagagtcaggtagggaccctgctcttccgcagccgcagccgcctgacgcacctatccctgtctcgacgggcatccgaatcctccctgtcgtctgaatcctccgaatcttctgatgcaggtctctgcatggattcccccagccctatggacccccacatggcggagcagacgtttgaacaggccatccaggcagccagccggatcattcgaaacgagcagtttgccatcagacgcttccagtctatgccggtgaggctgctgggccacagccccgtgcttcggaacatcaccaactcccaggcgcccgacggccggaggaagagcgaggcgggcagtggagctgccagcagctctggggaagacaaggagaatgatggatttgtcttcaagatgccatggaagcccacacatcccagctccacccatgctctggcagagtgggccagccgcagggaagcctttgcccagagacccagctcggcccccgacctgatgtgtctcagtcctgaccggaagatggaagtggaggagctcagccccctggccctaggtcgcttctctctgacccctgcagagggggatactgaggaagatgatggatttgtggacatcctagagagtgacttaaaggacctcgtcatgtacagcaagtgccagcggctcttccgctctccgtccatgccctgcagcgtgatccggcccatcctcaagaggctggagcggccccaggacagggacacgcccgtgcagaataagcggaggcggagcgtgacccctcctgaggagcagcaggaggctgaggaacctaaagcccgcgtcctccgctcaaaatcactgtgtcacgatgagatcgagaacctcctggacagtgaccaccgagagctgattggagattactctaaggccttcctcctacagacagtagacggaaagcaccaagacctcaagtacatctcaccagaaacgatggtggccctattgacgggcaagttcagcaacatcgtggataagtttgtgattgtagactgcagatacccctatgaatatgaaggcgggcacatcaagactgcggtgaacttgcccctggaacgcgacgccgagagcttcctactgaagagccccatcgcgccctgtagcctggacaagagagtcatcctcattttccactgtgaattctcatctgagcgtgggccccgcatgtgccgtttcatcagggaacgagaccgtgctgtcaacgactaccccagcctctactaccctgagatgtatatcctgaaaggcggctacaaggagttcttccctcagcacccgaacttctgtgaaccccaggactaccggcccatgaaccacgaggccttcaaggatgagctaaagaccttccgcctcaagactcgcagctgggctggggagcggagccggcgggagctctgtagccggctgcaggaccagtgaggggcctgcgccagtcctgctacctcccttgcctttcgaggcctgaagccagctgccctatgggcctgccgggctgagggcctgctggaggcctcaggtgctgtccatgggaaagatggtgtgggtgtcctgcctgtctgccccagcccagattcccctgtgtcatcccatcattttccatatcctggtgccccccacccctggaagagcccagtctgttgagttagttaagttgggttaataccagcttaaaggcagtattttgtgtcctccaggagcttcttgtttccttgttagggttaacccttcatcttcctgtgtcctgaaacgctcctttgtgtgtgtgtcagctgaggctgggggagagccgtggtccctgaggatgggtcagagctaaactccttcctggcctgagagtcagctctctgccctgtgtacttcccgggccagggctgcccctaatctctgtaggaaccgtggtatgtctgccatgttgcccctttctcttttcccctttcctgtcccaccatacgagcacctccagcctgaacagaagctcttactctttcctatttcagtgttacctgtgtgcttggtctgtttgactttacgcccatctcaggacacttccgtagactgtttaggttcccctgtcaaatatcagttacccactcggtcccagttttgttgccccagaaagggatgttattatccttgggggctcccagggcaagggttaaggcctgaatcatgagcctgctggaagcccagcccctactgctgtgaaccctggggcctgactgctcagaacttgctgctgtcttgttgcggatggatggaaggttggatggatgggtggatggccgtggatggccgtggatgcgcagtgccttgcatacccaaaccaggtgggagcgttttgttgagcatgacagcctgcagcaggaatatatgtgtgcctatttgtgtggacaaaaatatttacacttagggtttggagctattcaagaggaaatgtcacagaagcagctaaaccaaggactgagcaccctctggattctgaatctcaagatgggggcagggctgtgcttgaaggccctgctgagtcatctgttagggccttggttcaataaagcactgagcaagttgagaaaccagca

SEQ ID NO: 116154 - DNA, 3096 bp, Homo sapiens
  Payload ID: 2655
  Gene Symbol: CDC25B
  Gene Name: cell division cycle 25B
  Uniprot ID: P30305
  ENST ID: ENST00000439880
  CDS Start-End: 242-1942
ggaagtggcagctgcaactagaggcttccctggctggtgcctgagcccggcgtccctcgccccccgccctccccgcatccctctcctccctcgcgcctggccctgtggctcttcctccctccctccttccccccccccccacccctcgcccgctgcctccctcggcccagccagctgtgccggcgtttgttggctgccctgcgcccggccctccagccagccttctgccggccccgccgcgatggaggtgccccagccggagcccgcgccaggctcggctctcagtccagcaggcgtgtgcggtggcgcccagcgtccgggccacctcccgggcctcctgctgggatctcatggcctcctggggtccccggtgcgggcggccgcttcctcgccggtcaccaccctcacccagaccatgcacgacctcgccgggctcggcagccgcagccgcctgacgcacctatccctgtctcgacgggcatccgaatcctccctgtcgtctgaatcctccgaatcttctgatgcaggtctctgcatggattcccccagccctatggacccccacatggcggagcagacgtttgaacaggccatccaggcagccagccggatcattcgaaacgagcagtttgccatcagacgcttccagtctatgccggtgaggctgctgggccacagccccgtgcttcggaacatcaccaactcccaggcgcccgacggccggaggaagagcgaggcgggcagtggagctgccagcagctctggggaagacaaggagaatgatggatttgtcttcaagatgccatggaagcccacacatcccagctccacccatgctctggcagagtgggccagccgcagggaagcctttgcccagagacccagctcggcccccgacctgatgtgtctcagtcctgaccggaagatggaagtggaggagctcagccccctggccctaggtcgcttctctctgacccctgcagagggggatactgaggaagatgatggatttgtggacatcctagagagtgacttaaaggatgatgatgcagttcccccaggcatggagagtctcattagtgccccactggtcaagaccttggaaaaggaagaggaaaaggacctcgtcatgtacagcaagtgccagcggctcttccgctctccgtccatgccctgcagcgtgatccggcccatcctcaagaggctggagcggccccaggacagggacacgcccgtgcagaataagcggaggcggagcgtgacccctcctgaggagcagcaggaggctgaggaacctaaagcccgcgtcctccgctcaaaatcactgtgtcacgatgagatcgagaacctcctggacagtgaccaccgagagctgattggagattactctaaggccttcctcctacagacagtagacggaaagcaccaagacctcaagtacatctcaccagaaacgatggtggccctattgacgggcaagttcagcaacatcgtggataagtttgtgattgtagactgcagatacccctatgaatatgaaggcgggcacatcaagactgcggtgaacttgcccctggaacgcgacgccgagagcttcctactgaagagccccatcgcgccctgtagcctggacaagagagtcatcctcattttccactgtgaattctcatctgagcgtgggccccgcatgtgccgtttcatcagggaacgagaccgtgctgtcaacgactaccccagcctctactaccctgagatgtatatcctgaaaggcggctacaaggagttcttccctcagcacccgaacttctgtgaaccccaggactaccggcccatgaaccacgaggccttcaaggatgagctaaagaccttccgcctcaagactcgcagctgggctggggagcggagccggcgggagctctgtagccggctgcaggaccagtgaggggcctgcgccagtcctgctacctcccttgcctttcgaggcctgaagccagctgccctatgggcctgccgggctgagggcctgctggaggcctcaggtgctgtccatgggaaagatggtgtgggtgtcctgcctgtctgccccagcccagattcccctgtgtcatcccatcattttccatatcctggtgccccccacccctggaagagcccagtctgttgagttagttaagttgggttaataccagcttaaaggcagtattttgtgtcctccaggagcttcttgtttccttgttagggttaacccttcatcttcctgtgtcctgaaacgctcctttgtgtgtgtgtcagctgaggctgggggagagccgtggtccctgaggatgggtcagagctaaactccttcctggcctgagagtcagctctctgccctgtgtacttcccgggccagggctgcccctaatctctgtaggaaccgtggtatgtctgccatgttgcccctttctcttttcccctttcctgtcccaccatacgagcacctccagcctgaacagaagctcttactctttcctatttcagtgttacctgtgtgcttggtctgtttgactttacgcccatctcaggacacttccgtagactgtttaggttcccctgtcaaatatcagttacccactcggtcccagttttgttgccccagaaagggatgttattatccttgggggctcccagggcaagggttaaggcctgaatcatgagcctgctggaagcccagcccctactgctgtgaaccctggggcctgactgctcagaacttgctgctgtcttgttgcggatggatggaaggttggatggatgggtggatggccgtggatggccgtggatgcgcagtgccttgcatacccaaaccaggtgggagcgttttgttgagcatgacagcctgcagcaggaatatatgtgtgcctatttgtgtggacaaaaatatttacacttagggtttggagctattcaagaggaaatgtcacagaagcagctaaaccaaggactgagcaccctctggattctgaatctcaagatgggggcagggctgtgcttgaaggccctgctgagtcatctgttagggccttggttcaataaagcactgagcaagttgagaaa

SEQ ID NO: 116155 - DNA, 2128 bp, Homo sapiens
  Payload ID: 2656
  Gene Symbol: CDC25C
  Gene Name: cell division cycle 25C
  Uniprot ID: P30307
  ENST ID: ENST00000323760
  CDS Start-End: 280-1701
gtttgaatggtcaacgcctgcggctgttgatattcttgctcagaggccgtaactttggccttctgctcagggaagactctgagtccgacgttggcctacccagtcggaaggcagagctgcaatctagttaactacctcctttcccctagatttcctttcattctgctcaagtcttcgcctgtgtccgatccctatctactttctctcctcttgtaggcaagcctcagactccaggcttgagctaggttttgtttttctcctggtgagaattcgaagaccatgtctacggaactcttctcatccacaagagaggaaggaagctctggctcaggacccagttttaggtctaatcaaaggaaaatgttaaacctgctcctggagagagacacttcctttaccgtctgtccagatgtccctagaactccagtgggcaaatttcttggtgattctgcaaacctaagcattttgtctggaggaaccccaaaacgttgcctcgatctttcgaatcttagcagtggggagataactgccactcagcttaccacttctgcagaccttgatgaaactggtcacctggattcttcaggacttcaggaagtgcatttagctgggatgaatcatgaccagcacctaatgaaatgtagcccagcacagcttctttgtagcactccgaatggtttggaccgtggccatagaaagagagatgcaatgtgtagttcatctgcaaataaagaaaatgacaatggaaacttggtggacagtgaaatgaaatatttgggcagtcccattactactgttccaaaattggataaaaatccaaacctaggagaagaccaggcagaagagatttcagatgaattaatggagttttccctgaaagatcaagaagcaaaggtgagcagaagtggcctatatcgctccccgtcgatgccagagaacttgaacaggccaagactgaagcaggtggaaaaattcaaggacaacacaataccagataaagttaaaaaaaagtatttttctggccaaggaaagctcaggaagggcttatgtttaaagaagacagtctctctgtgtgacattactatcactcagatgctggaggaagattctaaccaggggcacctgattggtgatttttccaaggtatgtgcgctgccaaccgtgtcagggaaacaccaagatctgaagtatgtcaacccagaaacagtggctgccttactgtcggggaagttccagggtctgattgagaagttttatgtcattgattgtcgctatccatatgagtatctgggaggacacatccagggagccttaaacttatatagtcaggaagaactgtttaacttctttctgaagaagcccatcgtccctttggacacccagaagagaataatcatcgtgttccactgtgaattctcctcagagaggggcccccgaatgtgccgctgtctgcgtgaagaggacaggtctctgaaccagtatcctgcattgtactacccagagctatatatccttaaaggcggctacagagacttctttccagaatatatggaactgtgtgaaccacagagctactgccctatgcatcatcaggaccacaagactgagttgctgaggtgtcgaagccagagcaaagtgcaggaaggggagcggcagctgcgggagcagattgcccttctggtgaaggacatgagcccatgataacattccagccactggctgctaacaagtcaccaaaagacactgcagaaaccctgagcagaaagaggccttctggatggccaaacccaagattattaaaagatgtctctgcaaaccaacaggctaccaacttgtatccaggcctgggaatggattaggtttcagcagagctgaaagctggtggcagagtcctggagctggctctataaggcagccttgagttgcatagagatttgtattggttcagggaactctggcattccttttcccaactcctcatgtcttctcacaagccagccaactctttctctctgggcttcgggctatgcaagagcgttgtctaccttctttctttgtattttccttctttgtttccccctctttcttttttaaaaatggaaaaataaacactacagaatgagaggtg

SEQ ID NO: 116156 - DNA, 1951 bp, Homo sapiens
  Payload ID: 2656
  Gene Symbol: CDC25C
  Gene Name: cell division cycle 25C
  Uniprot ID: P30307
  ENST ID: ENST00000348983
  CDS Start-End: 322-1524
agcttagaggcgagcggggataggttactgggctggcggaaggtttgaatggtcaacgcctgcggctgttgatattcttgctcagaggccgtaactttggccttctgctcagggaagactctgagtccgacgttggcctacccagtcggaaggcagagctgcaatctagttaactacctcctttcccctagatttcctttcattctgctcaagtcttcgcctgtgtccgatccctatctactttctctcctcttgtaggcaagcctcagactccaggcttgagctaggttttgtttttctcctggtgagaattcgaagaccatgtctacggaactcttctcatccacaagagaggaaggaagctctggctcaggacccagttttaggtctaatcaaaggaaaatgttaaacctgctcctggagagagacacttcctttaccgtctgtccagatgtccctagaactccagtgggcaaatttcttggtgattctgcaaacctaagcattttgtctgggtcacctggattcttcaggacttcaggaagtgcatttagctgggatgacaatggaaacttggtggacagtgaaatgaaatatttgggcagtcccattactactgttccaaaattggataaaaatccaaacctaggagaagaccaggcagaagagatttcagatgaattaatggagttttccctgaaagatcaagaagcaaaggtgagcagaagtggcctatatcgctccccgtcgatgccagagaacttgaacaggccaagactgaagcaggtggaaaaattcaaggacaacacaataccagataaagttaaaaaaaagtatttttctggccaaggaaagctcaggaagggcttatgtttaaagaagacagtctctctgtgtgacattactatcactcagatgctggaggaagattctaaccaggggcacctgattggtgatttttccaaggtatgtgcgctgccaaccgtgtcagggaaacaccaagatctgaagtatgtcaacccagaaacagtggctgccttactgtcggggaagttccagggtctgattgagaagttttatgtcattgattgtcgctatccatatgagtatctgggaggacacatccagggagccttaaacttatatagtcaggaagaactgtttaacttctttctgaagaagcccatcgtccctttggacacccagaagagaataatcatcgtgttccactgtgaattctcctcagagaggggcccccgaatgtgccgctgtctgcgtgaagaggacaggtctctgaaccagtatcctgcattgtactacccagagctatatatccttaaaggcggctacagagacttctttccagaatatatggaactgtgtgaaccacagagctactgccctatgcatcatcaggaccacaagactgagttgctgaggtgtcgaagccagagcaaagtgcaggaaggggagcggcagctgcgggagcagattgcccttctggtgaaggacatgagcccatgataacattccagccactggctgctaacaagtcaccaaaagacactgcagaaaccctgagcagaaagaggccttctggatggccaaacccaagattattaaaagatgtctctgcaaaccaacaggctaccaacttgtatccaggcctgggaatggattaggtttcagcagagctgaaagctggtggcagagtcctggagctggctctataaggcagccttgagttgcatagagatttgtattggttcagggaactctggcattccttttcccaactcctcatgtcttctcacaagccagccaactctttctctctgggcttcgggctatgcaagagcgttgtctaccttctttctttgtattttccttctttgtttccccctctttcttttttaaaaatggaaaaataaacactacagaatgagaggtg

SEQ ID NO: 116157 - DNA, 1556 bp, Homo sapiens
  Payload ID: 2656
  Gene Symbol: CDC25C
  Gene Name: cell division cycle 25C
  Uniprot ID: P30307
  ENST ID: ENST00000415130
  CDS Start-End: 235-1437
agaggccgtaactttggccttctgctcagggaagactctgagtccgacgttggcctacccagtcggaaggcagagctgcaatctagttaactacctcctttcccctagatttcctttcattctgctcaagtcttcgcctgtgtccgatccctatctactttctctcctcttgtaggcaagcctcagactccaggcttgaggttttgtttttctcctggtgagaattcgaagaccatgtctacggaactcttctcatccacaagagaggaaggaagctctggctcaggacccagttttaggtctaatcaaaggaaaatgttaaacctgctcctggagagagacacttcctttaccgtctgtccagatgtccctagaactccagtgggcaaatttcttggtgattctgcaaacctaagcattttgtctgggtcacctggattcttcaggacttcaggaagtgcatttagctgggatgacaatggaaacttggtggacagtgaaatgaaatatttgggcagtcccattactactgttccaaaattggataaaaatccaaacctaggagaagaccaggcagaagagatttcagatgaattaatggagttttccctgaaagatcaagaagcaaaggtgagcagaagtggcctatatcgctccccgtcgatgccagagaacttgaacaggccaagactgaagcaggtggaaaaattcaaggacaacacaataccagataaagttaaaaaaaagtatttttctggccaaggaaagctcaggaagggcttatgtttaaagaagacagtctctctgtgtgacattactatcactcagatgctggaggaagattctaaccaggggcacctgattggtgatttttccaaggtatgtgcgctgccaaccgtgtcagggaaacaccaagatctgaagtatgtcaacccagaaacagtggctgccttactgtcggggaagttccagggtctgattgagaagttttatgtcattgattgtcgctatccatatgagtatctgggaggacacatccagggagccttaaacttatatagtcaggaagaactgtttaacttctttctgaagaagcccatcgtccctttggacacccagaagagaataatcatcgtgttccactgtgaattctcctcagagaggggcccccgaatgtgccgctgtctgcgtgaagaggacaggtctctgaaccagtatcctgcattgtactacccagagctatatatccttaaaggcggctacagagacttctttccagaatatatggaactgtgtgaaccacagagctactgccctatgcatcatcaggaccacaagactgagttgctgaggtgtcgaagccagagcaaagtgcaggaaggggagcggcagctgcgggagcagattgcccttctggtgaaggacatgagcccatgataacattccagccactggctgctaacaagtcaccaaaagacactgcagaaaccctgagcagaaagaggccttctggatggccaaacccaagattattaaaagatgtctctgcaaaccaa

SEQ ID NO: 116158 - DNA, 774 bp, Homo sapiens
  Payload ID: 2656
  Gene Symbol: CDC25C
  Gene Name: cell division cycle 25C
  ENST ID: ENST00000514017
  CDS Start-End: 1-774
gagcagaagtggcctatatcgctccccgtcgatgccagagaacttgaacaggccaagactgaagcaggtggaaaaattcaaggacaacacaataccagataaagttaaaaaaaagtatttttctggccaaggaaagctcaggaagggcttatgtttaaagaagacagtctctctgtgtgacattactatcactcagatgctggaggaagattctaaccaggggcacctgattggtgatttttccaaggtatgtgcgctgccaaccgtgtcagggaaacaccaagatctgaagtatgtcaacccagaaacagtaagcagatttctggagatggtggctgccttactgtcggggaagttccagggtctgattgagaagttttatgtcattgattgtcgctatccatatgagtatctgggaggacacatccagggagccttaaacttatatagtcaggaagaactgtttaacttctttctgaagaagcccatcgtccctttggacacccagaagagaataatcatcgtgttccactgtgaattctcctcagagaggggcccccgaatgtgccgctgtctgcgtgaagaggacaggtctctgaaccagtatcctgcattgtactacccagagctatatatccttaaaggcggctacagagacttctttccagaatatatggaactgtgtgaaccacagagctactgccctatgcatcatcaggaccacaagactgagttgctgaggtgtcgaagccagagcaaagtgcaggaagggga

SEQ ID NO: 116159 - DNA, 1968 bp, Homo sapiens
  Payload ID: 2656
  Gene Symbol: CDC25C
  Gene Name: cell division cycle 25C
  Uniprot ID: P30307
  ENST ID: ENST00000513970
  CDS Start-End: 435-1856
gaggtgcccgccccgaggccccagcgccacctgccctccaccacctaccgcggttcctccagctcccagggccgcggccggagcagctctgagcgctcggttcgccccacggtgcccttaaaaggcgctggcgcgaaccaacgagtccctgaggagagtagggggacagctccggctcgcagaatccccccaagccacccatggagggcgcagctccgtgtcgtgtctctctcaaagtgtctctcggacagcgctgttgggaacgagcctggcgctttgatttagggatgggggtggtttcctcactaacgagtcaccccctccaaaatatcgcagaaagtggacggccccagttggaggcacatcttgaaacccgcgggggaggccatgtcggaagaaggttttgtttttctcctggtgagaattcgaagaccatgtctacggaactcttctcatccacaagagaggaaggaagctctggctcaggacccagttttaggtctaatcaaaggaaaatgttaaacctgctcctggagagagacacttcctttaccgtctgtccagatgtccctagaactccagtgggcaaatttcttggtgattctgcaaacctaagcattttgtctggaggaaccccaaaacgttgcctcgatctttcgaatcttagcagtggggagataactgccactcagcttaccacttctgcagaccttgatgaaactggtcacctggattcttcaggacttcaggaagtgcatttagctgggatgaatcatgaccagcacctaatgaaatgtagcccagcacagcttctttgtagcactccgaatggtttggaccgtggccatagaaagagagatgcaatgtgtagttcatctgcaaataaagaaaatgacaatggaaacttggtggacagtgaaatgaaatatttgggcagtcccattactactgttccaaaattggataaaaatccaaacctaggagaagaccaggcagaagagatttcagatgaattaatggagttttccctgaaagatcaagaagcaaaggtgagcagaagtggcctatatcgctccccgtcgatgccagagaacttgaacaggccaagactgaagcaggtggaaaaattcaaggacaacacaataccagataaagttaaaaaaaagtatttttctggccaaggaaagctcaggaagggcttatgtttaaagaagacagtctctctgtgtgacattactatcactcagatgctggaggaagattctaaccaggggcacctgattggtgatttttccaaggtatgtgcgctgccaaccgtgtcagggaaacaccaagatctgaagtatgtcaacccagaaacagtggctgccttactgtcggggaagttccagggtctgattgagaagttttatgtcattgattgtcgctatccatatgagtatctgggaggacacatccagggagccttaaacttatatagtcaggaagaactgtttaacttctttctgaagaagcccatcgtccctttggacacccagaagagaataatcatcgtgttccactgtgaattctcctcagagaggggcccccgaatgtgccgctgtctgcgtgaagaggacaggtctctgaaccagtatcctgcattgtactacccagagctatatatccttaaaggcggctacagagacttctttccagaatatatggaactgtgtgaaccacagagctactgccctatgcatcatcaggaccacaagactgagttgctgaggtgtcgaagccagagcaaagtgcaggaaggggagcggcagctgcgggagcagattgcccttctggtgaaggacatgagcccatgataacattccagccactggctgctaacaagtcaccaaaagacactgcagaaaccctgagcagaaagaggccttctggatggccaaacccaagattattaaaagatgtctctgc

SEQ ID NO: 116160 - DNA, 1332 bp, Homo sapiens
  Payload ID: 2656
  Gene Symbol: CDC25C
  Gene Name: cell division cycle 25C
  Uniprot ID: P30307
  ENST ID: ENST00000514555
  CDS Start-End: 1-1332
atgtctacggaactcttctcatccacaagagaggaaggaagctctggctcaggacccagttttaggtctaatcaaaggaaaatgttaaacctgctcctggagagagacacttcctttaccgtctgtccagatgtccctagaactccagtgggcaaatttcttggtgattctgcaaacctaagcattttgtctggaggaaccccaaaacgttgcctcgatctttcgaatcttagcagtggggagataactgccactcagcttaccacttctgcagaccttgatgaaactggtcacctggattcttcaggacttcaggaagtgcatttagctgggatgaatcatgaccagcacctaatgaaatgtagcccagacaatggaaacttggtggacagtgaaatgaaatatttgggcagtcccattactactgttccaaaattggataaaaatccaaacctaggagaagaccaggcagaagagatttcagatgaattaatggagttttccctgaaagatcaagaagcaaaggtgagcagaagtggcctatatcgctccccgtcgatgccagagaacttgaacaggccaagactgaagcaggtggaaaaattcaaggacaacacaataccagataaagttaaaaaaaagtatttttctggccaaggaaagctcaggaagggcttatgtttaaagaagacagtctctctgtgtgacattactatcactcagatgctggaggaagattctaaccaggggcacctgattggtgatttttccaaggtatgtgcgctgccaaccgtgtcagggaaacaccaagatctgaagtatgtcaacccagaaacagtggctgccttactgtcggggaagttccagggtctgattgagaagttttatgtcattgattgtcgctatccatatgagtatctgggaggacacatccagggagccttaaacttatatagtcaggaagaactgtttaacttctttctgaagaagcccatcgtccctttggacacccagaagagaataatcatcgtgttccactgtgaattctcctcagagaggggcccccgaatgtgccgctgtctgcgtgaagaggacaggtctctgaaccagtatcctgcattgtactacccagagctatatatccttaaaggcggctacagagacttctttccagaatatatggaactgtgtgaaccacagagctactgccctatgcatcatcaggaccacaagactgagttgctgaggtgtcgaagccagagcaaagtgcaggaaggggagcggcagctgcgggagcagattgcccttctggtgaaggacatgagcccatga

SEQ ID NO: 116161 - DNA, 867 bp, Homo sapiens
  Payload ID: 2656
  Gene Symbol: CDC25C
  Gene Name: cell division cycle 25C
  ENST ID: ENST00000510119
  CDS Start-End: 358-867
ctgccctccaccacctaccgcggttcctccagctcccagggccgcggccggagcagctctgagcgctcggttcgccccacggtgcccttaaaaggcgctggcgcgaaccaacgagtccctgaggagagtagggggacagctccggctcgcagaatccccccaagccacccatggagggcgcagctccgtgtcgtgtctctctcaaagtgtctctcggacagcgctgttgggaacgagcctggcgctttgatttagggatgggggtggtttcctcactaacgagtcaccccctccaaaatatcgcagaaagtggacggccccagttggaggcacatcttgaaacccgcgggggaggccatgtcggaagaagctaggttttgtttttctcctggtgagaattcgaagaccatgtctacggaactcttctcatccacaagagaggaaggaagctctggctcaggacccagttttaggtctaatcaaaggaaaatgttaaacctgctcctggagagagacacttcctttaccgtctgtccagatgtccctagaactccagtgggcaaatttcttggtgattctgcaaacctaagcattttgtctggaggaaccccaaaacgttgcctcgatctttcgaatcttagcagtggggagataactgccactcagcttaccacttctgcagaccttgatgaaactggtcacctggattcttcaggacttcaggaagtgcatttagctgggatgaatcatgaccagcacctaatgaaatgtagcccagcacagcttctttgtagcactccgaatggtttggaccgtggccatagaaagagagatgcaatgtgtagttcatctgcaaataaagaaaat

SEQ ID NO: 116162 - DNA, 1059 bp, Homo sapiens
  Payload ID: 2656
  Gene Symbol: CDC25C
  Gene Name: cell division cycle 25C
  ENST ID: ENST00000503022
  CDS Start-End: 313-1059
agaggcgagcggggataggttactgggctggcggaaggtttgaatggtcaacgcctgcggctgttgatattcttgctcagaggccgtaactttggccttctgctcagggaagactctgagtccgacgttggcctacccagtcggaaggcagagctgcaatctagttaactacctcctttcccctagatttcctttcattctgctcaagtcttcgcctgtgtccgatccctatctactttctctcctcttgtaggcaagcctcagactccaggcttgaggttttgtttttctcctggtgagaattcgaagaccatgtctacggaactcttctcatccacaagagaggaaggaagctctggctcaggacccagttttaggtctaatcaaaggaaaatgttaaacctgctcctggagagagacacttcctttaccgtctgtccagatgtccctagaactccagtgggcaaatttcttggtgattctgcaaacctaagcattttgtctggaggaaccccaaaacgttgcctcgatctttcgaatcttagcagtggggagataactgccactcagcttaccacttctgcagaccttgatgaaactggtcacctggattcttcaggacttcaggaagtgcatttagctgggatgaatcatgaccagcacctaatgaaatgtagcccagcacagcttctttgtagcactccgaatggtttggaccgtggccatagaaagagagatgcaatgtgtagttcatctgcaaataaagaaaatgacaatggaaacttggtggacagtgaaatgaaatatttgggcagtcccattactactgttccaaaattggataaaaatccaaacctaggagaagaccaggcagaagagatttcagatgaattaatggagttttccctgaaagatcaagaagcaaaggtgagcagaagtggcctatatcgctccccgtcgatgccagagaacttgaacaggccaagactgaagcaggtggaaaaattcaaggacaacacaataccagataaagttaaaaaaaagtatttttctggccaa

SEQ ID NO: 116163 - DNA, 872 bp, Homo sapiens
  Payload ID: 2657
  Gene Symbol: CDC26
  Gene Name: cell division cycle 26
  Uniprot ID: Q8NHZ8
  ENST ID: ENST00000374206
  CDS Start-End: 360-617
ggagcatgatggaagtcgtagtaggaaatggcgtcgtggcattgaggggcatccctcctagaacctccaggaaaagctcgcggaagacgaggttctgcggagagagaggctccaagcagtctgggaagtgtagtccagttggcttagcagtagtttcgttgggggggagccgaggttccgggaaggggctaggccggcttgaaaagagattatgactgtaccttttaactttgtagctggaacacaagaagtgtttgtttaatgaatgacgtacacatttaagatctgtttggacgcggaggataatcctgtgaattgctaatagttcactgggtttggcccttagtgttgacttcagtatgctgagacggaaaccaacacgcctagagctaaagcttgatgacattgaagagtttgagaacattcgaaaggacctggagacccgtaagaaacagaaggaagatgtggaagttgtaggaggcagtgatggagaaggagccattgggcttagcagtgatcccaagagccgggaacaaatgatcaatgatcggattggttataaaccccaacccaagcccaataatcgttcatctcaatttggaagtcttgaattttagagatggattatcttgcatgccagagcgctggaatggaataaaatgatggcagaagtacaaaccagatttagagaattgagtgcttgcagtcaagcagaatgtacctcctgcagagacaaatcttctgcatgagattactgatgcttcacttgcactctaagctggaatccaaactctggtttgtctcttgaaaatttgactctataaaactgatctgattttctgtttttaaaaataaatatatttttggaaaaa

SEQ ID NO: 116164 - DNA, 5801 bp, Homo sapiens
  Payload ID: 2658
  Gene Symbol: CDC27
  Gene Name: cell division cycle 27
  Uniprot ID: P30260
  ENST ID: ENST00000066544
  CDS Start-End: 95-2569
tcgctggtgagtttaaatgagcaggggctggccgggccggagccgctacagggggggcctgaggcactgcagaaagtgggcctgagcctcgaggatgacggtgctgcaggaacccgtccaggctgctatatggcaagcactaaaccactatgcttaccgagatgcggttttcctcgcagaacgcctttatgcagaagtacactcagaagaagccttgtttttactggcaacctgttattaccgctcaggaaaggcatataaagcatatagactcttgaaaggacacagttgtactacaccgcaatgcaaatacctgcttgcaaaatgttgtgttgatctcagcaagcttgcagaaggggaacaaatcttatctggtggagtgtttaataagcagaaaagccatgatgatattgttactgagtttggtgattcagcttgctttactctttcattgttgggacatgtatattgcaagacagatcggcttgccaaaggatcagaatgttaccaaaagagccttagtttaaatcctttcctctggtctccctttgaatcattatgtgaaataggtgaaaagccagatcctgaccaaacatttaaattcacatctttacagaactttagcaactgtctgcccaactcttgcacaacacaagtacctaatcatagtttatctcacagacagcctgagacagttcttacggaaacaccccaggacacaattgaattaaacagattgaatttagaatcttccaattcaaagtactccttgaatacagattcctcagtgtcttatattgattcagctgtaatttcacctgatactgtcccactgggaacaggaacttccatattatctaaacaggttcaaaataaaccaaaaactggtcgaagtttattaggaggaccagcagctcttagtccattaaccccaagttttgggattttgccattagaaaccccaagtcctggagatggatcctatttacaaaactacactaatacacctcctgtaattgatgtgccatccaccggagccccttcaaaaaagtctgttgccagaatcggccaaactggaacaaagtctgtcttctcacagagtggaaatagccgagaggtaactccaattcttgcacaaacacaaagttctggtccacaaacaagtacaacacctcaggtattgagccccactattacatctcccccaaacgcactgcctcgaagaagttcacgactctttactagtgacagctccacaaccaaggagaatagcaaaaaattaaaaatgaagtttccacctaaaatcccaaacagaaaaacaaaaagtaaaactaataaaggaggaataactcaacctaacataaatgatagcctggaaattacaaaattggactcttccatcatttcagaagggaaaatatccacaatcacacctcagattcaggcctttaatctacaaaaagcagcagcagaaggtttgatgagccttcttcgtgaaatggggaaaggttatttagctttgtgttcatacaactgcaaagaagctataaatattttgagccatctaccttctcaccactacaatactggttgggtactgtgccaaattggaagggcctattttgaactttcagagtacatgcaagctgaaagaatattctcagaggttagaaggattgagaattatagagttgaaggcatggagatctactctacaacactttggcatcttcaaaaagatgttgctctttcagttctgtcaaaagacttaacagacatggataaaaattcgccagaggcctggtgtgctgcagggaactgtttcagtctgcaacgggaacatgatattgcaattaaattcttccagagagctatccaagttgatccaaattacgcttatgcctatactctattagggcatgagtttgtcttaactgaagaattggacaaagcattagcttgttttcgaaatgctatcagagtcaatcctagacattataatgcatggtatggtttaggaatgatttattacaagcaagaaaaattcagccttgcagaaatgcatttccaaaaagcgcttgatatcaaccctcaaagttcagttttactttgccacattggagtagttcaacatgcactgaaaaaatcagagaaggctttggataccctaaacaaagccattgtcattgatcccaagaaccctctatgcaaatttcacagagcctcagttttatttgcaaatgaaaaatataagtctgctttacaagaacttgaagaattgaaacaaattgttcccaaagaatccctcgtttacttcttaataggaaaggtttacaagaagttaggtcaaacgcacctcgccctgatgaatttctcttgggctatggatttagatcctaaaggagccaataaccagattaaagaggcaattgataagcgttatcttccagatgatgaggagccaataacccaagaagaacagatcatgggaacagatgaatcccaggagagcagcatgacagatgcggatgacacacaacttcatgcagctgaaagtgatgaattttaacttctggaaatcagacttttacaactggatgtgtgactagtgctgacgtgtttcttgtccctctgtatactgagtctttactcttgagctggcggtgtcatcgtccgtcacttataccatgagtgtgccactttcattggaccctgactgtatacagaatgaaaggcagtgcaatatttagctgctaacaagactggctcttttaccagtatgaatgacaatttatggggggtagggtggggaactttcttttctgtttttctttaatctccctttgttggaaagtatcatgaaaggaagagttatgctttatcttgaaggaaccattagatatggaaaatagtgatgaaccagagtttcttggttgctttttcaaaaatttgtttttatttggttctgttcctgataaacagagtaactgaccttcatttctaggttcttcaagaatggtgtttgcaagtgccagatggaacaataaaagacgttgcctataacagtgacttgattgccaaggaatgtaaattaccttaaacttgcagtatctcccataaacaaatgtaatgggcatattgggactcgtatgtaggaatcaaatatccctccatacagtgtactcttattcttggcaagaatgctttaatgtctaaccaagaattttaatttattcatcttgcttcaaagtgttgatcattgttgtcttggtattgcaaactttaaaattgtttcttaccatattgcctcttctctttgagctctgtgggatcacctttaacattcagagatgatagagtggttccccactgagaagccaaaacaaggcccttaataaccccttaagttcaccatatgaatcagaaggagaacactaaagtggagagacttttaagagatcatgatagtgaaagccttaatataatcagaattgtaccataaccttgaatctatatttgttcaaaacatccctttgacttttctaagtgtttgcttaagcagagtgtaagaatgtgtggttacctttggttgagatcctttccattctttttgactctctgcttcagattttttcagtagtgtgagtcaccaaaacatttactaagagtaattgggtttaggatgttggaaatttttagcttgggggaaaaaacattcttatgaaggagataggttctcttctgagtttgtcataatatagattggtgtctttggaaaatggccacaattttaagaattcaattatgcatataaaatgataattattggaattccacagtaacagatttaaacagtcttaaattgtttatctcctttactgtaatgtattgaaatttttagagaaattttagttgttaacattttattaagtgccagtgtcagaatataacaaattatagtttcttatgaatgacaggcctacagttattattctggattatttgatggaggacaaacttacctgtatttgttagtcaagctgtgaaaataaggtggattacaaaagatgtgaaaaaaattttagtctgtagactcagtaattttctataatttactgttaatctcatttgaacatggattaggtacaatttataaattaattcaagtcagggtctttaggtatcaggtgccagagagatatttaacagatttccctacctaaatttatgtatatgtactgtctaaaacaatacttttttaaaaaaaaggaacagttgggagaaaataaatataatgaaaaattcccagaggctagcacttggattctaacacgtatgctattgtattatccattagttctgtaatatttaattttagattcttttatttttttaattggcaaagcacaaggtgctgtataacagtgtcatttagagttttatagaaagcttcaacctgagttctgcgttataaagcctggagaaagctaagcttagaacataacttgctgaagtataattatctttttgtagcaggaatttatgtgccagaggtgagagtctttctggtactgattttttgagaccaaggataaaaggatcgttttgtaagacatgccatggcaatggctggttgggggacagtttccgcccaagcttggcctattttatttttcctcatacctactttcaaagtcatttaggtatttgaagccttatttcccacgtagtaacactttctggcttttgcagtttctttttttgtttggttttgttttttgcatggaatggggatcaaacaacccgaagaagaacacattttgatcaagcaaaatgtttgcttcaaatttcagaagtttattttacagaaattaaattaagtagtttgacatccttttctctgtttcacacatatattaggttggtgcataagtaattgtggtttttgccatgacttttatggcaaaacctgcaattacttttgcaccaacttaatacatctatatacatatatatatacgcgcacacacttgttcagaagttatgttgtggccttggatttgtttttccccttggaaatggttcttaactctgggattttagaaggttagaatattttttcaagagaacagtggtactcaaaagaatgaaaggtggtccctacattttctgtattcatcacttaaaatttttaatttttccgagaactacaagtaacatttgaaccatgctgctgttgtaccttaaacaaaaactcagtgataaccagtatttagtctattaaaaatgctctttttgaagaaaaaagtttggaagtctctgattagccagagtatagtatgagtcttcactgagaaatatggtgacccattttctttgtgaaaacctgggaaaatgcaagtgtgggtatgaagtgtgtgttctgtttgcattgaaacaatgtaattttgtgtcttctttttgctttaactgacttatttcagaaattgtacagtgttgagggggaaagtcttttctgttaatatatttgcaattcattaaaggatatggaaaatccaaataagttacttttgaaagcaatttataatcaagttgttaaagctatatgaaagctgtgccatctgtattttaataagaaggcacagaaaaacagagatacagttttatgtttcacaaaaaactagagcaatgtttatctaattttttaaaacttacactcttaatatatttatatttttaaacggtcatactcttttttagtattatttggaatatcaaaataaatactatgacaaaaacaa

SEQ ID NO: 116165 - DNA, 1420 bp, Homo sapiens
  Payload ID: 2658
  Gene Symbol: CDC27
  Gene Name: cell division cycle 27
  ENST ID: ENST00000526866
  CDS Start-End: 93-1124
gctggtgagtttaaatgagcaggggctggccgggccggagccgctacagggggggcctgaggcactgcagaaagtgggcctgagcctcgaggatgacggtgctgcaggaacccgtccaggctgctatatggcaagcactaaaccactatgcttaccgagatgcggttttcctcgcagaacgcctttatgcagaagtacactcagaagaagccttgtttttactggcaacctgttattaccgctcaggaaaggcatataaagcatatagactcttgaaaggacacagttgtactacaccgcaatgcaaatacctgcttgcaaaatgttgtgttgatctcagcaagcttgcagaaggggaacaaatcttatctggtggagtgtttaataagcagaaaagccatgatgatattgttactgagtttggtgattcagcttgctttactctttcattgttgggacatgtatattgcaagacagatcggcttgccaaaggatcagaatgttaccaaaagagccttagtttaaatcctttcctctggtctccctttgaatcattatgtgaaataggtgaaaagccagatcctgaccaaacatttaaattcacatctttacagaactttagcaactgtctgcccaactcttgcacaacacaagtacctaatcatagtttatctcacagacagcctgagacagttcttacggaaacaccccaggacacaattgaattaaacagattgaatttagaatcttccaattcaaagtactccttgaatacagattcctcagtgtcttatattgattcagctgtaatttcacctgatactgtcccactgggaacaggaacttccatattatctaaacaggttcaaaataaaccaaaaactggtcgaagtttattaggaggaccagcagctcttagtccattaaccccaagttttgggattttgccattagaaaccccaagtcctggagatggatcctatttacaaaactacactaatacacctcctgtaattgatgtgccatccaccggagccccttcaaaaaaggtatggtttaggaatgatttattacaagcaagaaaaattcagccttgcagaaatgcatttccaaaaagcgcttgatatcaaccctcaaagttcagttttactttgccacattggagtagttcaacatgcactgaaaaaatcagagaaggctttggataccctaaacaaagccattgtcattgatcccaagaaccctctatgcaaatttcacagagcctcagttttatttgcaaatgaaaaatataagtctgctttacaagaacttgaagaattgaaacaaattgttcccaaagaatccctcgtttacttcttaataggaaaggtttacaagaagttaggtcaaacgcacctcgccctgatgaatttctctt

SEQ ID NO: 116166 - DNA, 2570 bp, Homo sapiens
  Payload ID: 2658
  Gene Symbol: CDC27
  Gene Name: cell division cycle 27
  ENST ID: ENST00000533415
  CDS Start-End: 80-364
aatgagcaggggctggccgggccggagccgctacagggggggcctgaggcactgcagaaagtgggcctgagcctcgaggatgacggtgctgcaggaacccgtccaggctgctatatggcaagcactaaaccactatgcttaccgagatgcggttttcctcgcagaacgcctttatgcagaaggcttgcagaaggggaacaaatcttatctggtggagtgtttaataagcagaaaagccatgatgatattgttactgagtttggtgattcagcttgctttactctttcattgttgggacatgtatattgcaagacagatcggcttgccaaaggatcagaatgttaccaaaagagccttagtttaaatcctttcctctggtctccctttgaatcattatgtgaaataggtgaaaagccagatcctgaccaaacatttaaattcacatctttacagaactttagcaactgtctgcccaactcttgcacaacacaagtacctaatcatagtttatctcacagacagcctgagacagttcttacggaaacaccccaggacacaattgaattaaacagattgaatttagaatcttccaattcaaagtactccttgaatacagattcctcagtgtcttatattgattcagctgtaatttcacctgatactgtcccactgggaacaggaacttccatattatctaaacaggttcaaaataaaccaaaaactggtcgaagtttattaggaggaccagcagctcttagtccattaaccccaagttttgggattttgccattagaaaccccaagtcctggagatggatcctatttacaaaactacactaatacacctcctgtaattgatgtgccatccaccggagccccttcaaaaaagtctgttgccagaatcggccaaactggaacaaagtctgtcttctcacagagtggaaatagccgagaggtaactccaattcttgcacaaacacaaagttctggtccacaaacaagtacaacacctcaggtattgagccccactattacatctcccccaaacgcactgcctcgaagaagttcacgactctttactagtgacagctccacaaccaaggagaatagcaaaaaattaaaaatgaagtttccacctaaaatcccaaacagaaaaacaaaaagtaaaactaataaaggaggaataactcaacctaacataaatgatagcctggaaattacaaaattggactcttccatcatttcagaagggaaaatatccacaatcacacctcagattcaggcctttaatctacaaaaagcagcagcagaaggtttgatgagccttcttcgtgaaatggggaaaggttatttagctttgtgttcatacaactgcaaagaagctataaatattttgagccatctaccttctcaccactacaatactggttgggtactgtgccaaattggaagggcctattttgaactttcagagtacatgcaagctgaaagaatattctcagaggttagaaggattgagaattatagagttgaaggcatggagatctactctacaacactttggcatcttcaaaaagatgttgctctttcagttctgtcaaaagacttaacagacatggataaaaattcgccagaggcctggtgtgctgcagggaactgtttcagtctgcaacgggaacatgatattgcaattaaattcttccagagagctatccaagttgatccaaattacgcttatgcctatactctattagggcatgagtttgtcttaactgaagaattggacaaagcattagcttgttttcgaaatgctatcagagtcaatcctagacattataatgcatggtatggtttaggaatgatttattacaagcaagaaaaattcagccttgcagaaatgcatttccaaaaagcgcttgatatcaaccctcaaagttcagttttactttgccacattggagtagttcaacatgcactgaaaaaatcagagaaggctttggataccctaaacaaagccattgtcattgatcccaagaaccctctatgcaaatttcacagagcctcagttttatttgcaaatgaaaaatataagtctgctttacaagaacttgaagaattgaaacaaattgttcccaaagaatccctcgtttacttcttaataggaaaggtttacaagaagttaggtcaaacgcacctcgccctgatgaatttctcttgggctatggatttagatcctaaaggagccaataaccagattaaagaggcaattgataagcgttatcttccagatgatgaggagccaataacccaagaagaacagatcatgggaacagatgaatcccaggagagcagcatgacagatgcggatgacacacaacttcatgcagctgaaagtgatgaattttaacttctggaaatcagacttttacaactggatgtgtgactagtgctgacgtgtttcttgtccctctgtatactgagtctttactcttgagctggcggtgtcatcgtccgtcacttataccatgagtgtgccactttcattggaccctgactgtatacagaatgaaa

SEQ ID NO: 116167 - DNA, 3177 bp, Homo sapiens
  Payload ID: 2658
  Gene Symbol: CDC27
  Gene Name: cell division cycle 27
  Uniprot ID: P30260
  ENST ID: ENST00000531206
  CDS Start-End: 5-2497
gaggatgacggtgctgcaggaacccgtccaggctgctatatggcaagcactaaaccactatgcttaccgagatgcggttttcctcgcagaacgcctttatgcagaagtacactcagaagaagccttgtttttactggcaacctgttattaccgctcaggaaaggcatataaagcatatagactcttgaaaggacacagttgtactacaccgcaatgcaaatacctgcttgcaaaatgttgtgttgatctcagcaagcttgcagaaggggaacaaatcttatctggtggagtgtttaataagcagaaaagccatgatgatattgttactgagtttggtgattcagcttgctttactctttcattgttgggacatgtatattgcaagacagatcggcttgccaaaggatcagaatgttaccaaaagagccttagtttaaatcctttcctctggtctccctttgaatcattatgtgaaataggtgaaaagccagatcctgaccaaacatttaaattcacatctttacagaactttagcaactgtctgcccaactcttgcacaacacaagtacctaatcatagtttatctcacagacagcctgagacagttcttacggaaacaccccaggacacaattgaattaaacagattgaatttagaatcttccaattcaaagtactccttgaatacagattcctcagtgtcttatattgattcagctgtaatttcacctgatactgtcccactgggaacaggaacttccatattatctaaacaggttcaaaataaaccaaaaactggtcgaagtttattaggaggaccagcagctcttagtccattaaccccaagttttgggattttgccattagaaaccccaagtcctggagatggatcctatttacaaaactacactaatacacctcctgtaattgatgtgccatccaccggagccccttcaaaaaagacttttcgtgttttacagtctgttgccagaatcggccaaactggaacaaagtctgtcttctcacagagtggaaatagccgagaggtaactccaattcttgcacaaacacaaagttctggtccacaaacaagtacaacacctcaggtattgagccccactattacatctcccccaaacgcactgcctcgaagaagttcacgactctttactagtgacagctccacaaccaaggagaatagcaaaaaattaaaaatgaagtttccacctaaaatcccaaacagaaaaacaaaaagtaaaactaataaaggaggaataactcaacctaacataaatgatagcctggaaattacaaaattggactcttccatcatttcagaagggaaaatatccacaatcacacctcagattcaggcctttaatctacaaaaagcagcagcagaaggtttgatgagccttcttcgtgaaatggggaaaggttatttagctttgtgttcatacaactgcaaagaagctataaatattttgagccatctaccttctcaccactacaatactggttgggtactgtgccaaattggaagggcctattttgaactttcagagtacatgcaagctgaaagaatattctcagaggttagaaggattgagaattatagagttgaaggcatggagatctactctacaacactttggcatcttcaaaaagatgttgctctttcagttctgtcaaaagacttaacagacatggataaaaattcgccagaggcctggtgtgctgcagggaactgtttcagtctgcaacgggaacatgatattgcaattaaattcttccagagagctatccaagttgatccaaattacgcttatgcctatactctattagggcatgagtttgtcttaactgaagaattggacaaagcattagcttgttttcgaaatgctatcagagtcaatcctagacattataatgcatggtatggtttaggaatgatttattacaagcaagaaaaattcagccttgcagaaatgcatttccaaaaagcgcttgatatcaaccctcaaagttcagttttactttgccacattggagtagttcaacatgcactgaaaaaatcagagaaggctttggataccctaaacaaagccattgtcattgatcccaagaaccctctatgcaaatttcacagagcctcagttttatttgcaaatgaaaaatataagtctgctttacaagaacttgaagaattgaaacaaattgttcccaaagaatccctcgtttacttcttaataggaaaggtttacaagaagttaggtcaaacgcacctcgccctgatgaatttctcttgggctatggatttagatcctaaaggagccaataaccagattaaagaggcaattgataagcgttatcttccagatgatgaggagccaataacccaagaagaacagatcatgggaacagatgaatcccaggagagcagcatgacagatgcggatgacacacaacttcatgcagctgaaagtgatgaattttaacttctggaaatcagacttttacaactggatgtgtgactagtgctgacgtgtttcttgtccctctgtatactgagtctttactcttgagctggcggtgtcatcgtccgtcacttataccatgagtgtgccactttcattggaccctgactgtatacagaatgaaaggcagtgcaatatttagctgctaacaagactggctcttttaccagtatgaatgacaatttatggggggtagggtggggaactttcttttctgtttttctttaatctccctttgttggaaagtatcatgaaaggaagagttatgctttatcttgaaggaaccattagatatggaaaatagtgatgaaccagagtttcttggttgctttttcaaaaatttgtttttatttggttctgttcctgataaacagagtaactgaccttcatttctaggttcttcaagaatggtgtttgcaagtgccagatggaacaataaaagacgttgcctataacagtgacttgattgccaaggaatgtaaattaccttaaacttgcagtatctcccataaacaaatgtaatgggcatattgggactcgtatgtaggaatcaaatatccctccatacagtgtactcttattcttggcaagaatgctttaatgtctaaccaagaattttaatttattcatcttgcttcaaa

SEQ ID NO: 116168 - DNA, 2579 bp, Homo sapiens
  Payload ID: 2658
  Gene Symbol: CDC27
  Gene Name: cell division cycle 27
  ENST ID: ENST00000527547
  CDS Start-End: 53-2524
ccgctacagggggggcctgaggcactgcagaaagtgggcctgagcctcgaggatgacggtgctgcaggaacccgtccaggctgctatatggcaagcactaaaccactatgcttaccgagatgcggttttcctcgcagaacgcctttatgcagaagtacactcagaagaagccttgtttttactggcaacctgttattaccgctcaggaaaggcatataaagcatatagactcttgaaaggacacagttgtactacaccgcaatgcaaatacctgcttgcaaaatgttgtgttgatctcagcaagcttgcagaaggggaacaaatcttatctggtggagtgtttaataagcagaaaagccatgatgatattgttactgagtttggtgattcagcttgctttactctttcattgttgggacatgtatattgcaagacagatcggcttgccaaaggatcagaatgttaccaaaagagccttagtttaaatcctttcctctggtctccctttgaatcattatgtgaaataggtgaaaagccagatcctgaccaaacatttaaattcacatctttacagaactttagcaactgtctgcccaactcttgcacaacacaagtacctaatcatagtttatctcacagacagcctgagacagttcttacggaaacaccccaggacacaattgaattaaacagattgaatttagaatcttccaattcaaagtactccttgaatacagattcctcagtgtcttatattgattcagctgtaatttcacctgatactgtcccactgggaacaggaacttccatattatctaaacaggttcaaaataaaccaaaaactggtcgaagtttattaggaggaccagcagctcttagtccattaaccccaagttttgggattttgccattagaaaccccaagtcctggagatggatcctatttacaaaactacactaatacacctcctgtaattgatgtgccatccaccggagccccttcaaaaaagtctgttgccagaatcggccaaactggaacaaagtctgtcttctcacagagtggaaatagccgagaggtaactccaattcttgcacaaacacaaagttctggtccacaaacaagtacaacacctcaggtattgagccccactattacatctcccccaaacgcactgcctcgaagaagttcacgactctttactagtgacagctccacaaccaaggagaatagcaaaaaattaaaaatgaagtttccacctaaaatcccaaacagaaaaacaaaaagtaaaactaataaaggaggaataactcaacctaacataaatgatagcctggaaattacaaaattggactcttccatcatttcagaagggaaaatatccacaatcacacctcagattcaggcctttaatctacaaaaagcagcagcaggtttgatgagccttcttcgtgaaatggggaaaggttatttagctttgtgttcatacaactgcaaagaagctataaatattttgagccatctaccttctcaccactacaatactggttgggtactgtgccaaattggaagggcctattttgaactttcagagtacatgcaagctgaaagaatattctcagaggttagaaggattgagaattatagagttgaaggcatggagatctactctacaacactttggcatcttcaaaaagatgttgctctttcagttctgtcaaaagacttaacagacatggataaaaattcgccagaggcctggtgtgctgcagggaactgtttcagtctgcaacgggaacatgatattgcaattaaattcttccagagagctatccaagttgatccaaattacgcttatgcctatactctattagggcatgagtttgtcttaactgaagaattggacaaagcattagcttgttttcgaaatgctatcagagtcaatcctagacattataatgcatggtatggtttaggaatgatttattacaagcaagaaaaattcagccttgcagaaatgcatttccaaaaagcgcttgatatcaaccctcaaagttcagttttactttgccacattggagtagttcaacatgcactgaaaaaatcagagaaggctttggataccctaaacaaagccattgtcattgatcccaagaaccctctatgcaaatttcacagagcctcagttttatttgcaaatgaaaaatataagtctgctttacaagaacttgaagaattgaaacaaattgttcccaaagaatccctcgtttacttcttaataggaaaggtttacaagaagttaggtcaaacgcacctcgccctgatgaatttctcttgggctatggatttagatcctaaaggagccaataaccagattaaagaggcaattgataagcgttatcttccagatgatgaggagccaataacccaagaagaacagatcatgggaacagatgaatcccaggagagcagcatgacagatgcggatgacacacaacttcatgcagctgaaagtgatgaattttaacttctggaaatcagacttttacaactggatgtgtgactagtgctgacgtgtttct

SEQ ID NO: 116169 - DNA, 514 bp, Homo sapiens
  Payload ID: 2658
  Gene Symbol: CDC27
  Gene Name: cell division cycle 27
  ENST ID: ENST00000574304
  CDS Start-End: 1-179
ttgttactgagtttggtgattcagcttgctttactctttcattgttgggacatgtatattgcaagacagatcggcttgccaaaggatcagaatgttaccaaaagagccttagtttaaatcctttcctctggtctccctttgaatcattatgtgaaatagttttgggattttgccattagaaaccccaagtcctggagatggatcctatttacaaaactacactaatacacctcctgtaattgatgtgccatccaccggagccccttcaaaaaagacttttcgtgttttacagtctgttgccagaatcggccaaactggaacaaagtctgtcttctcacagagtggaaatagccgagaggtaactccaattcttgcacaaacacaaagttctggtccacaaacaagtacaacacctcaggtattgagccccactattacatctcccccaaacgcactgcctcgaagaagttcacgactctttactagtgacagctccacaaccaaggagaatagc

SEQ ID NO: 116170 - DNA, 548 bp, Homo sapiens
  Payload ID: 2658
  Gene Symbol: CDC27
  Gene Name: cell division cycle 27
  ENST ID: ENST00000576484
  CDS Start-End: 1-311
ctgagacagttcttacggaaacaccccaggacacaattgaattaaacagattgaatttagaatcttccaattcaaagtactccttgaatacagattcctcagtgtcttatattgattcagctgtaatttcacctgatactgtcccactgggaacaggaacttccatattatctaaacaggttcaaaataaaccaaaaactggtcgaagtttattaggaggaccagcagctcttagtccattaaccccaagaccttctaatttaagtatactgctgctttatatatgccttgatgactttttgacaccttgatttcaacctcttctcagttttgggattttgccattagaaaccccaagtcctggagatggatcctatttacaaaactacactaatacacctcctgtaattgatgtgccatccaccggagccccttcaaaaaagtctgttgccagaatcggccaaactggaacaaagtctgtcttctcacagagtggaaatagccgagaggtaactccaattcttgcacaaacacaaagttctggtcca

SEQ ID NO: 116171 - DNA, 656 bp, Homo sapiens
  Payload ID: 2658
  Gene Symbol: CDC27
  Gene Name: cell division cycle 27
  ENST ID: ENST00000570818
  CDS Start-End: 1-261
ttgtttttactggcaacctgttattaccgctcaggaaaggcatataaagcatatagactcttgaaaggacacagttgtactacaccgcaatgcaaatacctgcttgcaaaatgttgtgttgatctcagcaagcttgcagaaggggaacaaatcttatctggtggagtgtttaataagcagaaaagccatgatgatattgttactgagtttggtgattcagcttgctttactctttcattgttgggacatgtatattggtgaaaagccagatcctgaccaaacatttaaattcacatctttacagaactttagcaactgtctgcccaactcttgcacaacacaagtacctaatcatagtttatctcacagacagcctgagacagttcttacggaaacaccccaggacacaattgaattaaacagattgaatttagaatcttccaattcaaagtactccttgaatacagattcctcagtgtcttatattgattcagctgtaatttcacctgatactgtcccactgggaacaggaacttccatattatctaaacaggttcaaaataaaccaaaaactggtcgaagtttattaggaggaccagcagctcttagtccattaaccccaagttttgggattttgccattagaaaccccaagtc

SEQ ID NO: 116172 - DNA, 888 bp, Homo sapiens
  Payload ID: 2658
  Gene Symbol: CDC27
  Gene Name: cell division cycle 27
  ENST ID: ENST00000573502
  CDS Start-End: 1-341
caaaaagtaaaactaataaaggaggaataactcaacctaacataaatgatagcctggaaattacaaaattggactcttccatcatttcagaagggaaaatatccacaatcacacctcagattcaggcctttaatctacaaaaagcagcagcaggtttgatgagccttcttcgtgaaatggggaaaggttatttagctttgtgttcatacaactgcaaagaagctataaatattttgagccatctaccttctcaccactacaatactggttgggtactgtgccaaattggaagggcctattttgaactttcagagtacatgcaaaccttttctggcagctgagaattttgaacttggtaaattgataaactaggaaactgattttatataacctaaatcctcaaactttagagggagagaaacacagttctgggagctgtgaatgtgatgaggaaaaaaattgatgaggcagctgaggagagaccctgaagtcaagagagtgctgcaaaggaaaggataattaataggctgaaagaatattctcagaggttagaaggattgagaattatagagttgaaggcatggagatctactctacaacactttggcatcttcaaaaagatgttgctctttcagttctgtcaaaagacttaacagacatggataaaaattcgccagaggcctggtgtgctgcagggaactgtttcagtctgcaacgggaacatgatattgcaattaaattcttccagagagctatccaagttgatccaaattacgcttatgcctatactctattagggcatgagtttgtcttaactgaagaattggacaaagcattagcttgttttcgaaatgctatcagagtcaatcctagacattataatgcatg

SEQ ID NO: 116173 - DNA, 716 bp, Homo sapiens
  Payload ID: 2658
  Gene Symbol: CDC27
  Gene Name: cell division cycle 27
  ENST ID: ENST00000571643
  CDS Start-End: 1-490
agggcatgagtttgtcttaactgaagaattggacaaagcattagcttgttttcgaaatgctatcagagtcaatcctagacattataatgcatggtatggtttaggaatgatttattacaagcaagaaaaattcagccttgcagaaatgcatttccaaaaagcgcttgatatcaaccctcaaagttcagttttactttgccacattggagtagttcaacatgcactgaaaaaatcagagaaggctttggataccctaaacaaagccattgtcattgatcccaagaaccctctatgcaaatttcacagagcctcagttttatttgcaaatgaaaaatataagtctgctttacaagaacttgaagaattgaaacaaattgttcccaaagaatccctcgtttacttcttaataggaaagatcctaaaggagccaataaccagattaaagaggcaattgataagcgttatcttccagatgatgaggagccaataacccaagaagaacagatcatgggaacagatgaatcccaggagagcagcatgacagatgcggatgacacacaacttcatgcagctgaaagtgatgaattttaacttctggaaatcagacttttacaactggatgtgtgactagtgctgacgtgtttcttgtccctctgtatactgagtctttactcttgagctggcggtgtcatcgtccgtcacttataccatgagtg

SEQ ID NO: 116174 - DNA, 583 bp, Homo sapiens
  Payload ID: 2658
  Gene Symbol: CDC27
  Gene Name: cell division cycle 27
  ENST ID: ENST00000573550
  CDS Start-End: 1-226
ttaccgagatgcggttttcctcgcagaacgcctttatgcagaaggcttgcagaaggggaacaaatcttatctggtggagtgtttaataagcagaaaagccatgatgatattgttactgagtttggtgattcagcttgctttactctttcattgttgggacatgtatattgcaagacagatcggcttgccaaaggatcagaatgttaccaaaagagccttagtttaaatcctttcctctggtctccctttgaatcattatgtgaaataggtgaaaagccagatcctgaccaaacatttaaattcacatctttacagaactttagcaactgtctgcccaactcttgcacaacacaagtacctaatcatagtttatctcacagacagcctgagacagttcttacggaaacaccccaggacacaattgttcaaaataaaccaaaaactggtcgaagtttattaggaggaccagcagctcttagtccattaaccccaagttttgggattttgccattagaaaccccaagtcctggagatggatcctatttacaaaactacactaatacacctcctgtaattgatgtgc

SEQ ID NO: 116175 - DNA, 781 bp, Homo sapiens
  Payload ID: 2658
  Gene Symbol: CDC27
  Gene Name: cell division cycle 27
  ENST ID: ENST00000575483
  CDS Start-End: 81-781
aaatgagcaggggctggccgggccggagccgctacagggggggcctgaggcactgcagaaagtgggcctgagcctcgaggatgacggtgctgcaggaacccgtccaggctgctatatggcaagcactaaaccactatgcttaccgagatgcggttttcctcgcagaacgcctttatgcagaagtacactcagaagaagccttgtttttactggcaacctgttattaccgctcaggaaaggcatataaagcatatagactcttgaaaggacacagttgtactacaccgcaatgcaaatacctgcttgcaaaatgttgtgttgatctcagcaagcttgcagaaggggaacaaatcttatctggtggagtgtttaataagcagaaaagccatgatgatattgttactgagtttggtgattcagcttgctttactctttcattgttgggacatgtatattgcaagacagatcggcttgccaaaggatcagaatgttaccaaaagagccttagtttaaatcctttcctctggtctccctttgaatcattatgtgaaataggtgaaaagccagatcctgaccaaacatttaaattcacatctttacagaactttagcaactgtctgcccaactcttgcacaacacaagtacctaatcatagtttatctcacagacagcctgagacagttcttacggaaacaccccaggacacaattgttcaaaataaaccaaaaactggtcgaagtttattaggaggaccagcagctcttagtccattaaccccaag

SEQ ID NO: 116176 - DNA, 594 bp, Homo sapiens
  Payload ID: 2658
  Gene Symbol: CDC27
  Gene Name: cell division cycle 27
  ENST ID: ENST00000570740
  CDS Start-End: 1-100
aataggaaagtgctgctgtttatttttaggtttacaagaagttaggtcaaacgcacctcgccctgatgaatttctcttgggctatggatttagatcctaaaggagccaataaccagattaaagaggcaattgataagcgttatcttccagatgatgaggagccaataacccaagaagaacagatcatgggaacagatgaatcccaggagagcagcatgacagatgcggatgacacacaacttcatgcagctgaaagtgatgaattttaacttctggaaatcagacttttacaactggatgtgtgactagtgctgacgtgtttcttgtccctctgtatactgagtctttactcttgagctggcggtgtcatcgtccgtcacttataccatgagtgtgccactttcattggaccctgactgtatacagaatgaaaggcagtgcaatatttagctgctaacaagactggctcttttaccagtatgaatgacaatttatggggggtagggtggggaactttcttttctgtttttctttaatctccctttgttggaaagtatcatgaaaggaagagttatgctttatcttgaaggaacc

SEQ ID NO: 116177 - DNA, 515 bp, Homo sapiens
  Payload ID: 2658
  Gene Symbol: CDC27
  Gene Name: cell division cycle 27
  ENST ID: ENST00000532893
  CDS Start-End: 90-248
ggtgagtttaaatgagcaggggctggccgggccggagccgctacagggggggcctgaggcactgcagaaagtgggcctgagcctcgaggatgacggtgctgcaggaacccgtccaggctgctatatggcaagcactaaaccactatgcttaccgagatgcggttttcctcgcagaacgcctttatgcagaagcaagacagatcggcttgccaaaggatcagaatgttaccaaaagagccttagtttaaatcctttcctctggtctccctttgaatcattatgtgaaataggtgaaaagccagatcctgaccaaacatttaaattcacatctttacagaactttagcaactgtctgcccaactcttgcacaacacaagtacctaatcatagtttatctcacagacagcctgagacagttcttacggaaacaccccaggacacaattgaattaaacagattgaatttagaatcttccaattcaaagtactccttgaatacagattcctcagtgtctt

SEQ ID NO: 116178 - DNA, 1471 bp, Homo sapiens
  Payload ID: 2659
  Gene Symbol: CDC34
  Gene Name: cell division cycle 34
  Uniprot ID: P49427
  ENST ID: ENST00000215574
  CDS Start-End: 221-931
ggggcgcgcgggcccggccaaggcaagcgccggtggggcggcggcgccagagctgctggagcgctcggggtccccgggcggcggcggcggcgcagaggaggaggcaggcggcggccccggtggctcccccccggacggtgcgcggcccggcccgtctcgcgaactcgcggtggtcgcgcggccccgcgctgctccgaccccgggcccctccgccgccgccatggctcggccgctagtgcccagctcgcagaaggcgctgctgctggagctcaaggggctgcaggaagagccggtcgagggattccgcgtgacactggtggacgagggcgatctatacaactgggaggtggccatcttcgggccccccaacacctactacgagggcggctacttcaaggcgcgcctcaagttccccatcgactacccatactctccaccagcctttcggttcctgaccaagatgtggcaccctaacatctacgagacgggggacgtgtgtatctccatcctccacccgccggtggacgacccccagagcggggagctgccctcagagaggtggaaccccacgcagaacgtcaggaccattctcctgagtgtgatctccctcctgaacgagcccaacaccttctcgcccgcaaacgtggacgcctccgtgatgtacaggaagtggaaagagagcaaggggaaggatcgggagtacacagacatcatccggaagcaggtcctggggaccaaggtggacgcggagcgtgacggcgtgaaggtgcccaccacgctggccgagtactgcgtgaagaccaaggcgccggcgcccgacgagggctcagacctcttctacgacgactactacgaggacggcgaggtggaggaggaggccgacagctgcttcggggacgatgaggatgactctggcacggaggagtcctgacaccaccagaataaacttgccgagtttacctcactagggccggacccgtggctccttagacgacagactacctcacggaggttttgtgctggtccccgtctcctctggttgtttcgttttggctttttctccctccccatgtctgttctgggttttcacgtgcttcagagaagaggggctgccccaccgccactcacgtcactcggggctcggtggacgggcccagggtgggagcggccggcccacctgtcccctcgggaggggagctgagcccgacttctaccggggtcccccagcttccggactggccgcaccccggaggagccacgggggcgctgctgggaacgtgggcggggggccgtttcctgacactaccagcctgggaggcccaggtgtagcggtccgaggggcccggtcctgcctgtcagctccaggtcctggagccacgtccagcacagagtggacggattcaccgtggccgactcttttccctgctttggtttgtttgaaatctaaataaaactactttatgagaggcca

SEQ ID NO: 116179 - DNA, 1147 bp, Homo sapiens
  Payload ID: 2659
  Gene Symbol: CDC34
  Gene Name: cell division cycle 34
  ENST ID: ENST00000586283
  CDS Start-End: 1-440
acgagggcgatctatacaactgggaggtggccatcttcgggccccccaacacctactacgagggcggctacttcaaggcgcgcctcaagttccccatcgactacccatactctccaccagcctttcggttcctgaccaagatgtggcaccctaacatctacgagacgggggacgtgtgtatctccatcctccacccgccggtggacgacccccagagcggggagctgccctcagagaggtggaaccccacgcagaacgtcaggaccattctcctgagtgtgatctccctcctgaacgagcccaacaccttctcgcccgcaaacgtggacgcctccgtgatgtacaggaagtggaaagagagcaaggggaaggatcgggagtacacagacatcatccgcaggtcctggggaccaaggtggacgcggagcgtgacggcgtgaaggtgcccaccacgctggccgagtactgcgtgaagaccaaggcgccggcgcccgacgagggctcagacctcttctacgacgactactacgaggacggcgaggtggaggaggaggccgacagctgcttcggggacgatgaggatgactctggcacggaggagtcctgacaccaccagaataaacttgccgagtttacctcactagggccggacccgtggctccttagacgacagactacctcacggaggttttgtgctggtccccgtctcctctggttgtttcgttttggctttttctccctccccatgtctgttctgggttttcacgtgcttcagagaagaggggctgccccaccgccactcacgtcactcggggctcggtggacgggcccagggtgggagcggccggcccacctgtcccctcgggaggggagctgagcccgacttctaccggggtcccccagcttccggactggccgcaccccggaggagccacgggggcgctgctgggaacgtgggcggggggccgtttcctgacactaccagcctgggaggcccaggtgtagcggtccgaggggcccggtcctgcctgtcagctccaggtcctggagccacgtccagcacagagtggacggattcaccgtggccgactcttttccctgctttggtttgtttgaaatctaaataaaactactttatgagaggcca

SEQ ID NO: 116180 - DNA, 1062 bp, Homo sapiens
  Payload ID: 2659
  Gene Symbol: CDC34
  Gene Name: cell division cycle 34
  ENST ID: ENST00000606065
  CDS Start-End: 1-360
gcgcgcctcaagttccccatcgactacccatactctccaccagcctttcggttcctgaccaagatgtggcaccctaacatctacgagacgggggacgtgtgtatctccatcctccacccgccggtggacgacccccagagcggggagctgccctcagagaggtggaaccccacgcagaacgtcaggaccattctcctgagtgtgatctccctcctgaacgagcccaacaccttctcgcccgcaaacgtggacgcctccgtgatgtacaggaagtggaaagagagcaaggggaaggatcgggagtacacagacatcatccggtcctggggaccaaggtggacgcggagcgtgacggcgtgaaggtgcccaccacgctggccgagtactgcgtgaagaccaaggcgccggcgcccgacgagggctcagacctcttctacgacgactactacgaggacggcgaggtggaggaggaggccgacagctgcttcggggacgatgaggatgactctggcacggaggagtcctgacaccaccagaataaacttgccgagtttacctcactagggccggacccgtggctccttagacgacagactacctcacggaggttttgtgctggtccccgtctcctctggttgtttcgttttggctttttctccctccccatgtctgttctgggttttcacgtgcttcagagaagaggggctgccccaccgccactcacgtcactcggggctcggtggacgggcccagggtgggagcggccggcccacctgtcccctcgggaggggagctgagcccgacttctaccggggtcccccagcttccggactggccgcaccccggaggagccacgggggcgctgctgggaacgtgggcggggggccgtttcctgacactaccagcctgggaggcccaggtgtagcggtccgaggggcccggtcctgcctgtcagctccaggtcctggagccacgtccagcacagagtggacggattcaccgtggccgactcttttccctgctttggtttgtttgaaatctaaataaaactactttatgaga

SEQ ID NO: 116181 - DNA, 357 bp, Homo sapiens
  Payload ID: 2659
  Gene Symbol: CDC34
  Gene Name: cell division cycle 34
  ENST ID: ENST00000607527
  CDS Start-End: 1-324
tacttcaaggcgcgcctcaagttccccatcgactacccatactctccaccagcctttcggttcctgaccaagatgtggcaccctaacatctacgagacgggggacgtgtgtatctccatcctccacccgccggtggacgcggagcgtgacggcgtgaaggtgcccaccacgctggccgagtactgcgtgaagaccaaggcgccggcgcccgacgagggctcagacctcttctacgacgactactacgaggacggcgaggtggaggaggaggccgacagctgcttcggggacgatgaggatgactctggcacggaggagtcctgacaccaccagaataaacttgccgagtttacctca

SEQ ID NO: 116182 - DNA, 1608 bp, Homo sapiens
  Payload ID: 2660
  Gene Symbol: CDC37
  Gene Name: cell division cycle 37
  Uniprot ID: Q16543
  ENST ID: ENST00000222005
  CDS Start-End: 55-1191
tgctgccgccgtcgccgccacccgagccggagcgggctgggccgccaaggcaagatggtggactacagcgtgtgggaccacattgaggtgtctgatgatgaagacgagacgcaccccaacatcgacacggccagtctcttccgctggcggcatcaggcccgggtggaacgcatggagcagttccagaaggagaaggaggaactggacaggggctgccgcgagtgcaagcgcaaggtggccgagtgccagaggaaactgaaggagctggaggtggccgagggcggcaaggcagagctggagcgcctgcaggccgaggcacagcagctgcgcaaggaggagcggagctgggagcagaagctggaggagatgcgcaagaaggagaagagcatgccctggaacgtggacacgctcagcaaagacggcttcagcaagagcatggtaaataccaagcccgagaagacggaggaggactcagaggaggtgagggagcagaaacacaagaccttcgtggaaaaatacgagaaacagatcaagcactttggcatgcttcgccgctgggatgacagccaaaagtacctgtcagacaacgtccacctggtgtgcgaggagacagccaattacctggtcatttggtgcattgacctagaggtggaggagaaatgtgcactcatggagcaggtggcccaccagacaatcgtcatgcaatttatcctggagctggccaagagcctaaaggtggacccccgggcctgcttccggcagttcttcactaagattaagacagccgatcgccagtacatggagggcttcaacgacgagctggaagccttcaaggagcgtgtgcggggccgtgccaagctgcgcatcgagaaggccatgaaggagtacgaggaggaggagcgcaagaagcggctcggccccggcggcctggaccccgtcgaggtctacgagtccctccctgaggaactccagaagtgcttcgatgtgaaggacgtgcagatgctgcaggacgccatcagcaagatggaccccaccgacgcaaagtaccacatgcagcgctgcattgactctggcctctgggtccccaactctaaggccagcgaggccaaggagggagaggaggcaggtcctggggacccattactggaagctgttcccaagacgggcgatgagaaggatgtcagtgtgtgacctgccccagctaccaccgccacctgcttccaggcccctatgtgccccttttcagaaaacagatagatgccatctcgcccgctcctgacttcctctacttgcgctgctcggcccagcctggggggcccgcccagccctccctggcctctccactgtctccactctccagcgcccattcaagtctctgctttgagtcaaggggcttcactgcctgcagccccccatcagcattatgccaaaggcccgggggtccggggaagggcagaggtcaccaggctggtctaccaggtagttggggagggtccccagccaaggggccggctctcgtcactgggctctgttttcactgttcgtctgctgtctgtgtcttctatttggcaaacagcaatgatcttccaataaaagatttcagatgct

SEQ ID NO: 116183 - DNA, 537 bp, Homo sapiens
  Payload ID: 2660
  Gene Symbol: CDC37
  Gene Name: cell division cycle 37
  ENST ID: ENST00000589331
  CDS Start-End: 1-314
tcaacgacgagctggaagccttcaaggagcgtgtgcggggccgtgccaagctgcgcatcgagaaggccatgaaggagtacgaggaggaggagcgcaagaagcggctcggccccggcggcctggaccccgtcgaggtctacgagtccctccctgaggaactccagaagtgcttcgatgtgaaggacgtgcagatgctgcaggacgccatcagcaagatggaccccaccgtgagtaacccccgcgccccatgccttcccggcgggccgtgtgtctcccccagccctgtgtcccaagtctctgaagccggctggtgaaagtgcccctccaaggcttctccaaggagtaaggggggtcgtgtcaccttggcacacacccacatatattgagcacctactgtatcccagtatccagcagataaatgctgagctttgagcgcatgtccttcgtgactgtcactgttactgtgactgagtccagcctcagtttccttatccaaaccacattttctctcaatatcagctcacaaaatgcgtggga

SEQ ID NO: 116184 - DNA, 966 bp, Homo sapiens
  Payload ID: 2660
  Gene Symbol: CDC37
  Gene Name: cell division cycle 37
  ENST ID: ENST00000588869
  CDS Start-End: 33-215
cgagccggagcgggctgggccgccaaggcaagatggtggactacagcgtgtgggaccacattgaggtgtctgatgatgaagacgagacgcaccccaacatcgacacggccagtctcttccgctggcggcatcagacagggccttgctttgtcaccctgagatggcagtggcgccatctcagctcactgcaacttccaccttccgggctcaagtgatcctcctacttctgcctcctgagtagctgggaccacaggcccgggtggaacgcatggagcagttccagaaggagaaggaggaactggacaggggctgccgcgagtgcaagcgcaaggtggccgagtgccagaggaaactgaaggagctggaggtggccgagggcggcaaggcagagctggagcgcctgcaggccgaggcacagcagctgcgcaaggaggagcggagctgggagcagaagctggaggagatgcgcaagaaggagaagagcatgccctggaacgtggacacgctcagcaaagacggcttcagcaagagcatggtaaataccaagcccgagaagacggaggaggactcagaggaggtgagggagcagaaacacaagaccttcgtggaaaaatacgagaaacagatcaagcactttggtgagtggggcttgtgggttatggggggcaaggtcgaggcaggccctttgcctccagggccctccagcaccttgccagcatcttcccacaggcatgcttcgccgctgggatgacagccaaaagtacctgtcagacaacgtccacctggtgtgcgaggagacagccaattacctggtcatttggtgcattgacctagaggtggaggagaaatgtgcactcatggagcaggtggcccaccagacaatcgtcatgcaatttatcctggagctggccaagagcctaaaggtggacccccgggcctgcttccggcagttcttcactaagatta

SEQ ID NO: 116185 - DNA, 1389 bp, Homo sapiens
  Payload ID: 2660
  Gene Symbol: CDC37
  Gene Name: cell division cycle 37
  ENST ID: ENST00000593124
  CDS Start-End: 329-1389
caccggcgcggtacctgcagcgggcggcggcagagtgtgtgggatctcctgtctgtgcgtcggaggatagtgatggaagacaccctgtggcggataccgcagctgccggcccaccgctctatacatcgctgcctcttctaaagcgcttctgccagaggtaaactgaggaaggtcccaggtagccgcggagcgcacccccgtgcccttttcagggcggggtttcccgcgctcggcggaagcggaaggggcggggctccgcgctcctagtctccactgctgccgccgtcgccgccacccgagccggagcgggctgggccgccaaggcaagatggtggactacagcgtgtgggaccacattgaggtgtctgatgatgaagacgagacgcaccccaacatcgacacggccagtctcttccgctggcggcatcaggcccgggtggaacgcatggagcagttccagaaggagaaggaggaactggacaggggctgccgcgagtgcaagcgcaaggtggccgagtgccagaggaaactgaaggagctggaggtggccgagggcggcaaggcagagctggagcgcctgcaggccgaggcacagcagctgcgcaaggaggagcggagctgggagcagaagctggaggagatgcgcaagaaggagaagagcatgccctggaacgtggacacgctcagcaaagacggcttcagcaaggcccatgcccacgctcccgccaccttgatgctcatggcttcgtcaccacctccgccgtggatgggatgggcgctgcgaccacggcccgcccggccgcgctcgaggcgctccgcagccttgccccagcccactccccctctcaccctaccacagagcatggtaaataccaagcccgagaagacggaggaggactcagaggaggtgagggagcagaaacacaagaccttcgtggaaaaatacgagaaacagatcaagcactttggcatgcttcgccgctgggatgacagccaaaagtacctgtcagacaacgtccacctggtgtgcgaggagacagccaattacctggtcatttggtgcattgacctagaggtggaggagaaatgtgcactcatggagcaggtggcccaccagacaatcgtcatgcaatttatcctggagctggccaagagcctaaaggtggacccccgggcctgcttccggcagttcttcactaagattaagacagccgatcgccagtacatggagggcttcaacgacgagctggaagccttcaaggagcgtgtgcggggccgtgccaagctgcgcatcgagaaggccatgaaggagtacgaggaggaggagcgcaagaagcggctcggccccggcggcctggaccccgtcgaggtctacgagtccctccctga

SEQ ID NO: 116186 - DNA, 587 bp, Homo sapiens
  Payload ID: 2660
  Gene Symbol: CDC37
  Gene Name: cell division cycle 37
  ENST ID: ENST00000589625
  CDS Start-End: 1-554
attacctggtcatttggtgcattgacctagaggtggaggagaaatgtgcactcatggagcaggtggcccaccagacaatcgtcatgcaatttatcctggagctggccaagagcctaaaggtggacccccgggcctgcttccggcagttcttcactaagattaagacagccgatcgccagtacatggagggcttcaacgacgagctggaagccttcaaggagcgtgtgcggggccgtgccaagctgcgcatcgagaaggccatgaaggagtacgaggaggaggagcgcaagaagcggctcggccccggcggcctggaccccgtcgaggaactccagaagtgcttcgatgtgaaggacgtgcagatgctgcaggacgccatcagcaagatggaccccaccgacgcaaagtaccacatgcagcgctgcattgactctggcctctgggtccccaactctaaggccagcgaggccaaggagggagaggaggcaggtcctggggacccattactggaagctgttcccaagacgggcgatgagaaggatgtcagtgtgtgacctgccccagctaccaccgccacctgcttccag

SEQ ID NO: 116187 - DNA, 728 bp, Homo sapiens
  Payload ID: 2660
  Gene Symbol: CDC37
  Gene Name: cell division cycle 37
  ENST ID: ENST00000589629
  CDS Start-End: 39-728
gccacccgagccggagcgggctgggccgccaaggcaagatggtggactacagcgtgtgggaccacattgaggtgtctgatgatgaagacgagacgcaccccaacatcgacacggccagtctcttccgctggcggcatcaggcccgggtggaacgcatggagcagttccagaaggagaaggaggaactggacaggggctgccgcgagtgcaagcgcaaggtggccgagtgccagaggaaactgaaggagctggaggtggccgagggcggcaaggcagagctggagcgcctgcaggccgaggcacagcagctgcgcaaggaggagcggagctgggagcagaagctggaggagatgcgcaagaaggagaagagcatgccctggaacgtggacacgctcagcaaagacggcttcagcaagagcatggtaaataccaagcccgagaagacggaggaggactcagaggagttcttcactaagattaagacagccgatcgccagtacatggagggcttcaacgacgagctggaagccttcaaggagcgtgtgcggggccgtgccaagctgcgcatcgagaaggccatgaaggagtacgaggaggaggagcgcaagaagcggctcggccccggcggcctggaccccgtcgaggtctacgagtccctccctgaggaactccagaagtgcttcgatgtgaaggacgtgcagatgctgcaggacgccatcagcaagatg

SEQ ID NO: 116188 - DNA, 3502 bp, Homo sapiens
  Payload ID: 2661
  Gene Symbol: CDC37L1
  Gene Name: cell division cycle 37-like 1
  Uniprot ID: Q7L3B6
  ENST ID: ENST00000381854
  CDS Start-End: 203-1216
tttcttccgccgtccgccggtggcgaggcccaggctgtcgccgggtgtgcagcggcgtcgcggccagtagagggattctgggtaacggcccggacccccggctgggcttctggctcggcgcagcaggttccattcacgccaagtctgttggcagtggcagttgtagggccaagggcggttgtaggacccggagcagccggacatggaacaaccgtggccgcctccgggaccctggagcctccctcgggccgagggtgaggctgaggaagagagtgacttcgacgtgttccccagttctccccgctgcccgcagctgccaggcggcggcgcccagatgtatagccatggaattgaattggcttgccaaaagcagaaagagtttgtgaagagctctgtggcgtgcaaatggaatcttgctgaagctcaacagaaacttggtagcttagcactgcataattctgagtccttggatcaggagcatgccaaagcacaaacagcagtatcagaactgaggcaacgggaagaagagtggcgacagaaagaagaagctctagtacaaagagagaagatgtgtctgtggagcacggatgccattagcaaggatgtttttaataagagttttattaatcaagataaaagaaaagacacagaagatgaagataaatcagaatcatttatgcaaaaatatgagcaaaaaatcagacattttggtatgttgagtcgatgggatgatagccagagatttttgtctgaccatccataccttgtatgtgaagaaactgctaaatatcttattttatggtgttttcacctggaagctgagaagaaaggggctttaatggaacaaatagcacatcaagctgttgtaatgcagtttattatggaaatggccaaaaactgtaatgtggatccaagagggtgttttcgtttatttttccagaaagccaaagcagaggaagaaggttattttgaagcattcaaaaatgaacttgaagctttcaagtcaagagtaagactttattctcaatcacaaagttttcaacctatgacagttcagaatcatgttccccattctggtgttggatctataggtttattagaatccttaccacagaatccagattatcttcagtattctatcagtacagctctctgcagcttaaactcggtggtacataaagaagatgatgaacccaaaatgatggacactgtataatttggttaagactgctgaggccaagtgctattttgttacaagaaaggaagaacttggctattttcttgacacttttatgggtgctgcactttatttttgttcggtttttgatgggagggaaagagtactgaaatgttttgtaaattttttttaatgtgctgctaggttttttgttttgttttgttctgaagagaagagtggtaccatatgttgcaggaagtcaaactggactttttgtggctactaaatttgcttttaatcttattgttctcaattttggaatcaagtatgaaaatctgcacaaatgcaatgtttacaagaactggttgattctgggaggcatctgctacagtctctttttatatggatatgtacatgtcctattctacaaaaatgattaaagataaaaacatacttgtatcccactgctactttagctgtcaaatttggtgtttcatcacattaaaagcaataaatcagtagttggtaatgtactttactaaataagttggggggtacaatttttaaaagtcttaactcttaaatacttgactttcggcaccatcagttaaatccttgactataatacaaatttgatatatacattacatttaccctcaaattattctcaaaactatattccttagaatttgattttaccctgctgactttaagagttataataatatcaaatgtgatgagctaatatagattttctttttaaataagaataacttcaagctcactctttcttaacatagtctgggatctctcagggagtaagttttaaaagaatactaatggcttgtaagaacaaacaggaataataatctgatttttaaatttgtagttattttactcatgttgccttttaatttttgttattttggtttattttttgatgtagccttttaaaaaaggagtcttaaaaatgattttttttttaaaggcaagagaaatcttgtagtgctaactgccttgagctgccaattacctatttctgagaatttggtgactcttattggtaatgatggcatttacaacatttggcatttcccctttttcagctcagttaccatagaatacttccaagctttactacttcctctgtaagtcatttcagttatgccaggatatttgatgattttgtttatgtagaattaggtaacaaagccaattatgctatccttattattgaaggattaatcttatgacttaacataagctttggttatatttgggtgtagtctttggctaagtacccattaaggctagtagcaaacacttggaaggtggctaactgggactgggaatacgtgtctcaacttgagaaaccaaatagtgcgaagggactcagggtggccagacctgtgaccttggcctcatttgtatcttgttttcgctgaggtgatcagacacttagtaccctagaaatggactggaattattgaatcttcttctgtaacatcacaatcttcctggttttcagaataaacgtttttgtgcttttgatataaatatatactctataataaaatgtttgactaatttatatagtagtgtttgtcagcctgtactttttttttttttaaacccatgacctagtcgtagacatttttttctttttgttctgttctgaagcaagctcttatttttccctttctaccaaattgagagaatgggcagacacaggagccatattcctagtttcacagaaatgttacttgaattattattttcccttctttcccaggatttgcctgtaagcattcaaattgttttgaatttcattttgccttctctaagttagaggtatttaatgactgaagactggcaggagagaaagtatcaacaaactgagtaaactattcttgaggggcactgaaaagatgttctttgaaacttgatttatatatttttacttgcaaaagaatatactgtgttttgagtatgaaagtgtgattgggtctgttgtgggaaccactgactgatgccataatttgcacttaaaggctataaattacatagttagccgtactttagtactagaaacagtaaattgacatccttgaactaattcctaccttttttttgtttctgaagaaataaagagtatattaagcaaagggataatttatatttcaggttggacaatttaccctaaacaaattaaaccatggaaagtgcaaacacatgaatgaaacatttttttacatcaaagtatcatcaaagattcttgtttcatttgataaaattaatatttgaataaaaaaatttttaaatcaa

SEQ ID NO: 116189 - DNA, 1244 bp, Homo sapiens
  Payload ID: 2661
  Gene Symbol: CDC37L1
  Gene Name: cell division cycle 37-like 1
  ENST ID: ENST00000381858
  CDS Start-End: 210-1136
ccgactatttcttccgccgtccgccggtggcgaggcccaggctgtcgccgggtgtgcagcggcgtcgcggccagtagagggattctgggtaacggcccggacccccggctgggcttctggctcggcgcagcaggttccattcacgccaagtctgttggcagtggcagttgtagggccaagggcggttgtaggacccggagcagccggacatggaacaaccgtggccgcctccgggaccctggagcctccctcgggccgagggtgaggctgaggaagagagtgacttcgacgtgttccccagttctccccgctgcccgcagctgccaggcggcggcgcccagatgtatagccatggaattgaattggcttgccaaaagcagaaagagtttgtgaagagctctgtggcgtgcaaatggaatcttgctgaagctcaacagaaacttggtagcttagcactgcataattctgagtccttggatcaggagcatgccaaagcacaaacagcagtatcagaactgaggcaacgggaagaagagtggcgacagaaagaagaagctctagtacaaagagagaagatgtgtctgtggagcacggatgccattagcaaggatgtttttaataagagttttattaatcaagataaaagaaaagacacagaagatgaagataaatcagaatcatttatgcaaaaatatgagcaaaaaatcagacattttggtatgttgagtcgatgggatgatagccagagatttttgtctgaccatccataccttgtatgtgaagaaactgctaaatatcttattttatggtgttttcacctggaagctgagaagaaaggggctttaatggaacaaatagcacatcaagctgttgtaatgcagtttattatggaaatggccaaaaactgtaatgtggatccaagagggtgttttcgtttatttttccagaaagccaaagcagaggaagaaggttattttgaagcattcaaaaatgaacttgaagctttcaagtcaagagtaagactttattctcaatcacaaagttttcaacctatgacagttcagaatcatgttccccattctggtgttggatctataggtttattagaatccttaccacaggctccaagattttaagaccagctttagccagtttaatctgttgtctacattgtgagaaggaaagtcttattcaaaagacaatgtgaggagagtcctatatttagttttaaacctcataaagtg

SEQ ID NO: 116190 - DNA, 3848 bp, Homo sapiens
  Payload ID: 2662
  Gene Symbol: CDC40
  Gene Name: cell division cycle 40
  Uniprot ID: O60508
  ENST ID: ENST00000307731
  CDS Start-End: 25-1764
ctccgcagaagatttgttgccgtcatgtcggctgcgattgcagctctggccgcttcctatggttcgggttcagggtccgaatcggactcggacagtgagagcagtcggtgtccgctgccagccgccgactccctcatgcacttgactaaatcgccttcatcaaagccgtctctagcagtggcagtggactcggctccggaggtggcagttaaggaagatttggagactggagttcaccttgaccctgccgtcaaagaagttcagtataatcctacctatgagaccatgtttgctcctgagtttggaccagaaaatccctttaggacacagcaaatggctgcccctagaaatatgctttctggatatgccgaaccagctcatatcaatgatttcatgtttgagcagcaaaggagaacttttgcaacatatggttatgcattagacccttcattagataatcatcaagtgtctgctaaatatattggttctgtagaagaagctgaaaaaaatcaaggtttaactgtatttgaaactggtcagaagaaaacagaaaagaggaaaaagtttaaagaaaatgatgcatccaatattgatggttttttgggaccatgggcaaaatatgtggatgaaaaagatgtagccaaaccttcagaagaagagcaaaaagaattggatgaaatcacagcaaagaggcagaaaaaaggaaaacaggaagaagagaaacctggggaggagaagacaatcttacatgttaaagaaatgtatgactatcaaggcaggtcctatcttcacatacctcaggatgttggtgttaatctacggtcaactatgccacctgagaagtgttatcttcccaaaaaacaaattcatgtgtggtctggacacacaaagggcgtcagtgcagtcagattgtttcctctctctggccatttattgctgtcttgttccatggactgtaaaattaagctatgggaggtttatggagaacggcgctgtctgagaacatttattggtcacagtaaggctgttagggatatctgcttcaatactgcaggaacacagttcctcagtgcagcctatgacaggtatcttaagctctgggacactgagacaggacagtgtatatcaagatttacaaaccgaaaagtaccttattgtgtcaaattcaatcctgatgaagataagcaaaatctctttgtggctgggatgtctgataagaagattgtgcaatgggacattcgaagtggagaaattgtgcaggaatatgatcggcatttgggagctgtcaacaccattgtttttgtggatgagaataggagatttgtgagcacatctgatgataaaagcctaagagtttgggaatgggatatccctgtggatttcaagtacatagcagaacccagtatgcactcaatgcctgcagtgactttgtctccaaatggaaaatggctagcatgccaatcaatggacaaccaaatcttaatttttggagcacagaacagatttagattaaataagaaaaaaatttttaagggccatatggtagcaggctatgcttgtcaggtggacttttcaccagacatgagttatgtgatttcaggagatggaaatggaaaattaaacatttgggactggaagaccacaaaactctacagtcgatttaaagctcatgataaagtgtgtataggtgcagtgtggcatcctcatgaaacttctaaggtcataacatgtggttgggatggtctcattaaattgtgggattaatgagattaatccttaaactagctgggatcatttttgatccattgtcatatttatatttaattattaaatgtatctgatgataacttgatttacagataatgttgatgacattgaccctttgtttaaaaaaagaaactgtaaatttgacataatttcatttgcaacttcattttgttttttataaatgttatttatacagaaagtggctattgactttctatttgacaagtagttataattggcaagcagtttgagtttatactcatgacatactgaaagcatctctttggggtcaagaaagaatccctagtggatttgggattctagaggaggtgttataattaattattcagaaaaatgcatgtatttacctcttcaaccaaaagggcagtaaagaatagggataatatattttaatgtaaatttggaagaaggataaaatcacccacagttactctccctattattttcactgggtcaagttttaatcttttggcttcatgagttccactccctttgatgatatatgttgtatatttttagttgtaaagcagtaatctttaactgtagcattcctctaattataaacagtgaaaaatcaaaatcagtccagagttcttttgttgacttaattcctgatcagtatagacaggactatatatatttaatcagagaattacattatatctgaagatggagctcaggagaatgcaccaagactttgaattgtatttacattcactgtcagtaaagacctggctacgctttgagaaatcaggatctcctaggtcattgcttcgcagctgtgattactgaaatcctcctcataggagataaagtacgaggggtagagtccaagatgtcaacttgtaatttctttgaagtcatatgttttatctttaaaattattcttattttacctgtgaatatatacaacagaactttttaagattaaaaaatttttaaacctctatgtctgaaaaaaaaaatgacactcctggaagatggctagggttccccagtttgagaagcagtggccatggtgaaaaatagtttttgaaaacatcagattataaaatcaagatagtccggacgcggtggcacatgcctgtaatcccagcactttgggaggctgaggcaggtgaatcacctgaggtcaggagttcaagaccagcctggccaacatagtgaaaccccgtctctactaaaaacacaaaaattagccaggcttggtggctggcgcctgtaattccagctactcagaaggctgaggcagggagaattgcttgaacccaggagtggaggttgcagtgagctgagatcatgccactgcactccagcctgggcgacagagcgagactccacctcaaaaaataaaatcaagataacctcttgaatgtaatagctcatagcactttaatttggcaagccatttttcctgttttattataaatctatattagatgtttgaatatggtttgaaatatttcactaccgtgctgaaaaaggttggttgatagcagcttggagtgctaactggaagatcaaaatcatgtctcttgctgataacctaagagcattaagctctgagtccagtgaggtcatagcagtgtatgctccttgcccttacggagtgtctgtttttagaaatttagattttaaaaggcgtgggacatacgaccaggccctatagccacataaatataaatttcatagaaaaagaataaaagcggagatatattttttgacacagaggcacccaaagaaatacaaacattgcctagctgctgccatttctgtaactgcccagaagggtgacagatttctgaaggggaaaggattcagatatgaccttttctttagtcccaaccactagttttaacaaatgtgaattattgaaatgtgaagggacaaaaagaatcatacatttaaactgtcttgttcagcataccaatattgtatgttacaaatcatcatttctaaatctggattgattctgttgtgtttttgactgtttctaaagtaagtgtgtataaaagtctcctttttaaaaagatcatatttttaaataaagcattttttgt

SEQ ID NO: 116191 - DNA, 1977 bp, Homo sapiens
  Payload ID: 2662
  Gene Symbol: CDC40
  Gene Name: cell division cycle 40
  ENST ID: ENST00000368930
  CDS Start-End: 25-1644
ctccgcagaagatttgttgccgtcatgtcggctgcgattgcagctctggccgcttcctatggttcgggttcagggtccgaatcggactcggacagtgagagcagtcggtgtccgctgccagccgccgactccctcatgcacttgactaaatcgccttcatcaaagccgtctctagcagtggcagtggactcggctccggaggtggcagttaaggaagatttggagactggagttcaccttgaccctgccgtcaaagaagttcagtataatcctacctatgagaccatgtttgctcctgagtttggaccagaaaatccctttaggacacagcaaatggctgcccctagaaatatgctttctggatatgccgaaccagctcatatcaatgatttcatgtttgagcagcaaaggagaacttttgcaacatatggttatgcattagacccttcattagataatcatcaagtgtctgctaaatatattggttctgtagaagaagctgaaaaaaatcaaggtttaactgtatttgaaactggtcagaagaaaacagaaaagaggaaaaagtttaaagaaaatgatgcatccaatattgatggttttttgggaccatgggcaaaatatgtggatgaaaaagatgtagccaaaccttcagaagaagagcaaaaagaattggatgaaatcacagcaaagaggcagaaaaaaggaaaacaggaagaagagaaacctggggaggagaagacaatcttacatgttaaagaaatgtatgactatcaaggcaggtcctatcttcacatacctcaggatgttggtgttaatctacggtcaactatgccacctgagaagtgttatcttcccaaaaaacaaattcatgtgtggtctggacacacaaagggcgtcagtgcagtcagattgtttcctctctctggccatttattgctgtcttgttccatggactgtaaaattaagctatgggaggtttatggagaacggcgctgtctgagaacatttattggtcacagtaaggctgttagggatatctgcttcaatactgcaggaacacagttcctcagtgcagcctatgacaggtatcttaagctctgggacactgagacaggacagtgtatatcaagatttacaaaccgaaaagtaccttattgtgtcaaattcaatcctgatgaagataagcaaaatctctttgtggctgggatgtctgataagaagattgtgcaatgggacattcgaagtggagaaattgtgcaggaatatgatcggcatttgggagctgtcaacaccattgtttttgtggatgagaataggagatttgtgagcacatctgatgataaaagcctaagagtttgggaatgggatatccctgtggatttcaagtacatagcagaacccagtatgcactcaatgcctgcagtgactttgtctccaaatggaaaatggctagcatgccaatcaatggacaaccaaatcttaatttttggagcacagaacagatttagattaaataagaaaaaaatttttaagggccatatggtagcaggctatgcttgtcaggtggacttttcaccagacatgagagtccctcagagctttcagaatctgaaggaggtgactgcaggtccccaggaggggtgaggaggatggcaagtgggtgaaggtccagacctcaactcaagagcagctcccctttgatctccttgacatatttggaatccctcacaaatttgcatttgggaaaagagctctcctgcttaaaaaaaatatgaaagcctctatcaataatttattcttaacagcttttgtaatgatttaatttatttaatcagtcctccttctggtggccatatagatattttcccaaatggatgatgttacaaactgatgttatcaacaaactgggcaactaagtttgtgtgtgtgttctgtcattttgtaaaacagaattctgaaaagaagtgttgtaaatga

SEQ ID NO: 116192 - DNA, 3933 bp, Homo sapiens
  Payload ID: 2662
  Gene Symbol: CDC40
  Gene Name: cell division cycle 40
  Uniprot ID: O60508
  ENST ID: ENST00000368932
  CDS Start-End: 102-1841
cgcgctgcacgctgggagtgcaggaccgcgaggcctcaaggacctgggagcctcttcttcttccgccctggcagggtctccgcagaagatttgttgccgtcatgtcggctgcgattgcagctctggccgcttcctatggttcgggttcagggtccgaatcggactcggacagtgagagcagtcggtgtccgctgccagccgccgactccctcatgcacttgactaaatcgccttcatcaaagccgtctctagcagtggcagtggactcggctccggaggtggcagttaaggaagatttggagactggagttcaccttgaccctgccgtcaaagaagttcagtataatcctacctatgagaccatgtttgctcctgagtttggaccagaaaatccctttaggacacagcaaatggctgcccctagaaatatgctttctggatatgccgaaccagctcatatcaatgatttcatgtttgagcagcaaaggagaacttttgcaacatatggttatgcattagacccttcattagataatcatcaagtgtctgctaaatatattggttctgtagaagaagctgaaaaaaatcaaggtttaactgtatttgaaactggtcagaagaaaacagaaaagaggaaaaagtttaaagaaaatgatgcatccaatattgatggttttttgggaccatgggcaaaatatgtggatgaaaaagatgtagccaaaccttcagaagaagagcaaaaagaattggatgaaatcacagcaaagaggcagaaaaaaggaaaacaggaagaagagaaacctggggaggagaagacaatcttacatgttaaagaaatgtatgactatcaaggcaggtcctatcttcacatacctcaggatgttggtgttaatctacggtcaactatgccacctgagaagtgttatcttcccaaaaaacaaattcatgtgtggtctggacacacaaagggcgtcagtgcagtcagattgtttcctctctctggccatttattgctgtcttgttccatggactgtaaaattaagctatgggaggtttatggagaacggcgctgtctgagaacatttattggtcacagtaaggctgttagggatatctgcttcaatactgcaggaacacagttcctcagtgcagcctatgacaggtatcttaagctctgggacactgagacaggacagtgtatatcaagatttacaaaccgaaaagtaccttattgtgtcaaattcaatcctgatgaagataagcaaaatctctttgtggctgggatgtctgataagaagattgtgcaatgggacattcgaagtggagaaattgtgcaggaatatgatcggcatttgggagctgtcaacaccattgtttttgtggatgagaataggagatttgtgagcacatctgatgataaaagcctaagagtttgggaatgggatatccctgtggatttcaagtacatagcagaacccagtatgcactcaatgcctgcagtgactttgtctccaaatggaaaatggctagcatgccaatcaatggacaaccaaatcttaatttttggagcacagaacagatttagattaaataagaaaaaaatttttaagggccatatggtagcaggctatgcttgtcaggtggacttttcaccagacatgagttatgtgatttcaggagatggaaatggaaaattaaacatttgggactggaagaccacaaaactctacagtcgatttaaagctcatgataaagtgtgtataggtgcagtgtggcatcctcatgaaacttctaaggtcataacatgtggttgggatggtctcattaaattgtgggattaatgagattaatccttaaactagctgggatcatttttgatccattgtcatatttatatttaattattaaatgtatctgatgataacttgatttacagataatgttgatgacattgaccctttgtttaaaaaaagaaactgtaaatttgacataatttcatttgcaacttcattttgttttttataaatgttatttatacagaaagtggctattgactttctatttgacaagtagttataattggcaagcagtttgagtttatactcatgacatactgaaagcatctctttggggtcaagaaagaatccctagtggatttgggattctagaggaggtgttataattaattattcagaaaaatgcatgtatttacctcttcaaccaaaagggcagtaaagaatagggataatatattttaatgtaaatttggaagaaggataaaatcacccacagttactctccctattattttcactgggtcaagttttaatcttttggcttcatgagttccactccctttgatgatatatgttgtatatttttagttgtaaagcagtaatctttaactgtagcattcctctaattataaacagtgaaaaatcaaaatcagtccagagttcttttgttgacttaattcctgatcagtatagacaggactatatatatttaatcagagaattacattatatctgaagatggagctcaggagaatgcaccaagactttgaattgtatttacattcactgtcagtaaagacctggctacgctttgagaaatcaggatctcctaggtcattgcttcgcagctgtgattactgaaatcctcctcataggagataaagtacgaggggtagagtccaagatgtcaacttgtaatttctttgaagtcatatgttttatctttaaaattattcttattttacctgtgaatatatacaacagaactttttaagattaaaaaatttttaaacctctatgtctgaaaaaaaaaatgacactcctggaagatggctagggttccccagtttgagaagcagtggccatggtgaaaaatagtttttgaaaacatcagattataaaatcaagatagtccggacgcggtggcacatgcctgtaatcccagcactttgggaggctgaggcaggtgaatcacctgaggtcaggagttcaagaccagcctggccaacatagtgaaaccccgtctctactaaaaacacaaaaattagccaggcttggtggctggcgcctgtaattccagctactcagaaggctgaggcagggagaattgcttgaacccaggagtggaggttgcagtgagctgagatcatgccactgcactccagcctgggcgacagagcgagactccacctcaaaaaataaaatcaagataacctcttgaatgtaatagctcatagcactttaatttggcaagccatttttcctgttttattataaatctatattagatgtttgaatatggtttgaaatatttcactaccgtgctgaaaaaggttggttgatagcagcttggagtgctaactggaagatcaaaatcatgtctcttgctgataacctaagagcattaagctctgagtccagtgaggtcatagcagtgtatgctccttgcccttacggagtgtctgtttttagaaatttagattttaaaaggcgtgggacatacgaccaggccctatagccacataaatataaatttcatagaaaaagaataaaagcggagatatattttttgacacagaggcacccaaagaaatacaaacattgcctagctgctgccatttctgtaactgcccagaagggtgacagatttctgaaggggaaaggattcagatatgaccttttctttagtcccaaccactagttttaacaaatgtgaattattgaaatgtgaagggacaaaaagaatcatacatttaaactgtcttgttcagcataccaatattgtatgttacaaatcatcatttctaaatctggattgattctgttgtgtttttgactgtttctaaagtaagtgtgtataaaagtctcctttttaaaaagatcatatttttaaataaagcattttttgtagaaagtg

SEQ ID NO: 116193 - DNA, 1452 bp, Homo sapiens
  Payload ID: 2663
  Gene Symbol: CDC42
  Gene Name: cell division cycle 42
  Uniprot ID: P60953
  ENST ID: ENST00000315554
  CDS Start-End: 105-680
ggcagccgaggagaccccgcgcagtgctgccaacgccccggtggagaagctgaggtcatcatcagatttgaaatatttaaagtggatacaaaactatttcagcaatgcagacaattaagtgtgttgttgtgggcgatggtgctgttggtaaaacatgtctcctgatatcctacacaacaaacaaatttccatcggaatatgtaccgactgtttttgacaactatgcagtcacagttatgattggtggagaaccatatactcttggactttttgatactgcagggcaagaggattatgacagattacgaccgctgagttatccacaaacagatgtatttctagtctgtttttcagtggtctctccatcttcatttgaaaacgtgaaagaaaagtgggtgcctgagataactcaccactgtccaaagactcctttcttgcttgttgggactcaaattgatctcagagatgacccctctactattgagaaacttgccaagaacaaacagaagcctatcactccagagactgctgaaaagctggcccgtgacctgaaggctgtcaagtatgtggagtgttctgcacttacacagagaggtctgaagaatgtgtttgatgaggctatcctagctgccctcgagcctccggaaactcaacccaaaaggaagtgctgtatattctaaactgttttctccttcccttctttgctgctgcttcctgtcccactactgtagaaagatcgtttaaaaacaaaggaataaaaccatcctgtttgaaagcctctgcgtctttttactcaccaccttagagcaacctctgtattagtttttgatcaagaatgcaatatcatataaattttttgtgatcagtagtcaagttggacttgttttaacgttctgctgcttgagttgcctgatgctcagagctttttggtttggattactattgcaaaagggaacttggtctggctttaagaatgtcctcttggagaaaataacaagagttttaacacttctagatcttagttctagatggagaaagtaacacaaacatcattttactcttatgatcaattgttaattgtaattgcatgacaaaccttatggaaaaggggtgacctagtagagtgtaatggggaagggaggattcttttctggttttcctttgtgcggtgaaactttgtgttgctgttgctttggctgtctgtgctgtagtggagtatttgtcagtctggggtggggaagatattgatgtatctgctactgctttatgagttcatttgttacattatcttttaagaataacatccatttaaacagttgacttacagtttgttaatgctgagatgtaaagctgccacctttatattttcctgcttctgattttattgtgagggaaatatacaattgtggttaccttcaaattttgaaattaaaaatatacaaccgtttgtat

SEQ ID NO: 116194 - DNA, 2256 bp, Homo sapiens
  Payload ID: 2663
  Gene Symbol: CDC42
  Gene Name: cell division cycle 42
  Uniprot ID: P60953
  ENST ID: ENST00000344548
  CDS Start-End: 252-827
gtcaggtgcgtgcccctgtccggcagccgaggagaccccgcgcagtgctgccaacgccccggtggagaagctgagacggagtctcactgtgttgcccaggctggagtgcagtggcgccatcttggctcactgcagtgcgcctctgccccccgagttcaagcgattctcctgcctcaggctcctgagtagctgggactacaggtcatcatcagatttgaaatatttaaagtggatacaaaactatttcagcaatgcagacaattaagtgtgttgttgtgggcgatggtgctgttggtaaaacatgtctcctgatatcctacacaacaaacaaatttccatcggaatatgtaccgactgtttttgacaactatgcagtcacagttatgattggtggagaaccatatactcttggactttttgatactgcagggcaagaggattatgacagattacgaccgctgagttatccacaaacagatgtatttctagtctgtttttcagtggtctctccatcttcatttgaaaacgtgaaagaaaagtgggtgcctgagataactcaccactgtccaaagactcctttcttgcttgttgggactcaaattgatctcagagatgacccctctactattgagaaacttgccaagaacaaacagaagcctatcactccagagactgctgaaaagctggcccgtgacctgaaggctgtcaagtatgtggagtgttctgcacttacacagaaaggcctaaagaatgtatttgacgaagcaatattggctgccctggagcctccagaaccgaagaagagccgcaggtgtgtgctgctatgaacatctctccagagccctttctgcacagctggtgtcggcatcatactaaaagcaatgtttaaatcaaactaaagattaaaaattaaaattcgtttttgcaataatgacaaatgccctgcacctacccacatgcactcgtgtgagacaaggcccataggtatggccccccccttccccctcccagtactagttaattttgagtaattgtattgtcagaaaagtgattagtactatttttttttgttgtttcaaaaaaaaaatttttgtgtgtgtgtgttttttttttttttttttttgttgtttaaaagcaaggcatgcttgtggatgactctgtaacagactaattggaattgttgaagctgctccctggttccactctggagagtaatctgggacatcttagtgttttgttttgtttttttccctcctcttttttttgggggggagtgtgtgtggggtttgttttttagtcttgtttttttaattcattaaccagtggttagcccttaaggggaggaggacggattgattccacattccacttcctagatctagtttagaaaacatgttccccatctggtgctcttaggaaggagtatagtaaatgcctcatttaataacatactcctttttgaaagttgccttttctctccacccttgagtagatccagtatttgatgaaactcatgaaagtgggtggagcccatcttgcccctcctcttttctaggacgcactatatgtgactgtgactttcaaggacatttgtttgccatttgctgatttttttgggaagttaatttctaacttctttcactgataaatgaagaaaagtattgcacctttgaaatgcaccaaatgaattgagtttgtaattaaaaaaatttttttccctttcagtcattgtcttatatgcttagcatagatttgcagctcagtagtatatggtgttcctagaatgcagctgaagacctgttatgtagaggaaatacgaggggtggtgctagaagacagacatctgtggaatgattcacatcctctcaagttaggaggatggaggcctgcttcattaagaagctgggggtagggtgggggtggggagaacacttaacaacatggggaccagtcaggggaatccccttatttctgttttgcatatgaggaaccctagagcagccaggtgaggctctctagtttaataaaaatcatggaaagactcttaatgcagactcttcttaagtgttaatagggattttttcagcttattttggttgcagtttccaatttttaaaaatgttgaggtaatctttcccaccttcccaaacctaattcttgtagatgcattagtgttgaaccaatgctttctcatgtctcaattctttgtatatgcattcttttcagatgtattaaacaaacaaaaacccttcacaa

SEQ ID NO: 116195 - DNA, 2274 bp, Homo sapiens
  Payload ID: 2663
  Gene Symbol: CDC42
  Gene Name: cell division cycle 42
  Uniprot ID: P60953
  ENST ID: ENST00000400259
  CDS Start-End: 293-868
acttccgcgggcacccaactgtgcgtctcctgcgcgctgacgtcaggtgcgtgcccctgtccggcagccgaggagaccccgcgcagtgctgccaacgccccggtggagaagctgaggtgagtgcggggcccgaggttccccgcgggagctgccaccctaccttcccatccccgccgtctccgtcctctcccagtcctcggggacaccccgtctgcgggatcgtggggggcccgggagcacgggtcatcatcagatttgaaatatttaaagtggatacaaaactatttcagcaatgcagacaattaagtgtgttgttgtgggcgatggtgctgttggtaaaacatgtctcctgatatcctacacaacaaacaaatttccatcggaatatgtaccgactgtttttgacaactatgcagtcacagttatgattggtggagaaccatatactcttggactttttgatactgcagggcaagaggattatgacagattacgaccgctgagttatccacaaacagatgtatttctagtctgtttttcagtggtctctccatcttcatttgaaaacgtgaaagaaaagtgggtgcctgagataactcaccactgtccaaagactcctttcttgcttgttgggactcaaattgatctcagagatgacccctctactattgagaaacttgccaagaacaaacagaagcctatcactccagagactgctgaaaagctggcccgtgacctgaaggctgtcaagtatgtggagtgttctgcacttacacagaaaggcctaaagaatgtatttgacgaagcaatattggctgccctggagcctccagaaccgaagaagagccgcaggtgtgtgctgctatgaacatctctccagagccctttctgcacagctggtgtcggcatcatactaaaagcaatgtttaaatcaaactaaagattaaaaattaaaattcgtttttgcaataatgacaaatgccctgcacctacccacatgcactcgtgtgagacaaggcccataggtatggccccccccttccccctcccagtactagttaattttgagtaattgtattgtcagaaaagtgattagtactatttttttttgttgtttcaaaaaaaaaatttttgtgtgtgtgtgttttttttttttttttttttgttgtttaaaagcaaggcatgcttgtggatgactctgtaacagactaattggaattgttgaagctgctccctggttccactctggagagtaatctgggacatcttagtgttttgttttgtttttttccctcctcttttttttgggggggagtgtgtgtggggtttgttttttagtcttgtttttttaattcattaaccagtggttagcccttaaggggaggaggacggattgattccacattccacttcctagatctagtttagaaaacatgttccccatctggtgctcttaggaaggagtatagtaaatgcctcatttaataacatactcctttttgaaagttgccttttctctccacccttgagtagatccagtatttgatgaaactcatgaaagtgggtggagcccatcttgcccctcctcttttctaggacgcactatatgtgactgtgactttcaaggacatttgtttgccatttgctgatttttttgggaagttaatttctaacttctttcactgataaatgaagaaaagtattgcacctttgaaatgcaccaaatgaattgagtttgtaattaaaaaaatttttttccctttcagtcattgtcttatatgcttagcatagatttgcagctcagtagtatatggtgttcctagaatgcagctgaagacctgttatgtagaggaaatacgaggggtggtgctagaagacagacatctgtggaatgattcacatcctctcaagttaggaggatggaggcctgcttcattaagaagctgggggtagggtgggggtggggagaacacttaacaacatggggaccagtcaggggaatccccttatttctgttttgcatatgaggaaccctagagcagccaggtgaggctctctagtttaataaaaatcatggaaagactcttaatgcagactcttcttaagtgttaatagggattttttcagcttattttggttgcagtttccaatttttaaaaatgttgaggtaatctttcccaccttcccaaacctaattcttgtagatgcattagtgttgaaccaatgctttctcatgtctcaattctttgtatatgcattcttttcagatgtatt

SEQ ID NO: 116196 - DNA, 597 bp, Homo sapiens
  Payload ID: 2663
  Gene Symbol: CDC42
  Gene Name: cell division cycle 42
  ENST ID: ENST00000411827
  CDS Start-End: 188-597
cgcggcggggcggtggcaggagggcagctcgctggctgctcgcggcggtgcctgtccgagctcccctccgcgccggccgcgtcctctgggcggggtggccccgagccacggcctccaggctgctcttcctttcggaggtcatcatcagatttgaaatatttaaagtggatacaaaactatttcagcaatgcagacaattaagtgtgttgttgtgggcgatggtgctgttggtaaaacatgtctcctgatatcctacacaacaaacaaatttccatcggaatatgtaccgactgtttttgacaactatgcagtcacagttatgattggtggagaaccatatactcttggactttttgatactgcagggcaagaggattatgacagattacgaccgctgagttatccacaaacagatgtatttctagtctgtttttcagtggtctctccatcttcatttgaaaacgtgaaagaaaagtgggtgcctgagataactcaccactgtccaaagactcctttcttgcttgttgggactcaaattgatctcagagatgacccctctactattgagaaacttgccaagaacaaacagaagcctat

SEQ ID NO: 116197 - DNA, 1976 bp, Homo sapiens
  Payload ID: 2664
  Gene Symbol: CDC45
  Gene Name: cell division cycle 45
  Uniprot ID: O75419
  ENST ID: ENST00000263201
  CDS Start-End: 144-1844
aaagaaaggaaggctgggaactaagaagctattggttggtgatccctggaccaatcggaggagccgtgatttggcgggagtcttgaccgccgccgggctcttggtacctcagcgcgagcgccaggcgtccggccgccgtggctatgttcgtgtccgatttccgcaaagagttctacgaggtggtccagagccagagggtccttctcttcgtggcctcggacgtggatgctctgtgtgcgtgcaagatccttcaggccttgttccagtgtgaccacgtgcaatatacgctggttccagtttctgggtggcaagaacttgaaactgcatttcttgagcataaagaacagtttcattattttattctcataaactgtggagctaatgtagacctattggatattcttcaacctgatgaagacactatattctttgtgtgtgacacccataggccagtcaatgtcgtcaatgtatacaacgatacccagatcaaattactcattaaacaagatgatgaccttgaagttcccgcctatgaagacatcttcagggatgaagaggaggatgaagagcattcaggaaatgacagtgatgggtcagagccttctgagaagcgcacacggttagaagaggagatagtggagcaaaccatgcggaggaggcagcggcgagagtgggaggcccggagaagagacatcctctttgactacgagcagtatgaatatcatgggacatcgtcagccatggtgatgtttgagctggcttggatgctgtccaaggacctgaatgacatgctgtggtgggccatcgttggactaacagaccagtgggtgcaagacaagatcactcaaatgaaatacgtgactgatgttggtgtcctgcagcgccacgtttcccgccacaaccaccggaacgaggatgaggagaacacactctccgtggactgcacacggatctcctttgagtatgacctccgcctggtgctctaccagcactggtccctccatgacagcctgtgcaacaccagctataccgcagccaggttcaagctgtggtctgtgcatggacagaagcggctccaggagttccttgcagacatgggtcttcccctgaagcaggtgaagcagaagttccaggccatggacatctccttgaaggagaatttgcgggaaatgattgaagagtctgcaaataaatttgggatgaaggacatgcgcgtgcagactttcagcattcattttgggttcaagcacaagtttctggccagcgacgtggtctttgccaccatgtctttgatggagagccccgagaaggatggctcagggacagatcacttcatccaggctctggacagcctctccaggagtaacctggacaagctgtaccatggcctggaactcgccaagaagcagctgcgagccacccagcagaccattgccagctgcctttgcaccaacctcgtcatctcccaggggcctttcctgtactgctctctcatggagggcactccagatgtcatgctgttctctaggccggcatccctaagcctgctcagcaaacacctgctcaagtcctttgtgtgttcgacaaagaaccggcgctgcaaactgctgcccctggtgatggctgcccccctgagcatggagcatggcacagtgaccgtggtgggcatccccccagagaccgacagctcggacaggaagaacttttttgggagggcgtttgagaaggcagcggaaagcaccagctcccggatgctgcacaaccattttgacctctcagtaattgagctgaaagctgaggatcggagcaagtttctggacgcacttatttccctcctgtcctaggaatttgattcttccagaatgaccttcttatttatgtaactggctttcatttagattgtaagttatggacatgatttgagatgtagaagccattttttattaaataaaatgcttattttaggctccgtcccc

SEQ ID NO: 116198 - DNA, 1693 bp, Homo sapiens
  Payload ID: 2664
  Gene Symbol: CDC45
  Gene Name: cell division cycle 45
  Uniprot ID: O75419
  ENST ID: ENST00000404724
  CDS Start-End: 32-1594
cgcgagcgccaggcgtccggccgccgtggctatgttcgtgtccgatttccgcaaagagttctacgaggtggtccagagccagagggtccttctcttcgtggcctcggacgtggatgctctgtgtgcgtgcaagatccttcaggccttgttccagtgtgaccacgtgcaatatacgctggttccagtttctgggtggcaagaacttgaaactgcatttcttgagcataaagaacagatcaaattactcattaaacaagatgatgaccttgaagttcccgcctatgaagacatcttcagggatgaagaggaggatgaagagcattcaggaaatgacagtgatgggtcagagccttctgagaagcgcacacggttagaagaggagatagtggagcaaaccatgcggaggaggcagcggcgagagtgggaggcccggagaagagacatcctctttgactacgagcagtatgaatatcatgggacatcgtcagccatggtgatgtttgagctggcttggatgctgtccaaggacctgaatgacatgctgtggtgggccatcgttggactaacagaccagtgggtgcaagacaagatcactcaaatgaaatacgtgactgatgttggtgtcctgcagcgccacgtttcccgccacaaccaccggaacgaggatgaggagaacacactctccgtggactgcacacggatctcctttgagtatgacctccgcctggtgctctaccagcactggtccctccatgacagcctgtgcaacaccagctataccgcagccaggttcaagctgtggtctgtgcatggacagaagcggctccaggagttccttgcagacatgggtcttcccctgaagcaggtgaagcagaagttccaggccatggacatctccttgaaggagaatttgcgggaaatgattgaagagtctgcaaataaatttgggatgaaggacatgcgcgtgcagactttcagcattcattttgggttcaagcacaagtttctggccagcgacgtggtctttgccaccatgtctttgatggagagccccgagaaggatggctcagggacagatcacttcatccaggctctggacagcctctccaggagtaacctggacaagctgtaccatggcctggaactcgccaagaagcagctgcgagccacccagcagaccattgccagctgcctttgcaccaacctcgtcatctcccaggggcctttcctgtactgctctctcatggagggcactccagatgtcatgctgttctctaggccggcatccctaagcctgctcagcaaacacctgctcaagtcctttgtgtgttcgacaaagaaccggcgctgcaaactgctgcccctggtgatggctgcccccctgagcatggagcatggcacagtgaccgtggtgggcatccccccagagaccgacagctcggacaggaagaacttttttgggagggcgtttgagaaggcagcggaaagcaccagctcccggatgctgcacaaccattttgacctctcagtaattgagctgaaagctgaggatcggagcaagtttctggacgcacttatttccctcctgtcctaggaatttgattcttccagaatgaccttcttatttatgtaactggctttcatttagattgtaagttatggacatgatttgagatgtagaagccatttttta

SEQ ID NO: 116199 - DNA, 2090 bp, Homo sapiens
  Payload ID: 2664
  Gene Symbol: CDC45
  Gene Name: cell division cycle 45
  Uniprot ID: O75419
  ENST ID: ENST00000407835
  CDS Start-End: 257-1957
actacccagactgcctctgcttcagccatcgaggactcgggcggaactaagctacaaatccttcttcaaaccacaccaaaaacctattgcaaacgtaaatgctgccccattggaaagaaaggaaggctgggaactaagaagctattggttggtgatccctggaccaatcggaggagccgtgatttggcgggagtcttgaccgccgccgggctcttggtacctcagcgcgagcgccaggcgtccggccgccgtggctatgttcgtgtccgatttccgcaaagagttctacgaggtggtccagagccagagggtccttctcttcgtggcctcggacgtggatgctctgtgtgcgtgcaagatccttcaggccttgttccagtgtgaccacgtgcaatatacgctggttccagtttctgggtggcaagaacttgaaactgcatttcttgagcataaagaacagtttcattattttattctcataaactgtggagctaatgtagacctattggatattcttcaacctgatgaagacactatattctttgtgtgtgacacccataggccagtcaatgtcgtcaatgtatacaacgatacccagatcaaattactcattaaacaagatgatgaccttgaagttcccgcctatgaagacatcttcagggatgaagaggaggatgaagagcattcaggaaatgacagtgatgggtcagagccttctgagaagcgcacacggttagaagaggagatagtggagcaaaccatgcggaggaggcagcggcgagagtgggaggcccggagaagagacatcctctttgactacgagcagtatgaatatcatgggacatcgtcagccatggtgatgtttgagctggcttggatgctgtccaaggacctgaatgacatgctgtggtgggccatcgttggactaacagaccagtgggtgcaagacaagatcactcaaatgaaatacgtgactgatgttggtgtcctgcagcgccacgtttcccgccacaaccaccggaacgaggatgaggagaacacactctccgtggactgcacacggatctcctttgagtatgacctccgcctggtgctctaccagcactggtccctccatgacagcctgtgcaacaccagctataccgcagccaggttcaagctgtggtctgtgcatggacagaagcggctccaggagttccttgcagacatgggtcttcccctgaagcaggtgaagcagaagttccaggccatggacatctccttgaaggagaatttgcgggaaatgattgaagagtctgcaaataaatttgggatgaaggacatgcgcgtgcagactttcagcattcattttgggttcaagcacaagtttctggccagcgacgtggtctttgccaccatgtctttgatggagagccccgagaaggatggctcagggacagatcacttcatccaggctctggacagcctctccaggagtaacctggacaagctgtaccatggcctggaactcgccaagaagcagctgcgagccacccagcagaccattgccagctgcctttgcaccaacctcgtcatctcccaggggcctttcctgtactgctctctcatggagggcactccagatgtcatgctgttctctaggccggcatccctaagcctgctcagcaaacacctgctcaagtcctttgtgtgttcgacaaagaaccggcgctgcaaactgctgcccctggtgatggctgcccccctgagcatggagcatggcacagtgaccgtggtgggcatccccccagagaccgacagctcggacaggaagaacttttttgggagggcgtttgagaaggcagcggaaagcaccagctcccggatgctgcacaaccattttgacctctcagtaattgagctgaaagctgaggatcggagcaagtttctggacgcacttatttccctcctgtcctaggaatttgattcttccagaatgaccttcttatttatgtaactggctttcatttagattgtaagttatggacatgatttgagatgtagaagccattttttattaaataaaatgcttattttaggctccgtcccca

SEQ ID NO: 116200 - DNA, 577 bp, Homo sapiens
  Payload ID: 2664
  Gene Symbol: CDC45
  Gene Name: cell division cycle 45
  ENST ID: ENST00000428937
  CDS Start-End: 1-290
ctgatgaagacactatattctttgtgtgtgacacccataggccagtcaatgtcgtcaatgtatacaacgatacccagatcaaattactcattaaacaagatgatgaccttgaagttcccgcctatgaagacatcttcagggatgaagaggaggatgaagagcattcaggaaatgacagtgatgggtcagagccttctgagaagcgcacacggttagaagaggagatagtggagcaaaccatgcggaggaggcagcggcgagagtgggaggcccggaggataatttattgagtttagaacctttgggccagtggctctgggagtgaacctgtggccgctgcattggagaagagctccaggttgttcgccggtcccatgagtgacaggacagccccaaggtctcccagaagagacatcctctttgactacgagcagtatgaatatcatgggacatcgtcagccatggtgatgtttgagctggcttggatgctgtccaaggacctgaatgacatgctgtggtgggccatcgttggactaacagaccagtgggtgcaagacaagatcactcaaatgaaata

SEQ ID NO: 116201 - DNA, 552 bp, Homo sapiens
  Payload ID: 2664
  Gene Symbol: CDC45
  Gene Name: cell division cycle 45
  ENST ID: ENST00000438587
  CDS Start-End: 76-552
agccatcgaggactcgggcggaactaagctacaaatccttcttcaaaccacaccaaaaacctattgcaaacgtaaatgctgccccattggagggtccttctcttcgtggcctcggacgtggatgctctgtgtgcgtgcaagatccttcaggccttgttccagtgtgaccacgtgcaatatacgctggttccagtttctgggtggcaagaacttgaaactgcatttcttgagcataaagaacagtttcattattttattctcataaactgtggagctaatgtagacctattggatattcttcaacctgatgaagacactatattctttgtgtgtgacacccataggccagtcaatgtcgtcaatgtatacaacgatacccagatcaaattactcattaaacaagatgatgaccttgaagttcccgcctatgaagacatcttcagggatgaagaggaggatgaagagcattcaggaaatgacagtgatgggtcagagccttctgagaagcgcacacggttagaagaggagatagtggagcaaaccatgcggagg

SEQ ID NO: 116202 - DNA, 2072 bp, Homo sapiens
  Payload ID: 2664
  Gene Symbol: CDC45
  Gene Name: cell division cycle 45
  Uniprot ID: O75419
  ENST ID: ENST00000437685
  CDS Start-End: 144-1940
aaagaaaggaaggctgggaactaagaagctattggttggtgatccctggaccaatcggaggagccgtgatttggcgggagtcttgaccgccgccgggctcttggtacctcagcgcgagcgccaggcgtccggccgccgtggctatgttcgtgtccgatttccgcaaagagttctacgaggtggtccagagccagagggtccttctcttcgtggcctcggacgtggatgctctgtgtgcgtgcaagatccttcaggccttgttccagtgtgaccacgtgcaatatacgctggttccagtttctgggtggcaagaacttgaaactgcatttcttgagcataaagaacagtttcattattttattctcataaactgtggagctaatgtagacctattggatattcttcaacctgatgaagacactatattctttgtgtgtgacacccataggccagtcaatgtcgtcaatgtatacaacgatacccagatcaaattactcattaaacaagatgatgaccttgaagttcccgcctatgaagacatcttcagggatgaagaggaggatgaagagcattcaggaaatgacagtgatgggtcagagccttctgagaagcgcacacggttagaagaggagatagtggagcaaaccatgcggaggaggcagcggcgagagtgggaggcccggagtggctctgggagtgaacctgtggccgctgcattggagaagagctccaggttgttcgccggtcccatgagtgacaggacagccccaaggtctcccagaagagacatcctctttgactacgagcagtatgaatatcatgggacatcgtcagccatggtgatgtttgagctggcttggatgctgtccaaggacctgaatgacatgctgtggtgggccatcgttggactaacagaccagtgggtgcaagacaagatcactcaaatgaaatacgtgactgatgttggtgtcctgcagcgccacgtttcccgccacaaccaccggaacgaggatgaggagaacacactctccgtggactgcacacggatctcctttgagtatgacctccgcctggtgctctaccagcactggtccctccatgacagcctgtgcaacaccagctataccgcagccaggttcaagctgtggtctgtgcatggacagaagcggctccaggagttccttgcagacatgggtcttcccctgaagcaggtgaagcagaagttccaggccatggacatctccttgaaggagaatttgcgggaaatgattgaagagtctgcaaataaatttgggatgaaggacatgcgcgtgcagactttcagcattcattttgggttcaagcacaagtttctggccagcgacgtggtctttgccaccatgtctttgatggagagccccgagaaggatggctcagggacagatcacttcatccaggctctggacagcctctccaggagtaacctggacaagctgtaccatggcctggaactcgccaagaagcagctgcgagccacccagcagaccattgccagctgcctttgcaccaacctcgtcatctcccaggggcctttcctgtactgctctctcatggagggcactccagatgtcatgctgttctctaggccggcatccctaagcctgctcagcaaacacctgctcaagtcctttgtgtgttcgacaaagaaccggcgctgcaaactgctgcccctggtgatggctgcccccctgagcatggagcatggcacagtgaccgtggtgggcatccccccagagaccgacagctcggacaggaagaacttttttgggagggcgtttgagaaggcagcggaaagcaccagctcccggatgctgcacaaccattttgacctctcagtaattgagctgaaagctgaggatcggagcaagtttctggacgcacttatttccctcctgtcctaggaatttgattcttccagaatgaccttcttatttatgtaactggctttcatttagattgtaagttatggacatgatttgagatgtagaagccattttttattaaataaaatgcttattttaggctccgtcccc

SEQ ID NO: 116203 - DNA, 568 bp, Homo sapiens
  Payload ID: 2664
  Gene Symbol: CDC45
  Gene Name: cell division cycle 45
  ENST ID: ENST00000455750
  CDS Start-End: 232-568
agaggtgacgcttctttgggggcgggctggagttttctggccgtgaatggcagagcgctaatggccgcctccaatgtggcccaatcagaaagaaaggaaggctgggaactaagaagctattggttggtgatccctggaccaatcggaggagccgtgatttggcgggagtcttgaccgccgccgggctcttggtacctcagcgcgagcgccaggcgtccggccgccgtggctatgttcgtgtccgatttccgcaaagagttctacgaggtggtccagagccagagggtccttctcttcgtggcctcggacgtggatgctctgtgtgcgtgcaagatccttcaggccttgttccagtgtgaccacgtgcaatatacgctggttccagtttctgggtggcaagaacttgaaactgcatttcttgagcataaagaacagtttcattattttattctcataaactgtggagctaatgtagacctattggatattcttcaacctgatgaagacactatattctttgtgtgtgacacccataggccagtcaatgtcgtcaatgtatacaacgata

SEQ ID NO: 116204 - DNA, 6423 bp, Homo sapiens
  Payload ID: 2665
  Gene Symbol: CDC5L
  Gene Name: cell division cycle 5-like
  Uniprot ID: Q99459
  ENST ID: ENST00000371477
  CDS Start-End: 300-2708
tttcttccattctgttttggacatgcgcggggcgtaaggcgctttggccagagtggtttgatggttttgtgttagtcttcctgcagctgagcttccacaagacactttttccctttcagccacccaatatctcgcgagacttgctattctgcgccccctcccaccttgcgcttgcgcagatcttcaaagcagaaggtcgcgcttggaggaagtggcggctttgagtccggtggcccaatcgctgttactacttctctgaagctcctctcggctgcttgccgagacaccctgccgccaagatgcctcgaattatgatcaaggggggcgtatggaggaataccgaggatgaaattctgaaagcagcggtaatgaaatatgggaaaaatcagtggtctaggattgcctcattgctgcatagaaaatcagcaaagcagtgcaaagccagatggtatgaatggctggatccaagcattaagaagacagaatggtccagagaagaagaggaaaaactcttgcacttggccaagttgatgccaactcagtggaggaccattgctccaatcattggaagaacagcggcccagtgcttagaacactatgaatttcttctggataaagctgcccaaagagacaatgaagaggaaacaacagatgatccacgaaaacttaaacctggagaaatagatccaaatccagaaacaaaaccagcgcggcctgatccaattgatatggatgaggatgaacttgagatgctttctgaagccagagcccgcttggctaatactcagggaaagaaggccaagaggaaagcaagagagaaacaattggaagaagcaagacgtcttgctgccctccaaaaaagaagagaacttcgagcagctggcatagaaattcagaagaaaagaaaaaggaagagaggagttgattataatgccgaaatcccatttgaaaaaaagcctgcccttggtttttatgatacttctgaggaaaactaccaagctcttgacgcagatttcaggaaattaagacaacaggatcttgatggggagctaagatctgaaaaagaaggaagagatagaaaaaaagacaaacagcatttgaaaaggaaaaaagaatctgatttaccatcagctattcttcaaactagtggtgtttctgaatttactaaaaagagaagcaaactagtacttcctgcccctcagatttcagatgcagaactccaggaagttgtaaaagtaggccaagcgagtgaaattgcacgtcaaactgccgaggaatctggcataacaaattctgcttccagtacacttttgtctgagtacaatgtcaccaacaacagcgttgctcttagaacaccacgaacaccagcttcccaggacagaattctgcaggaagcccagaacctcatggccctcaccaatgtggacaccccattgaaaggtggacttaataccccattgcatgagagtgacttctcaggtgtaactccacagcgacaagttgtacagactccaaacacagttctctctactccattcaggactccttctaatggagctgaagggctgactccccggagtggaacaactcccaaaccagttattaactctactccgggtagaactcctcttcgagacaagttaaacattaatcccgaggatggaatggcagactatagtgatccctcttacgtgaagcagatggaaagagaatcccgagaacatctccgtttagggttgttgggccttcctgcccctaagaatgattttgaaattgttctaccagaaaatgccgagaaggagctggaagaacgtgaaatagatgatacttacattgaagatgctgctgatgtggatgctcgaaagcaggccatacgagatgcagagcgtgtaaaggaaatgaaacgaatgcataaagctgtccagaaagatctgccaagaccatcagaagtaaatgaaactattctaagacccttaaatgtagaaccgcctttaacagatttacagaaaagtgaagaactaatcaaaaaagaaatgatcacaatgcttcattatgaccttctacatcacccttatgaaccatctggaaataaaaaaggcaaaactgtagggtttggtaccaataattcagagcacattacctatctggaacataatccttatgaaaagttctccaaagaagagctgaaaaaggcccaggatgttttggtgcaggagatggaagtggttaaacaaggaatgagccatggagagctctcaagtgaagcttataaccaggtgtgggaagaatgctacagtcaagttttatatcttcctgggcagagccgctacacacgggccaatctggctagtaaaaaggacagaattgaatcacttgaaaagaggctcgagataaacaggggtcacatgacgacagaagccaagagggctgcaaagatggaaaagaagatgaaaattttgcttgggggttaccagtctcgtgctatggggctcatgaaacagttgaatgacttatgggaccaaattgaacaggctcacttggagttacgcacttttgaagaactcaagaaacatgaagattctgctattccccggaggctagagtgtctaaaagaagacgttcagcgacaacaagaaagagaaaaggaacttcaacatagatatgctgatttgctgctggagaaagagactttaaagtcaaaattctgaagtacagtttatattctgtcacaggattaattaattgccggttttcatactctagaaggctgaaactgatgtttatcttcattgacaaatttacccaccatctgtggtttttcagttgtttattttaaatgatatcgatcttacacattctgtgtataaagaccttaactccacaggacggacattttagagtttaaattattaaggctatcattcttttagtaatgtcatatttgcaaacttttttagttttggcctttaatttaaaaagcctaattttaaagtgctgcctgtgagtaactcttgaataaaaacaaaatataaaaaattgagaatgtagccttttgtttgaagtaattagatacttaagagtgcctgcaaaccagcagctatgtactctgtgtcatatttaatgagtaactcttgggtaatcaaaatggtgatgcagtatcttaaacacttaagaggcagttctttgtggctttgttagtttcagcaaagagtggtcatttctgtatacactgacaagttagattaactttttagtacctcaaattttttttttgttaatatcactttaaagaaggtctcttgtctgccagctacttaaataatttatgggtcagggcttaaaagatttaacttccttgccccattattttcttataagtattttttgacaaaggcattttaaaagttaatttcaagaaggccatcaaacttaaagctctatgtttagcctaagaagtcagttacatcagtgtagaatttggggaatggatagaggtggagatatttaattttatataattcatataaattgatttagttacagtatcagttggctacaagctcattatagactagcaatgttttgacatcaccaaaaacgtttgcccagtcttagaatactagggactataggaagggaagggattcattcattcattcgatattgaatgtataccctgtgccagagtcttagagagagaacaacaaacaaaataggcctagttcttgtttagtagagcttatagtcttttgagaatgacagacaattaaaatccaaatgtttatttggtgattcttatgtgtcagacacttaagtgttgggagataagcagttattaagacagagttcttgctctcatggaggtgacattagtggggaggagatactaagtatgtccagggaaagtatcagaccatgagttttagattctgtggaggaaattaaagtagggtgattatgagatagtgaatgagtggctattttagactggacgatcaaagagacctcttggaaggcagctatgctcaccactataccactgcactgtgccgcaccgtaccactataagctgcacggccaaagagacctcttaaagaagtaacatttaagataacatgtgattgacattttagaatgggctatccttgtgagattcaaggaaagaacatcctaggtggagtgaatagcaaacataaagcctcttttgtatgtttgaggaacaaaaaggacaatgcagctagagtgtcaagaatggcatttctgtatataagacctcgttgtatagagccacataaataaggctataataaggaatttggatcttactttaaatatgataagaatcgatgagaagatctaagcaaaggaatgacatgatcagatttggttttagaaacatcactatctccttagtgtgtaaaatctcaccaggctggagatagggaagccagtccaattaggagcctgatgcagtgatccagacaaaaaaataatagtgattctaactagagtccaggtaatagtagtggagatatgtggagagacatgataggtatatacttaatagtcttatcagacgataaattgatattttcctggtgtgtagtcacttaattcaaatacttttttcagtaagttctgggttttctaggaaaaacttcagtatcatcagtgaataatgatagtgtttcttctgatagttttatttcacttttattgcatgttttgttatctgaaatgtttaggacaatgttaacaataatgatgttagacatttttttttcttattttaatgggaatgtccatagttttaagtttgctgttgggagttagatagtctttatctgaaagacagtgtctctcttttagtttttaaagagtttgaattagaaatggctctggaactttaaacagtataccatttgggcatctattaaagcattcatataattgttctcatttgatgttttgatgaggtatattaatagattttcccacattaaatcatctttgcactcctggaatcaggtagattaatttttaaaagaaattttaaaggatttatagtttatttgcactttttgtagacttgaattatatggatttaaaagttgatctaatattaataaaggctcactttgttttcaaaatttgaagtaattcacatacttatagcctaaaaaaatcggcaggaattacaaaatttcaaaactggcacattgtaaactgcatatgcatttgccaggtagtggtgccacttgaaatggtgaacagacacactgttatcctttgtcagtatcctgtaaagcccaggattctttaccagcaccatacagcgattttggtgactattttaacattcacactgaggccaggggtggtgagtcatgcctgtaatcctagcactttgggaggccaaggtgggaggatcatttgagctcaggagttcaagattagcctgggtaacatagtgagaccctgtctctattaaaaaataataataaaaataacattcacattggtattgttcactaaggtattggttgttaaggcattcattaaggtattgttaaaacttgtgttaagcatgttaaagtctcagtaactttgggatagaaataaaatgtgataaaaagctgaaagaaaccaccacaagggagagtcctttttgaaatattagagacataatgctgtctaataaaaaacgacatcaaagaaaaactacactacagtgactgcagacttaatgttggccaaccatgcatcctccctagaaatgcatttgaatttgatttactaatcttttatttaggaaatttacatttttacattagtgagattggtcttttgggctattgtacttttttttttttttttttgagatggagtcttgctctctcacccaggctggagtgcagtagtgcaatcttggcccactgcaacctctgcctcctgggctcgagtgattctctgcctcagccttccaagtagctgggactacaggcatgtgccaccgcacctggctaatttttgtgtttttagtagagatggggttttgctatgttggccaggctggtcttgaattcctgacctcaggtgatccacctacctcggcctcccaaagtgctagaattacaggtgtgagccaccatgcccagcctggttattgtattttgatattgggattttgctagctctctaaagtaaataggataactgtatatctttttctgtgcattaagcagttataacatgggaatgatttgttcatgaaaggttgaaagtctgtacttacagaacttttgagttcacagtgctttctggaaataatttctttataactgtcagtttcttttgtgactattatgttacctatttttaaatttaagcaactttaaattaaaaaaattgtttttaaaatat

SEQ ID NO: 116205 - DNA, 4810 bp, Homo sapiens
  Payload ID: 2666
  Gene Symbol: CDC6
  Gene Name: cell division cycle 6
  Uniprot ID: Q99741
  ENST ID: ENST00000209728
  CDS Start-End: 472-2154
gctttacccagagtcgccctgccgcaatcgcgcgtctttccaccgaggccccggatgtagattccctcccccgttcagtggtcgtggcctcacagcgactctaagacttggggctctctcattggctgtaactcttccactggattggtagcaaaaaaagaggcggtgcccaaggcgaaaggctctgtgactacagccaatcagaatcgaggccgggctttggcgggaggtgggaacgctgtggccattcggatttggcgcgagcgcggctggagtttgctgctgccgctgtgcagtttgttcaggggcttgtggtggtgagtccgagaggctgcgtgtgagagacgtgagaaggatcctgcactgaggaggtggaaagaagaggattgctcgaggaggcctggggtctgtgaggcagcggagctgggtgaaggctgcgggttccggcgaggcctgagctgtgctgtcgtcatgcctcaaacccgatcccaggcacaggctacaatcagttttccaaaaaggaagctgtctcgggcattgaacaaagctaaaaactccagtgatgccaaactagaaccaacaaatgtccaaaccgtaacctgttctcctcgtgtaaaagccctgcctctcagccccaggaaacgtctgggcgatgacaacctatgcaacactccccatttacctccttgttctccaccaaagcaaggcaagaaagagaatggtccccctcactcacatacacttaagggacgaagattggtatttgacaatcagctgacaattaagtctcctagcaaaagagaactagccaaagttcaccaaaacaaaatactttcttcagttagaaaaagtcaagagatcacaacaaattctgagcagagatgtccactgaagaaagaatctgcatgtgtgagactattcaagcaagaaggcacttgctaccagcaagcaaagctggtcctgaacacagctgtcccagatcggctgcctgccagggaaagggagatggatgtcatcaggaatttcttgagggaacacatctgtgggaaaaaagctggaagcctttacctttctggtgctcctggaactggaaaaactgcctgcttaagccggattctgcaagacctcaagaaggaactgaaaggctttaaaactatcatgctgaattgcatgtccttgaggactgcccaggctgtattcccagctattgctcaggagatttgtcaggaagaggtatccaggccagctgggaaggacatgatgaggaaattggaaaaacatatgactgcagagaagggccccatgattgtgttggtattggacgagatggatcaactggacagcaaaggccaggatgtattgtacacgctatttgaatggccatggctaagcaattctcacttggtgctgattggtattgctaataccctggatctcacagatagaattctacctaggcttcaagctagagaaaaatgtaagccacagctgttgaacttcccaccttataccagaaatcagatagtcactattttgcaagatcgacttaatcaggtatctagagatcaggttctggacaatgctgcagttcaattctgtgcccgcaaagtctctgctgtttcaggagatgttcgcaaagcactggatgtttgcaggagagctattgaaattgtagagtcagatgtcaaaagccagactattctcaaaccactgtctgaatgtaaatcaccttctgagcctctgattcccaagagggttggtcttattcacatatcccaagtcatctcagaagttgatggtaacaggatgaccttgagccaagaaggagcacaagattccttccctcttcagcagaagatcttggtttgctctttgatgctcttgatcaggcagttgaaaatcaaagaggtcactctggggaagttatatgaagcctacagtaaagtctgtcgcaaacagcaggtggcggctgtggaccagtcagagtgtttgtcactttcagggctcttggaagccaggggcattttaggattaaagagaaacaaggaaacccgtttgacaaaggtgtttttcaagattgaagagaaagaaatagaacatgctctgaaagataaagctttaattggaaatatcttagctactggattgccttaaattcttctcttacaccccacccgaaagtattcagctggcatttagagagctacagtcttcattttagtgctttacacattcgggcctgaaaacaaatatgaccttttttacttgaagccaatgaattttaatctatagattctttaatattagcacagaataatatctttgggtcttactatttttacccataaaagtgaccaggtagaccctttttaattacattcactacttctaccacttgtgtatctctagccaatgtgcttgcaagtgtacagatctgtgtagaggaatgtgtgtatatttacctcttcgtttgctcaaacatgagtgggtatttttttgtttgttttttttgttgttgttgtttttgaggcgcgtctcaccctgttgcccaggctggagtgcaatggcgcgttctctgctcactacagcacccgcttcccaggttgaagtgattctcttgcctcagcctcccgagtagctgggattacaggtgcccaccaccgcgcccagctaattttttaatttttagtagagacagggttttaccatgttggccaggctggtcttgaactcctgaccctcaagtgatctgcccaccttggcctccctaagtgctgggattataggcgtgagccaccatgctcagccattaaggtattttgttaagaactttaagtttagggtaagaagaatgaaaatgatccagaaaaatgcaagcaagtccacatggagatttggaggacactggttaaagaatttatttctttgtatagtatactatgttcatggtgcagatactacaacattgtggcattttagactcgttgagtttcttgggcactcccaagggcgttggggtcataaggagactataactctacagattgtgaatatatttattttcaagttgcattctttgtctttttaagcaatcagatttcaagagagctcaagctttcagaagtcaatgtgaaaattccttcctaggctgtcccacagtctttgctgcccttagatgaagccacttgtttcaagatgactactttggggttgggttttcatctaaacacatttttccagtcttattagataaattagtccatatggttggttaatcaagagccttctgggtttggtttggtggcattaaatggcaatttgtgactgagacaccagagggcacccttataacattgactactttgaaaggggatgcttgaggctgaggtagttttgagggaaagggggaagttctagtttgatttgtttgggagattgctgtcctttcataactgaagcaaatgcttgaaatgtaaaccatgtgtgatacgaatgatctgagagccagtgaccaagtctgcttttccctgagctctcctgctgccgcctctacctttctgacatggccttccatttggaacttgatatgtgtacaagtgatctgttggccactgtttcattcatcctgaccactgtatccgtgtaatgtgatctgagctacaacaggtggtatgggatagaggcaaggaaagcagagagagccctctgaaatgaacactacccactggtgtgtgtagcacatgatagtctgtaggcatgagtctgaatgttgttctcacactcctttactagagtattcgttccctctgaaggtagtttgaacatggaaacacagttctatacctagaaggttggaaagtgtctgggactataagggttaacatgcataattgcaaagattgtccgaaggctgatggaaagcagagactgaatgggattgagaacagatgcgaagcttgatttaaattacattttattggatgctgcagccttaagagacgtgactgctttacagtttgtttccacactgtgggcagctgctgtctgttctgtgtccacagtaggatcctgcccaataaggagcagcctccccacctcattgtgtttgaggcttggcgccttcctcttaactgtagggcttgagtcaggaacatggcttgactcgcagtggggctgctatgtatcctccctggcttccagccaaaatcacattggtagattcaaaggggccaaatttctttcccctctatctttccctttcccctggttttggaaatagagttttctgtctactgatttgttagtttccttttcttctcccctcactgtcaatttctaggtcattgctgctcttaagactttagcagttggaacagggttggttctgtcaatgatgcatgaagcagacttagtgtccctgcttggcttctgctgcccttgtgggagcaaaagctgatatatgtttgtcagtaaagtcttaagtgtaattcagactgctgaggaagaaagccctttccttgctggcttttctccctgaagctgagagcttcaggaaggtggtaggagttttagtgggatgggatgggatgggcttgtggttagcagtttttgccaggatcataggctgcttcacttagagtagtggcaaagatgctgacctacattcttccttttgaaggtgatggagtgtgtgtctatatcctggtttatctctctcccccaccccaaggaagctgattaagcttccatagagtgttgggtgttgccatggaaagagcatagacaaaataaattgtgtgtttcaacccca

SEQ ID NO: 116206 - DNA, 541 bp, Homo sapiens
  Payload ID: 2666
  Gene Symbol: CDC6
  Gene Name: cell division cycle 6
  ENST ID: ENST00000577249
  CDS Start-End: 240-541
gtttgctgctgccgctgtgcagtttgttcaggggcttgtggtggtgagtccgagaggctgcgtgtgagagacgtgagaaggatcctgcactgaggaggtggaaagaagaggattgctcgaggaggcctggggtctgtgaggcagcggagctgggtgaaggctgcgggttccggcgaggcctgaggtgaagtgaagggaaaagagctgagctcgctggaggtctgagctgtgctgtcgtcatgcctcaaacccgatcccaggcacaggctacaatcagttttccaaaaaggaagctgtctcgggcattgaacaaagctaaaaactccagtgatgccaaactagaaccaacaaatgtccaaaccgtaacctgttctcctcgtgtaaaagccctgcctctcagccccaggaaacgtctgggcgatgacaacctatgcaacactccccatttacctccttgttctccaccaaagcaaggcaagaaagagaatggtccccctcactcacatacacttaagggacgaagattggtatttgacaatca

SEQ ID NO: 116207 - DNA, 696 bp, Homo sapiens
  Payload ID: 2666
  Gene Symbol: CDC6
  Gene Name: cell division cycle 6
  ENST ID: ENST00000580824
  CDS Start-End: 150-696
ctggagtttgctgctgccgctgtgcagtttgttcaggggcttgtggtggtgagtccgagaggctgcgtgtgagagacgtgagaaggatcctgcactgaggaggtggaaagaagaggattgctcgaggaggcctgggctgtgctgtcgtcatgcctcaaacccgatcccaggcacaggctacaatcagttttccaaaaaggaagctgtctcgggcattgaacaaagctaaaaactccagtgatgccaaactagaaccaacaaatgtccaaaccgtaacctgttctcctcgtgtaaaagccctgcctctcagccccaggaaacgtctgggcgatgacaacctatgcaacactccccatttacctccttgttctccaccaaagcaaggcaagaaagagaatggtccccctcactcacatacacttaagggacgaagattggtatttgacaatcagctgacaattaagtctcctagcaaaagagaactagccaaagttcaccaaaacaaaatactttcttcagttagaaaaagtcaagagatcacaacaaattctgagcagagatgtccactgaagaaagaatctgcatgtgtgagactattcaagcaagaaggcacttgctaccagcaagcaaagctggtcctgaacacagctgtcccagatcggctgcctgccagggaaagggagatggatgtcatca

SEQ ID NO: 116208 - DNA, 584 bp, Homo sapiens
  Payload ID: 2666
  Gene Symbol: CDC6
  Gene Name: cell division cycle 6
  ENST ID: ENST00000473555
  CDS Start-End: 230-584
gtgtttataacagcgcccttccacgtagtaggtagacaacaaatgtcagctgttcttgcatagatttggatgtgaagcaaaagtgaatgctaaaataagtgtgataacataattaggaaataagtgttaatcatcagtataaataaattccatgttagttattttctcttcactttcacatattgactagttgtcctcttattttttttaatctagctgtgctgtcgtcatgcctcaaacccgatcccaggcacaggctacaatcagttttccaaaaaggaagctgtctcgggcattgaacaaagctaaaaactccagtgatgccaaactagaaccaacaaatgtccaaaccgtaacctgttctcctcgtgtaaaagccctgcctctcagccccaggaaacgtctgggcgatgacaacctatgcaacactccccatttacctccttgttctccaccaaagcaaggcaagaaagagaatggtccccctcactcacatacacttaagggacgaagattggtatttgacaatcagctgacaattaagtctcctagcaaaagagaactagccaaagttcaccaaaaca

SEQ ID NO: 116209 - DNA, 3173 bp, Homo sapiens
  Payload ID: 2667
  Gene Symbol: CDC7
  Gene Name: cell division cycle 7
  Uniprot ID: O00311
  ENST ID: ENST00000234626
  CDS Start-End: 120-1844
ttggagacggcgacccaggcatctggggagccacagaagtcgtactcccttaaaccctgctttgctccccctgtggatgtaaccccttagctggcattttgcatctcaattggcttgtgatggaggcgtctttggggattcagatggatgagccaatggctttttctccccagcgtgaccggtttcaggctgaaggctctttaaaaaaaaacgagcagaattttaaacttgcaggtgttaaaaaagatattgagaagctttatgaagctgtaccacagcttagtaatgtgtttaagattgaggacaaaattggagaaggcactttcagctctgtttatttggccacagcacagttacaagtaggacctgaagagaaaattgctctaaaacacttgattccaacaagtcatcctataagaattgcagctgaacttcagtgcctaacagtggctggggggcaagataatgtcatgggagttaaatactgctttaggaagaatgatcatgtagttattgctatgccatatctggagcatgagtcgtttttggacattctgaattctctttcctttcaagaagtacgggaatatatgcttaatctgttcaaagctttgaaacgcattcatcagtttggtattgttcaccgtgatgttaagcccagcaattttttatataataggcgcctgaaaaagtatgccttggtagactttggtttggcccaaggaacccatgatacgaaaatagagcttcttaaatttgtccagtctgaagctcagcaggaaaggtgttcacaaaacaaatcccacataatcacaggaaacaagattccactgagtggcccagtacctaaggagctggatcagcagtccaccacaaaagcttctgttaaaagaccctacacaaatgcacaaattcagattaaacaaggaaaagacggaaaggagggatctgtaggcctttctgtccagcgctctgtttttggagaaagaaatttcaatatacacagctccatttcacatgagagccctgcagtgaaactcatgaagcagtcaaagactgtggatgtactgtctagaaagttagcaacaaaaaagaaggctatttctacaaaagttatgaatagtgctgtgatgaggaaaactgccagttcttgcccagctagcctgacctgtgactgctatgcaacagataaagtttgtagtatttgcctttcaaggcgtcagcaggttgcccctagggcaggtacaccaggattcagagcaccagaggtcttgacaaagtgccccaatcaaactacagcaattgacatgtggtctgcaggtgtcatatttctttctttgcttagtggacgatatccattttataaagcaagtgatgatttaactgctttggcccaaattatgacaattaggggatccagagaaactatccaagctgctaaaacttttgggaaatcaatattatgtagcaaagaagttccagcacaagacttgagaaaactctgtgagagactcaggggtatggattctagcactcccaagttaacaagtgatatacaagggcatgcttctcatcaaccagctatttcagagaagactgaccataaagcttcttgcctcgttcaaacacctccaggacaatactcagggaattcatttaaaaagggggatagtaatagctgtgagcattgttttgatgagtataataccaatttagaaggctggaatgaggtacctgatgaagcttatgacctgcttgataaacttctagatctaaatccagcttcaagaataacagcagaagaagctttgttgcatccattttttaaagatatgagcttgtgataatggatcttcatttaatgtttactgttatgaggtagaataaaaaagaatactttgtaatagccacaagttcttgtttagagaccagagcaggattaataatttattttaacattttagtgtttggtggcacattctaaaatatagattaagaatacttaaaatgcctgggatagttcttgggactaacaacatgatcttctttgagttaaacctacctaagtagattttaggtgggttcctattaggtcagatttttagcttccctaattacctttcactgacatatacagaaaaaggagcagttttagttttaattaattaaaattaacagatgtgatgaggattaaatgaatcaaaagacttaatttgtagattcttttagagttatgagctaggtatagtttggggaaactcaacctggtgctggtgctcttaacaattttgtaaataaagaagataatttccttttctagaggtacatattaggccttttatgaacactaaaacaatgaggaaatgttggtcatggggcaaagtatcacttaaaattgaattcatccatttttaaaaaacacttcatgaaagcattctggtgtgaattgccatttttttcttactggcttctcaattttcttccttctctgcccctacctaaaacattctcctcggaaattacatggtgctgaccacaaagtttctggatgttttattaaatattgtacgtgtttacagttgggaatttaaaataatacatacactggttgataaagggaagctgcaggaccaaggtgaagattgatagtccaaatgcttttcttttttgagttgtatattttttcacaccatcttagatataattaggtagctgctgaaaggaaaagtgaatacagaattgacggtattattggagatttttcctctgcgtagagccatccagatctctgtatcctgttttgactaagtcttaggtgggttgggaagacagataatgaagtaggcaaagagaaaaggacccaagatagaggtttatattcagaaatggtatatatcaatgacagcatatcaaacttcctatgggaaaaagtctggtgggtggtcagctgacagatttcccatttagtagtcatagaatacagaaatagtttagggacatgtattcattttgttattttgagcattgataggtcagtatatctacctaatctgtttggtaagtataggatatataaaccattaccattgatctgtcttatgccataatcttaaaaaaaatttgaatgctcttgaatttgtatattcaataaagttatccttttatatttttta

SEQ ID NO: 116210 - DNA, 3313 bp, Homo sapiens
  Payload ID: 2667
  Gene Symbol: CDC7
  Gene Name: cell division cycle 7
  Uniprot ID: O00311
  ENST ID: ENST00000428239
  CDS Start-End: 260-1984
atctggttcggtctctggcccgagggaagccggtccttcccggctgagctcgcggccagcgctggccggcggattcccattcattcacccttctcctcctccgcccagtactcgtggccagggtcgtatcagttctccgtcaacttgcttggggccttggacgagcctcctggcgcttcctgtcagtggcgaaaagctgctttgctccccctgtggatgtaaccccttagctggcattttgcatctcaattggcttgtgatggaggcgtctttggggattcagatggatgagccaatggctttttctccccagcgtgaccggtttcaggctgaaggctctttaaaaaaaaacgagcagaattttaaacttgcaggtgttaaaaaagatattgagaagctttatgaagctgtaccacagcttagtaatgtgtttaagattgaggacaaaattggagaaggcactttcagctctgtttatttggccacagcacagttacaagtaggacctgaagagaaaattgctctaaaacacttgattccaacaagtcatcctataagaattgcagctgaacttcagtgcctaacagtggctggggggcaagataatgtcatgggagttaaatactgctttaggaagaatgatcatgtagttattgctatgccatatctggagcatgagtcgtttttggacattctgaattctctttcctttcaagaagtacgggaatatatgcttaatctgttcaaagctttgaaacgcattcatcagtttggtattgttcaccgtgatgttaagcccagcaattttttatataataggcgcctgaaaaagtatgccttggtagactttggtttggcccaaggaacccatgatacgaaaatagagcttcttaaatttgtccagtctgaagctcagcaggaaaggtgttcacaaaacaaatcccacataatcacaggaaacaagattccactgagtggcccagtacctaaggagctggatcagcagtccaccacaaaagcttctgttaaaagaccctacacaaatgcacaaattcagattaaacaaggaaaagacggaaaggagggatctgtaggcctttctgtccagcgctctgtttttggagaaagaaatttcaatatacacagctccatttcacatgagagccctgcagtgaaactcatgaagcagtcaaagactgtggatgtactgtctagaaagttagcaacaaaaaagaaggctatttctacaaaagttatgaatagtgctgtgatgaggaaaactgccagttcttgcccagctagcctgacctgtgactgctatgcaacagataaagtttgtagtatttgcctttcaaggcgtcagcaggttgcccctagggcaggtacaccaggattcagagcaccagaggtcttgacaaagtgccccaatcaaactacagcaattgacatgtggtctgcaggtgtcatatttctttctttgcttagtggacgatatccattttataaagcaagtgatgatttaactgctttggcccaaattatgacaattaggggatccagagaaactatccaagctgctaaaacttttgggaaatcaatattatgtagcaaagaagttccagcacaagacttgagaaaactctgtgagagactcaggggtatggattctagcactcccaagttaacaagtgatatacaagggcatgcttctcatcaaccagctatttcagagaagactgaccataaagcttcttgcctcgttcaaacacctccaggacaatactcagggaattcatttaaaaagggggatagtaatagctgtgagcattgttttgatgagtataataccaatttagaaggctggaatgaggtacctgatgaagcttatgacctgcttgataaacttctagatctaaatccagcttcaagaataacagcagaagaagctttgttgcatccattttttaaagatatgagcttgtgataatggatcttcatttaatgtttactgttatgaggtagaataaaaaagaatactttgtaatagccacaagttcttgtttagagaccagagcaggattaataatttattttaacattttagtgtttggtggcacattctaaaatatagattaagaatacttaaaatgcctgggatagttcttgggactaacaacatgatcttctttgagttaaacctacctaagtagattttaggtgggttcctattaggtcagatttttagcttccctaattacctttcactgacatatacagaaaaaggagcagttttagttttaattaattaaaattaacagatgtgatgaggattaaatgaatcaaaagacttaatttgtagattcttttagagttatgagctaggtatagtttggggaaactcaacctggtgctggtgctcttaacaattttgtaaataaagaagataatttccttttctagaggtacatattaggccttttatgaacactaaaacaatgaggaaatgttggtcatggggcaaagtatcacttaaaattgaattcatccatttttaaaaaacacttcatgaaagcattctggtgtgaattgccatttttttcttactggcttctcaattttcttccttctctgcccctacctaaaacattctcctcggaaattacatggtgctgaccacaaagtttctggatgttttattaaatattgtacgtgtttacagttgggaatttaaaataatacatacactggttgataaagggaagctgcaggaccaaggtgaagattgatagtccaaatgcttttcttttttgagttgtatattttttcacaccatcttagatataattaggtagctgctgaaaggaaaagtgaatacagaattgacggtattattggagatttttcctctgcgtagagccatccagatctctgtatcctgttttgactaagtcttaggtgggttgggaagacagataatgaagtaggcaaagagaaaaggacccaagatagaggtttatattcagaaatggtatatatcaatgacagcatatcaaacttcctatgggaaaaagtctggtgggtggtcagctgacagatttcccatttagtagtcatagaatacagaaatagtttagggacatgtattcattttgttattttgagcattgataggtcagtatatctacctaatctgtttggtaagtataggatatataaaccattaccattgatctgtcttatgccataatcttaaaaaaaatttgaatgctcttgaatttgtatattcaataaagttatccttttatatttttta

SEQ ID NO: 116211 - DNA, 701 bp, Homo sapiens
  Payload ID: 2667
  Gene Symbol: CDC7
  Gene Name: cell division cycle 7
  ENST ID: ENST00000426137
  CDS Start-End: 230-701
cggtccttcccggctgagctcgcggccagcgctggccggcggattcccattcattcacccttctcctcctccgcccagtactcgtggccagggtcgtatcagttctccgtcaacttgcttggggccttggacgagcctcctggcgcttcctgtcagtggcgaaaagctgctttgctccccctgtggatgtaaccccttagctggcattttgcatctcaattggcttgtgatggaggcgtctttggggattcagatggatgagccaatggctttttctccccagcgtgaccggtttcaggctgaaggctctttaaaaaaaaacgagcagaattttaaacttgcaggtgttaaaaaagatattgagaagctttatgaagctgtaccacagcttagtaatgtgtttaagattgaggacaaaattggagaaggcactttcagctctgtttatttggccacagcacagttacaagtaggacctgaagagaaaattgctctaaaacacttgattccaacaagtcatcctataagaattgcagctgaacttcagtgcctaacagtggctggggggcaagataatgtcatgggagttaaatactgctttaggaagaatgatcatgtagttattgctatgccatatctggagcatgagtcgtttttggacattctgaattctctttcctttcaagaagtacgggaatata

SEQ ID NO: 116212 - DNA, 4969 bp, Homo sapiens
  Payload ID: 2668
  Gene Symbol: CDC73
  Gene Name: cell division cycle 73
  Uniprot ID: Q6P1J9
  ENST ID: ENST00000367435
  CDS Start-End: 185-1780
cggcggcctgggtggctactgcccctgctgctgtcgtaggcgaggacggctgttagtgctgctgctgttggttcgtcgcggcggcgaaggaggaggaggaagagggcgaggcgacaagagaagaaggaggcaggcgcggcggcagcggcggcgccccgagccggcggaggcgaggggggggaagatggcggacgtgcttagcgtcctgcgacagtacaacatccagaagaaggagattgtggtgaagggagacgaagtgatcttcggggagttctcctggcccaagaatgtgaagaccaactatgttgtttgggggactggaaaggaaggccaacccagagagtactacacattggattccattttatttctacttaataacgtgcacctttctcatcctgtttatgtccgacgtgcagctactgaaaatattcctgtggttagaagacctgatcgaaaagatctacttggatatctcaatggtgaagcgtcaacatcggcaagtatagacagaagcgctcccttagaaataggtcttcagcgatctactcaagtcaaacgagctgcagatgaagttttagcagaagcaaagaaaccacgaattgaggatgaagagtgtgtgcgccttgataaagagagattggctgcccgtttggagggtcacaaagaagggattgtacagactgaacagattaggtctttgtctgaagctatgtcagtggaaaaaattgctgcaatcaaagccaaaattatggctaagaaaagatctactatcaagactgatctagatgatgacataactgcccttaaacagaggagttttgtggatgctgaggtagatgtgacccgagatattgtcagcagagagagagtatggaggacacgaacaactatcttacaaagcacaggaaagaatttttccaagaacatttttgcaattcttcaatctgtaaaagccagagaagaagggcgtgcacctgaacagcgacctgccccaaatgcagcacctgtggatcccactttgcgcaccaaacagcctatcccagctgcctataacagatacgatcaggaaagattcaaaggaaaagaagaaacggaaggcttcaaaattgacactatgggaacctaccatggtatgacactgaaatctgtaacggagggtgcatctgcccggaagactcagactcctgcagcccagccagtaccaagaccagtttctcaagcaagacctcccccaaatcagaagaaaggatctcgaacacccattatcataattcctgcagctaccacctctttaataaccatgcttaatgcaaaagaccttctacaggacctgaaatttgtcccatcagatgaaaagaagaaacaaggttgtcaacgagaaaatgaaactctaatacaaagaagaaaagaccagatgcaaccagggggcactgcaattagtgttacagtaccttatagagtagtagaccagccccttaaacttatgcctcaagactgggaccgcgttgtagccgtttttgtgcagggtcctgcatggcagttcaaaggttggccatggcttttgcctgatggatcaccagttgatatatttgctaaaattaaagccttccatctgaagtatgatgaagttcgtctggatccaaatgttcagaaatgggatgtaacagtattagaactcagctatcacaaacgtcatttggatagaccagtgttcttacggttttgggaaacattggacaggtacatggtaaagcataaatcgcacttgagattctgaattatttggctcctccatttctggaaattgagactcaagctttatgaatttatcaagaacttaaaaatgaagaaggtcacagattgatcttttataagaccttatttgatgctttgtgcttcaaggagatgatacctgtcatccatataagcaaactttttggcttacaactatttttttaatattagccttctagtctgtaatggaaattgtatattttgatagaagttttttctccattggttaaattagcattacttaaaatttgtttctttagaaaataaatgcaggttataaatgtgtgtatatttagagattataaggctctctgagccatcttctgatttttcattgctctataattctttttactgaaaatactatgttatgaatggtattaaattttagtctctggaacatccaaaaccaagcaaagggatgtgactattttgaatgaatcagaatgtcaacttgtatgtacactatatctacacttactcattatttaaaaagaataatgaaaaatctagatcaattcttcaatttgattgaactgttcagccttttcaagatttctttatttacaaatgattacatttaaatgaatgtacattcttctcactgactttggtgattttgaaacctagaatgatgtgtttctatctgtaatatctttccatttgaaaaaaatctcaaaacacagattaaaaccacaataggctgtagtattttttattttgggagccagagtatgatttgggggaagaatatgtatcagccctattgcagtataactttaagctccttttctctttagtccacttttgattgtaatttttatggtataggattttgaatcttctattttaggcttgtcagtcttggagttcttatcttccattatccctaaatattgataaactcccaggcaccaaagaaaacatttgcttaattgtctgaaaagaaacaagagaaaaacactggtatttttatgtctgtattcaatatggtataaaatataaaaactatattttaacttagtgaaatattttactatttctctacttcagacaaaatgttgcatccaaggtacatcaagtgaccatttgccttgaaccttgatttcactttgttttttttttttccttaaaggcaactaggaagctttactttcctaaagtgtttttgccattggaatttttgctgatcacagtcttatgtcatttttttctctgtttttattcccagcaattttctcctaggttaacatatttttggtgaacgtttaggcctttcataggtattaagctgacattatctagcttcttaatgaaatttaacactgtcacaaaaatgagaagttattattttttaagtgatcacatagttcataccactagtaactagaaaagatatttattcacatgatatttacaaggctcttcagaagggaacagtcagcattttaaattactagattttagcatacttaacaaggtttgaacagattctacccctattttcctccctttttagcgtcttctttccttaaagataaaagaaaactcaaatttgtttacattaggctttcttagcatataaatatatttccaaaataaattacatgttgtgtaaactttctccatgatgaaatagtcaaggaccagaatctgtaatatttttatgtaagattacttgtcaagactactacaagtcagtatgaactaccttcccataaagatttttggtatttgtacttatttatgaactttacttgagacagaatatggttaaaattaggaacatctactttgaatgaggtttatttttctattttgaatttgccttatgtatattcaaaggcttatggaaatactgtaaaggaacattaggaaaaggacaaataggctataaccatctatcttaaaatcagacccttagtataagcacctctttttcttttcctctttgacaatttagtctcttatttaggtccatgtaattaatttcattccattattttttagctgtttattctaaaaaacaaaaattttcagccactcccatttattctcccatgacatggtcctatatagcagtacttaacacagtgccttgcacatagtaggcattcagtaaatacttacatgcatgaatgaataatgtattttcagtgtaacaaatttattataaaagtgtagttcgactcttcttggtcttggagtttgagagtacagaattacagggaatgaagagaggtataagtagatattttaatggaaatgaagtataaattaataacttgacttacccctccataagttactgctaactggagatacccttgtatgcccaacctgtaaaggaaaaagttctatttctatatttataggacattcttctcagtcaaggaacagtaagaaatatgtaggtttcaatcagttgctctcaaccctgactgcattttagaatcatttggagagtttttaaaaatatccatgcctgaatcttgattcccattttcatgtaatttgagacaagacctggtcatcagtattttttttaaagttctccaggtaatttgaatgtgcaggaaggattcagaatcactggtttaatttgttattgaaaacagtaccagtattaaatgtgtttcctcttccttcttttctgtatgtatgtgtggtttttgattttttgttgttgttgttgttttgtggccaccctttgcactagaccatcccttttattggtggtattggcctatattcccattgacaaatgcaatttttaattatttatttaatataggagtattttactgtttaatatttaaacaatgtttaatgtatttcattattaactagtattatagtttgtttttttcccatgtctccataacttttactaacatttgtttttagcagcacaacagtaatccatataaaaacaactaattcataatgaggaaaatctcataatttttaaggcagaaagaagtattaatttttgatctgccatgtagaatgagacaaatacagtttgcttatgaaaggaaagtggcatacttttaaattggtctacacagaaaagtaaaagtaaactattcatttaaataagattcattatctaataaatattgagggaatatttttcctaaataaaaatttttctgactgctaacaaaaa

SEQ ID NO: 116213 - DNA, 4683 bp, Homo sapiens
  Payload ID: 2669
  Gene Symbol: CCAR1
  Gene Name: cell division cycle and apoptosis regulator 1
  Uniprot ID: Q8IX12
  ENST ID: ENST00000265872
  CDS Start-End: 120-3572
gaagttggcgcatgcgcctaaagctgacgggtttgaaatggcttcgatgttagccgggacccgactcagatcgatgctatagaagacaaacaagggaaggttttttttccttttgcatcatggctcaatttggaggacagaagaatccgccatgggctactcagtttacagccactgcagtatcacagccagctgcactgggtgttcaacagccatcactccttggagcatctcctaccatttatacacagcaaactgcattggcagcagcaggccttaccacacaaactccagcaaactatcagttaacacaaactgctgcattgcagcaacaagccgcagctgcagcagctgcattacaacagcaatattcacaacctcagcaggccctgtatagtgtgcaacaacagttacagcaaccccagcaaaccctcttaacacagccagctgttgcactgcctacaagccttagcctgtctactcctcagccaacagcacaaataactgtatcatatccaacaccaaggtccagtcaacagcaaacccagcctcagaagcagcgtgttttcacaggggtggttacaaaactacatgatacgtttggatttgtggatgaagatgtattctttcagcttagtgctgtcaaagggaaaaccccccaagtaggtgacagagtattggttgaagctacttataatcctaatatgccttttaaatggaatgcacagagaattcaaacactaccaaatcagaatcagtcgcaaacccagccattactgaagactcctcctgctgtacttcagccaattgcaccacagacaacatttggtgttcagactcagccccagccccagtcactgctgcaggcacagatttcagcagcttctattacaccactattgcagactcaaccacagcccttattacagcagcctcagcaaaaagctggtttattgcagcctcctgttcgtatagtttcacagccacaaccggcacgacgattagatcccccatcccgattttcaggaagaaatgacagaggggatcaagtgcctaacagaaaagatgatcgaagtcgtgagagagagagagaaagacgtagatcgagagaaagatcacctcagaggaaacgttcccgggaaagatctccacgaagagagcgagagcgatcacctcggagagttcgacgtgttgttccacgttacacagttcagttttcaaagttttctttagattgtcccagttgtgacatgatggaactaaggcgccgttatcaaaatttgtatatacctagtgacttttttgatgctcaatttacatgggtggatgctttccctttgtcaagaccatttcagctgggaaattactgcaatttttatgtaatgcacagagaagtagagtccttagaaaaaaatatggccattcttgatccaccagatgctgaccacttatacagtgcaaaggtaatgctgatggctagccctagtatggaagatttatatcataagtcatgtgctcttgctgaggacccacaagaacttcgagatggattccaacatcctgctagacttgttaagtttttagtgggcatgaaaggcaaggatgaagctatggccattggaggccactggtctccttcgttggatggaccagacccagaaaaagatccctctgtgttgattaagactgctattcgttgttgtaaggctctgacaggcattgatctaagtgtgtgcacacaatggtaccgttttgcagagattcgctaccatcgccctgaggagacccacaaggggcgtacagttccagctcatgtggagacagtggttttatttttcccggatgtttggcattgccttcccacccgctcagagtgggaaaccctctcccgaggatacaagcagcagctggtcgagaagcttcagggtgaacgcaaggaggctgatggagaacaggatgaagaagagaaggatgatggtgaagctaaagaaatttctacacctacccattggtctaaacttgatccaaagacaatgaaggtaaatgacctccgaaaagaattagaaagtcgagctcttagttccaaaggattaaaatcccagttaatagcccgattgacaaaacagcttaaagtagaggaacaaaaagaagaacagaaggagttagagaaatctgaaaaagaagaggatgaggatgatgataggaaatctgaagacgataaagaggaagaagaaaggaaacgtcaagaggaaatagaacgccagcgtcgagaaagaagatatattttgcctgatgaaccggccatcattgtacatccaaattgggctgcaaaaagtggcaagtttgattgtagcatcatgtctttgagtgtcctattggactacagattagaggataataaagaacattcatttgaggtttcattgtttgcggaacttttcaacgaaatgcttcaaagagattttggtgtccgtatatacaaatcattactgtctcttcctgagaaagaggacaaaaaagaaaaggataaaaaaagcaaaaaagatgagagaaaagataaaaaagaagaaagagatgatgaaactgatgaaccaaaacccaaacggagaaaatcaggcgatgataaagataaaaaagaagatagagatgaaaggaagaaagaagataaaagaaaagatgattctaaagatgatgatgaaactgaagaagataacaatcaagatgaatatgaccctatggaagcagaagaagctgaggatgaagaagatgatagggatgaggaagaaatgaccaaacgagatgacaaaagagatatcaacagatactgcaaggagaggccctctaaagataaggaaaaagaaaagactcaaatgatcacaattaacagagatctgttaatggcttttgtttattttgatcaaagtcattgtggttaccttcttgaaaaggatttggaagaaatactttatactcttggactacatctttctcgggctcaggtaaagaagcttcttaataaagtagtgctccgtgaatcttgcttttaccggaaattaacagacacctcaaaagatgaagagaaccatgaagagtctgagtcattgcaggaagatatgctaggaaacagattattacttccaacaccaacagtaaagcaggaatcaaaggatgtggaagaaaatgttggcctcattgtgtacaatggtgcaatggtagatgtaggaagcctcttgcaaaaattggaaaagagcgaaaaagtaagagctgaggtagaacagaagctgcagttactagaagaaaaaacagatgaagatgaaaaaaccatattaaatttggagaattccaacaaaagcctctctggtgaactcagagaagttaaaaaggaccttagtcagttacaagaaaacttaaagatttcggaaaacatgaatttacaatttgaaaaccaaatgaataagacaatcagaaacttatctacggtaatggatgaaatccacactgttctcaagaaggataatgtaaagaatgaagacaaagatcaaaaatccaaggagaatggtgccagtgtatgataaaatccatgtagtgatgaggaatggtgttaaataatgtaatatataaaaatcatgatataagaatgtttgaaggtgatgcatgtttgattttagtagtataaatgtattttagttcaaatgatgtataaagttttatgaatgtgagtttctgcttttgaaaattgcttgtaattcctagccttcaaattattaaacactccttgagtgaaataattttgcattgcaaagtgttttaggatgaactttgttatagttttaactccaataaagttcatcagtttaattgactgtagtatttaattaccaaatttcttttattaaaatgcctagaaatttttaatttatagaattattaggttttaaaatttttagttcatctgttaaaatttcagtcaaaatcataaaatagcatgatgcttaatttttgcaagttttttgaaactttttgttttttttactcatcaccaaaaaatcccctcttgatcagtctctaaaagcattcattaaaaattcagttcaggccgggcacggtggctcacacctgtaatcccaacactttgggaggccgaggcaggtggatcacctgaggttaggagttcgagaccagcctggccaacatggtgaaacccggtctctactaaaaatataaaaattagctgggcatggtggtgggtgcctgtaatcccagctacttgggaggctgaggcaggagaatcgcttgaacccaggaggcggaggttgcagtcactcaggatcatgcagctacactccagcctgggcgacaagagtgaaactccatctcaaaaagaaaaaaaaaaaaaatcagtttatttgaaagacagtatatcagaaagaaagaagcaatagagaactagtattgttctttatgggttagactttacataatattagttgtcctgatgtcaatgttactgctttcaattaatttttctactttcccagaatagcatctatattccttttaattttgagggtttaaaaaaaaatgcagtgtatgtcaaatttacagtttagtaccaagccagtagatgtcagtatgatgccttaaattaagtcttctttaattaaagatatttttttaaattaa

SEQ ID NO: 116214 - DNA, 3415 bp, Homo sapiens
  Payload ID: 2669
  Gene Symbol: CCAR1
  Gene Name: cell division cycle and apoptosis regulator 1
  ENST ID: ENST00000540210
  CDS Start-End: 85-1791
cttcgatgttagccgggacccgactcaggtgaagatcgatgctatagaagacaaacaagggaaggttttttttccttttgcatcatggctcaatttggaggacagaagaatccgccatgggctactcagtttacagccactgcagtatcacagccagctgcactgggtgttcaacagccatcactccttggagcatctcctaccatttatacacagcaaactgcattggcagcagcaggccttaccacacaaactccagcaaactatcagttaacacaaactgctgcattgcagcaacaagccgcagctgcagcagctgcattacaacagcaatattcacaacctcagcaggccctgtatagtgtgcaacaacagttacagcaaccccagcaaaccctcttaacacagccagctgttgcactgcctacaagccttagcctgtctactcctcagccaacagcacaaataactgtatcatatccaacaccaaggtccagtcaacagcaaacccagcctcagaagcagcgtgttttcacaggggtggttacaaaactacatgatacgtttggatttgtggatgaagatgtattctttcagcttagtgctgtcaaagggaaaaccccccaagtaggtgacagagtattggttgaagctacttataatcctaatatgccttttaaatggaatgcacagagaattcaaacactaccaaatcagaatcagtcgcaaacccagccattactgaagactcctcctgctgtacttcagccaattgcaccacagacaacatttggtgttcagactcagccccagccccagtcactgctgcaggcacagatttcagcagcttctattacaccactattgcagactcaaccacagcccttattacagcagcctcagcaaaaagctggtttattgcagcctcctgttcgtatagtttcacagccacaaccggcacgacgattagatcccccatcccgattttcaggaagaaatgacagaggggatcaagtgcctaacagaaaagatgatcgaagtcgtgagagagagagagaaagacgtagatcgagagaaagatcacctcagaggaaacgttcccgggaaagatctccacgaagagagcgagagcgatcacctcggagagttcgacgtgttgttccacgttacacagttcagttttcaaagttttctttagattgtcccagttgtgacatgatggaactaaggcgccgttatcaaaatttgtatatacctagtgacttttttgatgctcaatttacatgggtggatgctttccctttgtcaagaccatttcagctgggaaattactgcaatttttatgtaatgcacagagaagtagagtccttagaaaaaaatatggccattcttgatccaccagatgctgaccacttatacagtgcaaaggtaatgctgatggctagccctagtatggaagatttatatcataagtcatgtgctcttgctgaggacccacaagaacttcgagatggattccaacatcctgctagacttgttaagtttttagtgggcatgaaaggcaaggatgaagctatggccattggaggccactggtctccttcgttggatggaccagacccagaaaaagatccctctgtgttgattaagactgctattcgttgttgtaaggctctgacaggcattgatctaagtgtgtgcacacaatggatgaagaagagaaggatgatggtgaagctaaagaaatttctacacctacccattggtctaaacttgatccaaagacaatgaaggtaaatgacctccgaaaagaattagaaagtcgagctcttagttccaaaggattaaaatcccagttaatagcccgattgacaaaacagcttaaagtagaggaacaaaaagaagaacagaaggagttagagaaatctgaaaaagaagaggatgaggatgatgataggaaatctgaagacgataaagaggaagaagaaaggaaacgtcaagaggaaatagaacgccagcgtcgagaaagaagatatattttgcctgatgaaccggccatcattgtacatccaaattgggctgcaaaaagtggcaagtttgattgtagcatcatgtctttgagtgtcctattggactacagattagaggataataaagaacattcatttgaggtttcattgtttgcggaacttttcaacgaaatgcttcaaagagattttggtgtccgtatatacaaatcattactgtctcttcctgagaaagaggacaaaaaagaaaaggataaaaaaagcaaaaaagatgagagaaaagataaaaaagaagaaagagatgatgaaactgatgaaccaaaacccaaacggagaaaatcaggcgatgataaagataaaaaagaagatagagatgaaaggaagaaagaagataaaagaaaagatgattctaaagatgatgatgaaactgaagaagataacaatcaagatgaatatgaccctatggaagcagaagaagctgaggatgaagaagatgatagggatgaggaagaaatgaccaaacgagatgacaaaagagatatcaacagatactgcaaggagaggccctctaaagataaggaaaaagaaaagactcaaatgatcacaattaacagagatctgttaatggcttttgtttattttgatcaaagtcattgtggttaccttcttgaaaaggatttggaagaaatactttatactcttggactacatctttctcgggctcaggtaaagaagcttcttaataaagtagtgctccgtgaatcttgcttttaccggaaattaacagacacctcaaaagatgaagagaaccatgaagagtctgagtcattgcaggaagatatgctaggaaacagattattacttccaacaccaacagtaaagcaggaatcaaaggatgtggaagaaaatgttggcctcattgtgtacaatggtgcaatggtagatgtaggaagcctcttgcaaaaattggaaaagagcgaaaaagtaagagctgaggtagaacagaagctgcagttactagaagaaaaaacagatgaagatgaaaaaaccatattaaatttggagaattccaacaaaagcctctctggtgaactcagagaagttaaaaaggaccttagtcagttacaagaaaacttaaagatttcggaaaacatgaatttacaatttgaaaaccaaatgaataagacaatcagaaacttatctacggtaatggatgaaatccacactgttctcaagaaggataatgtaaagaatgaagacaaagatcaaaaatccaaggagaatggtgccagtgtatgataaaatccatgtagtgatgaggaatggtgttaaataatgtaatatataaaaatcatgatataagaatgtttgaaggtgatgcatgtttg

SEQ ID NO: 116215 - DNA, 2407 bp, Homo sapiens
  Payload ID: 2669
  Gene Symbol: CCAR1
  Gene Name: cell division cycle and apoptosis regulator 1
  ENST ID: ENST00000543225
  CDS Start-End: 92-2407
gggtttgaaatggcttcgatgttagccgggacccgactcagatcgatgctatagaagacaaacaagggaaggttttttttccttttgcatcatggctcaatttggaggacagaagaatccgccatgggctactcagtttacagccactgcagtatcacagccagctgcactgggtgttcaacagccatcactccttggagcatctcctaccatttatacacagcaaactgcattggcagcagcaggccttaccacacaaactccagcaaactatcagttaacacaaactgctgcattgcagcaacaagccgcagctgcagcagctgcattacaacagccagctgttgcactgcctacaagccttagcctgtctactcctcagccaacagcacaaataactgtatcatatccaacaccaaggtccagtcaacagcaaacccagcctcagaagcagcgtgttttcacaggggtggttacaaaactacatgatacgtttggatttgtggatgaagatgtattctttcagcttagtgctgtcaaagggaaaaccccccaagtaggtgacagagtattggttgaagctacttataatcctaatatgccttttaaatggaatgcacagagaattcaaacactaccaaatcagaatcagtcgcaaacccagccattactgaagactcctcctgctgtacttcagccaattgcaccacagacaacatttggtgttcagactcagccccagccccagtcactgctgcaggcacagatttcagcagcttctattacaccactattgcagactcaaccacagcccttattacagcagcctcagcaaaaagctggtttattgcagcctcctgttcgtatagtttcacagccacaaccggcacgacgattagatcccccatcccgattttcaggaagaaatgacagaggggatcaagtgcctaacagaaaagatgatcgaagtcgtgagagagagagagaaagacgtagatcgagagaaagatcacctcagaggaaacgttcccgggaaagatctccacgaagagagcgagagcgatcacctcggagagttcgacgtgttgttccacgttacacagttcagttttcaaagttttctttagattgtcccagttgtgacatgatggaactaaggcgccgttatcaaaatttgtatatacctagtgacttttttgatgctcaatttacatgggtggatgctttccctttgtcaagaccatttcagctgggaaattactgcaatttttatgtaatgcacagagaagtagagtccttagaaaaaaatatggccattcttgatccaccagatgctgaccacttatacagtgcaaaggtaatgctgatggctagccctagtatggaagatttatatcataagtcatgtgctcttgctgaggacccacaagaacttcgagatggattccaacatcctgctagacttgttaagtttttagtgggcatgaaaggcaaggatgaagctatggccattggaggccactggtctccttcgttggatggaccagacccagaaaaagatccctctgtgttgattaagactgctattcgttgttgtaaggctctgacaggcattgatctaagtgtgtgcacacaatggtaccgttttgcagagattcgctaccatcgccctgaggagacccacaaggggcgtacagttccagctcatgtggagacagtggttttatttttcccggatgtttggcattgccttcccacccgctcagagtgggaaaccctctcccgaggatacaagcagcagctggtcgagaagcttcagggtgaacgcaaggaggctgatggagaacaggatgaagaagagaaggatgatggtgaagctaaagaaatttctacacctacccattggtctaaacttgatccaaagacaatgaaggtaaatgacctccgaaaagaattagaaagtcgagctcttagttccaaaggattaaaatcccagttaatagcccgattgacaaaacagcttaaagtagaggaacaaaaagaagaacagaaggagttagagaaatctgaaaaagaagaggatgaggatgatgataggaaatctgaagacgataaagaggaagaagaaaggaaacgtcaagaggaaatagaacgccagcgtcgagaaagaagatatattttgcctgatgaaccggccatcattgtacatccaaattgggctgcaaaaagtggcaagtttgattgtagcatcatgtctttgagtgtcctattggactacagattagaggataataaagaacattcatttgaggtttcattgtttgcggaacttttcaacgaaatgcttcaaagagattttggtgtccgtatatacaaatcattactgtctcttcctgagaaagaggac

SEQ ID NO: 116216 - DNA, 552 bp, Homo sapiens
  Payload ID: 2669
  Gene Symbol: CCAR1
  Gene Name: cell division cycle and apoptosis regulator 1
  ENST ID: ENST00000536391
  CDS Start-End: 196-552
cttcagagcaagcgcaagacatatagccccgctcattgttaagcgaggccaaggcaacccttaggcgcgctctatttcccctttcgtagcgaaagggccaggcgtattgagcggtcaggggagcgcgcacgcagaacgtcagccaatcgatgctatagaagacaaacaagggaaggttttttttccttttgcatcatggctcaatttggaggacagaagaatccgccatgggctactcagtttacagccactgcagtatcacagccagctgcactgggtgttcaacagccatcactccttggagcatctcctaccatttatacacagcaaactgcattggcagcagcaggccttaccacacaaactccagcaaactatcagttaacacaaactgctgcattgcagcaacaagccgcagctgcagcagctgcattacaacagcaatattcacaacctcagcaggccctgtatagtgtgcaacaacagttacagcaaccccagcaaaccctcttaacacagccagctgttgcactgcctacaagccttagcctg

SEQ ID NO: 116217 - DNA, 869 bp, Homo sapiens
  Payload ID: 2669
  Gene Symbol: CCAR1
  Gene Name: cell division cycle and apoptosis regulator 1
  ENST ID: ENST00000543706
  CDS Start-End: 1-869
gtctaaacttgatccaaagacaatgaaggtaaatgacctccgaaaagaattagaaagtcgagctcttagttccaaaggattaaaatcccagttaatagcccgattgacaaaacagcttaaagtagaggaacaaaaagaagaacagaaggagttagagaaatctgaaaaagaagaggatgaggatgatgataggaaatctgaagacgataaagaggaagaagaaaggaaacgtcaagaggaaatagaacgccagcgtcgagaaagaagatatattttgcctgatgaaccggccatcattgtacatccaaattgggctgcaaaaagtggcaagtttgattgtagcatcatgtctttgagtgtcctattggactacagattagaggataataaagaacattcatttgagaaagaagataaaagaaaagatgattctaaagatgatgatgaaactgaagaagataacaatcaagatgaatatgaccctatggaagcagaagaagctgaggatgaagaagatgatagggatgaggaagaaatgaccaaacgagatgacaaaagagatatcaacagatactgcaaggagaggccctctaaagataaggaaaaagaaaagactcaaatgatcacaattaacagagatctgttaatggcttttgtttattttgatcaaagtcattgtggttaccttcttgaaaaggatttggaagaaatactttatactcttggactacatctttctcgggctcaggtaaagaagcttcttaataaagtagtgctccgtgaatcttgcttttaccggaaattaacagacacctcaaaagatgaagagaaccatgaagagtctgagtcattgcaggaagatatgctag

SEQ ID NO: 116218 - DNA, 2432 bp, Homo sapiens
  Payload ID: 2669
  Gene Symbol: CCAR1
  Gene Name: cell division cycle and apoptosis regulator 1
  ENST ID: ENST00000541012
  CDS Start-End: 107-1813
gcgcctaaagctgacgggtttgaaatggcttcgatgttagccgggacccgactcagatcgatgctatagaagacaaacaagggaaggttttttttccttttgcatcatggctcaatttggaggacagaagaatccgccatgggctactcagtttacagccactgcagtatcacagccagctgcactgggtgttcaacagccatcactccttggagcatctcctaccatttatacacagcaaactgcattggcagcagcaggccttaccacacaaactccagcaaactatcagttaacacaaactgctgcattgcagcaacaagccgcagctgcagcagctgcattacaacagcaatattcacaacctcagcaggccctgtatagtgtgcaacaacagttacagcaaccccagcaaaccctcttaacacagccagctgttgcactgcctacaagccttagcctgtctactcctcagccaacagcacaaataactgtatcatatccaacaccaaggtccagtcaacagcaaacccagcctcagaagcagcgtgttttcacaggggtggttacaaaactacatgatacgtttggatttgtggatgaagatgtattctttcagcttagtgctgtcaaagggaaaaccccccaagtaggtgacagagtattggttgaagctacttataatcctaatatgccttttaaatggaatgcacagagaattcaaacactaccaaatcagaatcagtcgcaaacccagccattactgaagactcctcctgctgtacttcagccaattgcaccacagacaacatttggtgttcagactcagccccagccccagtcactgctgcaggcacagatttcagcagcttctattacaccactattgcagactcaaccacagcccttattacagcagcctcagcaaaaagctggtttattgcagcctcctgttcgtatagtttcacagccacaaccggcacgacgattagatcccccatcccgattttcaggaagaaatgacagaggggatcaagtgcctaacagaaaagatgatcgaagtcgtgagagagagagagaaagacgtagatcgagagaaagatcacctcagaggaaacgttcccgggaaagatctccacgaagagagcgagagcgatcacctcggagagttcgacgtgttgttccacgttacacagttcagttttcaaagttttctttagattgtcccagttgtgacatgatggaactaaggcgccgttatcaaaatttgtatatacctagtgacttttttgatgctcaatttacatgggtggatgctttccctttgtcaagaccatttcagctgggaaattactgcaatttttatgtaatgcacagagaagtagagtccttagaaaaaaatatggccattcttgatccaccagatgctgaccacttatacagtgcaaaggtaatgctgatggctagccctagtatggaagatttatatcataagtcatgtgctcttgctgaggacccacaagaacttcgagatggattccaacatcctgctagacttgttaagtttttagtgggcatgaaaggcaaggatgaagctatggccattggaggccactggtctccttcgttggatggaccagacccagaaaaagatccctctgtgttgattaagactgctattcgttgttgtaaggctctgacaggcattgatctaagtgtgtgcacacaatggatgaagaagagaaggatgatggtgaagctaaagaaatttctacacctacccattggtctaaacttgatccaaagacaatgaaggtaaatgacctccgaaaagaattagaaagtcgagctcttagttccaaaggattaaaatcccagttaatagcccgattgacaaaacagcttaaagtagaggaacaaaaagaagaacagaaggagttagagaaatctgaaaaagaagaggatgaggatgatgataggaaatctgaagacgataaagaggaagaagaaaggaaacgtcaagaggaaatagaacgccagcgtcgagaaagaagatatattttgcctgatgaaccggccatcattgtacatccaaattgggctgcaaaaagtggcaagtttgattgtagcatcatgtctttgagtgtcctattggactacagattagaggataataaagaacattcatttgaggtttcattgtttgcggaacttttcaacgaaatgcttcaaagagattttggtgtccgtatatacaaatcattactgtctcttcctgagaaagaggacaaaaaagaaaaggataaaaaaagcaaaaaagatgagagaaaagataaaaaagaagaaagagatgatgaaactgatgaaccaaaacccaaacggagaaaatcaggcgatgataaagataaaaaagaagatagagatgaaaggaa

SEQ ID NO: 116219 - DNA, 3224 bp, Homo sapiens
  Payload ID: 2669
  Gene Symbol: CCAR1
  Gene Name: cell division cycle and apoptosis regulator 1
  ENST ID: ENST00000539539
  CDS Start-End: 95-3224
gacgggtttgaaatggcttcgatgttagccgggacccgactcagatcgatgctatagaagacaaacaagggaaggttttttttccttttgcatcatggctcaatttggaggacagaagaatccgccatgggctactcagtttacagccactgcagtatcacagccagctgcactgggtgttcaacagccatcactccttggagcatctcctaccatttatacacagcaaactgcattggcagcagcaggccttaccacacaaactccagcaaactatcagttaacacaaactgctgcattgcagcaacaagccgcagctgcagcagctgcattacaacagttacagcaaccccagcaaaccctcttaacacagccagctgttgcactgcctacaagccttagcctgtctactcctcagccaacagcacaaataactgtatcatatccaacaccaaggtccagtcaacagcaaacccagcctcagaagcagcgtgttttcacaggggtggttacaaaactacatgatacgtttggatttgtggatgaagatgtattctttcagcttagtgctgtcaaagggaaaaccccccaagtaggtgacagagtattggttgaagctacttataatcctaatatgccttttaaatggaatgcacagagaattcaaacactaccaaatcagaatcagtcgcaaacccagccattactgaagactcctcctgctgtacttcagccaattgcaccacagacaacatttggtgttcagactcagccccagccccagtcactgctgcaggcacagatttcagcagcttctattacaccactattgcagactcaaccacagcccttattacagcagcctcagcaaaaagctggtttattgcagcctcctgttcgtatagtttcacagccacaaccggcacgacgattagatcccccatcccgattttcaggaagaaatgacagaggggatcaagtgcctaacagaaaagatgatcgaagtcgtgagagagagagagaaagacgtagatcgagagaaagatcacctcagaggaaacgttcccgggaaagatctccacgaagagagcgagagcgatcacctcggagagttcgacgtgttgttccacgttacacagttcagttttcaaagttttctttagattgtcccagttgtgacatgatggaactaaggcgccgttatcaaaatttgtatatacctagtgacttttttgatgctcaatttacatgggtggatgctttccctttgtcaagaccatttcagctgggaaattactgcaatttttatgtaatgcacagagaagtagagtccttagaaaaaaatatggccattcttgatccaccagatgctgaccacttatacagtgcaaaggtaatgctgatggctagccctagtatggaagatttatatcataagtcatgtgctcttgctgaggacccacaagaacttcgagatggattccaacatcctgctagacttgttaagtttttagtgggcatgaaaggcaaggatgaagctatggccattggaggccactggtctccttcgttggatggaccagacccagaaaaagatccctctgtgttgattaagactgctattcgttgttgtaaggctctgacaggcattgatctaagtgtgtgcacacaatggtaccgttttgcagagattcgctaccatcgccctgaggagacccacaaggggcgtacagttccagctcatgtggagacagtggttttatttttcccggatgtttggcattgccttcccacccgctcagagtgggaaaccctctcccgaggatacaagcagcagctggtcgagaagcttcagggtgaacgcaaggaggctgatggagaacaggatgaagaagagaaggatgatggtgaagctaaagaaatttctacacctacccattggtctaaacttgatccaaagacaatgaaggtaaatgacctccgaaaagaattagaaagtcgagctcttagttccaaaggattaaaatcccagttaatagcccgattgacaaaacagcttaaagtagaggaacaaaaagaagaacagaaggagttagagaaatctgaaaaagaagaggatgaggatgatgataggaaatctgaagacgataaagaggaagaagaaaggaaacgtcaagaggaaatagaacgccagcgtcgagaaagaagatatattttgcctgatgaaccggccatcattgtacatccaaattgggctgcaaaaagtggcaagtttgattgtagcatcatgtctttgagtgtcctattggactacagattagaggataataaagaacattcatttgaggtttcattgtttgcggaacttttcaacgaaatgcttcaaagagattttggtgtccgtatatacaaatcattactgtctcttcctgagaaagaggacaaaaaagaaaaggataaaaaaagcaaaaaagatgagagaaaagataaaaaagaagaaagagatgatgaaactgatgaaccaaaacccaaacggagaaaatcaggcgatgataaagataaaaaagaagatagagatgaaaggaagaaagaagataaaagaaaagatgattctaaagatgatgatgaaactgaagaagataacaatcaagatgaatatgaccctatggaagcagaagaagctgaggatgaagaagatgatagggatgaggaagaaatgaccaaacgagatgacaaaagagatatcaacagatactgcaaggagaggccctctaaagataaggaaaaagaaaagactcaaatgatcacaattaacagagatctgttaatggcttttgtttattttgatcaaagtcattgtggttaccttcttgaaaaggatttggaagaaatactttatactcttggactacatctttctcgggctcaggtaaagaagcttcttaataaagtagtgctccgtgaatcttgcttttaccggaaattaacagacacctcaaaagatgaagagaaccatgaagagtctgagtcattgcaggaagatatgctaggaaacagattattacttccaacaccaacagtaaagcaggaatcaaaggatgtggaagaaaatgttggcctcattgtgtacaatggtgcaatggtagatgtaggaagcctcttgcaaaaattggaaaagagcgaaaaagtaagagctgaggtagaacagaagctgcagttactag

SEQ ID NO: 116220 - DNA, 2475 bp, Homo sapiens
  Payload ID: 2669
  Gene Symbol: CCAR1
  Gene Name: cell division cycle and apoptosis regulator 1
  ENST ID: ENST00000543229
  CDS Start-End: 95-349
gacgggtttgaaatggcttcgatgttagccgggacccgactcagatcgatgctatagaagacaaacaagggaaggttttttttccttttgcatcatggctcaatttggaggacagaagaatccgccatgggctactcagtttacagccactgcagtatcacagccagctgcactgggtgttcaacagccatcactccttggagcatctcctaccatttatacacagcaaactgcattggcagcagcaggccttaccacacaaactccagcaaactatcagttaacacaaactgctgcattgcagcaacaagccgcagctgcagcagctgcattacaacagcacaaataactgtatcatatccaacaccaaggtccagtcaacagcaaacccagcctcagaagcagcgtgttttcacaggggtggttacaaaactacatgatacgtttggatttgtggatgaagatgtattctttcagcttagtgctgtcaaagggaaaaccccccaagtaggtgacagagtattggttgaagctacttataatcctaatatgccttttaaatggaatgcacagagaattcaaacactaccaaatcagaatcagtcgcaaacccagccattactgaagactcctcctgctgtacttcagccaattgcaccacagacaacatttggtgttcagactcagccccagccccagtcactgctgcaggcacagatttcagcagcttctattacaccactattgcagactcaaccacagcccttattacagcagcctcagcaaaaagctggtttattgcagcctcctgttcgtatagtttcacagccacaaccggcacgacgattagatcccccatcccgattttcaggaagaaatgacagaggggatcaagtgcctaacagaaaagatgatcgaagtcgtgagagagagagagaaagacgtagatcgagagaaagatcacctcagaggaaacgttcccgggaaagatctccacgaagagagcgagagcgatcacctcggagagttcgacgtgttgttccacgttacacagttcagttttcaaagttttctttagattgtcccagttgtgacatgatggaactaaggcgccgttatcaaaatttgtatatacctagtgacttttttgatgctcaatttacatgggtggatgctttccctttgtcaagaccatttcagctgggaaattactgcaatttttatgtaatgcacagagaagtagagtccttagaaaaaaatatggccattcttgatccaccagatgctgaccacttatacagtgcaaaggtaatgctgatggctagccctagtatggaagatttatatcataagtcatgtgctcttgctgaggacccacaagaacttcgagatggattccaacatcctgctagacttgttaagtttttagtgggcatgaaaggcaaggatgaagctatggccattggaggccactggtctccttcgttggatggaccagacccagaaaaagatccctctgtgttgattaagactgctattcgttgttgtaaggctctgacaggcattgatctaagtgtgtgcacacaatggtaccgttttgcagagattcgctaccatcgccctgaggagacccacaaggggcgtacagttccagctcatgtggagacagtggttttatttttcccggatgtttggcattgccttcccacccgctcagagtgggaaaccctctcccgaggatacaagcagcagctggtcgagaagcttcagggtgaacgcaaggaggctgatggagaacaggatgaagaagagaaggatgatggtgaagctaaagaaatttctacacctacccattggtctaaacttgatccaaagacaatgaaggtaaatgacctccgaaaagaattagaaagtcgagctcttagttccaaaggattaaaatcccagttaatagcccgattgacaaaacagcttaaagtagaggaacaaaaagaagaacagaaggagttagagaaatctgaaaaagaagaggatgaggatgatgataggaaatctgaagacgataaagaggaagaagaaaggaaacgtcaagaggaaatagaacgccagcgtcgagaaagaagatatattttgcctgatgaaccggccatcattgtacatccaaattgggctgcaaaaagtggcaagtttgattgtagcatcatgtctttgagtgtcctattggactacagattagaggataataaagaacattcatttgaggtttcattgtttgcggaacttttcaacgaaatgcttcaaagagattttggtgtccgtatatacaaatcattactgtctcttcctgagaaagaggacaaaaaagaaaaggataaaaaaagcaaaaaagatgagagaaaagataaaaaagaagaaagagatgatgaaactgatgaaccaaaacccaaacggagaaaatcaggcgatgataaagat

SEQ ID NO: 116221 - DNA, 2447 bp, Homo sapiens
  Payload ID: 2669
  Gene Symbol: CCAR1
  Gene Name: cell division cycle and apoptosis regulator 1
  ENST ID: ENST00000536012
  CDS Start-End: 509-2447
gggtttgaaatggcttcgatgttagccgggacccgactcagctgcactgggtgttcaacagccatcactccttggagcatctcctaccatttatacacagcaaactgcattggcagcagcaggccttaccacacaaactccagcaaactatcagttaacacaaactgctgcattgcagcaacaagccgcagctgcagcagctgcattacaacagttacagcaaccccagcaaaccctcttaacacagccagctgttgcactgcctacaagccttagcctgtctactcctcagccaacagcacaaataactgtatcatatccaacaccaaggtccagtcaacagcaaacccagcctcagaagcagcgtgttttcacaggggtggttacaaaactacatgatacgtttggatttgtggatgaagatgtattctttcagcttagtgctgtcaaagggaaaaccccccaagtaggtgacagagtattggttgaagctacttataatcctaatatgccttttaaatggaatgcacagagaattcaaacactaccaaatcagaatcagtcgcaaacccagccattactgaagactcctcctgctgtacttcagccaattgcaccacagacaacatttggtgttcagactcagccccagccccagtcactgctgcaggcacagatttcagcagcttctattacaccactattgcagactcaaccacagcccttattacagcagcctcagcaaaaagctggtttattgcagcctcctgttcgtatagtttcacagccacaaccggcacgacgattagatcccccatcccgattttcaggaagaaatgacagaggggatcaagtgcctaacagaaaagatgatcgaagtcgtgagagagagagagaaagacgtagatcgagagaaagatcacctcagaggaaacgttcccgggaaagatctccacgaagagagcgagagcgatcacctcggagagttcgacgtgttgttccacgttacacagttcagttttcaaagttttctttagattgtcccagttgtgacatgatggaactaaggcgccgttatcaaaatttgtatatacctagtgacttttttgatgctcaatttacatgggtggatgctttccctttgtcaagaccatttcagctgggaaattactgcaatttttatgtaatgcacagagaagtagagtccttagaaaaaaatatggccattcttgatccaccagatgctgaccacttatacagtgcaaaggtaatgctgatggctagccctagtatggaagatttatatcataagtcatgtgctcttgctgaggacccacaagaacttcgagatggattccaacatcctgctagacttgttaagtttttagtgggcatgaaaggcaaggatgaagctatggccattggaggccactggtctccttcgttggatggaccagacccagaaaaagatccctctgtgttgattaagactgctattcgttgttgtaaggctctgacaggcattgatctaagtgtgtgcacacaatggtaccgttttgcagagattcgctaccatcgccctgaggagacccacaaggggcgtacagttccagctcatgtggagacagtggttttatttttcccggatgtttggcattgccttcccacccgctcagagtgggaaaccctctcccgaggatacaagcagcagctggtcgagaagcttcagggtgaacgcaaggaggctgatggagaacaggatgaagaagagaaggatgatggtgaagctaaagaaatttctacacctacccattggtctaaacttgatccaaagacaatgaaggtaaatgacctccgaaaagaattagaaagtcgagctcttagttccaaaggattaaaatcccagttaatagcccgattgacaaaacagcttaaagtagaggaacaaaaagaagaacagaaggagttagagaaatctgaaaaagaagaggatgaggatgatgataggaaatctgaagacgataaagaggaagaagaaaggaaacgtcaagaggaaatagaacgccagcgtcgagaaagaagatatattttgcctgatgaaccggccatcattgtacatccaaattgggctgcaaaaagtggcaagtttgattgtagcatcatgtctttgagtgtcctattggactacagattagaggataataaagaacattcatttgaggtttcattgtttgcggaacttttcaacgaaatgcttcaaagagattttggtgtccgtatatacaaatcattactgtctcttcctgagaaagaggacaaaaaagaaaaggataaaaaaagcaaaaaagatgagagaaaagataaaaaagaagaaagagatgatgaaactgatgaaccaaaacccaaacggagaaaatcaggcgatgataaagataaaaaagaagata

SEQ ID NO: 116222 - DNA, 478 bp, Homo sapiens
  Payload ID: 2669
  Gene Symbol: CCAR1
  Gene Name: cell division cycle and apoptosis regulator 1
  ENST ID: ENST00000479143
  CDS Start-End: 1-146
agactgctattcgttgttgtaaggctctgacaggcattgatctaagtgtgtgcacacaatggcacaggaacacaggcacaaatgcacaccacacactacataataaacacacatggaggaacataactggtaacagcgactggtaatccagctttcagcagtatagttgatgaagaagagaaggatgatggtgaagctaaagaaatttctacacctacccattggtctaaacttgatccaaagacaatgaaggtaaatgacctccgaaaagaattagaaagtcgagctcttagttccaaaggattaaaatcccagttaatagcccgattgacaaaacagcttaaagtagaggaacaaaaagaagaacagaaggagttagagaaatctgaaaaagaagaggatgaggatgatgataggaaatctgaagacgataaagaggaagaagaaaggaaacgtcaagaggaaatagaacgccagc

SEQ ID NO: 116223 - DNA, 754 bp, Homo sapiens
  Payload ID: 2669
  Gene Symbol: CCAR1
  Gene Name: cell division cycle and apoptosis regulator 1
  ENST ID: ENST00000538031
  CDS Start-End: 242-754
agttggcgcatgcgcctaaagctgacgggtttgaaatggcttcgatgttagccgggacccgactcaggtgaaggtctggtccccgtagttggagcagtgggcggccaagccgggtctcttaacatcttgtcgaatctgtggaagggccgggagcgatcttttgggtagcccggcggccccgggcggcgacgatcgatgctatagaagacaaacaagggaaggttttttttccttttgcatcatggctcaatttggaggacagaagaatccgccatgggctactcagtttacagccactgcagtatcacagccagctgcactgggtgttcaacagccatcactccttggagcatctcctaccatttatacacagcaaactgcattggcagcagcaggccttaccacacaaactccagcaaactatcagttaacacaaactgctgcattgcagcaacaagccgcagctgcagcagctgcattacaacagcaatattcacaacctcagcaggccctgtatagtgtgcaacaacagttacagcaaccccagcaaaccctcttaacacagccagctgttgcactgcctacaagccttagcctgtctactcctcagccaacagcacaaataactgtatcatatccaacaccaaggtccagtcaacagcaaacccagcctcagaagcagcgtgttttcacaggggtggttacaaaactacatgatacgtttggatttgtggatgaagatgtattctttcag

SEQ ID NO: 116224 - DNA, 570 bp, Homo sapiens
  Payload ID: 2669
  Gene Symbol: CCAR1
  Gene Name: cell division cycle and apoptosis regulator 1
  ENST ID: ENST00000494903
  CDS Start-End: 286-570
tggcttcgatgttagccgggacccgactcaggtgaaggtctggtccccgtagttggagcagtgggcggccaagccgggtctcttaacatcttgtcgaatctgtggaagggccgggagcgatcttttgggtagcccggcggccccgggcggcgacggtggggctcttgtgggactgggacgggagggacgcggtcccttttgtgcgggtcggagcaggcccggcgcggccagccccacccccaccgctcggctcctcaggtgcccccagcgcccctcagcctcggcatggcgacgctgcagtccgccgccccattgctcccgagccgctgcggttttaccctcctggccccccggcccgggacatcgtggcggctcccggcggcgtgggtcttggggaatagaggctttctccatcgatgctatagaagacaaacaagggaaggttttttttccttttgcatcatggctcaatttggaggacagaagaatccgccatgggctactcagtttacagccactgcagtatcacagccagctgcactgggtgttcaacagccatcactccttgga

SEQ ID NO: 116225 - DNA, 3521 bp, Homo sapiens
  Payload ID: 2669
  Gene Symbol: CCAR1
  Gene Name: cell division cycle and apoptosis regulator 1
  Uniprot ID: Q8IX12
  ENST ID: ENST00000543719
  CDS Start-End: 114-3521
tgcgcctaaagctgacgggtttgaaatggcttcgatgttagccgggacccgactcaggtgaagatcgatgctatagaagacaaacaagggaaggttttttttccttttgcatcatggctcaatttggaggacagaagaatccgccatgggctactcagtttacagccactgcagtatcacagccagctgcactgggtgttcaacagccatcactccttggagcatctcctaccatttatacacagcaaactgcattggcagcagcaggccttaccacacaaactccagcaaactatcagttaacacaaactgctgcattgcagcaacaagccgcagctgcagcagctgcattacaacagttacagcaaccccagcaaaccctcttaacacagccagctgttgcactgcctacaagccttagcctgtctactcctcagccaacagcacaaataactgtatcatatccaacaccaaggtccagtcaacagcaaacccagcctcagaagcagcgtgttttcacaggggtggttacaaaactacatgatacgtttggatttgtggatgaagatgtattctttcagcttagtgctgtcaaagggaaaaccccccaagtaggtgacagagtattggttgaagctacttataatcctaatatgccttttaaatggaatgcacagagaattcaaacactaccaaatcagaatcagtcgcaaacccagccattactgaagactcctcctgctgtacttcagccaattgcaccacagacaacatttggtgttcagactcagccccagccccagtcactgctgcaggcacagatttcagcagcttctattacaccactattgcagactcaaccacagcccttattacagcagcctcagcaaaaagctggtttattgcagcctcctgttcgtatagtttcacagccacaaccggcacgacgattagatcccccatcccgattttcaggaagaaatgacagaggggatcaagtgcctaacagaaaagatgatcgaagtcgtgagagagagagagaaagacgtagatcgagagaaagatcacctcagaggaaacgttcccgggaaagatctccacgaagagagcgagagcgatcacctcggagagttcgacgtgttgttccacgttacacagttcagttttcaaagttttctttagattgtcccagttgtgacatgatggaactaaggcgccgttatcaaaatttgtatatacctagtgacttttttgatgctcaatttacatgggtggatgctttccctttgtcaagaccatttcagctgggaaattactgcaatttttatgtaatgcacagagaagtagagtccttagaaaaaaatatggccattcttgatccaccagatgctgaccacttatacagtgcaaaggtaatgctgatggctagccctagtatggaagatttatatcataagtcatgtgctcttgctgaggacccacaagaacttcgagatggattccaacatcctgctagacttgttaagtttttagtgggcatgaaaggcaaggatgaagctatggccattggaggccactggtctccttcgttggatggaccagacccagaaaaagatccctctgtgttgattaagactgctattcgttgttgtaaggctctgacaggcattgatctaagtgtgtgcacacaatggtaccgttttgcagagattcgctaccatcgccctgaggagacccacaaggggcgtacagttccagctcatgtggagacagtggttttatttttcccggatgtttggcattgccttcccacccgctcagagtgggaaaccctctcccgaggatacaagcagcagctggtcgagaagcttcagggtgaacgcaaggaggctgatggagaacaggatgaagaagagaaggatgatggtgaagctaaagaaatttctacacctacccattggtctaaacttgatccaaagacaatgaaggtaaatgacctccgaaaagaattagaaagtcgagctcttagttccaaaggattaaaatcccagttaatagcccgattgacaaaacagcttaaagtagaggaacaaaaagaagaacagaaggagttagagaaatctgaaaaagaagaggatgaggatgatgataggaaatctgaagacgataaagaggaagaagaaaggaaacgtcaagaggaaatagaacgccagcgtcgagaaagaagatatattttgcctgatgaaccggccatcattgtacatccaaattgggctgcaaaaagtggcaagtttgattgtagcatcatgtctttgagtgtcctattggactacagattagaggataataaagaacattcatttgaggtttcattgtttgcggaacttttcaacgaaatgcttcaaagagattttggtgtccgtatatacaaatcattactgtctcttcctgagaaagaggacaaaaaagaaaaggataaaaaaagcaaaaaagatgagagaaaagataaaaaagaagaaagagatgatgaaactgatgaaccaaaacccaaacggagaaaatcaggcgatgataaagataaaaaagaagatagagatgaaaggaagaaagaagataaaagaaaagatgattctaaagatgatgatgaaactgaagaagataacaatcaagatgaatatgaccctatggaagcagaagaagctgaggatgaagaagatgatagggatgaggaagaaatgaccaaacgagatgacaaaagagatatcaacagatactgcaaggagaggccctctaaagataaggaaaaagaaaagactcaaatgatcacaattaacagagatctgttaatggcttttgtttattttgatcaaagtcattgtggttaccttcttgaaaaggatttggaagaaatactttatactcttggactacatctttctcgggctcaggtaaagaagcttcttaataaagtagtgctccgtgaatcttgcttttaccggaaattaacagacacctcaaaagatgaagagaaccatgaagagtctgagtcattgcaggaagatatgctaggaaacagattattacttccaacaccaacagtaaagcaggaatcaaaggatgtggaagaaaatgttggcctcattgtgtacaatggtgcaatggtagatgtaggaagcctcttgcaaaaattggaaaagagcgaaaaagtaagagctgaggtagaacagaagctgcagttactagaagaaaaaacagatgaagatgaaaaaaccatattaaatttggagaattccaacaaaagcctctctggtgaactcagagaagttaaaaaggaccttagtcagttacaagaaaacttaaagatttcggaaaacatgaatttacaatttgaaaaccaaatgaataagacaatcagaaacttatctacggtaatggatgaaatccacactgttctcaagaaggataatgtaaagaatgaagacaaagatcaaaaatccaaggagaatggtgccagtgtatga

SEQ ID NO: 116226 - DNA, 4540 bp, Homo sapiens
  Payload ID: 2669
  Gene Symbol: CCAR1
  Gene Name: cell division cycle and apoptosis regulator 1
  ENST ID: ENST00000630771
  CDS Start-End: 190-1896
agaacgtcagccagtaagcgccgttcctccgggagatgtggaggaggggggcggcgtggaggaagagggggaagttggcgcatgcgcctaaagctgacgggtttgaaatggcttcgatgttagccgggacccgactcagatcgatgctatagaagacaaacaagggaaggttttttttccttttgcatcatggctcaatttggaggacagaagaatccgccatgggctactcagtttacagccactgcagtatcacagccagctgcactgggtgttcaacagccatcactccttggagcatctcctaccatttatacacagcaaactgcattggcagcagcaggccttaccacacaaactccagcaaactatcagttaacacaaactgctgcattgcagcaacaagccgcagctgcagcagctgcattacaacagcaatattcacaacctcagcaggccctgtatagtgtgcaacaacagttacagcaaccccagcaaaccctcttaacacagccagctgttgcactgcctacaagccttagcctgtctactcctcagccaacagcacaaataactgtatcatatccaacaccaaggtccagtcaacagcaaacccagcctcagaagcagcgtgttttcacaggggtggttacaaaactacatgatacgtttggatttgtggatgaagatgtattctttcagcttagtgctgtcaaagggaaaaccccccaagtaggtgacagagtattggttgaagctacttataatcctaatatgccttttaaatggaatgcacagagaattcaaacactaccaaatcagaatcagtcgcaaacccagccattactgaagactcctcctgctgtacttcagccaattgcaccacagacaacatttggtgttcagactcagccccagccccagtcactgctgcaggcacagatttcagcagcttctattacaccactattgcagactcaaccacagcccttattacagcagcctcagcaaaaagctggtttattgcagcctcctgttcgtatagtttcacagccacaaccggcacgacgattagatcccccatcccgattttcaggaagaaatgacagaggggatcaagtgcctaacagaaaagatgatcgaagtcgtgagagagagagagaaagacgtagatcgagagaaagatcacctcagaggaaacgttcccgggaaagatctccacgaagagagcgagagcgatcacctcggagagttcgacgtgttgttccacgttacacagttcagttttcaaagttttctttagattgtcccagttgtgacatgatggaactaaggcgccgttatcaaaatttgtatatacctagtgacttttttgatgctcaatttacatgggtggatgctttccctttgtcaagaccatttcagctgggaaattactgcaatttttatgtaatgcacagagaagtagagtccttagaaaaaaatatggccattcttgatccaccagatgctgaccacttatacagtgcaaaggtaatgctgatggctagccctagtatggaagatttatatcataagtcatgtgctcttgctgaggacccacaagaacttcgagatggattccaacatcctgctagacttgttaagtttttagtgggcatgaaaggcaaggatgaagctatggccattggaggccactggtctccttcgttggatggaccagacccagaaaaagatccctctgtgttgattaagactgctattcgttgttgtaaggctctgacaggcattgatctaagtgtgtgcacacaatggatgaagaagagaaggatgatggtgaagctaaagaaatttctacacctacccattggtctaaacttgatccaaagacaatgaaggtaaatgacctccgaaaagaattagaaagtcgagctcttagttccaaaggattaaaatcccagttaatagcccgattgacaaaacagcttaaagtagaggaacaaaaagaagaacagaaggagttagagaaatctgaaaaagaagaggatgaggatgatgataggaaatctgaagacgataaagaggaagaagaaaggaaacgtcaagaggaaatagaacgccagcgtcgagaaagaagatatattttgcctgatgaaccggccatcattgtacatccaaattgggctgcaaaaagtggcaagtttgattgtagcatcatgtctttgagtgtcctattggactacagattagaggataataaagaacattcatttgaggtttcattgtttgcggaacttttcaacgaaatgcttcaaagagattttggtgtccgtatatacaaatcattactgtctcttcctgagaaagaggacaaaaaagaaaaggataaaaaaagcaaaaaagatgagagaaaagataaaaaagaagaaagagatgatgaaactgatgaaccaaaacccaaacggagaaaatcaggcgatgataaagataaaaaagaagatagagatgaaaggaagaaagaagataaaagaaaagatgattctaaagatgatgatgaaactgaagaagataacaatcaagatgaatatgaccctatggaagcagaagaagctgaggatgaagaagatgatagggatgaggaagaaatgaccaaacgagatgacaaaagagatatcaacagatactgcaaggagaggccctctaaagataaggaaaaagaaaagactcaaatgatcacaattaacagagatctgttaatggcttttgtttattttgatcaaagtcattgtggttaccttcttgaaaaggatttggaagaaatactttatactcttggactacatctttctcgggctcaggtaaagaagcttcttaataaagtagtgctccgtgaatcttgcttttaccggaaattaacagacacctcaaaagatgaagagaaccatgaagagtctgagtcattgcaggaagatatgctaggaaacagattattacttccaacaccaacagtaaagcaggaatcaaaggatgtggaagaaaatgttggcctcattgtgtacaatggtgcaatggtagatgtaggaagcctcttgcaaaaattggaaaagagcgaaaaagtaagagctgaggtagaacagaagctgcagttactagaagaaaaaacagatgaagatgaaaaaaccatattaaatttggagaattccaacaaaagcctctctggtgaactcagagaagttaaaaaggaccttagtcagttacaagaaaacttaaagatttcggaaaacatgaatttacaatttgaaaaccaaatgaataagacaatcagaaacttatctacggtaatggatgaaatccacactgttctcaagaaggataatgtaaagaatgaagacaaagatcaaaaatccaaggagaatggtgccagtgtatgataaaatccatgtagtgatgaggaatggtgttaaataatgtaatatataaaaatcatgatataagaatgtttgaaggtgatgcatgtttgattttagtagtataaatgtattttagttcaaatgatgtataaagttttatgaatgtgagtttctgcttttgaaaattgcttgtaattcctagccttcaaattattaaacactccttgagtgaaataattttgcattgcaaagtgttttaggatgaactttgttatagttttaactccaataaagttcatcagtttaattgactgtagtatttaattaccaaatttcttttattaaaatgcctagaaatttttaatttatagaattattaggttttaaaatttttagttcatctgttaaaatttcagtcaaaatcataaaatagcatgatgcttaatttttgcaagttttttgaaactttttgttttttttactcatcaccaaaaaatcccctcttgatcagtctctaaaagcattcattaaaaattcagttcaggccgggcacggtggctcacacctgtaatcccaacactttgggaggccgaggcaggtggatcacctgaggttaggagttcgagaccagcctggccaacatggtgaaacccggtctctactaaaaatataaaaattagctgggcatggtggtgggtgcctgtaatcccagctacttgggaggctgaggcaggagaatcgcttgaacccaggaggcggaggttgcagtcactcaggatcatgcagctacactccagcctgggcgacaagagtgaaactccatctcaaaaagaaaaaaaaaaaaaatcagtttatttgaaagacagtatatcagaaagaaagaagcaatagagaactagtattgttctttatgggttagactttacataatattagttgtcctgatgtcaatgttactgctttcaattaatttttctactttcccagaatagcatctatattccttttaattttgagggtttaaaaaaaaatgcagtgtatgtcaaatttacagtttagtaccaagccagtagatgtcagtatgatgccttaaattaagtcttctttaattaaagatatttttttaaatt

SEQ ID NO: 116227 - DNA, 3731 bp, Homo sapiens
  Payload ID: 2670
  Gene Symbol: CDCA2
  Gene Name: cell division cycle associated 2
  Uniprot ID: Q69YH5
  ENST ID: ENST00000330560
  CDS Start-End: 478-3549
agtccccgaggtcacaaggcagtggcaggtgtctgtagtcctcgggttgactgcagctcgcggtggtccctctccgagcccaggaagccactccagtgccgagggagaggcctgggagcgctcggagtgtgcgcggactggagaagggggaggtggcggagtgattcgtagagtaaattcggtaccgaggggcggggtcggggatttgaatcggtcggcgggcggaggaggcgggtggaggaggctgccgggcagagcgcaggccaggatcagcgcaggctgtgagtccaggtcagccgtcgggacctcgggctccgggttcgaagagcggctcccggctgcgggtgctttgccaggagagcccttccggacagaggagccggggtctggaaggagcggccgacgcgacgctcgcctgccacggggctctgggagtaagcctgtctgcctggcgggccttcaggtgcggcgtgagagatggatgccaattcaaaagacaagccccctgaaaccaaggagtctgcaatgaataatgctggaaatgcctctttcattttgggaactgggaagattgtgactcctcagaagcatgccgaattacctcctaatccttgcacaccagatacttttaaatcacctttgaacttttccacagtaaccgtagagcaattgggaattacacctgaaagctttgttaggaactctgcaggaaagtcatcatcctaccttaaaaaatgtagacgacgttctgcagtcggtgctcggggctctcctgaaacaaaccatctgattcgtttcattgctcggcagcaaaatataaagaatgctaggaaatctcctttggcacaagattctccttcccagggcagccctgcactgtatcgaaatgttaacactttaagagaacgaatatcagccttccagtcagcttttcactccataaaggaaaacgagaaaatgaccggctgtctggaattctcagaggcaggaaaagagtccgagatgacagacttgaccagaaaggaaggtctcagcgcttgccagcagtctgggttccctgcagtgttgtcctccaaacgtcggagaatatcctatcagagagactctgatgaaaatctgacggatgctgaaggaaaagtaattggtctccagatattcaatattgatacagacagagcatgtgcagttgaaacttctgtagatctttctgagatatcatctaaacttggttcaacacagtctggatttttagttgaagagtctcttcccctttcagagctcacagagacttcaaatgcactaaaggttgctgactgtgtagtgggcaaaggatcaagtgatgccgtttcgcctgacacgttcacagcagaagtgagctcagacgcagtccctgatgtcaggtcaccagctactccagcctgcaggagggaccttcccacccccaagacctttgtacttcgttctgtactgaagaaaccctctgttaagatgtgtctagagagcttacaggaacactgtaacaacctctatgatgatgatgggactcatccgagcttaatctcaaatctcccaaactgttgcaaagagaaagaagcagaagatgaagaaaattttgaagcacctgcctttctaaatatgaggaagaggaagagagttacttttggagaggacttaagcccggaagtgtttgatgaatctttgccagcaaatactccattgcgtaaaggaggaacacctgtttgtaaaaaagacttcagtggtctcagttccctgctgcttgagcagtcacctgttcctgagccattacctcaaccagattttgatgacaagggggagaatcttgaaaacatagaaccacttcaagtatcatttgccgttctcagttctcctaataaatcatcaatctctgagaccctttcaggcactgatacctttagttcttcaaataaccatgagaaaatatcctctcctaaagttggtagaataacaaggacttctaacagaagaaatcaattggtcagtgttgtagaagagagtgtttgcaacttattgaatacagaagttcagccttgtaaagaaaagaaaattaataggaggaagtctcaagaaacaaagtgtacaaagagagcacttcctaagaagagtcaggttttaaaaagttgcagaaagaagaaaggaaagggaaagaaaagtgttcagaaatctttatatggggaaagagacattgcttctaagaagcccctcctcagtcctattcccgagctgcctgaagtccctgagatgacaccttccattccgagcatccgaagactgggttcaggttatttcagttcaaatggcaaactggaagaagtgaagactcctaaaaatccagtgaaaagaaaggatcttttgcgtcatgacccagatttgcatatgcatcaaggctatgataaatatgatgtctctgaattctgctcttatataaaaagttcctcatcgcttggcaatgctacttctgatgaagatccaaatacaaatataatgaacattaatgaaaataaaaatattccaaaagcaaaaaataagtcagaaagtgaaaatgaaccaaaagctggaactgacagtcctgtttcttgtgcttctgtaactgaagaacgtgtggcatcagatagtcccaaacctgctctgaccctgcagcagggtcaagaattttctgctggtggtcaaaatgcagaaaacctttgtcagttctttaaaatttcaccagatttaaacataaagtgtgaaagaaaggatgacttcttaggagctgcagaaggaaaactgcaatgcaatcgtttaatgcctaattcacaaaaagactgtcattgtttaggagatgtcttaattgaaaatacgaaagaatctaaaagccagagtgaggatttgggaagaaaacccatggaaagtagcagtgttgtgagttgcagagacaggaaagatagaagacgttccatgtgttattctgatggtcgaagtttacatttggaaaaaaatggaaatcacacaccatcctccagtgtgggcagctctgtagaaattagtttagaaaattctgaactgtttaaagatttgtctgatgccattgagcaaacctttcagaggagaaatagtgaaaccaaagtgcgacgtagcacgaggctacagaaggatttagaaaacgaaggtcttgtatggatttcacttccacttccttccacttcccaaaaagccaaaagaagaacaatatgtacatttgacagcagtggatttgaaagtatgtctcccataaaagaaactgtgtcctccagacaaaaaccgcagatggcacctcccgtctcagatccagaaaacagccagggccctgctgctggttcttccgatgaacctggtaagaggaggaagagcttttgtatatctacacttgcaaatactaaagccacttcccagttcaaaggctaccggagaagatcctctcttaatgggaagggagagagctctctgactgccttggaaaggattgaacataatggagaaagaaagcagtaattgacatttcctgcagagtctgtggcaagagggaaagtaaccatctatgctgaaatgatctgtctagttcccattctctgttcaacctcagtgtttcaaaagttcctaataaataaactcatttgagttgaacctacttttatgtagaaataaataagtttcttcatcattcagatagaaaa

SEQ ID NO: 116228 - DNA, 3565 bp, Homo sapiens
  Payload ID: 2670
  Gene Symbol: CDCA2
  Gene Name: cell division cycle associated 2
  ENST ID: ENST00000380665
  CDS Start-End: 404-3430
gatttgaatcggtcggcgggcggaggaggcgggtggaggaggctgccgggcagagcgcaggccaggatcagcgcaggctgtgagtccaggtcagccgtcgggacctcgggctccgggttcgaagagcggctcccggctgcgggtgctttgccaggagagcccttccggacagaggagccggggtctggaaggagcggccgacgcgacgctcgcctgccacggggctctgggagtaagcctgtctgcctggcgggccttcaggtgcggcgtgagagatggatgccaattcaaaagacaagccccctgaaaccaaggagtctgcaatgaataatgctggtatgtgatgatctgcctccttgtgaagttgaaggtttagacagagagttgtcctcacccctacaatatgtcgtccgtttcaggaaatgcctctttcattttgggaactgggaagattgtgactcctcagaagcatgccgaattacctcctaatccttgcacaccagatacttttaaatcacctttgaacttttccacagtaaccgtagagcaattgggaattacacctgaaagctttgttaggaactctgcaggaaagtcatcatcctaccttaaaaaatgtagacgacgttctgcagtcggtgctcggggctctcctgaaacaaaccatctgattcgtttcattgctcggcagcaaaatataaagaatgctaggaaatctcctttggcacaagattctccttcccagggcagccctgcactgtatcgaaatgttaacactttaagagaacgaatatcagccttccagtcagcttttcactccataaaggaaaacgagaaaatgaccggctgtctggaattctcagaggcaggaaaagagtccgagatgacagacttgaccagaaaggaaggtctcagcgcttgccagcagtctgggttccctgcagtgttgtcctccaaacgtcggagaatatcctatcagagagactctgatgaaaatctgacggatgctgaaggaaaagtaattggtctccagatattcaatattgatacagacagagcatgtgcagttgaaacttctgtagatctttctgagatatcatctaaacttggttcaacacagtctggatttttagttgaagagtctcttcccctttcagagctcacagagacttcaaatgcactaaaggttgctgactgtgtagtgggcaaaggatcaagtgatgccgtttcgcctgacacgttcacagcagaagtgagctcagacgcagtccctgatgtcaggtcaccagctactccagcctgcaggagggaccttcccacccccaagacctttgtacttcgttctgtactgaagaaaccctctgttaagatgtgtctagagagcttacaggaacactgtaacaacctctatgatgatgatgggactcatccgagcttaatctcaaatctcccaaactgttgcaaagagaaagaagcagaagatgaagaaaattttgaagcacctgcctttctaaatatgaggaagaggaagagagttacttttggagaggacttaagcccggaagtgtttgatgaatctttgccagcaaatactccattgcgtaaaggaggaacacctgtttgtaaaaaagacttcagtggtctcagttccctgctgcttgagcagtcacctgttcctgagccattacctcaaccagattttgatgacaagggggagaatcttgaaaacatagaaccacttcaagtatcatttgccgttctcagttctcctaataaatcatcaatctctgagaccctttcaggcactgatacctttagttcttcaaataaccatgagaaaatatcctctcctaaagttggtagaataacaaggacttctaacagaagaaatcaattggtcagtgttgtagaagagagtgtttgcaacttattgaatacagaagttcagccttgtaaagaaaagaaaattaataggaggaagtctcaagaaacaaagtgtacaaagagagcacttcctaagaagagtcaggttttaaaaagttgcagaaagaagaaaggaaagggaaagaaaagtgttcagaaatctttatatggggaaagagacattgcttctaagaagcccctcctcagtcctattcccgagctgcctgaagtccctgagatgacaccttccattccgagcatccgaagactgggttcaggttatttcagttcaaatggcaaactggaagaagtgaagactcctaaaaatccagtgaaaagaaaggatcttttgcgtcatgacccagatttgcatatgcatcaaggctatgataaatatgatgtctctgaattctgctcttatataaaaagttcctcatcgcttggcaatgctacttctgatgaagatccaaatacaaatataatgaacattaatgaaaataaaaatattccaaaagcaaaaaataagtcagaaagtgaaaatgaaccaaaagctggaactgacagtcctgtttcttgtgcttctgtaactgaagaacgtgtggcatcagatagtcccaaacctgctctgaccctgcagcagggtcaagaattttctgctggtggtcaaaatgcagaaaacctttgtcagttctttaaaatttcaccagatttaaacataaagtgtgaaagaaaggatgacttcttaggagctgcagaaggaaaactgcaatgcaatcgtttaatgcctaattcacaaaaagactgtcattgtttaggagatgtcttaattgaaaatacgaaagaatctaaaagccagagtgaggatttgggaagaaaacccatggaaagtagcagtgttgtgagttgcagagacaggaaagatagaagacgttccatgtgttattctgatggtcgaagtttacatttggaaaaaaatggaaatcacacaccatcctccagtgtgggcagctctgtagaaattagtttagaaaattctgaactgtttaaagatttgtctgatgccattgagcaaacctttcagaggagaaatagtgaaaccaaagtgcgacgtagcacgaggctacagaaggatttagaaaacgaaggtcttgtatggatttcacttccacttccttccacttcccaaaaagccaaaagaagaacaatatgtacatttgacagcagtggatttgaaagtatgtctcccataaaagaaactgtgtcctccagacaaaaaccgcagatggcacctcccgtctcagatccagaaaacagccagggccctgctgctggttcttccgatgaacctggtaagaggaggaagagcttttgtatatctacacttgcaaatactaaagccacttcccagttcaaaggctaccggagaagatcctctcttaatgggaagggagagagctctctgactgccttggaaaggattgaacataatggagaaagaaagcagtaattgacatttcctgcagagtctgtggcaagagggaaagtaaccatctatgctgaaatgatctgtctagttcccattctctgttcaacctcagtgtttcaaaagttcctaataaataaactcatttgagttgaacct

SEQ ID NO: 116229 - DNA, 1047 bp, Homo sapiens
  Payload ID: 2671
  Gene Symbol: CDCA3
  Gene Name: cell division cycle associated 3
  ENST ID: ENST00000229265
  CDS Start-End: 89-820
gttgtgcatccagaggtggaattggggcccggcattccctcctcgtcccgggctggcccttgcccccaccctgcaactcctggttgagatgggctcagccaagagcgtcccagtcacaccagcgcggcctccgccgcacaacaagcatctggctcgagtggcggacccccgttcacctagtgctggcatcctgcgcactcccatccaggtggagagctctccacagccaggcctaccagcaggggagcaactggagggtcttaaacatgcccaggactcagatccccgctctcctactcttggtattgcacggacacctatgaagaccagcagtggagagcctgttctgcccccagaggcacctttatcttctgaattggacttgcctctgggtacccagttatctgttgaggaacagatgccaccttggaaccagactgagttcccctccaaacaggtgttttccaaggaggaagcaagacagcccacagaaacccctgtggccagccagagctccgacaagccctcaagggaccctgagactcccagatcttcaggttctatgcgcaatagatggaaaccaaacagcagcaaggtactagggagatcccccctcaccatcctgcaggatgacaactcccctggcaccctgacactacgacagggtaagcggccttcacccctaagtgaaaatgttagtgaactaaaggaaggagccattcttggaactggacgacttctgaaaactggaggacgagcatgggagcaaggccaggaccatgacaaggaaaatcagcactttcccttggtggagagctaggccctgcatggccccagcaatgcagtcacccagggcctggtgatatctgtgtcctctcaccccttctttcccagggatactgaggaatggcttgttttcttagactcctcctcagctaccaaactgggactcacagctttattgggctttctttgtgtcttgtgtgtttcttttatattaaaggaagtaattttaaatgttactttaaaaaggtatatgtaaacctt

SEQ ID NO: 116230 - DNA, 2760 bp, Homo sapiens
  Payload ID: 2671
  Gene Symbol: CDCA3
  Gene Name: cell division cycle associated 3
  ENST ID: ENST00000422785
  CDS Start-End: 106-765
gagttgagccacgagctgttgtgcatccagaggtggaattggggcccggcattccctcctcgtcccgggctggcccttgcccccaccctgcaactcctggttgagatgggctcagccaagagcgtcccagtcacaccagcgcggcctccgccgcacaacaagcatctggctcgagtggcggacccccgttcacctagtgctggcatcctgcgcactcccatccaggtggagagctctccacagccaggcctaccagcaggggagcaactggagggtcttaaacatgcccaggactcagatccccgctctcctactcttggtattgcacggacacctatgaagaccagcagtggagaccccccaagcccactggtgaaacagctgagtgaagtatttgaaactgaagactctaaatcaaatcttcccccagagcctgttctgcccccagaggcacctttatcttctgaattggacttgcctctgggtacccagttatctgttgaggaacagatgccaccttggaaccagactgagttcccctccaaacaggtgttttccaaggaggaagcaagacagcccacagaaacccctgtggccagccagagctccgacaagccctcaagggaccctgagactcccagatcttcagcctcctcagttccagattttgaggaagctgtcccaggaacctgtggccacagccatcccgtcagctgtgactcccaggcagctcaccctgttatcgtggccagagaggatgcctgaggaagagggaaaggagtcagcctgtctctccaagctgatttggaaagcagtgtgtgcatgcgtgtaagtgtatgtgtgggtgtgtgggtgtgtgtgtgtatgtgggtgtgtggggggatatgtgtgcatgtgtatgcatgtgtgggtgtgtgtacgtgtgtgtgtgcatgtgtgcttgagcacatgcatgcagggatcctagactcggtagactgggctcaacccctgaagaaggctaagagactgaaagaggattagctgtagggcagggggttctctgtcaagagctttggttgggggagggctgggatcagacagagaaaggctggaagcatctgtgtactatgaaaaaacccgagggcaccttgacaggtgctggaaaagagaaggcaaccgttcatcctatttctttgcttccagatgaagaaactgaggcccatggaggagtgacttgtgcaaggacactcagaaagtgagcaacagaattaggatttggattctgcccctggccagtgttattttcatcagcacctggcctcttgatagagaagaagccatcctatctgaccaacttcaggctagtcttagatgagccctaggctgcagtcagggccctcgggccactccagatctccttgattctgccttgattccatgtttccctgaggctgtcttgcctctcagtgggtgcccctgaaatgccaggaacccagaactgactggacagtcatggtccacagatctcctagggcagggagcagtcatggcattgggcagtggagagaggctgcttagagcaacactgagggaaaacagtcctagttgggaaccaaggggtactggattccaggggtggagtcacccagtgacaagggacagcagtaagagagtccgaaatgggagctgatggggggtacagaatggggagggagggctggggagggtccttccagctgaggaagcagcagccagggctggcccttacccacacgctcagacttcatggagtcccagacattgcagttgaagtcgtcgtagccagcgaatagtaggcggccactgagggagaaggccacggacgtgatgccgcagatgatgctctcgtgggagaagcagatcagctcctggtctgcccgcaggtcaaacaagcggcaggaagcgtcatccgagcccgtgcagatggcctctccattggggaagaactgagggcacgggtggcaagtgggtcagggatcagacctgggcagcccacagcctctcccgccctctgcctcccacctgacagctccagggcaagccgctgctctcagcctccctgcctgtccctcccttggtttggggtgagaagcagccctgccaacacataccacgtgccagtgacttccctatgcccctcgcccgctctgcactatacagcgctgcaggcaggcatcatttccacgtcgcaggcaagagcaccaaggcttgcctgcagtgacccggctagaagggcggacggaggttgtcccagactcccagactacacaagtgggctggatcagggtgtgtaagaacagggtccagtacaaatgcaaggcctggatctcacggcgagcaaatgtcagataagctcaaacggagggagagtctacagaaaactggtttgtactcttcaaaaacgtcaatgacataaaagacaaaggtgggaaaacagttccagtttaaaggtggtgacgaaaaagatatggcgaggaaaggtaatgcacgtttctggattggatcctggacagaaaaaaacatgagctattatggacatttttgaggctattggtgaaatttgaatatagactgtagactgtagtattgtgtcaatgttgagtttcctgatcttaagaatcatacagtgattatgctacagaagggctttgtttcgggaagtacttaaggggtaaagaaacatgatgtctgcaacctactttcaaaagacacagaaagaaaatgtatatctacatctaa

SEQ ID NO: 116231 - DNA, 985 bp, Homo sapiens
  Payload ID: 2671
  Gene Symbol: CDCA3
  Gene Name: cell division cycle associated 3
  ENST ID: ENST00000540683
  CDS Start-End: 86-634
gtgcatccagaggtggaattggggcccggcattccctcctcgtcccgggctggcccttgcccccaccctgcaactcctggttgagatgggctcagccaagagcgtcccagtcacaccagcgcggcctccgccgcacaacaagcatctggctcgagtggcggacccccgttcacctagtgctggcatcctgcgcactcccatccaggtggagagctctccacagccaggcctaccagcaggggagcaactggagggtcttaaacatgcccaggactcagatccccgctctcctactcttggtattgcacggacacctatgaagaccagcagtggagaccccccaagcccactggtgaaacagctgagtgaagtatttgaaactgaagactctaaatcaaatcttcccccagagcctgttctgcccccagaggcacctttatcttctgaattggacttgcctctgggtacccagttatctgttgaggaacagatgccaccttggaaccagactgagttcccctccaaacaggtgttttccaaggaggaagcaagacagcccacagaaacccctgtggccagccagagctccgacaagccctcaagggaccctgagactcccagatcttcagggtaagcggccttcacccctaagtgaaaatgttagtgaactaaaggaaggagccattcttggaactggacgacttctgaaaactggaggacgagcatgggagcaaggccaggaccatgacaaggaaaatcagcactttcccttggtggagagctaggccctgcatggccccagcaatgcagtcacccagggcctggtgatatctgtgtcctctcaccccttctttcccagggatactgaggaatggcttgttttcttagactcctcctcagctaccaaactgggactcacagctttattgggctttctttgtgtcttgtgtgtttcttttatattaaaggaagtaattttaaatgt

SEQ ID NO: 116232 - DNA, 1943 bp, Homo sapiens
  Payload ID: 2671
  Gene Symbol: CDCA3
  Gene Name: cell division cycle associated 3
  Uniprot ID: Q99618
  ENST ID: ENST00000538862
  CDS Start-End: 903-1709
gcgcgagaatggcagttggacggagcctgcctgccggtgctccgcccctgccccgcgcttgactgacgccaatgagaagcgctcctaaggcaattgatggttgaaagaaccaatcccactcctccagggcgggagcgcacgtagagcagctaggtgggcttcggggttgcagctgctgcggctccgcagctgctccggctccgggacccttagagtccattcgcgtgccttctattgaagagcaggaactgacggttgttttaggcctctcaattccagaaagtttcctggggacctgtccggtcggaaagtcgagggacagttgtcttggtatttgtaaagggggtatccagtgaggcggagcttgagggggttgtgtcgagtgactgatacagctgtcaaccaataaagctactatcgctcgcctcaggaaaaccatcacaactccagctggatgtgcgcataatagtgtaatcactcatgattctattttgtttaataattcgttcttgagactagacgtctcgaaagcgaagactggcactcctcagcctgccacggacggctcgcaggccgatactgaacagaagtacccttatcaaggaggcgtcacccctgggcaagcctagcatcagtccattgacacctacagtcaccatgatagacgttctcccagaccaacagcttcctttggctcgaggcgggtcttacgtggagggcctatgggaactacgtcggctcagccaatagggtcagggcagggggcgtggcgggaagtttgaaactggtaacttcgggagttgagccacgagctgttgtgcatccagaggtggaattggggcccggcattccctcctcgtcccgggctggcccttgcccccaccctgcaactcctggttgagatgggctcagccaagagcgtcccagtcacaccagcgcggcctccgccgcacaacaagcatctggctcgagtggcggacccccgttcacctagtgctggcatcctgcgcactcccatccaggtggagagctctccacagccaggcctaccagcaggggagcaactggagggtcttaaacatgcccaggactcagatccccgctctcctactcttggtattgcacggacacctatgaagaccagcagtggagaccccccaagcccactggtgaaacagctgagtgaagtatttgaaactgaagactctaaatcaaatcttcccccagagcctgttctgcccccagaggcacctttatcttctgaattggacttgcctctgggtacccagttatctgttgaggaacagatgccaccttggaaccagactgagttcccctccaaacaggtgttttccaaggaggaagcaagacagcccacagaaacccctgtggccagccagagctccgacaagccctcaagggaccctgagactcccagatcttcaggttctatgcgcaatagatggaaaccaaacagcagcaaggtactagggagatcccccctcaccatcctgcaggatgacaactcccctggcaccctgacactacgacagggtaagcggccttcacccctaagtgaaaatgttagtgaactaaaggaaggagccattcttggaactggacgacttctgaaaactggaggacgagcatgggagcaaggccaggaccatgacaaggaaaatcagcactttcccttggtggagagctaggccctgcatggccccagcaatgcagtcacccagggcctggtgatatctgtgtcctctcaccccttctttcccagggatactgaggaatggcttgttttcttagactcctcctcagctaccaaactgggactcacagctttattgggctttctttgtgtcttgtgtgtttcttttatattaaaggaagtaattttaaatgttactttaaaaaggtatatgtaaaccttgcaccga

SEQ ID NO: 116233 - DNA, 1327 bp, Homo sapiens
  Payload ID: 2671
  Gene Symbol: CDCA3
  Gene Name: cell division cycle associated 3
  Uniprot ID: Q99618
  ENST ID: ENST00000535406
  CDS Start-End: 307-1113
cgagctgttgtgcatccagaggtggaattggggcccggtaagtgatttgaataatttaataaataagttagagggctcagcaggcccagaacgagccattttgtcagctgcagcagtcattaactccgcagaggcctctggtccctcgccaggaagtttcttcactggaaactgggaagacagggtggtttagggttgaaggtccgacgtggaagagataagggctgagacctgagtcacttctcacaggcattccctcctcgtcccgggctggcccttgcccccaccctgcaactcctggttgagatgggctcagccaagagcgtcccagtcacaccagcgcggcctccgccgcacaacaagcatctggctcgagtggcggacccccgttcacctagtgctggcatcctgcgcactcccatccaggtggagagctctccacagccaggcctaccagcaggggagcaactggagggtcttaaacatgcccaggactcagatccccgctctcctactcttggtattgcacggacacctatgaagaccagcagtggagaccccccaagcccactggtgaaacagctgagtgaagtatttgaaactgaagactctaaatcaaatcttcccccagagcctgttctgcccccagaggcacctttatcttctgaattggacttgcctctgggtacccagttatctgttgaggaacagatgccaccttggaaccagactgagttcccctccaaacaggtgttttccaaggaggaagcaagacagcccacagaaacccctgtggccagccagagctccgacaagccctcaagggaccctgagactcccagatcttcaggttctatgcgcaatagatggaaaccaaacagcagcaaggtactagggagatcccccctcaccatcctgcaggatgacaactcccctggcaccctgacactacgacagggtaagcggccttcacccctaagtgaaaatgttagtgaactaaaggaaggagccattcttggaactggacgacttctgaaaactggaggacgagcatgggagcaaggccaggaccatgacaaggaaaatcagcactttcccttggtggagagctaggccctgcatggccccagcaatgcagtcacccagggcctggtgatatctgtgtcctctcaccccttctttcccagggatactgaggaatggcttgttttcttagactcctcctcagctaccaaactgggactcacagctttattgggctttctttgtgtcttgtgtgtttcttttatattaaaggaagtaattttaaatgttactttaaaaaggt

SEQ ID NO: 116234 - DNA, 2513 bp, Homo sapiens
  Payload ID: 2672
  Gene Symbol: CDCA4
  Gene Name: cell division cycle associated 4
  Uniprot ID: Q9BXL8
  ENST ID: ENST00000336219
  CDS Start-End: 157-882
agcgcagcgtcgaccctttgtggacgccgagtggcggtcgctcgccccgccccgcgccgtcgggcgctccttcctcagcggcgggaagctggcggcagcggcggtggcggtggctgagcagaggacccggcgggcggcctcgcgggtcaggacacaatgtttgcacgaggactgaagaggaaatgtgttggccacgaggaagacgtggagggagccctggccggcttgaagacagtgtcctcatacagcctgcagcggcagtcgctcctggacatgtctctggtgaagttgcagctttgccacatgcttgtggagcccaacctgtgccgctcagtcctcattgccaacacggtccggcagatccaagaggagatgacgcaggatgggacgtggcgcacagtggcaccccaggctgcagagcgggcgccgctcgaccgcttggtctccacggagatcctgtgccgtgcagcgtgggggcaagagggggcacatcctgctcctggcttgggggacggccacacacagggtccagtttctgacctttgcccagtcacctcagcacaggcaccaaggcacctgcagagcagcgcctgggagatggatggccctcgagaaaacagaggaagctttcacaagtcacttgatcagatatttgaaacgctggagactaaaaaccccagctgcatggaagagctgttctcagacgtggacagcccctactacgacctggacacagtactgacaggcatgatggggggtgccaggccgggcccctgcgaagggctcgagggcttggctccggccaccccaggccctagctccagctgcaagtccgacctgggcgagctggaccacgtggtggagatcctggtggagacctgagcaggagccctgagtgctcacagccgcctctgacgcattgacacgtgagcactggctcccacggagggtgcgcctgccgccagcggcccagccttgctgccctgtctgctgattctgagaaatcccagaacagcccattaccagtggggctgcagccctaggcccgtcccactcacctcccccctgtggagcgccaggcagaggctgttctggaaggcttcttgtcttctgacgtccccacagccctgggcccctcgtgtctctttgtgtcccccactgtagaggacggtgagccgcagctgcatcaacctccttttacctttagataggtgaatttttacaattcagttttacatgttttgggcagtattttgtcttaagatatattttttaaactttttataccttatctctttagattttttcagctattttcttaaaagtatattttttctataaacatcctttgctgctacattagaacttttatagcctaaacaattgcagttggtgtgtttcatttttttaaggtttaaataagggttttttgttttgttttgttttttgcagtgagcatcactacagtctcagtcaacagtgtgaatgtatcatgttttactttaaatgtgtgtgtgatacttcttcattatgtcctgcgctgcagtgagacctgggtgaaaatcaggagccgcacacagccacatcttcctagacctaagagtaaattatggaggattttatttatgtctatttatatgtaaatgtcattgaagacaaaggtcaaatatttgtctgtttgtagatcacaggcaccagttggtcttcagggacctcatagcccctcggtggtgccttctcaaggcagtgttcctggaggctcccatcagggtcagcccatgcacctgccctgggtgaggaagtagcattgctgctggatgagaaacgcctgcgctgctctgttagactggtgctgaaacaaaaggttaaggctaggttgaagtctagaatgaaagaaatctgaatccatgtcattcataaccccttgatctgtagtgtcatgggtgctgccgcaggcagggagtgagctgggggtgcctgcagccttccactcctgccccgcctcaccccacatgctccctgtttctcatgctttctctaacttcctcaccccttaaccaaaaaggtgtgttttcttttgtgcatatagccattcttaaatatcagtgatgtaaacctcactttattaaaaaattatccagcaaacaaaatgggaatgtggtgttagttacgaccacggcctgaccctccagcaacctttctgcaggatcagttctgctgtattatctggtggtgctttctaaggtggggaaaggaattgcacttggctgcattaaatggacgctgggttacttttatttcccccccccacagggttgcagagcaaattctttttacattgttcagcgcccggctggagttgggggtgtccacgacctctgacagcccccgatgtcgaaagttaatcctcatggaccctagtttaaagggtatgtgttttataggaataaatctaaagcactattttgtttctgtatagcatttttatcttttagaaacatcatttgttcagc

SEQ ID NO: 116235 - DNA, 1536 bp, Homo sapiens
  Payload ID: 2672
  Gene Symbol: CDCA4
  Gene Name: cell division cycle associated 4
  Uniprot ID: Q9BXL8
  ENST ID: ENST00000392590
  CDS Start-End: 69-794
ctggcggcagcggcggtggcggtggctgagcagaggacccggcgggcggcctcgcgggtcaggacacaatgtttgcacgaggactgaagaggaaatgtgttggccacgaggaagacgtggagggagccctggccggcttgaagacagtgtcctcatacagcctgcagcggcagtcgctcctggacatgtctctggtgaagttgcagctttgccacatgcttgtggagcccaacctgtgccgctcagtcctcattgccaacacggtccggcagatccaagaggagatgacgcaggatgggacgtggcgcacagtggcaccccaggctgcagagcgggcgccgctcgaccgcttggtctccacggagatcctgtgccgtgcagcgtgggggcaagagggggcacatcctgctcctggcttgggggacggccacacacagggtccagtttctgacctttgcccagtcacctcagcacaggcaccaaggcacctgcagagcagcgcctgggagatggatggccctcgagaaaacagaggaagctttcacaagtcacttgatcagatatttgaaacgctggagactaaaaaccccagctgcatggaagagctgttctcagacgtggacagcccctactacgacctggacacagtactgacaggcatgatggggggtgccaggccgggcccctgcgaagggctcgagggcttggctccggccaccccaggccctagctccagctgcaagtccgacctgggcgagctggaccacgtggtggagatcctggtggagacctgagcaggagccctgagtgctcacagccgcctctgacgcattgacactgagcatcactacagtctcagtcaacagtgtgaatgtatcatgttttactttaaatgtgtgtgtgatacttcttcattatgtcctgcgctgcagtgagacctgggtgaaaatcaggagccgcacacagccacatcttcctagacctaagagtaaattatggaggattttatttatgtctatttatatgtaaatgtcattgaagacaaaggtcaaatatttgtctgtttgtagatcacaggcaccagttggtcttcagggacctcatagcccctcggtggtgccttctcaaggcagtgttcctggaggctcccatcagggtcagcccatgcacctgccctgggtgaggaagtagcattgctgctggatgagaaacgcctgcgctgctctgttagactggtgctgaaacaaaaggttaaggctaggttgaagtctagaatgaaagaaatctgaatccatgtcattcataaccccttgatctgtagtgtcatgggtgctgccgcaggcagggagtgagctgggggtgcctgcagccttccactcctgccccgcctcaccccacatgctccctgtttctcatgctttctctaacttcctcaccccttaaccaaaaaggtgtgttttcttttgtgcatatagccattcttaaatatcagtgatgtaaacctcactttattaaaaaattatccagcaaacaaaa

SEQ ID NO: 116236 - DNA, 2587 bp, Homo sapiens
  Payload ID: 2673
  Gene Symbol: CDCA5
  Gene Name: cell division cycle associated 5
  Uniprot ID: Q96FF9
  ENST ID: ENST00000275517
  CDS Start-End: 174-932
gacgggtggaaaagactcggggttccgagggccgcagaccgctagccctacgtcacttccgcttcctttcccgcagggcgggtaattcgaacgttttttgcagcgagtggccttcccggttggcgcgcgcccggggcggcggcgctggaggagctcgagacggagcctaagttatgtctgggaggcgaacgcggtccggaggagccgctcagcgctccgggccaagggccccatctcctactaagcctctgcggaggtcccagcggaaatcaggctctgaactcccgagcatcctccctgaaatctggccgaagacacccagtgcggctgcagtcagaaagcccatcgtcttaaagaggatcgtggcccatgctgtagaggtcccagctgtccaatcacctcgcaggagccctaggatttcctttttcttggagaaagaaaacgagccccctggcagggagcttactaaggaggaccttttcaagacacacagcgtccctgccacccccaccagcactcctgtgccgaaccctgaggccgagtccagctccaaggaaggagagctggacgccagagacttggaaatgtctaagaaagtcaggcgttcctacagccggctggagaccctgggctctgcctctacctccaccccaggccgccggtcctgctttggcttcgaggggctgctgggggcagaagacttgtccggagtctcgccagtggtgtgctccaaactcaccgaggtccccagggtttgtgcaaagccctgggccccagacatgactctccctggaatctccccaccacccgagaaacagaaacgtaagaagaagaaaatgccagagatcttgaaaacggagctggatgagtgggctgcggccatgaatgccgagtttgaagctgctgagcagtttgatctcctggttgaatgagatgcagtggggggtgcacctggccagactctccctcctgtcctgtacatagccacctccctgtggagaggacacttagggtcccctcccctggtcttgttacctgtgtgtgtgctggtgctgcgcatgaggactgtctgcctttgagggcttgggcagcagcggcagccatcttggttttaggaaatggggccgcctggcccagccactcactggtgtcctgtctcttgtcgtcctgtccttcctatctccccaaagtaccatagccagtttccagatgggccacagactggggaggagaatcagtggcccagccagaagttaaagggctgagggttgaggtgagaggcacctctgctcttgttgggaggggtggctgcttggaaataggcccaggggctctgccagcctcggcctctccctcctgagttgccttctgttggtggctttcttcttgaacccacctgtgtaaagaggttttcagttccgtgggtttcccctttgattctgtaaatagtcccagagagaattcgtgggctgagggcaattctgtcttggaggaagaagctggacattcagcctgtggagtctgagttttgaaggatgtagggagccttagttgggtctcagaccataagtgtgtactacacagaagctgtgttttctagttctggtctgctgttgagatgtttggtaaatgccaggttgatagggcgctggctgcttggagcaaagggtgcatttcagggtgtggccaccaggtgctgtgagtttctgtggctcatggcctctgggctggtcccttgcacagggcccacgctggagtcttaccactctgctgcaggggtggaaggtggcccctcttgtcacccatacccatttcttacaaaataagttacaccgagtctacttggccctagaagagaaagttgaagagtcccagacctactagcattttgcaactatgcttgtaaagtcctcggaaagtttcctcgcgtaccagacagcggcgggggctgatagcaattttagtttttggcctccctatcctctcacatgagaacactgcctggatgcatctcatgatctctggagaatttccccatctttctcttctttccatcgtgtggattcaatagtgtggatttgaaggctgccctgcccccgactctcctgccgcacccctggccattgtaccttttgatgtttagaagttcgtggaagtagacgctgaggtgtgcagaggagctggtggataacagagaatgccagggaagatgagtgctgggtcagggtacttggatgaaacggtgcaggccaggcgggccctaataaaaccctctgccaggtctgggagtcccaggccatctgctcaacgctctgtggtttgtcagacctgcaagcaagccccctgctggggaagcctaggtgtccttgagctgaaccgcactgaagaactcttgtcctcactggctgatgcagcagaactcttgggaaatgtcttagtcctgcagaatcaggagtcaccagatgatgcagagttgagatcatcattgcaaagttctctgttcctgaggaactaaatttaaggaaaaaatgggattttgttttagagttggaaaaaaagcctgattaaagagtttctgcctgttcat

SEQ ID NO: 116237 - DNA, 1012 bp, Homo sapiens
  Payload ID: 2673
  Gene Symbol: CDCA5
  Gene Name: cell division cycle associated 5
  ENST ID: ENST00000404147
  CDS Start-End: 70-993
gagtggccttcccggttggcgcgcgcccggggcggcggcgctggaggagctcgagacggagcctaagttatgtctgggaggcgaacgcggtccggaggagccgctcagcgctccgggccaagggccccatctcctactaagcctctgcggaggtcccagcggaaatcaggctctgaactcccgagcatcctccctgaaatctggccgaagacacccagtgcggctgcagtcagaaagcccatcgtcttaaagaggatcgtggcccatgctgtagaggtcccagctgtccaatcacctcgcaggagccctaggatttcctttttcttggagaaagaaaacgagccccctggcagggagcttactaaggaggaccttttcaagacacacagcgtccctgccacccccaccagcactcctgtgccgaaccctgaggccgagtccagctccaaggaaggagagctggacgccagagacttggaaatgtctaagaaagtcaggcgttcctacagccggctggagaccctgggctctgcctctacctccaccccaggccgccggtcctgctttggcttcgaggggctgctgggggcagaagacttgtccggagtctcgccagtggtgtgctccaaactcaccgaggtccccagggtttgtgcaaagccctgggccccagacatgactctccctggaatctccccaccacccgagaaacagaaacgtaagaagaagaaaatgccagagatcttggtgagtgagaggcaggggtttttctctgccgtgtgctctgggagacgtgcagggctggggctctggctcttttgggggataggcagcacctgcagggtgtgggtgagatgctccagccaccatgttcccttctcactcacctgctcctcatttctcttccctcagaaaacggagctggatgagtgggctgcggccatgaatgccgagtttgaagctgctgagcagtttgatctcctggttgaatgagatgcagtggggggtgcac

SEQ ID NO: 116238 - DNA, 835 bp, Homo sapiens
  Payload ID: 2673
  Gene Symbol: CDCA5
  Gene Name: cell division cycle associated 5
  ENST ID: ENST00000524733
  CDS Start-End: 1-212
tcagaaagcccatcgtcttaaagaggatcgtggcccatgctgtagaggtcccagctgtccaatcacctcgcaggagccctagggccgccggtcctgctttggcttcgaggggctgctgggggcagaagacttgtccggagtctcgccagtggtgtgctccaaactcaccgaggtccccagggtttgtgcaaagccctgggccccagacatgactctccctggaatctccccaccacccgagaaacagaaacgtaagaagaagaaaatgccagagatcttgaaaacggagctggatgagtgggctgcggccatgaatgccgagtttgaagctgctgagcagtttgatctcctggttgaatgagatgcagtggggggtgcacctggccagactctccctcctgtcctgtacatagccacctccctgtggagaggacacttagggtcccctcccctggtcttgttacctgtgtgtgtgctggtgctgcgcatgaggactgtctgcctttgagggcttgggcagcagcggcagccatcttggttttaggaaatggggccgcctggcccagccactcactggtgtcctgtctcttgtcgtcctgtccttcctatctccccaaagtaccatagccagtttccagatgggccacagactggggaggagaatcagtggcccagccagaagttaaagggctgagggttgaggtgagaggcacctctgctcttgttgggaggggtggctgcttggaaataggcccaggggctctgccagcctcggcctctccctcctgagttgccttctgttggtggctttcttcttgaacccacctgtgtaaag

SEQ ID NO: 116239 - DNA, 789 bp, Homo sapiens
  Payload ID: 2673
  Gene Symbol: CDCA5
  Gene Name: cell division cycle associated 5
  ENST ID: ENST00000529290
  CDS Start-End: 1-763
acagaaacgtaagaagaagaaaatgccagagatcttgtctcttaggggcagacaaagagcccactccaagctggccaacaagccagtggtgcagcctgttgaggagcaagaacccaagggccctcaggcttccgaggagcggaacttggagccaccttcctcagaacaactggaacccaccgtcacgttcctgtttacactcctgaacacctctgagcccactgagccaaaagaccctgaatcggactcggagatccaggagtaccagttcttagatcaggaggactggggcccccagcggacctcaaaggagatcaggcagttgcagaatgactgcatgaggcttcgggagtcactgaacaccacccaagtgcacaacctggccctgggggagaagctgcagaacctgcccaccttattgtataagagcctgaaggagggagcccaggccatccaggaggaggcccaggccatccaggatgaagtgaaggccctgcaggaggaaagccaggccctgccggaggtggctctgctcaggtgtgcgggcagccatggcagcggggagggaagaggcggctgccccatgctgctcactcgagctgtctctgcctgcagtgacccaaacccccggaaggcaggtctcctcttcaagctgcctgacctgccccacgaccacagagaccagggtcaggcctggccaggccccaggccagaggtcggacacctcctcgggaggccgctccttcagccagctcctccctagatcccagaaataaacttggaagctaa

SEQ ID NO: 116240 - DNA, 672 bp, Homo sapiens
  Payload ID: 2673
  Gene Symbol: CDCA5
  Gene Name: cell division cycle associated 5
  ENST ID: ENST00000525464
  CDS Start-End: 1-672
cctggaatctccccaccacccgagaaacagaaacgtaagaagaagaaaatgccagagatcttgtctcttaggggcagacaaagagcccactccaagctggccaacaagccagtggtgcagcctgttgaggagcaagaacccaagggccctcaggcttccgaggagcggaacttggagccaccttcctcagaacaactggaacccaccgtcacgttcctgtttacactcctgaacacctctgagcccactgagccaaaagaccctgaatcggactcggagatccaggagtaccagttcttagatcaggaggactggggcccccagcggacctcaaaggagatcaggcagttgcagaatgactgcatgaggcttcgggagtcactgaacaccacccaagtgcacaacctggccctgggggagaagctgcagaacctgcccaccttattgtataagagcctgaaggagggagcccaggccatccaggaggaggcccaggccatccaggatgaagtgaaggccctgcaggaggaaagccaggccctgccggaggtggctctgctcagtgacccaaacccccggaaggcaggtctcctcttcaagctgcctgacctgccccacgaccacagagaccagggtcaggcctggccaggccccaggccagaggtcggacac

SEQ ID NO: 116241 - DNA, 692 bp, Homo sapiens
  Payload ID: 2673
  Gene Symbol: CDCA5
  Gene Name: cell division cycle associated 5
  ENST ID: ENST00000527430
  CDS Start-End: 1-173
tgtctgggaggcgaacgcggtccggaggagccgctcagcgctccgggccccatctcctactaagcctctgcggaggtcccagcggaaatcaggctctgaactcccgagcatcctccctgaaatctggccgaagacacccagtgcggctgcagtcagaaagcccatcgtcttaaagaggatcgtggcccatgctgtagaggtcccagctgtccaatcacctcgcaggagccctaggatttcctttttcttggagaaagaaaacgagccccctggcagggagcttactaaggaggaccttttcaagacacacagcgtccctgccacccccaccagcactcctgtgccgaaccctgaggccgagtccagctccaaggaaggagagctggacgccagagacttggaaatgtctaagaaagtcaggcgttcctacagccggctggagaccctgggctctgcctctacctccaccccaggccgccggtcctgctttggcttcgaggggctgctgggggcagaagacttgtccggagtctcgccagtggtgtgctccaaactcaccgaggtccccagggtttgtgcaaagccctgggccccagacatgactctccctggaatctccccaccacccgagaaacagaaacgtaagaagaagaaaatgccagagatcttgaaaacggagctggatgagtggg

SEQ ID NO: 116242 - DNA, 2500 bp, Homo sapiens
  Payload ID: 2674
  Gene Symbol: CDCA7
  Gene Name: cell division cycle associated 7
  Uniprot ID: Q9BWT1
  ENST ID: ENST00000347703
  CDS Start-End: 145-1260
cccgagccccgcccctccgggcccgggtcggcgcgcccagcctgccagccgcgctgctgctgctcctcctgctgtgggaccgctgaccgcgcggctgctccgctctccccgctccaagcgccgatctgggcacccgccaccagcatggacgctcgccgcgtgccgcagaaagatctcagagtaaagaagaacttaaagaaattcagatatgtgaagttgatttccatggaaacctcgtcatcctctgatgacagttgtgacagctttgcttctgataattttgcaaacacgaggctgcagtcagttcgggaaggctgtaggacccgcagccagtgcaggcactctggacctctcagggtggcgatgaagtttccagcgcggagtaccaggggagcaaccaacaaaaaagcagagtcccgccagccctcagagaattctgtgactgattccaactccgattcagaagatgaaagtggaatgaattttttggagaaaagggctttaaatataaagcaaaacaaagcaatgcttgcaaaactcatgtctgaattagaaagcttccctggctcgttccgtggaagacatcccctcccaggctccgactcacaatcaaggagaccgcgaaggcgtacattcccgggtgttgcttccaggagaaaccctgaacggagagctcgtcctcttaccaggtcaaggtcccggatcctcgggtcccttgacgctctacccatggaggaggaggaggaagaggataagtacatgttggtgagaaagaggaagaccgtggatggctacatgaatgaagatgacctgcccagaagccgtcgctccagatcatccgtgacccttccgcatataattcgcccagtggaagaaattacagaggaggagttggagaacgtctgcagcaattctcgagagaagatatataaccgttcactgggctctacttgtcatcaatgccgtcagaagactattgataccaaaacaaactgcagaaacccagactgctggggcgttcgaggccagttctgtggcccctgccttcgaaaccgttatggtgaagaggtcagggatgctctgctggatccgaactggcattgcccgccttgtcgaggaatctgcaactgcagtttctgccggcagcgagatggacggtgtgcgactggggtccttgtgtatttagccaaatatcatggctttgggaatgtgcatgcctacttgaaaagcctgaaacaggaatttgaaatgcaagcataatatctggaaaatttgctgcctgccttctacttctcaaatctttcttgtaaaagtttccaattttttcactgaaacctgagttaaaaatcttgatgatcagcctgtttcataagaaactccaatcaagttaatcttagcagacatgtgtttctggagcatcacagaaggtatattgctagttacactttgccctcctgcagtttcttctctgctcccaacccccatctcacagcatccccctctatttccaatgctcctctccaaccgcttagtttctgaatttcttttaaattacagttttatgaaagcatattttatttacttggtgttgaaatagccctcataaaacctaagcacttggaaacacaataatagtattaactaactagatctattgaatttcagagaagagccttctaacttgtttacacaaaaacgagtatgatttagcattcatactagttgaaatttttaatagaatcaaggcacaaaagtcttaaaaccatgtggaaaaattaggtaattattgcagattgatgtctctcaatcccatgtattgcgcttatgttacaagttgttgtcacagttgagacttaatttctcctaatttcttctgcccgaagggtaagtggtgcgtccagcttacacaatcataattcaaaggttggtgggcaatgtaatacttaattaaaataatgatggaagagctatctggagattatgagtaagctgatttgaattttcagtataaaactttagtataattgtagtttgcaaagtttatttcagttcacatgtaaggtattgcaaataaattcttggacaattttgtatggaaacttgatattaaaaactagtctgtggttctttgcagtttcttgtaaatttataaaccaggcacaaggttcaagtttagattttaagcacttttataacaatgataagtgcctttttggagatgtaacttttagcagtttgttaacctgacatctctgccagtctagtttctgggcaggtttcctgtgtcagtattccccctcctctttgcattaatcaaggtatttggtagaggtggaatctaagtgtttgtatgtccaatttacttgcatatgtaaaccattgctgtgccattcaatgtttgatgcataattggaccttgaatcgataagtgtaaatacagcttttgatctgtaatgcttttatacaaaagtttattttaataataaaatgtttgttctaa

SEQ ID NO: 116243 - DNA, 2789 bp, Homo sapiens
  Payload ID: 2674
  Gene Symbol: CDCA7
  Gene Name: cell division cycle associated 7
  Uniprot ID: Q9BWT1
  ENST ID: ENST00000306721
  CDS Start-End: 104-1456
ctgccagccgcgctgctgctgctcctcctgctgtgggaccgctgaccgcgcggctgctccgctctccccgctccaagcgccgatctgggcacccgccaccagcatggacgctcgccgcgtgccgcagaaagatctcagagtaaagaagaacttaaagaaattcagatatgtgaagttgatttccatggaaacctcgtcatcctctgatgacagttgtgacagctttgcttctgataattttgcaaacacgaaacctaaattcaggtcagatatcagtgaagaactggcaaatgttttttatgaggactctgataatgaatctttctgcggcttttcagaaagtgaggtgcaagatgtattagaccattgtggatttttacagaaaccaaggccagatgtcactaacgaactggccggtatttttcatgccgactctgacgatgaatcattttgcggtttctcagagagtgagatacaagatggaatgaggctgcagtcagttcgggaaggctgtaggacccgcagccagtgcaggcactctggacctctcagggtggcgatgaagtttccagcgcggagtaccaggggagcaaccaacaaaaaagcagagtcccgccagccctcagagaattctgtgactgattccaactccgattcagaagatgaaagtggaatgaattttttggagaaaagggctttaaatataaagcaaaacaaagcaatgcttgcaaaactcatgtctgaattagaaagcttccctggctcgttccgtggaagacatcccctcccaggctccgactcacaatcaaggagaccgcgaaggcgtacattcccgggtgttgcttccaggagaaaccctgaacggagagctcgtcctcttaccaggtcaaggtcccggatcctcgggtcccttgacgctctacccatggaggaggaggaggaagaggataagtacatgttggtgagaaagaggaagaccgtggatggctacatgaatgaagatgacctgcccagaagccgtcgctccagatcatccgtgacccttccgcatataattcgcccagtggaagaaattacagaggaggagttggagaacgtctgcagcaattctcgagagaagatatataaccgttcactgggctctacttgtcatcaatgccgtcagaagactattgataccaaaacaaactgcagaaacccagactgctggggcgttcgaggccagttctgtggcccctgccttcgaaaccgttatggtgaagaggtcagggatgctctgctggatccgaactggcattgcccgccttgtcgaggaatctgcaactgcagtttctgccggcagcgagatggacggtgtgcgactggggtccttgtgtatttagccaaatatcatggctttgggaatgtgcatgcctacttgaaaagcctgaaacaggaatttgaaatgcaagcataatatctggaaaatttgctgcctgccttctacttctcaaatctttcttgtaaaagtttccaattttttcactgaaacctgagttaaaaatcttgatgatcagcctgtttcataagaaactccaatcaagttaatcttagcagacatgtgtttctggagcatcacagaaggtatattgctagttacactttgccctcctgcagtttcttctctgctcccaacccccatctcacagcatccccctctatttccaatgctcctctccaaccgcttagtttctgaatttcttttaaattacagttttatgaaagcatattttatttacttggtgttgaaatagccctcataaaacctaagcacttggaaacacaataatagtattaactaactagatctattgaatttcagagaagagccttctaacttgtttacacaaaaacgagtatgatttagcattcatactagttgaaatttttaatagaatcaaggcacaaaagtcttaaaaccatgtggaaaaattaggtaattattgcagattgatgtctctcaatcccatgtattgcgcttatgttacaagttgttgtcacagttgagacttaatttctcctaatttcttctgcccgaagggtaagtggtgcgtccagcttacacaatcataattcaaaggttggtgggcaatgtaatacttaattaaaataatgatggaagagctatctggagattatgagtaagctgatttgaattttcagtataaaactttagtataattgtagtttgcaaagtttatttcagttcacatgtaaggtattgcaaataaattcttggacaattttgtatggaaacttgatattaaaaactagtctgtggttctttgcagtttcttgtaaatttataaaccaggcacaaggttcaagtttagattttaagcacttttataacaatgataagtgcctttttggagatgtaacttttagcagtttgttaacctgacatctctgccagtctagtttctgggcaggtttcctgtgtcagtattccccctcctctttgcattaatcaaggtatttggtagaggtggaatctaagtgtttgtatgtccaatttacttgcatatgtaaaccattgctgtgccattcaatgtttgatgcataattggaccttgaatcgataagtgtaaatacagcttttgatctgtaatgcttttatacaaaagtttattttaataataaaatgtttgttctaacttgtctgcttttttaaaaataatcttactgtacttaattctaattttttcctcatatttaaataaaaggccatttccaccttttctaaaaaa

SEQ ID NO: 116244 - DNA, 1369 bp, Homo sapiens
  Payload ID: 2674
  Gene Symbol: CDCA7
  Gene Name: cell division cycle associated 7
  Uniprot ID: Q9BWT1
  ENST ID: ENST00000410101
  CDS Start-End: 93-1313
gctgctgctgctcctcctgctgtgggaccgctgaccgcgcggctgctccgctctccccgctccaagcgccgatctgggcacccgccaccagcatggacgctcgccgcgtgccgcagaaagatctcagagtaaagaagaacttaaagaaattcagatatgtgaagttgatttccatggaaacctcgtcatcctctgatgacagttgtgacagctttgcttctgataattttgcaaacacgaaaccaaggccagatgtcactaacgaactggccggtatttttcatgccgactctgacgatgaatcattttgcggtttctcagagagtgagatacaagatggaatgaggctgcagtcagttcgggaaggctgtaggacccgcagccagtgcaggcactctggacctctcagggtggcgatgaagtttccagcgcggagtaccaggggagcaaccaacaaaaaagcagagtcccgccagccctcagagaattctgtgactgattccaactccgattcagaagatgaaagtggaatgaattttttggagaaaagggctttaaatataaagcaaaacaaagcaatgcttgcaaaactcatgtctgaattagaaagcttccctggctcgttccgtggaagacatcccctcccaggctccgactcacaatcaaggagaccgcgaaggcgtacattcccgggtgttgcttccaggagaaaccctgaacggagagctcgtcctcttaccaggtcaaggtcccggatcctcgggtcccttgacgctctacccatggaggaggaggaggaagaggataagtacatgttggtgagaaagaggaagaccgtggatggctacatgaatgaagatgacctgcccagaagccgtcgctccagatcatccgtgacccttccgcatataattcgcccagtggaagaaattacagaggaggagttggagaacgtctgcagcaattctcgagagaagatatataaccgttcactgggctctacttgtcatcaatgccgtcagaagactattgataccaaaacaaactgcagaaacccagactgctggggcgttcgaggccagttctgtggcccctgccttcgaaaccgttatggtgaagaggtcagggatgctctgctggatccgaactggcattgcccgccttgtcgaggaatctgcaactgcagtttctgccggcagcgagatggacggtgtgcgactggggtccttgtgtatttagccaaatatcatggctttgggaatgtgcatgcctacttgaaaagcctgaaacaggaatttgaaatgcaagcataatatctggaaaatttgctgcctgccttctacttctcaaatctttcttgtaaaagttt

SEQ ID NO: 116245 - DNA, 1488 bp, Homo sapiens
  Payload ID: 2674
  Gene Symbol: CDCA7
  Gene Name: cell division cycle associated 7
  Uniprot ID: Q9BWT1
  ENST ID: ENST00000410019
  CDS Start-End: 93-1082
gctgctgctgctcctcctgctgtgggaccgctgaccgcgcggctgctccgctctccccgctccaagcgccgatctgggcacccgccaccagcatggacgctcgccgcgtgccgaggctgcagtcagttcgggaaggctgtaggacccgcagccagtgcaggcactctggacctctcagggtggcgatgaagtttccagcgcggagtaccaggggagcaaccaacaaaaaagcagagtcccgccagccctcagagaattctgtgactgattccaactccgattcagaagatgaaagtggaatgaattttttggagaaaagggctttaaatataaagcaaaacaaagcaatgcttgcaaaactcatgtctgaattagaaagcttccctggctcgttccgtggaagacatcccctcccaggctccgactcacaatcaaggagaccgcgaaggcgtacattcccgggtgttgcttccaggagaaaccctgaacggagagctcgtcctcttaccaggtcaaggtcccggatcctcgggtcccttgacgctctacccatggaggaggaggaggaagaggataagtacatgttggtgagaaagaggaagaccgtggatggctacatgaatgaagatgacctgcccagaagccgtcgctccagatcatccgtgacccttccgcatataattcgcccagtggaagaaattacagaggaggagttggagaacgtctgcagcaattctcgagagaagatatataaccgttcactgggctctacttgtcatcaatgccgtcagaagactattgataccaaaacaaactgcagaaacccagactgctggggcgttcgaggccagttctgtggcccctgccttcgaaaccgttatggtgaagaggtcagggatgctctgctggatccgaactggcattgcccgccttgtcgaggaatctgcaactgcagtttctgccggcagcgagatggacggtgtgcgactggggtccttgtgtatttagccaaatatcatggctttgggaatgtgcatgcctacttgaaaagcctgaaacaggaatttgaaatgcaagcataatatctggaaaatttgctgcctgccttctacttctcaaatctttcttgtaaaagtttccaattttttcactgaaacctgagttaaaaatcttgatgatcagcctgtttcataagaaactccaatcaagttaatcttagcagacatgtgtttctggagcatcacagaaggtatattgctagttacactttgccctcctgcagtttcttctctgctcccaacccccatctcacagcatccccctctatttccaatgctcctctccaaccgcttagtttctgaatttcttttaaattacagttttatgaaagcatattttatttacttggtgttgaaatagccctcataaaacctaagcacttggaaacacaataatagtattaactaactagatctattgaatttcaga

SEQ ID NO: 116246 - DNA, 928 bp, Homo sapiens
  Payload ID: 2674
  Gene Symbol: CDCA7
  Gene Name: cell division cycle associated 7
  ENST ID: ENST00000435616
  CDS Start-End: 77-247
ctgctgtgggaccgctgaccgcgcggctgctccgctctccccgctccaagcgccgatctgggcacccgccaccagcatggacgctcgccgcgtgccgcagaaagatctcagagtaaagaagaacttaaagaaattcagatatgtgaagttgatttccatggaaacctcgtcatcctctgatgacagttgtgacagctttgcttctgataattttgcaaacacgaaagtgaggtgcaagatgtattagaccattgtggatttttacagaaaccaaggccagatgtcactaacgaactggccggtatttttcatgccgactctgacgatgaatcattttgcggtttctcagagagtgagatacaagatggaatgaggctgcagtcagttcgggaaggctgtaggacccgcagccagtgcaggcactctggacctctcagggtggcgatgaagtttccagcgcggagtaccaggggagcaaccaacaaaaaagcagagtcccgccagccctcagagaattctgtgactgattccaactccgattcagaagatgaaagtggaatgaattttttggagaaaagggctttaaatataaagcaaaacaaagcaatgcttgcaaaactcatgtctgaattagaaagcttccctggctcgttccgtggaagacatcccctcccaggctccgactcaacaaacgaaggggacctagaggaaaccccctgacagatctctggatgatcctccttgaatcctgggcagtttggtctctccttgctgtgctcctgtggcactaaactccttttgattggttctttctttccttcccagctagactaagcccctcatgggcagcaatcaaggagaccgcgaaggcgtacattcccgggtgttgcttccaggagaaaccctgaacggagagctcgtcctctta

SEQ ID NO: 116247 - DNA, 2915 bp, Homo sapiens
  Payload ID: 2675
  Gene Symbol: CDCA7L
  Gene Name: cell division cycle associated 7-like
  Uniprot ID: Q96GN5
  ENST ID: ENST00000356195
  CDS Start-End: 231-1493
ggtgcgccgggccgtggtgagtccgggctcccgtggccgcgtgctgggaggagactggagcccggttaggaagaatggagttggcgactcgctaccagagcacttcgcaggcatagtttggaagtcatcagggctggttcttttccttccagatccctaaagaagtggctgacatctttaacgcccccagtgatgatgaagagtttgttggcttccgagatgatgttcccatggaaaccctctcgtcagaggagagctgcgatagttttgactcactagagtcagggaaacagcaggatgtgcgctttcattccaaatacttcacagaagagctaagaagaatttttatagaggacactgactcagagactgaggattttgcaggatttacgcagagtgatctgaatggaaagactaacccagaagtaatggtcgtggagtcagatttgagtgatgatggcaaagcatctttggtgagcgaggaagaggaagatgaagaagaagataaggctacccctagaagaagcaggtctagaagaagtagtattggtcttcgagtagcctttcagttccccaccaagaagctggccaacaaaccagataaaaacagttcttccgagcagttgttttctagcgcacgcttacagaatgagaaaaaaacaattcttgaaagaaagaaagactgtagacaggtgatacaaagggaagattctacctctgagtctgaggatgactctcgggatgagagccaggagagttcagatgctttgctgaaaaggaccatgaacatcaaggagaacaaagccatgcttgcccagttattggcggaattgaactcgatgccagatttcttcccagtacgaaccccaacctcagcttctaggaagaagacagtgaggcgggccttctcggagggacagatcacgcggcgtatgaacccaacccggagtgcgcggcctcctgagaagtttgctctagagaacttcactgtctcagccgctaaatttgcggaagagttttacagcttccgaagaaggaagacaattggggggaaatgccgggagtacagacgacgtcaccgtatatcttcttttcggccagtggaggatatcaccgaagaggacttagaaaatgttgccataactgttcgagataaaatctatgataaagttctgggtaacacgtgccatcagtgtcgacaaaagaccatcgacaccaagacagtgtgtcggaaccagggttgctgtggtgtgcgaggacagttctgtggaccatgcctgcggaaccgctatggggaggatgtcagatcggcattgctggacccggattgggtgtgtcccccctgtcgtgggatctgcaattgcagctactgtcggaagcgtgacggccgctgtgccacaggaatcctcattcatctggccaagttttatggttatgacaatgttaaggaatatctggagagcttacaaaaggagctggtagaagacaattaagaggaaaacaaacagaaccagccacctcaccatagagtactccaacaagacatgcataccattggtgcctaagaaagatttttttacagttgtgtttttatacagaaattctttgtagaaattactattttttgttaaagattgtttatatgcttacaaagatttctcaggaagacagcagagcagaggaatctatatagatgtatgcacagacctgtctgtatgctgaactttgttaaaaatatctgccagttattaaaaagcacagtttaaatggggtggggttaaagttcaggtaagtaagttagagagaaaacattgtatgatcagctcctgcacttgatctatctatctttggcttcccaaacagtaactcactccaggccaagtgtgccttagcacgagtgaccacagtttaatagaccacacacatcgtttaacctgctcttggtcattggaaatttacactgaacaaagtgcaattaactgtagaacagttttatttttattaaaacttgactgaacaaaaggggaccatcaacattgtagacactggacactggaggccttacagagtgctagcctcttccttcaggactcacctggggcctgctgcttttatattttgaaagagtttaagggctaataatttaatttgttgtttgttaaaaattaaaatctccgttctttccggctgcattgcttttgcatgttcacatatgatgtacttttatgatgtacttttttttttttgagatggagtcttgttctgttgcccaggagggagtgcagtggtgcaacctcggctcactgcaacctttgcctcctaggttcaagtgattctcctacctcctgagtaactgggattacagtcgtgtgccaccacgctcagccctgagttagtttctagtatttttttctgactttcactctaaggatagcgttgaaaaaagaatgcacgtgtgagttactaaaaagttagaataatgtgcatgggaacagtgcagcaacatgctagaaaatcctcactgcactccagcagaggctagaggaatgccagtgttaccttacgcttctagaagcagagccactccagccagaacccattttgcagtcttctcttcgctcttcagcctgaaggtccagatgtagctggggcctctcagtttggttctatacacagggcactcgtaggtctgtttggtttcttgtctgtccacgggggtggcttttgcaaagatgaccggcatagggcatgccagctccttgagacgggcttcaacaatggttcctgcttgggtgtcccagcgggcgcctatggcaaaaacacagcggttgcaattgtgtggcagcttgctactaatgataatgatcaagtaagttgtttgatgcaataaacattcaacattctggttttgtcat

SEQ ID NO: 116248 - DNA, 1830 bp, Homo sapiens
  Payload ID: 2675
  Gene Symbol: CDCA7L
  Gene Name: cell division cycle associated 7-like
  Uniprot ID: Q96GN5
  ENST ID: ENST00000373934
  CDS Start-End: 81-1307
gttcttggtgcgccgggccgtggtgagtccgggctcccgtggccgcgtgctgggaggagactggagcccggttaggaagaatggagttggcgactcgctaccagatccctaaagaagtggctgacatctttaacgcccccagtgatgatgaagagtttgttggcttccgagatgatgttcccatggaaaccctctcgtcagaggagagctgcgatagttttgactcactagagtcagggaaacaggtcgtggagtcagatttgagtgatgatggcaaagcatctttggtgagcgaggaagaggaagatgaagaagaagataaggctacccctagaagaagcaggtctagaagaagtagtattggtcttcgagtagcctttcagttccccaccaagaagctggccaacaaaccagataaaaacagttcttccgagcagttgttttctagcgcacgcttacagaatgagaaaaaaacaattcttgaaagaaagaaagactgtagacaggtgatacaaagggaagattctacctctgagtctgaggatgactctcgggatgagagccaggagagttcagatgctttgctgaaaaggaccatgaacatcaaggagaacaaagccatgcttgcccagttattggcggaattgaactcgatgccagatttcttcccagtacgaaccccaacctcagcttctaggaagaagacagtgaggcgggccttctcggagggacagatcacgcggcgtatgaacccaacccggagtgcgcggcctcctgagaagtttgctctagagaacttcactgtctcagccgctaaatttgcggaagagttttacagcttccgaagaaggaagacaattggggggaaatgccgggagtacagacgacgtcaccgtatatcttcttttcggccagtggaggatatcaccgaagaggacttagaaaatgttgccataactgttcgagataaaatctatgataaagttctgggtaacacgtgccatcagtgtcgacaaaagaccatcgacaccaagacagtgtgtcggaaccagggttgctgtggtgtgcgaggacagttctgtggaccatgcctgcggaaccgctatggggaggatgtcagatcggcattgctggacccggattgggtgtgtcccccctgtcgtgggatctgcaattgcagctactgtcggaagcgtgacggccgctgtgccacaggaatcctcattcatctggccaagttttatggttatgacaatgttaaggaatatctggagagcttacaaaaggagctggtagaagacaattaagaggaaaacaaacagaaccagccacctcaccatagagtactccaacaagacatgcataccattggtgcctaagaaagatttttttacagttgtgtttttatacagaaattctttgtagaaattactattttttgttaaagattgtttatatgcttacaaagatttctcaggaagacagcagagcagaggaatctatatagatgtatgcacagacctgtctgtatgctgaactttgttaaaaatatctgccagttattaaaaagcacagtttaaatggggtggggttaaagttcaggtaagtaagttagagagaaaacattgtatgatcagctcctgcacttgatctatctatctttggcttcccaaacagtaactcactccaggccaagtgtgccttagcacgagtgaccacagtttaatagaccacacacatcgtttaacctgctcttggtcattggaaatttacactgaacaaagtgcaattaactgtagaacagttttatttttattaaaacttgactga

SEQ ID NO: 116249 - DNA, 3066 bp, Homo sapiens
  Payload ID: 2675
  Gene Symbol: CDCA7L
  Gene Name: cell division cycle associated 7-like
  Uniprot ID: Q96GN5
  ENST ID: ENST00000406877
  CDS Start-End: 281-1645
aactgcagccccctctcgcgccgcctgcgaagacaaggtcagtggccgcgaagttggaacgtgatcggagccacgaggcccagtgaggcggcaccgagggggcagcgcaacgcgctccccctgtccagggcgtcaagtgcgcccctcccggggcccgcctgtgctccgggcggagcgcgctagctgctcgggcgcggggcgttcttggtgcgccgggccgtggtgagtccgggctcccgtggccgcgtgctgggaggagactggagcccggttaggaagaatggagttggcgactcgctaccagatccctaaagaagtggctgacatctttaacgcccccagtgatgatgaagagtttgttggcttccgagatgatgttcccatggaaaccctctcgtcagaggagagctgcgatagttttgactcactagagtcagggaaacagcaggatgtgcgctttcattccaaatacttcacagaagagctaagaagaatttttatagaggacactgactcagagactgaggattttgcaggatttacgcagagtgatctgaatggaaagactaacccagaagtaatggtcgtggagtcagatttgagtgatgatggcaaagcatctttggtgagcgaggaagaggaagatgaagaagaagataaggctacccctagaagaagcaggtctagaagaagtagtattggtcttcgagtagcctttcagttccccaccaagaagctggccaacaaaccagataaaaacagttcttccgagcagttgttttctagcgcacgcttacagaatgagaaaaaaacaattcttgaaagaaagaaagactgtagacaggtgatacaaagggaagattctacctctgagtctgaggatgactctcgggatgagagccaggagagttcagatgctttgctgaaaaggaccatgaacatcaaggagaacaaagccatgcttgcccagttattggcggaattgaactcgatgccagatttcttcccagtacgaaccccaacctcagcttctaggaagaagacagtgaggcgggccttctcggagggacagatcacgcggcgtatgaacccaacccggagtgcgcggcctcctgagaagtttgctctagagaacttcactgtctcagccgctaaatttgcggaagagttttacagcttccgaagaaggaagacaattggggggaaatgccgggagtacagacgacgtcaccgtatatcttcttttcggccagtggaggatatcaccgaagaggacttagaaaatgttgccataactgttcgagataaaatctatgataaagttctgggtaacacgtgccatcagtgtcgacaaaagaccatcgacaccaagacagtgtgtcggaaccagggttgctgtggtgtgcgaggacagttctgtggaccatgcctgcggaaccgctatggggaggatgtcagatcggcattgctggacccggattgggtgtgtcccccctgtcgtgggatctgcaattgcagctactgtcggaagcgtgacggccgctgtgccacaggaatcctcattcatctggccaagttttatggttatgacaatgttaaggaatatctggagagcttacaaaaggagctggtagaagacaattaagaggaaaacaaacagaaccagccacctcaccatagagtactccaacaagacatgcataccattggtgcctaagaaagatttttttacagttgtgtttttatacagaaattctttgtagaaattactattttttgttaaagattgtttatatgcttacaaagatttctcaggaagacagcagagcagaggaatctatatagatgtatgcacagacctgtctgtatgctgaactttgttaaaaatatctgccagttattaaaaagcacagtttaaatggggtggggttaaagttcaggtaagtaagttagagagaaaacattgtatgatcagctcctgcacttgatctatctatctttggcttcccaaacagtaactcactccaggccaagtgtgccttagcacgagtgaccacagtttaatagaccacacacatcgtttaacctgctcttggtcattggaaatttacactgaacaaagtgcaattaactgtagaacagttttatttttattaaaacttgactgaacaaaaggggaccatcaacattgtagacactggacactggaggccttacagagtgctagcctcttccttcaggactcacctggggcctgctgcttttatattttgaaagagtttaagggctaataatttaatttgttgtttgttaaaaattaaaatctccgttctttccggctgcattgcttttgcatgttcacatatgatgtacttttatgatgtacttttttttttttgagatggagtcttgttctgttgcccaggagggagtgcagtggtgcaacctcggctcactgcaacctttgcctcctaggttcaagtgattctcctacctcctgagtaactgggattacagtcgtgtgccaccacgctcagccctgagttagtttctagtatttttttctgactttcactctaaggatagcgttgaaaaaagaatgcacgtgtgagttactaaaaagttagaataatgtgcatgggaacagtgcagcaacatgctagaaaatcctcactgcactccagcagaggctagaggaatgccagtgttaccttacgcttctagaagcagagccactccagccagaacccattttgcagtcttctcttcgctcttcagcctgaaggtccagatgtagctggggcctctcagtttggttctatacacagggcactcgtaggtctgtttggtttcttgtctgtccacgggggtggcttttgcaaagatgaccggcatagggcatgccagctccttgagacgggcttcaacaatggttcctgcttgggtgtcccagcgggcgcctatggcaaaaacacagcggttgcaattgtgtggcagcttgctactaatgataatgatcaagtaagttgtttgatgcaataaacattcaacattctggttttgtca

SEQ ID NO: 116250 - DNA, 611 bp, Homo sapiens
  Payload ID: 2675
  Gene Symbol: CDCA7L
  Gene Name: cell division cycle associated 7-like
  ENST ID: ENST00000435717
  CDS Start-End: 1-295
ggtaacacgtgccatcagtgtcgacaaaagaccatcgacaccaagacagtgtgtcggaaccagggttgctgtggtgtgcgaggacagttctgtggaccatgcctgcggaaccgctatggggaggatgtcagatcggcattgctggacccggattgggtgtgtcccccctgtcgtgggatctgcaattgcagctactgtcggaagcgtgacggccgctgtgccacaggaatcctcattcatctggccaagttttatggttatgacaatgttaaggaatatctggagaggtaagtaagtctctagcagcttacaaaacagcttgaaatcttgaggctgagcacaggagaccctctgggcaagtagttgttgccttcccgtgtgacttacttacttatataaaccacgagtaccatccattctgtatctgtttgcattggaaaagctcaggcctgatattttccctattagggaatcttctcctttgctagatttttcaactcaactccacgttgcctttaaccaaaatttctccttgaggtgtatgacagaaatggaaggaacaaacaaacaaggcaggctgaggggaaagacacagattatgaagaggcagc

SEQ ID NO: 116251 - DNA, 568 bp, Homo sapiens
  Payload ID: 2675
  Gene Symbol: CDCA7L
  Gene Name: cell division cycle associated 7-like
  ENST ID: ENST00000457951
  CDS Start-End: 100-568
agctgctcgggcgcggggcgttcttggtgcgccgggccgtggtgagtccgggctcccgtggccgcgtgctgggaggagactggagcccggttaggaagaatggagttggcgactcgctaccagcaggatgtgcgctttcattccaaatacttcacagaagagctaagaagaatttttatagaggacactgactcagagactgaggattttgcaggatttacgcagagtgatctgaatggaaagactaacccagaagtaatggtcgtggagtcagatttgagtgatgatggcaaagcatctttggtgagcgaggaagaggaagatgaagaagaagataaggctacccctagaagaagcaggtctagaagaagtagtattggtcttcgagtagcctttcagttccccaccaagaagctggccaacaaaccagataaaaacagttcttccgagcagttgttttctagcgcacgcttacagaatgagaaaaaaacaattcttgaaagaaagaaagactgtagacaggtgatacaaagggaagattctacctctgagtctgaggatgactctc

SEQ ID NO: 116252 - DNA, 563 bp, Homo sapiens
  Payload ID: 2675
  Gene Symbol: CDCA7L
  Gene Name: cell division cycle associated 7-like
  ENST ID: ENST00000435031
  CDS Start-End: 276-563
acttgttttattgagagtcgcgagactcactgcttccaccttgcttccgactggtgtttactttcctccacctgcgtgcctggcccgggagaaggggaggcggggccgccagcgttggaaggcgcagagtgcccggcgcccgagcccaaaccgctgtcacctgcccgagtctggcggcaaagactgagccactaacgatccctaaagaagtggctgacatctttaacgcccccagtgatgatgaagagtttgttggcttccgagatgatgttcccatggaaaccctctcgtcagaggagagctgcgatagttttgactcactagagtcagggaaacagcaggatgtgcgctttcattccaaatacttcacagaagagctaagaagaatttttatagaggacactgactcagagactgaggattttgcaggatttacgcagagtgatctgaatggaaagactaacccagaagtaatggtcgtggagtcagatttgagtgatgatggcaaagcatctttggtgagcgaggaagaggaagatgaagaagaagataaggctacccct

SEQ ID NO: 116253 - DNA, 569 bp, Homo sapiens
  Payload ID: 2675
  Gene Symbol: CDCA7L
  Gene Name: cell division cycle associated 7-like
  ENST ID: ENST00000447180
  CDS Start-End: 231-569
ggtgcgccgggccgtggtgagtccgggctcccgtggccgcgtgctgggaggagactggagcccggttaggaagaatggagttggcgactcgctaccagagcacttcgcaggcatagtttggaagtcatcagggctggttcttttccttccagatccctaaagaagtggctgacatctttaacgcccccagtgatgatgaagagtttgttggcttccgagatgatgttcccatggaaaccctctcgtcagaggagagctgcgatagttttgactcactagagtcagggaaacaggatgtgcgctttcattccaaatacttcacagaagagctaagaagaatttttatagaggacactgactcagagactgaggattttgcaggatttacgcagagtgatctgaatggaaagactaacccagaagtaatggtcgtggagtcagatttgagtgatgatggcaaagcatctttggtgagcgaggaagaggaagatgaagaagaagataaggctacccctagaagaagcaggtctagaagaagtagtattggtcttcgagtagcctttcagttc

SEQ ID NO: 116254 - DNA, 2303 bp, Homo sapiens
  Payload ID: 2676
  Gene Symbol: CDCA8
  Gene Name: cell division cycle associated 8
  Uniprot ID: Q53HL2
  ENST ID: ENST00000327331
  CDS Start-End: 114-956
gtgactgtggagtttgaattgggtggcggttgactgtagagccgctctctctcactggcacagcgaggttttgctcagcccttgtctcgggaccgcagcctccgccgagcgccatggctcctaggaagggcagtagtcgggtggccaagaccaactccttacggaggcggaagctcgcctcctttctgaaagacttcgaccgtgaagtggaaatacgaatcaagcaaattgagtcagacaggcagaacctcctcaaggaggtggataacctctacaacatcgagatcctgcggctccccaaggctctgcgcgagatgaactggcttgactacttcgcccttggaggaaacaaacaggccctggaagaggcggcaacagctgacctggatatcaccgaaataaacaaactaacagcagaagctattcagacacccctgaaatctgccaaaacacgaaaggtaatacaggtagatgaaatgatagtggaagaggaagaagaagaagaaaatgaacgtaagaatcttcaaactgcaagagtcaaaaggtgtcctccatccaagaagagaactcagtccatacaaggaaaaggaaaagggaaaaggtcaagccgtgctaacactgttaccccagccgtgggccgattggaggtgtccatggtcaaaccaactccaggcctgacacccaggtttgactcaagggtcttcaagacccctggcctgcgtactccagcagcaggagagcggatttacaacatctcagggaatggcagccctcttgctgacagcaaagagatcttcctcactgtgccagtgggcggcggagagagcctgcgattattggccagtgacttgcagaggcacagtattgcccagctggatccagaggccttgggaaacattaagaagctctccaaccgtctcgcccaaatctgcagcagcatacggacccacaaatgagacaccaaagttgacaggatggacttttaatgggcacttctgggaccctgaagagacttcttcccttcaggcttattgtttgagtgtgaagttccagagcaaggagccatgttcctctaagggaattcaggaattcagacgtgctagtcccacaccagttaggtagagctgtctgttcaccctcccatcccagctgatcccagtcactgcttgctggggccatgccatggaagcttcccatcagtctcccagctgaatcctccctgctctctgagctgctgccttttgcctcctgcaactcaacatcctcttcaccctgccctgcctgcagttgagggggcgaagaagaaccctgtgttctcaggaagactgcctccaccaccgctacccagagaacctctgcatctggcatttctgctctctatgcttgagaccgggaggtttaggctcagataagtgagctctgggccatgagagggtaggtccagaaggtggggggaactgtacagatcagcagagcaggacagttggcagcagtgacctcagtagggaacatgtccgtctaccctctcgcactcatgacacctccccctaccagccctcctcttcctcctcctcctcctcctgtgggaggtggtcagtgggacttagggatctttcacctgctgtgcccagtagttctgaagtctgcttgtggagcagtgttttatgtttatccctgtttactgaagaccaaatactggtttggagacaacttccatgtcttgctcttctacctccctagttagtggaaatttggataagggaactgtagggcccagattctggaggttttatgtcattggccacagaataactgtctctaagctatccatggtccagtggtccctgccaagtctgtagacttcagagagcacttctctcttatggggttcatgggaacaggggtgggtgtgacttgcttggtggcctcattccatgtgtgcctgtgcctggggcatggactttgttaagcagagtcagcagtgaggtcctcattctccagccagcctctctgccctggagaatcatgtgctatgttctaagaatttgagaactagagtcctcatccccaggcttgaaggcacatggctttctcatgtagggctctctgtggtatttgttattattttgcaacaagaccattttagtaaaacagtcctgttcaagttgtattcttttaagttcttttattctcctttccctgagatttttgtatatattgttctgagtaatggtatctttgagctgattgttctaatcagagctggtacctactttcaataaattctggttttgtgttttctt

SEQ ID NO: 116255 - DNA, 2469 bp, Homo sapiens
  Payload ID: 2676
  Gene Symbol: CDCA8
  Gene Name: cell division cycle associated 8
  Uniprot ID: Q53HL2
  ENST ID: ENST00000373055
  CDS Start-End: 274-1116
gggccggcaggaacttgcttgtgattggatgttgtgggacggcggcttctcattcgtcagcctgtgactgtggagtttgaattgggtggcggttgactgtagagccgctctctctcactggcacagcgaggttttgctcagcccttgtctcgggaccgcaggtacgtgcctggcgacttcttcgggtggtccccgtccgccctcctcgtccctacccagtttcttgcttccctgccccatctccgccgctccccgcagcctccgccgagcgccatggctcctaggaagggcagtagtcgggtggccaagaccaactccttacggaggcggaagctcgcctcctttctgaaagacttcgaccgtgaagtggaaatacgaatcaagcaaattgagtcagacaggcagaacctcctcaaggaggtggataacctctacaacatcgagatcctgcggctccccaaggctctgcgcgagatgaactggcttgactacttcgcccttggaggaaacaaacaggccctggaagaggcggcaacagctgacctggatatcaccgaaataaacaaactaacagcagaagctattcagacacccctgaaatctgccaaaacacgaaaggtaatacaggtagatgaaatgatagtggaagaggaagaagaagaagaaaatgaacgtaagaatcttcaaactgcaagagtcaaaaggtgtcctccatccaagaagagaactcagtccatacaaggaaaaggaaaagggaaaaggtcaagccgtgctaacactgttaccccagccgtgggccgattggaggtgtccatggtcaaaccaactccaggcctgacacccaggtttgactcaagggtcttcaagacccctggcctgcgtactccagcagcaggagagcggatttacaacatctcagggaatggcagccctcttgctgacagcaaagagatcttcctcactgtgccagtgggcggcggagagagcctgcgattattggccagtgacttgcagaggcacagtattgcccagctggatccagaggccttgggaaacattaagaagctctccaaccgtctcgcccaaatctgcagcagcatacggacccacaaatgagacaccaaagttgacaggatggacttttaatgggcacttctgggaccctgaagagacttcttcccttcaggcttattgtttgagtgtgaagttccagagcaaggagccatgttcctctaagggaattcaggaattcagacgtgctagtcccacaccagttaggtagagctgtctgttcaccctcccatcccagctgatcccagtcactgcttgctggggccatgccatggaagcttcccatcagtctcccagctgaatcctccctgctctctgagctgctgccttttgcctcctgcaactcaacatcctcttcaccctgccctgcctgcagttgagggggcgaagaagaaccctgtgttctcaggaagactgcctccaccaccgctacccagagaacctctgcatctggcatttctgctctctatgcttgagaccgggaggtttaggctcagataagtgagctctgggccatgagagggtaggtccagaaggtggggggaactgtacagatcagcagagcaggacagttggcagcagtgacctcagtagggaacatgtccgtctaccctctcgcactcatgacacctccccctaccagccctcctcttcctcctcctcctcctcctgtgggaggtggtcagtgggacttagggatctttcacctgctgtgcccagtagttctgaagtctgcttgtggagcagtgttttatgtttatccctgtttactgaagaccaaatactggtttggagacaacttccatgtcttgctcttctacctccctagttagtggaaatttggataagggaactgtagggcccagattctggaggttttatgtcattggccacagaataactgtctctaagctatccatggtccagtggtccctgccaagtctgtagacttcagagagcacttctctcttatggggttcatgggaacaggggtgggtgtgacttgcttggtggcctcattccatgtgtgcctgtgcctggggcatggactttgttaagcagagtcagcagtgaggtcctcattctccagccagcctctctgccctggagaatcatgtgctatgttctaagaatttgagaactagagtcctcatccccaggcttgaaggcacatggctttctcatgtagggctctctgtggtatttgttattattttgcaacaagaccattttagtaaaacagtcctgttcaagttgtattcttttaagttcttttattctcctttccctgagatttttgtatatattgttctgagtaatggtatctttgagctgattgttctaatcagagctggtacctactttcaataaattctggttttgtgttttcttttgtaa

SEQ ID NO: 116256 - DNA, 1177 bp, Homo sapiens
  Payload ID: 2677
  Gene Symbol: CGREF1
  Gene Name: cell growth regulator with EF-hand domain 1
  Uniprot ID: Q99674
  ENST ID: ENST00000260595
  CDS Start-End: 77-982
gggcggcgcagcagccaggagcgcccacggagctggacccccagagccgcgcggcgccgcagcagttccaggaaggatgttacctttgacgatgacagtgttaatcctgctgctgctccccacgggtcaggctgccccaaaggatggagtcacaaggccagactctgaagtgcagcatcagctcctgcccaaccccttccagccaggccaggagcagctcggacttctgcagagctacctaaagggactaggaaggacagaagtgcaactggagcatctgagccgggagcaggttctcctctacctctttgccctccatgactatgaccagagtggacagctggatggcctggagctgctgtccatgttgacagctgctctggcccctggagctgccaactctcctaccaccaacccggtgatcttgatagtggacaaagtgctcgagacccaggacctgaatggggatgggctcatgacccctgctgagctcatcaacttcccgggagtagccctcaggcacgtggagcccggagagccccttgctccatctcctcaggagccacaagctgttggaaggcagtccctattagctaaaagcccattaagacaagaaacacaggaagcccctggtcccagagaagaagcaaagggccaggtagaggccagaagggagtctttggatcctgtccaggagcctgggggccaggcagaggctgatggagatgttccagggcccagaggggaagctgagggccaggcagaggctaaaggagatgcccctgggcccagaggggaagctgggggccaggcagaggctgaaggagatgcccccgggcccagaggggaagctgggggccaggcagaggccagggagaatggagaggaggccaaggaacttccaggggaaacactggagtctaagaacacccaaaatgactttgaggtgcacattgttcaagtggagaatgatgagatctagatcttgaagatacaggtaccccacgaagtctcagtgccagaacataagccctgaagtgggcaggggaaatgtacgctgggacaaggaccatctctgtgccccctgcctggtcccagtaggtatcaggtctttctgtgcagctcagggagaccctaagttaaggggcagattaccaataaagaactgaatgaattc

SEQ ID NO: 116257 - DNA, 1610 bp, Homo sapiens
  Payload ID: 2677
  Gene Symbol: CGREF1
  Gene Name: cell growth regulator with EF-hand domain 1
  Uniprot ID: Q99674
  ENST ID: ENST00000312734
  CDS Start-End: 493-1449
gcggcggctggcactggctccggactctgcccggccagggcggcggctccagccgggagggcgacgtggagcggccacgtggagcggcccgggggaggctggcggcgggaggcgaggcgcgggcggcgcagcagccaggagcgcccacggagctggacccccagagccgcgcggcgccgcagcagctttactcctgaagccagcgagatcacgaacccactgggagaaacgaacaactccagacgcactaccttaagagctgtaacactcactgcgaaggtccgcagctgcattcctgagccagcgagaccacaaacccaccagaaggaagaaacttcgaacgcatccgaacatcagaaggaacaaactccagacacgccgcctttaggaactgtaacactcaaccgcgagggtccgcggcttcattcttgaagtcagtgagaccaagaacccaccaattccggacacactgggattacagttccaggaaggatgttacctttgacgatgacagtgttaatcctgctgctgctccccacgggtcaggctgccccaaaggatggagtcacaaggccagactctgaagtgcagcatcagctcctgcccaaccccttccagccaggccaggagcagctcggacttctgcagagctacctaaagggactaggaaggacagaagtgcaactggagcatctgagccgggagcaggttctcctctacctctttgccctccatgactatgaccagagtggacagctggatggcctggagctgctgtccatgttgacagctgctctggcccctggagctgccaactctcctaccaccaacccggtgatcttgatagtggacaaagtgctcgagacccaggacctgaatggggatgggctcatgacccctgctgagctcatcaacttcccgggagtagccctcaggcacgtggagcccggagagccccttgctccatctcctcaggagccacaagctgttggaaggcagtccctattagctaaaagcccattaagacaagaaacacaggaagcccctggtcccagagaagaagcaaagggccaggtagaggccagaagggagtctttggatcctgtccaggagcctgggggccaggcagaggctgatggagatgttccagggcccagaggggaagctgagggccaggcagaggctaaaggagatgcccctgggcccagaggggaagctgggggccaggcagaggctgaaggagatgcccccgggcccagaggggaagctgggggccaggcagaggctgaaggagatgcccccgggcccagaggggaagctgggggccaggcagaggccagggagaatggagaggaggccaaggaacttccaggggaaacactggagtctaagaacacccaaaatgactttgaggtgcacattgttcaagtggagaatgatgagatctagatcttgaagatacaggtaccccacgaagtctcagtgccagaacataagccctgaagtgggcaggggaaatgtacgctgggacaaggaccatctctgtgccccctgcctggtcccagtaggtatcaggtctttctgtgcagctcagggagaccctaagttaa

SEQ ID NO: 116258 - DNA, 1575 bp, Homo sapiens
  Payload ID: 2677
  Gene Symbol: CGREF1
  Gene Name: cell growth regulator with EF-hand domain 1
  Uniprot ID: Q99674
  ENST ID: ENST00000402550
  CDS Start-End: 282-680
ctcacacgggcgcgcgcagcccctccggccgcgggcgcagcgggggcgctggtggagctgcgaagggccaggtccggcgggcggggcggcggctggcactggctccggactctgcccggccagggcggcggctccagccgggagggcgacgtggagcggccacgtggagcggcccgggggaggctggcggcgggaggcgaggcgcgggcggcgcagcagccaggagcgcccacggagctggacccccagagccgcgcggcgccgcagcagttccaggaaggatgttacctttgacgatgacagtgttaatcctgctgctgctccccacgggtcaggctgccccaaaggatggagtcacaaggccagactctgaagtgcagcatcagctcctgcccaaccccttccagccaggccaggagcagctcggacttctgcagagctacctaaagggactaggaaggacagaagtgcaactggagcatctgagccgggagcaggttctcctctacctctttgccctccatgactatgaccagagtggacagctggatggcctggagctgctgtccatgttgacagctgctctggcccctggagctgccaactctcctaccaccaacccgggcaacctggacgccaggctggatggaggggagaaggcgatgcagccgcaatggtagtctccatggtgtgtgaggagccggcacctgctctcacacgatgccatcaaagccctgcaggccacacttcttgccggccacctggcacccgaatctcagtgcttcctgcacgctcctccctggaggaggggcaagtagctaggtcagccaggtgtttggggcagggacaggtcccagtccttttcccctcctgctgccatactcaccctgggagaggctgaagatgacggaggcattgaaggtgtctccagctcccagtgtatccaccacgcggggtggcgggaaagcatccgagtggagcaatttgccatcagggcccagggcgtcggcgccctcctcagcccaggcacagacaagcacagccctgcaagacggctccactcagctgggtgttagcccaccccgtccccccagccatcctcccagctccagggcggactcctggagtccaggctcatcctgtaccttctaaagccccttcctggcttccccggctcaccctttcctcacacgaccatacaagcccctcaaggcttcctctgctgactggaaccccaagtgcttggccacatctttgctgacaaacacctgtgggcagtggaagagaagctggtggtcacttctaactcgtcattcaccaacagcagcctagcgttgcccccattacaacacgactcccccaacatgtccacatagatccccaacgtagcatctcactgtcccacgggaacgtggttttcttttttctttattttttgtgaagatggtctccctgaggctggtcttgaactcctggccccatatgatcttcctgcctcagcctcccaaaatttctgggattacaggtgtgagtcactgcacctggccagaagcatatttttatcgatgcttatat

SEQ ID NO: 116259 - DNA, 1906 bp, Homo sapiens
  Payload ID: 2677
  Gene Symbol: CGREF1
  Gene Name: cell growth regulator with EF-hand domain 1
  Uniprot ID: Q99674
  ENST ID: ENST00000402394
  CDS Start-End: 270-1226
cgcgcagcccctccggccgcgggcgcagcgggggcgctggtggagctgcgaagggccaggtccggcgggcggggcggcggctggcactggctccggactctgcccggccagggcggcggctccagccgggagggcgacgtggagcggccacgtggagcggcccgggggaggctggcggcgggaggcgaggcgcgggcggcgcagcagccaggagcgcccacggagctggacccccagagccgcgcggcgccgcagcagttccaggaaggatgttacctttgacgatgacagtgttaatcctgctgctgctccccacgggtcaggctgccccaaaggatggagtcacaaggccagactctgaagtgcagcatcagctcctgcccaaccccttccagccaggccaggagcagctcggacttctgcagagctacctaaagggactaggaaggacagaagtgcaactggagcatctgagccgggagcaggttctcctctacctctttgccctccatgactatgaccagagtggacagctggatggcctggagctgctgtccatgttgacagctgctctggcccctggagctgccaactctcctaccaccaacccggtgatcttgatagtggacaaagtgctcgagacccaggacctgaatggggatgggctcatgacccctgctgagctcatcaacttcccgggagtagccctcaggcacgtggagcccggagagccccttgctccatctcctcaggagccacaagctgttggaaggcagtccctattagctaaaagcccattaagacaagaaacacaggaagcccctggtcccagagaagaagcaaagggccaggtagaggccagaagggagtctttggatcctgtccaggagcctgggggccaggcagaggctgatggagatgttccagggcccagaggggaagctgagggccaggcagaggctaaaggagatgcccctgggcccagaggggaagctgggggccaggcagaggctgaaggagatgcccccgggcccagaggggaagctgggggccaggcagaggctgaaggagatgcccccgggcccagaggggaagctgggggccaggcagaggccagggagaatggagaggaggccaaggaacttccaggggaaacactggagtctaagaacacccaaaatgactttgaggtgcacattgttcaagtggagaatgatgagatctagatcttgaagatacaggtaccccacgaagtctcagtgccagaacataagccctgaagtgggcaggggaaatgtacgctgggacaaggaccatctctgtgccccctgcctggtcccagtaggtatcaggtctttctgtgcagctcagggagaccctaagttaaggggcagattaccaataaagaactgaatgaattcatccccccggccacctctctacccgtccagcctgcccagaccctctcagaggaacggggttggggaccgaaaggacagggatgccgcctgcccagtgtttctgggcctcacggtgctccggcagcagagcgcatggtgctagccatggccggctgcagaggacccagtgaggaaagctcagtctatccctgggccccaaaccctcaccggttccccctcacctggtgttcagacaccccatgctctcctgcagctcagggcaggtgaccccatccccagtaatattaatcatcactagaactttttgagagccttgtacacatcaggcatcatgctgggcattttatatatgattttatcctcacaataattctgtagccaagcagaattggttccatttgacagatgaagaaattgaggcagattgcgttaagtgctgtaccctaaggtgatatgcagctaattaaatggcagattttaatcca

SEQ ID NO: 116260 - DNA, 1376 bp, Homo sapiens
  Payload ID: 2677
  Gene Symbol: CGREF1
  Gene Name: cell growth regulator with EF-hand domain 1
  Uniprot ID: Q99674
  ENST ID: ENST00000404694
  CDS Start-End: 6-1328
gtaagatgaatgggctgaaggaggtcagatatgcttgcgctgtacttctctgggcaccttggcacctagtggggagcaagggaatggggcgtggggtggggatgcgcccccagctctgcttccgccacagcaggcctgcctttatgtgctttatatacaagagctggagtgacatttattttgagcatagttccatgggatccctgctgtctgtctgtgagtcctccctgagcaggagtcctgtctttggggctgcaggtagaagcaggcagaaaatgcgcttgtgtctaacccagcccatctgtgacacggtggcagacgcctctttcccccgacccctgattctcttccttgttccagttccaggaaggatgttacctttgacgatgacagtgttaatcctgctgctgctccccacgggtcaggctgccccaaaggatggagtcacaaggccagactctgaagtgcagcatcagctcctgcccaaccccttccagccaggccaggagcagctcggacttctgcagagctacctaaagggactaggaaggacagaagtgcaactggagcatctgagccgggagcaggttctcctctacctctttgccctccatgactatgaccagagtggacagctggatggcctggagctgctgtccatgttgacagctgctctggcccctggagctgccaactctcctaccaccaacccggtgatcttgatagtggacaaagtgctcgagacccaggacctgaatggggatgggctcatgacccctgctgagctcatcaacttcccgggagtagccctcaggcacgtggagcccggagagccccttgctccatctcctcaggagccacaagctgttggaaggcagtccctattagctaaaagcccattaagacaagaaacacaggaagcccctggtcccagagaagaagcaaagggccaggtagaggccagaagggagtctttggatcctgtccaggagcctgggggccaggcagaggctgatggagatgttccagggcccagaggggaagctgagggccaggcagaggctaaaggagatgcccctgggcccagaggggaagctgggggccaggcagaggctgaaggagatgcccccgggcccagaggggaagctgggggccaggcagaggctgaaggagatgcccccgggcccagaggggaagctgggggccaggcagaggccagggagaatggagaggaggccaaggaacttccaggggaaacactggagtctaagaacacccaaaatgactttgaggtgcacattgttcaagtggagaatgatgagatctagatcttgaagatacaggtaccccacgaagtctcagtgccagaacataag

SEQ ID NO: 116261 - DNA, 1346 bp, Homo sapiens
  Payload ID: 2677
  Gene Symbol: CGREF1
  Gene Name: cell growth regulator with EF-hand domain 1
  Uniprot ID: Q99674
  ENST ID: ENST00000405600
  CDS Start-End: 143-1099
gcgcagcagccaggagcgcccacggagctggacccccagagccgcgcggcgccgcagcaggtgggtgacaccccgccccggccggccggagacccgagcccatcgccgtcagccagccagggccgcgcgggttccaggaaggatgttacctttgacgatgacagtgttaatcctgctgctgctccccacgggtcaggctgccccaaaggatggagtcacaaggccagactctgaagtgcagcatcagctcctgcccaaccccttccagccaggccaggagcagctcggacttctgcagagctacctaaagggactaggaaggacagaagtgcaactggagcatctgagccgggagcaggttctcctctacctctttgccctccatgactatgaccagagtggacagctggatggcctggagctgctgtccatgttgacagctgctctggcccctggagctgccaactctcctaccaccaacccggtgatcttgatagtggacaaagtgctcgagacccaggacctgaatggggatgggctcatgacccctgctgagctcatcaacttcccgggagtagccctcaggcacgtggagcccggagagccccttgctccatctcctcaggagccacaagctgttggaaggcagtccctattagctaaaagcccattaagacaagaaacacaggaagcccctggtcccagagaagaagcaaagggccaggtagaggccagaagggagtctttggatcctgtccaggagcctgggggccaggcagaggctgatggagatgttccagggcccagaggggaagctgagggccaggcagaggctaaaggagatgcccctgggcccagaggggaagctgggggccaggcagaggctgaaggagatgcccccgggcccagaggggaagctgggggccaggcagaggctgaaggagatgcccccgggcccagaggggaagctgggggccaggcagaggccagggagaatggagaggaggccaaggaacttccaggggaaacactggagtctaagaacacccaaaatgactttgaggtgcacattgttcaagtggagaatgatgagatctagatcttgaagatacaggtaccccacgaagtctcagtgccagaacataagccctgaagtgggcaggggaaatgtacgctgggacaaggaccatctctgtgccccctgcctggtcccagtaggtatcaggtctttctgtgcagctcagggagaccctaagttaaggggcagattaccaataaagaactgaatgaattcatccccccggccacctctctacccgtccagcctgcccagaccctctcagagg

SEQ ID NO: 116262 - DNA, 1695 bp, Homo sapiens
  Payload ID: 2677
  Gene Symbol: CGREF1
  Gene Name: cell growth regulator with EF-hand domain 1
  ENST ID: ENST00000440612
  CDS Start-End: 264-437
gcccctccggccgcgggcgcagcgggggcgctggtggagctgcgaagggccaggtccggcgggcggggcggcggctggcactggctccggactctgcccggccagggcggcggctccagccgggagggcgacgtggagcggccacgtggagcggcccgggggaggctggcggcgggaggcgaggcgcgggcggcgcagcagccaggagcgcccacggagctggacccccagagccgcgcggcgccgcagcagttccaggaaggatgttacctttgacgatgacagtgttaatcctgctgctgctccccacgggtcaggctgccccaaaggatggagtcacaaggccagactctgaagtgcagcatcagctcctgcccaaccccttccagccaggccaggagcagctcggttctcctctacctctttgccctccatgactatgaccagagtggacagctggatggcctggagctgctgtccatgttgacagctgctctggcccctggagctgccaactctcctaccaccaacccggtaagctctgctggatggagatccccgcataaaggagacccagcactttggggctttggtctttctcatcataactcttttggccttacccaccctatattggagttggccccaattccaatatgtgttccagatcggacctccctgaggacagcaacactctgtatcctgggtcacatttgtggctgaggcacgcccttaattccaagggcaacctggacgccaggctggatggaggggagaaggcgatgcagccgcaatggtagtctccatggtgtgtgaggagccggcacctgctctcacacgatgccatcaaagccctgcaggccacacttcttgccggccacctggcacccgaatctcagtgcttcctgcacgctcctccctggaggaggggcaagtagctaggtcagccaggtgtttggggcagggacaggtcccagtccttttcccctcctgctgccatactcaccctgggagaggctgaagatgacggaggcattgaaggtgtctccagctcccagtgtatccaccacgcggggtggcgggaaagcatccgagtggagcaatttgccatcagggcccagggcgtcggcgccctcctcagcccaggcacagacaagcacagccctgcaagacggctccactcagctgggtgttagcccaccccgtccccccagccatcctcccagctccagggcggactcctggagtccaggctcatcctgtaccttctaaagccccttcctggcttccccggctcaccctttcctcacacgaccatacaagcccctcaaggcttcctctgctgactggaaccccaagtgcttggccacatctttgctgacaaacacctgtgggcagtggaagagaagctggtggtcacttctaactcgtcattcaccaacagcagcctagcgttgcccccattacaacacgactcccccaacatgtccacatagatccccaacgtagcatctcactgtcccacgggaacgtggttttcttttttctttattttttgtgaagatggtctccctgaggctggtcttgaactcctggccccatatgatcttcctgcctcagcctcccaaaatttctgggattacaggtgtgagtcactgcacctggccagaagcatatttttatcgatgcttatat

SEQ ID NO: 116263 - DNA, 2057 bp, Homo sapiens
  Payload ID: 2678
  Gene Symbol: CGRRF1
  Gene Name: cell growth regulator with ring finger domain 1
  Uniprot ID: Q99675
  ENST ID: ENST00000216420
  CDS Start-End: 133-1131
aagtgcggacctacaaagtttgtccgctccggggcactgtagtggcttttaccctggccgggcgggcggggctcagccgggctgggctgggctccgcggctggagccgggctctacccagagcaagaccctgatggctgcggtgtttctggtaacgctttatgaatactcgccgcttttctacatcgcggtggtctttacctgcttcatcgtgaccaccggcctggtattgggatggtttggttgggatgttccagtaattctgagaaattcagaagagacccagttcagcacaagagttttcaaaaagcaaatgagacaagtcaagaatccttttggcttagagatcactaatccatcttcagcttcaattacaactggcataaccttgacaacagattgccttgaagatagcctccttacatgctactgggggtgcagtgttcaaaaattatatgaagctctgcagaagcatgtttattgcttcagaataagcactccccaagcattagaagatgctctgtatagtgaatatctctatcaggaacagtattttattaaaaaggatagcaaagaagaaatatattgccagttaccaagagatactaaaattgaagactttggtacagtacccagatctcgctatccattggtagcgctattgaccttagctgatgaggatgaccgggaaatttatgatattatttccatggtgtcagtgattcatattcctgataggacttataaactatcctgcagaatattgtatcaatatttactcttggctcaaggtcaatttcatgatcttaagcaacttttcatgtctgcaaataataatttcactccctccaacaattcctcttcagaagaaaaaaacacagacagaagtttgttggaaaaggtgggactctctgaaagtgaagttgagccatcggaagagaacagcaaggactgtgttgtttgccagaatgggactgtgaactgggtactcttaccatgcagacacacatgcctgtgtgatggctgtgtgaagtattttcagcagtgcccaatgtgcaggcagtttgttcaggaatcttttgcactttgcagtcaaaaagagcaagataaagacaaaccgaagactctttgaagacatcgtaacactgaaaagtacactttctactaaagatgcagaaattgatgatcttggaattcatcataacatggaatctacagtactgaccatcaatgaaaattatattttaacttcatatttgtatggtacttggatgataaaaattaattattcctttctgcttagtgaatgaatactggaatccatctgtgttgatacataaaaattcattcaactcttgaaaagaatctaagagtttggccttttattagctagatttcctctcatgttaattagaaaaatcattctgaaaggcaatccattgaaaatttgaggaggttaaattcttaagatcactaaatgttttacctttgatgtaatcggagtgcaattaagaaaaaacttaattctacttaaagtaattgtgtgttccctagtttatacaaaggagttggaatgagcttctttagatcttttcctgaaataacagcttttataaatatccatctgtttggtttctaatgtcccttattatagttacgtaaatacaggtcatagttttaaatataggttcttaaatcataaatacaagatataattcttgactgttctccgtgtattataaaatgatactcatctataggaggcagatatataaaattcggataataagattttttggataattaaatttattaaattgatagtcaagtgtgattagattagcagaatgtgatctccagggaagatctgtgagacctttaatgccttaccttagatttctgcctgcacagcaaatccatccagaactgaggtgggaggtggaggttatagagctagaaaaatcactaaaagaaacaaataactatttttttctagtgtatttttattccaaataaaccctgtattcttctgaatagtaaattactttattcatccat

SEQ ID NO: 116264 - DNA, 668 bp, Homo sapiens
  Payload ID: 2678
  Gene Symbol: CGRRF1
  Gene Name: cell growth regulator with ring finger domain 1
  ENST ID: ENST00000557317
  CDS Start-End: 55-668
gggctgggctgggctccgcggctggagccgggctctacccagagcaagaccctgatggctgcggtgtttctggtaacgctttatgaatactcgccgcttttctacatcgcggtggtctttacctgcttcatcgtgaccaccggcctggtattgggatggtttggttgggatgttccagtaattctgagaaattcagaagagacccagttcagcacaagagttttcaaaaagcaaatgagacaagtcaagaatccttttggcttagagatcactaatccatcttcagcttcaattacaatagagacagtgtttcaccatgttgaccaggctggtctcaaactcctgacctcagatgatccacccacctcagcctcccaaagtgctgggattacagctggcataaccttgacaacagattgccttgaagatagcctccttacatgctactgggggtgcagtgttcaaaaattatatgaagctctgcagaagcatgtttattgcttcagaataagcactccccaagcattagaagatgctctgtatagtgaatatctctatcaggaacagtattttattaaaaaggatagcaaagaagaaatatattgccagttaccaagagatactaaaattgaagactttggtacagtacccagatctcgctatccatt

SEQ ID NO: 116265 - DNA, 622 bp, Homo sapiens
  Payload ID: 2678
  Gene Symbol: CGRRF1
  Gene Name: cell growth regulator with ring finger domain 1
  ENST ID: ENST00000557755
  CDS Start-End: 49-183
ggctgggctccgcggctggagccgggctctacccagagcaagaccctgatggctgcggtgtttctggtaacgctttatgaatactcgccgcttttctacatcgcggtggtctttacctgcttcatcgtgaccaccggcctggtattgggatgctggcataaccttgacaacagattgccttgaagatagcctccttacatgctactgggggtgcagtgttcaaaaattatatgaagctctgcagaagcatgtttattgcttcagaataagcactccccaagcattagaagatgctctgtatagtgaatatctctatcaggaacagtattttattaaaaaggatagcaaagaagaaatatattgccagttaccaagagatactaaaattgaagactttggtacagtacccagatctcgctatccattggtagcgctattgaccttagctgatgaggatgaccgggaaatttatgatattatttccatggtgtcagtgattcatattcctgataggacttataaactatcctgcagaatattgtatcaatatttactcttggctcaaggtcaatttcatgatcttaagcaacttttcatgtctgcaaataataatttcactccc

SEQ ID NO: 116266 - DNA, 719 bp, Homo sapiens
  Payload ID: 2678
  Gene Symbol: CGRRF1
  Gene Name: cell growth regulator with ring finger domain 1
  ENST ID: ENST00000554791
  CDS Start-End: 149-424
catgagaaccccaggcaagtgcggacctacaaagtttgtccgctccggggcactgtagtggcttttaccctggccgggcgggcggggctcagccgggctgggctgggctccgcggctggagccgggctctacccagagcaagaccctgatggctgcggtgtttctggtaacgctttatgaatactcgccgcttttctacatcgcggtggtctttacctgcttcatcgtgaccaccggcctggtattgggatggtttggttgggatgttccagtaattctgagaaattcagaagagacccagttcagcacaagagttttcaaaaagcaaatgagacaagtcaagaatccttttggcttagagatcactaatccatcttcagcttcaattacaaatttccatggtgtcagtgattcatattcctgataggacttataaactatcctgcagaatattgtatcaatatttactcttggctcaaggtcaatttcatgatcttaagcaacttttcatgtctgcaaataataatttcactccctccaacaattcctcttcagaagaaaaaaacacagacagaagtttgttggaaaaggtgggactctctgaaagtgaagttgagccatcggaagagaacagcaaggactgtgttgtttgccagaatgggactgtgaactgggtactcttaccatgcagacacacatgcctgtgtgatggctgtgtg

SEQ ID NO: 116267 - DNA, 605 bp, Homo sapiens
  Payload ID: 2678
  Gene Symbol: CGRRF1
  Gene Name: cell growth regulator with ring finger domain 1
  ENST ID: ENST00000556172
  CDS Start-End: 1-222
atttccatggtgtcagtgattcatattcctgataggacttataaactatcctgcagaatattgtatcaatatttactcttggctcaaggtcaatttcatgatcttaagaagaaaaaaacacagacagaagtttgttggaaaaggtgggactctctgaaagtgaagttgagccatcggaagagaacagcaaggactgtgttgtttgccagaatgggactgtgaactgggtactcttaccatgcagacacacatgcctgtgtgatggctgtgtgaagtattttcagcagtgcccaatgtgcaggcagtttgttcaggaatcttttgcactttgcagtcaaaaagagcaagataaagacaaaccgaagactctttgaagacatcgtaacactgaaaagtacactttctactaaagatgcagaaattgatgatcttggaattcatcataacatggaatctacagtactgaccatcaatgaaaattatattttaacttcatatttgtatggtacttggatgataaaaattaattattcctttctgcttagtgaatgaatactggaatccatctgtgttgatacataaaaattcattcaactcttgaaaag

SEQ ID NO: 116268 - DNA, 7226 bp, Homo sapiens
  Payload ID: 2679
  Gene Symbol: CEMIP
  Gene Name: cell migration inducing protein, hyaluronan binding
  Uniprot ID: Q8WUJ3
  ENST ID: ENST00000220244
  CDS Start-End: 289-4374
aaaagcggcctctcggctgagggccggggagctagcgctcaagcagagcccagcgcggtgctatcggacagagcctggcgagcgcaagcggcgcggggagccagcggggctgagcgcggccagggtctgaacccagatttcccagactagctaccactccgcttgcccacgccccgggagctcgcggcgcctggcggtcagcgaccagacgtccggggccgctgcgctcctggcccgcgaggcgtgacactgtctcggctacagacccagagggagcacactgccaggatgggagctgctgggaggcaggacttcctcttcaaggccatgctgaccatcagctggctcactctgacctgcttccctggggccacatccacagtggctgctgggtgccctgaccagagccctgagttgcaaccctggaaccctggccatgaccaagaccaccatgtgcatatcggccagggcaagacactgctgctcacctcttctgccacggtctattccatccacatctcagagggaggcaagctggtcattaaagaccacgacgagccgattgttttgcgaacccggcacatcctgattgacaacggaggagagctgcatgctgggagtgccctctgccctttccagggcaatttcaccatcattttgtatggaagggctgatgaaggtattcagccggatccttactatggtctgaagtacattggggttggtaaaggaggcgctcttgagttgcatggacagaaaaagctctcctggacatttctgaacaagacccttcacccaggtggcatggcagaaggaggctatttttttgaaaggagctggggccaccgtggagttattgttcatgtcatcgaccccaaatcaggcacagtcatccattctgaccggtttgacacctatagatccaagaaagagagtgaacgtctggtccagtatttgaacgcggtgcccgatggcaggatcctttctgttgcagtgaatgatgaaggttctcgaaatctggatgacatggccaggaaggcgatgaccaaattgggaagcaaacacttcctgcaccttggatttagacacccttggagttttctaactgtgaaaggaaatccatcatcttcagtggaagaccatattgaatatcatggacatcgaggctctgctgctgcccgggtattcaaattgttccagacagagcatggcgaatatttcaatgtttctttgtccagtgagtgggttcaagacgtggagtggacggagtggttcgatcatgataaagtatctcagactaaaggtggggagaaaatttcagacctctggaaagctcacccaggaaaaatatgcaatcgtcccattgatatacaggccactacaatggatggagttaacctcagcaccgaggttgtctacaaaaaaggccaggattataggtttgcttgctacgaccggggcagagcctgccggagctaccgtgtacggttcctctgtgggaagcctgtgaggcccaaactcacagtcaccattgacaccaatgtgaacagcaccattctgaacttggaggataatgtacagtcatggaaacctggagataccctggtcattgccagtactgattactccatgtaccaggcagaagagttccaggtgcttccctgcagatcctgcgcccccaaccaggtcaaagtggcagggaaaccaatgtacctgcacatcggggaggagatagacggcgtggacatgcgggcggaggttgggcttctgagccggaacatcatagtgatgggggagatggaggacaaatgctacccctacagaaaccacatctgcaatttctttgacttcgatacctttgggggccacatcaagtttgctctgggatttaaggcagcacacttggagggcacggagctgaagcatatgggacagcagctggtgggtcagtacccgattcacttccacctggccggtgatgtagacgaaaggggaggttatgacccacccacatacatcagggacctctccatccatcatacattctctcgctgcgtcacagtccatggctccaatggcttgttgatcaaggacgttgtgggctataactctttgggccactgcttcttcacggaagatgggccggaggaacgcaacacttttgaccactgtcttggcctccttgtcaagtctggaaccctcctcccctcggaccgtgacagcaagatgtgcaagatgatcacagaggactcctacccggggtacatccccaagcccaggcaagactgcaatgctgtgtccaccttctggatggccaatcccaacaacaacctcatcaactgtgccgctgcaggatctgaggaaactggattttggtttatttttcaccacgtaccaacgggcccctccgtgggaatgtactccccaggttattcagagcacattccactgggaaaattctataacaaccgagcacattccaactaccgggctggcatgatcatagacaacggagtcaaaaccaccgaggcctctgccaaggacaagcggccgttcctctcaatcatctctgccagatacagccctcaccaggacgccgacccgctgaagccccgggagccggccatcatcagacacttcattgcctacaagaaccaggaccacggggcctggctgcgcggcggggatgtgtggctggacagctgccggtttgctgacaatggcattggcctgaccctggccagtggtggaaccttcccgtatgacgacggctccaagcaagagataaagaacagcttgtttgttggcgagagtggcaacgtggggacggaaatgatggacaataggatctggggccctggcggcttggaccatagcggaaggaccctccctataggccagaattttccaattagaggaattcagttatatgatggccccatcaacatccaaaactgcactttccgaaagtttgtggccctggagggccggcacaccagcgccctggccttccgcctgaataatgcctggcagagctgcccccataacaacgtgaccggcattgcctttgaggacgttccgattacttccagagtgttcttcggagagcctgggccctggttcaaccagctggacatggatggggataagacatctgtgttccatgacgtcgacggctccgtgtccgagtaccctggctcctacctcacgaagaatgacaactggctggtccggcacccagactgcatcaatgttcccgactggagaggggccatttgcagtgggtgctatgcacagatgtacattcaagcctacaagaccagtaacctgcgaatgaagatcatcaagaatgacttccccagccaccctctttacctggagggggcgctcaccaggagcacccattaccagcaataccaaccggttgtcaccctgcagaagggctacaccatccactgggaccagacggcccccgccgaactcgccatctggctcatcaacttcaacaagggcgactggatccgagtggggctctgctacccgcgaggcaccacattctccatcctctcggatgttcacaatcgcctgctgaagcaaacgtccaagacgggcgtcttcgtgaggaccttgcagatggacaaagtggagcagagctaccctggcaggagccactactactgggacgaggactcagggctgttgttcctgaagctgaaagctcagaacgagagagagaagtttgctttctgctccatgaaaggctgtgagaggataaagattaaagctctgattccaaagaacgcaggcgtcagtgactgcacagccacagcttaccccaagttcaccgagagggctgtcgtagacgtgccgatgcccaagaagctctttggttctcagctgaaaacaaaggaccatttcttggaggtgaagatggagagttccaagcagcacttcttccacctctggaacgacttcgcttacattgaagtggatgggaagaagtaccccagttcggaggatggcatccaggtggtggtgattgacgggaaccaagggcgcgtggtgagccacacgagcttcaggaactccattctgcaaggcataccatggcagcttttcaactatgtggcgaccatccctgacaattccatagtgcttatggcatcaaagggaagatacgtctccagaggcccatggaccagagtgctggaaaagcttggggcagacaggggtctcaagttgaaagagcaaatggcattcgttggcttcaaaggcagcttccggcccatctgggtgacactggacactgaggatcacaaagccaaaatcttccaagttgtgcccatccctgtggtgaagaagaagaagttgtgaggacagctgccgcccggtgccacctcgtggtagactatgacggtgactcttggcagcagaccagtgggggatggctgggtcccccagcccctgccagcagctgcctgggaaggccgtgtttcagccctgatgggccaagggaaggctatcagagaccctggtgctgccacctgcccctactcaagtgtctacctggagcccctggggcggtgctggccaatgctggaaacattcactttcctgcagcctcttgggtgcttctctcctatctgtgcctcttcagtgggggtttggggaccatatcaggagacctgggttgtgctgacagcaaagatccactttggcaggagccctgacccagctaggaggtagtctggagggctggtcattcacagatccccatggtcttcagcagacaagtgagggtggtaaatgtaggagaaagagccttggccttaaggaaatctttactcctgtaagcaagagccaacctcacaggattaggagctggggtagaactggctatccttggggaagaggcaagccctgcctctggccgtgtccacctttcaggagactttgagtggcaggtttggacttggactagatgactctcaaaggcccttttagttctgagattccagaaatctgctgcatttcacatggtacctggaacccaacagttcatggatatccactgatatccatgatgctgggtgccccagcgcacacgggatggagaggtgagaactaatgcctagcttgaggggtctgcagtccagtagggcaggcagtcaggtccatgtgcactgcaatgccaggtggagaaatcacagagaggtaaaatggaggccagtgccatttcagaggggaggctcaggaaggcttcttgcttacaggaatgaaggctgggggcattttgctggggggagatgaggcagcctctggaatggctcagggattcagccctccctgccgctgcctgctgaagctggtgactacggggtcgccctttgctcacgtctctctggcccactcatgatggagaagtgtggtcagaggggagcaatgggctttgctgcttatgagcacagaggaattcagtccccaggcagccctgcctctgactccaagagggtgaagtccacagaagtgagctcctgccttagggcctcatttgctcttcatccagggaactgagcacagggggcctccaggagaccctagatgtgctcgtactccctcggcctgggatttcagagctggaaatatagaaaatatctagcccaaagccttcattttaacagatggggaaagtgagcccccaagatgggaaagaaccacacagctaagggagggcctggggagccccaccctagcccttgctgccacaccacattgcctcaacaaccggccccagagtgcccaggcactcctgaggtagcttctggaaatggggacaagtcccctcgaaggaaaggaaatgactagagtagaatgacagctagcagatctcttccctcctgctcccagcgcacacaaacccgccctccccttggtgttggcggtccctgtggccttcactttgttcactacctgtcagcccagcctgggtgcacagtagctgcaactccccattggtgctacctggctctcctgtctctgcagctctacaggtgaggcccagcagagggagtagggctcgccatgtttctggtgagccaatttggctgatcttgggtgtctgaacagctattgggtccaccccagtccctttcagctgctgcttaatgccctgctctctccctggcccaccttatagagagcccaaagagctcctgtaagagggagaactctatctgtggtttataatcttgcacgaggcaccagagtctccctgggtcttgtgatgaactacatttatcccctttcctgccccaaccacaaactctttccttcaaagagggcctgcctggctccctccacccaactgcacccatgagactcggtccaagagtccattccccaggtgggagccaactgtcagggaggtctttcccaccaaacatctttcagctgctgggaggtgaccatagggctctgcttttaaagatatggctgcttcaaaggccagagtcacaggaaggacttcttccagggagattagtggtgatggagaggagagttaaaatgacctcatgtccttcttgtccacggttttgttgagttttcactcttctaatgcaagggtctcacactgtgaaccacttaggatgtgatcactttcaggtggccaggaatgttgaatgtctttggctcagttcatttaaaaaagatatctatttgaaagttctcagagttgtacatatgtttcacagtacaggatctgtacataaaagtttctttcctaaaccattcaccaagagccaatatctaggcattttcttggtagcacaaattttcttattgcttagaaaattgtcctccttgttatttctgtttgtaagacttaagtgagttaggtctttaaggaaagcaacgctcctctgaaatgcttgtcttttttctgttgccgaaatagctggtcctttttcgggagttagatgtatagagtgtttgtatgtaaacatttcttgtaggcatcaccatgaacaaagatatattttctatttatttattatatgtgcacttcaagaagtcactgtcagagaaataaagaattgtcttaaatgtcatgattggagatgtcctttgcattgcttggaaggggtgtacctagagccaaggaaattggctctggtttggaaaaattttgctgttattatagtaaacatacaaaggatgtcatcatc

SEQ ID NO: 116269 - DNA, 7297 bp, Homo sapiens
  Payload ID: 2679
  Gene Symbol: CEMIP
  Gene Name: cell migration inducing protein, hyaluronan binding
  Uniprot ID: Q8WUJ3
  ENST ID: ENST00000356249
  CDS Start-End: 360-4445
gagctagcgctcaagcagagcccagcgcggtgctatcggacagagcctggcgagcgcaagcggcgcggggagccagcggggctgagcgcggccagggtctgaacccagatttcccagactagctaccactccgcttgcccacgccccgggagctcgcggcgcctggcggtcagcgaccagacgtccggggccgctgcgctcctggcccgcgaggcgtgacactgtctcggctacagacccagagagaaaagcttcattctggaggggaaggagttttgagtgccaaggatgaaattccacccatcactcggtctctgagctgcaggacacaggcaggacaacgggagcacactgccaggatgggagctgctgggaggcaggacttcctcttcaaggccatgctgaccatcagctggctcactctgacctgcttccctggggccacatccacagtggctgctgggtgccctgaccagagccctgagttgcaaccctggaaccctggccatgaccaagaccaccatgtgcatatcggccagggcaagacactgctgctcacctcttctgccacggtctattccatccacatctcagagggaggcaagctggtcattaaagaccacgacgagccgattgttttgcgaacccggcacatcctgattgacaacggaggagagctgcatgctgggagtgccctctgccctttccagggcaatttcaccatcattttgtatggaagggctgatgaaggtattcagccggatccttactatggtctgaagtacattggggttggtaaaggaggcgctcttgagttgcatggacagaaaaagctctcctggacatttctgaacaagacccttcacccaggtggcatggcagaaggaggctatttttttgaaaggagctggggccaccgtggagttattgttcatgtcatcgaccccaaatcaggcacagtcatccattctgaccggtttgacacctatagatccaagaaagagagtgaacgtctggtccagtatttgaacgcggtgcccgatggcaggatcctttctgttgcagtgaatgatgaaggttctcgaaatctggatgacatggccaggaaggcgatgaccaaattgggaagcaaacacttcctgcaccttggatttagacacccttggagttttctaactgtgaaaggaaatccatcatcttcagtggaagaccatattgaatatcatggacatcgaggctctgctgctgcccgggtattcaaattgttccagacagagcatggcgaatatttcaatgtttctttgtccagtgagtgggttcaagacgtggagtggacggagtggttcgatcatgataaagtatctcagactaaaggtggggagaaaatttcagacctctggaaagctcacccaggaaaaatatgcaatcgtcccattgatatacaggccactacaatggatggagttaacctcagcaccgaggttgtctacaaaaaaggccaggattataggtttgcttgctacgaccggggcagagcctgccggagctaccgtgtacggttcctctgtgggaagcctgtgaggcccaaactcacagtcaccattgacaccaatgtgaacagcaccattctgaacttggaggataatgtacagtcatggaaacctggagataccctggtcattgccagtactgattactccatgtaccaggcagaagagttccaggtgcttccctgcagatcctgcgcccccaaccaggtcaaagtggcagggaaaccaatgtacctgcacatcggggaggagatagacggcgtggacatgcgggcggaggttgggcttctgagccggaacatcatagtgatgggggagatggaggacaaatgctacccctacagaaaccacatctgcaatttctttgacttcgatacctttgggggccacatcaagtttgctctgggatttaaggcagcacacttggagggcacggagctgaagcatatgggacagcagctggtgggtcagtacccgattcacttccacctggccggtgatgtagacgaaaggggaggttatgacccacccacatacatcagggacctctccatccatcatacattctctcgctgcgtcacagtccatggctccaatggcttgttgatcaaggacgttgtgggctataactctttgggccactgcttcttcacggaagatgggccggaggaacgcaacacttttgaccactgtcttggcctccttgtcaagtctggaaccctcctcccctcggaccgtgacagcaagatgtgcaagatgatcacagaggactcctacccggggtacatccccaagcccaggcaagactgcaatgctgtgtccaccttctggatggccaatcccaacaacaacctcatcaactgtgccgctgcaggatctgaggaaactggattttggtttatttttcaccacgtaccaacgggcccctccgtgggaatgtactccccaggttattcagagcacattccactgggaaaattctataacaaccgagcacattccaactaccgggctggcatgatcatagacaacggagtcaaaaccaccgaggcctctgccaaggacaagcggccgttcctctcaatcatctctgccagatacagccctcaccaggacgccgacccgctgaagccccgggagccggccatcatcagacacttcattgcctacaagaaccaggaccacggggcctggctgcgcggcggggatgtgtggctggacagctgccggtttgctgacaatggcattggcctgaccctggccagtggtggaaccttcccgtatgacgacggctccaagcaagagataaagaacagcttgtttgttggcgagagtggcaacgtggggacggaaatgatggacaataggatctggggccctggcggcttggaccatagcggaaggaccctccctataggccagaattttccaattagaggaattcagttatatgatggccccatcaacatccaaaactgcactttccgaaagtttgtggccctggagggccggcacaccagcgccctggccttccgcctgaataatgcctggcagagctgcccccataacaacgtgaccggcattgcctttgaggacgttccgattacttccagagtgttcttcggagagcctgggccctggttcaaccagctggacatggatggggataagacatctgtgttccatgacgtcgacggctccgtgtccgagtaccctggctcctacctcacgaagaatgacaactggctggtccggcacccagactgcatcaatgttcccgactggagaggggccatttgcagtgggtgctatgcacagatgtacattcaagcctacaagaccagtaacctgcgaatgaagatcatcaagaatgacttccccagccaccctctttacctggagggggcgctcaccaggagcacccattaccagcaataccaaccggttgtcaccctgcagaagggctacaccatccactgggaccagacggcccccgccgaactcgccatctggctcatcaacttcaacaagggcgactggatccgagtggggctctgctacccgcgaggcaccacattctccatcctctcggatgttcacaatcgcctgctgaagcaaacgtccaagacgggcgtcttcgtgaggaccttgcagatggacaaagtggagcagagctaccctggcaggagccactactactgggacgaggactcagggctgttgttcctgaagctgaaagctcagaacgagagagagaagtttgctttctgctccatgaaaggctgtgagaggataaagattaaagctctgattccaaagaacgcaggcgtcagtgactgcacagccacagcttaccccaagttcaccgagagggctgtcgtagacgtgccgatgcccaagaagctctttggttctcagctgaaaacaaaggaccatttcttggaggtgaagatggagagttccaagcagcacttcttccacctctggaacgacttcgcttacattgaagtggatgggaagaagtaccccagttcggaggatggcatccaggtggtggtgattgacgggaaccaagggcgcgtggtgagccacacgagcttcaggaactccattctgcaaggcataccatggcagcttttcaactatgtggcgaccatccctgacaattccatagtgcttatggcatcaaagggaagatacgtctccagaggcccatggaccagagtgctggaaaagcttggggcagacaggggtctcaagttgaaagagcaaatggcattcgttggcttcaaaggcagcttccggcccatctgggtgacactggacactgaggatcacaaagccaaaatcttccaagttgtgcccatccctgtggtgaagaagaagaagttgtgaggacagctgccgcccggtgccacctcgtggtagactatgacggtgactcttggcagcagaccagtgggggatggctgggtcccccagcccctgccagcagctgcctgggaaggccgtgtttcagccctgatgggccaagggaaggctatcagagaccctggtgctgccacctgcccctactcaagtgtctacctggagcccctggggcggtgctggccaatgctggaaacattcactttcctgcagcctcttgggtgcttctctcctatctgtgcctcttcagtgggggtttggggaccatatcaggagacctgggttgtgctgacagcaaagatccactttggcaggagccctgacccagctaggaggtagtctggagggctggtcattcacagatccccatggtcttcagcagacaagtgagggtggtaaatgtaggagaaagagccttggccttaaggaaatctttactcctgtaagcaagagccaacctcacaggattaggagctggggtagaactggctatccttggggaagaggcaagccctgcctctggccgtgtccacctttcaggagactttgagtggcaggtttggacttggactagatgactctcaaaggcccttttagttctgagattccagaaatctgctgcatttcacatggtacctggaacccaacagttcatggatatccactgatatccatgatgctgggtgccccagcgcacacgggatggagaggtgagaactaatgcctagcttgaggggtctgcagtccagtagggcaggcagtcaggtccatgtgcactgcaatgccaggtggagaaatcacagagaggtaaaatggaggccagtgccatttcagaggggaggctcaggaaggcttcttgcttacaggaatgaaggctgggggcattttgctggggggagatgaggcagcctctggaatggctcagggattcagccctccctgccgctgcctgctgaagctggtgactacggggtcgccctttgctcacgtctctctggcccactcatgatggagaagtgtggtcagaggggagcaatgggctttgctgcttatgagcacagaggaattcagtccccaggcagccctgcctctgactccaagagggtgaagtccacagaagtgagctcctgccttagggcctcatttgctcttcatccagggaactgagcacagggggcctccaggagaccctagatgtgctcgtactccctcggcctgggatttcagagctggaaatatagaaaatatctagcccaaagccttcattttaacagatggggaaagtgagcccccaagatgggaaagaaccacacagctaagggagggcctggggagccccaccctagcccttgctgccacaccacattgcctcaacaaccggccccagagtgcccaggcactcctgaggtagcttctggaaatggggacaagtcccctcgaaggaaaggaaatgactagagtagaatgacagctagcagatctcttccctcctgctcccagcgcacacaaacccgccctccccttggtgttggcggtccctgtggccttcactttgttcactacctgtcagcccagcctgggtgcacagtagctgcaactccccattggtgctacctggctctcctgtctctgcagctctacaggtgaggcccagcagagggagtagggctcgccatgtttctggtgagccaatttggctgatcttgggtgtctgaacagctattgggtccaccccagtccctttcagctgctgcttaatgccctgctctctccctggcccaccttatagagagcccaaagagctcctgtaagagggagaactctatctgtggtttataatcttgcacgaggcaccagagtctccctgggtcttgtgatgaactacatttatcccctttcctgccccaaccacaaactctttccttcaaagagggcctgcctggctccctccacccaactgcacccatgagactcggtccaagagtccattccccaggtgggagccaactgtcagggaggtctttcccaccaaacatctttcagctgctgggaggtgaccatagggctctgcttttaaagatatggctgcttcaaaggccagagtcacaggaaggacttcttccagggagattagtggtgatggagaggagagttaaaatgacctcatgtccttcttgtccacggttttgttgagttttcactcttctaatgcaagggtctcacactgtgaaccacttaggatgtgatcactttcaggtggccaggaatgttgaatgtctttggctcagttcatttaaaaaagatatctatttgaaagttctcagagttgtacatatgtttcacagtacaggatctgtacataaaagtttctttcctaaaccattcaccaagagccaatatctaggcattttcttggtagcacaaattttcttattgcttagaaaattgtcctccttgttatttctgtttgtaagacttaagtgagttaggtctttaaggaaagcaacgctcctctgaaatgcttgtcttttttctgttgccgaaatagctggtcctttttcgggagttagatgtatagagtgtttgtatgtaaacatttcttgtaggcatcaccatgaacaaagatatattttctatttatttattatatgtgcacttcaagaagtcactgtcagagaaataaagaattgtcttaaatgtcatgattggagatgtcctttgcattgcttggaaggggtgtacctagagccaaggaaattggctctggtttggaaaaattttgctgttattatagtaaacatacaaaggatgtcatcatc

SEQ ID NO: 116270 - DNA, 7357 bp, Homo sapiens
  Payload ID: 2679
  Gene Symbol: CEMIP
  Gene Name: cell migration inducing protein, hyaluronan binding
  Uniprot ID: Q8WUJ3
  ENST ID: ENST00000394685
  CDS Start-End: 420-4505
gagctagcgctcaagcagagcccagcgcggtgctatcggacagagcctggcgagcgcaagcggcgcggggagccagcggggctgagcgcggccagggtctgaacccagatttcccagactagctaccactccgcttgcccacgccccgggagctcgcggcgcctggcggtcagcgaccagacgtccggggccgctgcgctcctggcccgcgaggcgtgacactgtctcggctacagacccagagagaaaagcttcattctggaggggaaggagttttgagtgccaaggatgaaattccacccatcactcggtctctgagctgcaggacacaggcaggacaacggtaggattttcatgccccgatctgcctggccttgagttgtggcagctggggaagccactgggagcacactgccaggatgggagctgctgggaggcaggacttcctcttcaaggccatgctgaccatcagctggctcactctgacctgcttccctggggccacatccacagtggctgctgggtgccctgaccagagccctgagttgcaaccctggaaccctggccatgaccaagaccaccatgtgcatatcggccagggcaagacactgctgctcacctcttctgccacggtctattccatccacatctcagagggaggcaagctggtcattaaagaccacgacgagccgattgttttgcgaacccggcacatcctgattgacaacggaggagagctgcatgctgggagtgccctctgccctttccagggcaatttcaccatcattttgtatggaagggctgatgaaggtattcagccggatccttactatggtctgaagtacattggggttggtaaaggaggcgctcttgagttgcatggacagaaaaagctctcctggacatttctgaacaagacccttcacccaggtggcatggcagaaggaggctatttttttgaaaggagctggggccaccgtggagttattgttcatgtcatcgaccccaaatcaggcacagtcatccattctgaccggtttgacacctatagatccaagaaagagagtgaacgtctggtccagtatttgaacgcggtgcccgatggcaggatcctttctgttgcagtgaatgatgaaggttctcgaaatctggatgacatggccaggaaggcgatgaccaaattgggaagcaaacacttcctgcaccttggatttagacacccttggagttttctaactgtgaaaggaaatccatcatcttcagtggaagaccatattgaatatcatggacatcgaggctctgctgctgcccgggtattcaaattgttccagacagagcatggcgaatatttcaatgtttctttgtccagtgagtgggttcaagacgtggagtggacggagtggttcgatcatgataaagtatctcagactaaaggtggggagaaaatttcagacctctggaaagctcacccaggaaaaatatgcaatcgtcccattgatatacaggccactacaatggatggagttaacctcagcaccgaggttgtctacaaaaaaggccaggattataggtttgcttgctacgaccggggcagagcctgccggagctaccgtgtacggttcctctgtgggaagcctgtgaggcccaaactcacagtcaccattgacaccaatgtgaacagcaccattctgaacttggaggataatgtacagtcatggaaacctggagataccctggtcattgccagtactgattactccatgtaccaggcagaagagttccaggtgcttccctgcagatcctgcgcccccaaccaggtcaaagtggcagggaaaccaatgtacctgcacatcggggaggagatagacggcgtggacatgcgggcggaggttgggcttctgagccggaacatcatagtgatgggggagatggaggacaaatgctacccctacagaaaccacatctgcaatttctttgacttcgatacctttgggggccacatcaagtttgctctgggatttaaggcagcacacttggagggcacggagctgaagcatatgggacagcagctggtgggtcagtacccgattcacttccacctggccggtgatgtagacgaaaggggaggttatgacccacccacatacatcagggacctctccatccatcatacattctctcgctgcgtcacagtccatggctccaatggcttgttgatcaaggacgttgtgggctataactctttgggccactgcttcttcacggaagatgggccggaggaacgcaacacttttgaccactgtcttggcctccttgtcaagtctggaaccctcctcccctcggaccgtgacagcaagatgtgcaagatgatcacagaggactcctacccggggtacatccccaagcccaggcaagactgcaatgctgtgtccaccttctggatggccaatcccaacaacaacctcatcaactgtgccgctgcaggatctgaggaaactggattttggtttatttttcaccacgtaccaacgggcccctccgtgggaatgtactccccaggttattcagagcacattccactgggaaaattctataacaaccgagcacattccaactaccgggctggcatgatcatagacaacggagtcaaaaccaccgaggcctctgccaaggacaagcggccgttcctctcaatcatctctgccagatacagccctcaccaggacgccgacccgctgaagccccgggagccggccatcatcagacacttcattgcctacaagaaccaggaccacggggcctggctgcgcggcggggatgtgtggctggacagctgccggtttgctgacaatggcattggcctgaccctggccagtggtggaaccttcccgtatgacgacggctccaagcaagagataaagaacagcttgtttgttggcgagagtggcaacgtggggacggaaatgatggacaataggatctggggccctggcggcttggaccatagcggaaggaccctccctataggccagaattttccaattagaggaattcagttatatgatggccccatcaacatccaaaactgcactttccgaaagtttgtggccctggagggccggcacaccagcgccctggccttccgcctgaataatgcctggcagagctgcccccataacaacgtgaccggcattgcctttgaggacgttccgattacttccagagtgttcttcggagagcctgggccctggttcaaccagctggacatggatggggataagacatctgtgttccatgacgtcgacggctccgtgtccgagtaccctggctcctacctcacgaagaatgacaactggctggtccggcacccagactgcatcaatgttcccgactggagaggggccatttgcagtgggtgctatgcacagatgtacattcaagcctacaagaccagtaacctgcgaatgaagatcatcaagaatgacttccccagccaccctctttacctggagggggcgctcaccaggagcacccattaccagcaataccaaccggttgtcaccctgcagaagggctacaccatccactgggaccagacggcccccgccgaactcgccatctggctcatcaacttcaacaagggcgactggatccgagtggggctctgctacccgcgaggcaccacattctccatcctctcggatgttcacaatcgcctgctgaagcaaacgtccaagacgggcgtcttcgtgaggaccttgcagatggacaaagtggagcagagctaccctggcaggagccactactactgggacgaggactcagggctgttgttcctgaagctgaaagctcagaacgagagagagaagtttgctttctgctccatgaaaggctgtgagaggataaagattaaagctctgattccaaagaacgcaggcgtcagtgactgcacagccacagcttaccccaagttcaccgagagggctgtcgtagacgtgccgatgcccaagaagctctttggttctcagctgaaaacaaaggaccatttcttggaggtgaagatggagagttccaagcagcacttcttccacctctggaacgacttcgcttacattgaagtggatgggaagaagtaccccagttcggaggatggcatccaggtggtggtgattgacgggaaccaagggcgcgtggtgagccacacgagcttcaggaactccattctgcaaggcataccatggcagcttttcaactatgtggcgaccatccctgacaattccatagtgcttatggcatcaaagggaagatacgtctccagaggcccatggaccagagtgctggaaaagcttggggcagacaggggtctcaagttgaaagagcaaatggcattcgttggcttcaaaggcagcttccggcccatctgggtgacactggacactgaggatcacaaagccaaaatcttccaagttgtgcccatccctgtggtgaagaagaagaagttgtgaggacagctgccgcccggtgccacctcgtggtagactatgacggtgactcttggcagcagaccagtgggggatggctgggtcccccagcccctgccagcagctgcctgggaaggccgtgtttcagccctgatgggccaagggaaggctatcagagaccctggtgctgccacctgcccctactcaagtgtctacctggagcccctggggcggtgctggccaatgctggaaacattcactttcctgcagcctcttgggtgcttctctcctatctgtgcctcttcagtgggggtttggggaccatatcaggagacctgggttgtgctgacagcaaagatccactttggcaggagccctgacccagctaggaggtagtctggagggctggtcattcacagatccccatggtcttcagcagacaagtgagggtggtaaatgtaggagaaagagccttggccttaaggaaatctttactcctgtaagcaagagccaacctcacaggattaggagctggggtagaactggctatccttggggaagaggcaagccctgcctctggccgtgtccacctttcaggagactttgagtggcaggtttggacttggactagatgactctcaaaggcccttttagttctgagattccagaaatctgctgcatttcacatggtacctggaacccaacagttcatggatatccactgatatccatgatgctgggtgccccagcgcacacgggatggagaggtgagaactaatgcctagcttgaggggtctgcagtccagtagggcaggcagtcaggtccatgtgcactgcaatgccaggtggagaaatcacagagaggtaaaatggaggccagtgccatttcagaggggaggctcaggaaggcttcttgcttacaggaatgaaggctgggggcattttgctggggggagatgaggcagcctctggaatggctcagggattcagccctccctgccgctgcctgctgaagctggtgactacggggtcgccctttgctcacgtctctctggcccactcatgatggagaagtgtggtcagaggggagcaatgggctttgctgcttatgagcacagaggaattcagtccccaggcagccctgcctctgactccaagagggtgaagtccacagaagtgagctcctgccttagggcctcatttgctcttcatccagggaactgagcacagggggcctccaggagaccctagatgtgctcgtactccctcggcctgggatttcagagctggaaatatagaaaatatctagcccaaagccttcattttaacagatggggaaagtgagcccccaagatgggaaagaaccacacagctaagggagggcctggggagccccaccctagcccttgctgccacaccacattgcctcaacaaccggccccagagtgcccaggcactcctgaggtagcttctggaaatggggacaagtcccctcgaaggaaaggaaatgactagagtagaatgacagctagcagatctcttccctcctgctcccagcgcacacaaacccgccctccccttggtgttggcggtccctgtggccttcactttgttcactacctgtcagcccagcctgggtgcacagtagctgcaactccccattggtgctacctggctctcctgtctctgcagctctacaggtgaggcccagcagagggagtagggctcgccatgtttctggtgagccaatttggctgatcttgggtgtctgaacagctattgggtccaccccagtccctttcagctgctgcttaatgccctgctctctccctggcccaccttatagagagcccaaagagctcctgtaagagggagaactctatctgtggtttataatcttgcacgaggcaccagagtctccctgggtcttgtgatgaactacatttatcccctttcctgccccaaccacaaactctttccttcaaagagggcctgcctggctccctccacccaactgcacccatgagactcggtccaagagtccattccccaggtgggagccaactgtcagggaggtctttcccaccaaacatctttcagctgctgggaggtgaccatagggctctgcttttaaagatatggctgcttcaaaggccagagtcacaggaaggacttcttccagggagattagtggtgatggagaggagagttaaaatgacctcatgtccttcttgtccacggttttgttgagttttcactcttctaatgcaagggtctcacactgtgaaccacttaggatgtgatcactttcaggtggccaggaatgttgaatgtctttggctcagttcatttaaaaaagatatctatttgaaagttctcagagttgtacatatgtttcacagtacaggatctgtacataaaagtttctttcctaaaccattcaccaagagccaatatctaggcattttcttggtagcacaaattttcttattgcttagaaaattgtcctccttgttatttctgtttgtaagacttaagtgagttaggtctttaaggaaagcaacgctcctctgaaatgcttgtcttttttctgttgccgaaatagctggtcctttttcgggagttagatgtatagagtgtttgtatgtaaacatttcttgtaggcatcaccatgaacaaagatatattttctatttatttattatatgtgcacttcaagaagtcactgtcagagaaataaagaattgtcttaaatgtcatgattggagatgtcctttgcattgcttggaaggggtgtacctagagccaaggaaattggctctggtttggaaaaattttgctgttattatagtaaacatacaaaggatgtcatcatc

SEQ ID NO: 116271 - DNA, 385 bp, Homo sapiens
  Payload ID: 2679
  Gene Symbol: CEMIP
  Gene Name: cell migration inducing protein, hyaluronan binding
  ENST ID: ENST00000495041
  CDS Start-End: 1-229
catcaacttcaacaagggcgactggatccgagtggggctctgctacccgcgaggcaccacattctccatcctctcggatgttcacaatcgcctgctgaagcaaacgtccaagacgggcgtcttcgtgaggaccttgcagatggacaaagtggagcagagctaccctggcaggagccactactactgggacgaggactcaggaaaacaaaggaccatttcttggaggtgaagatggagagttccaagcagcacttcttccacctctggaacgacttcgcttacattgaagtggatgggaagaagtaccccagttcggaggatggcatccaggtggtggtgattgacgggaaccaagggcgcgtggtgagccacacgagcttcagga

SEQ ID NO: 116272 - DNA, 648 bp, Homo sapiens
  Payload ID: 2679
  Gene Symbol: CEMIP
  Gene Name: cell migration inducing protein, hyaluronan binding
  ENST ID: ENST00000560027
  CDS Start-End: 1-437
ggagaggggccatttgcagtgggtgctatgcacagatgtacattcaagcctacaagaccagtaacctgcgaatgaagatcatcaagaatgacttccccagccaccctctttacctggagggggcgctcaccaggagcacccattaccagcaataccaaccggttgtcaccctgcagaagggctacaccatccactgggaccagacggcccccgccgaactcgccatctggctcatcaacttcaacaagggcgactggatccgagtggggctctgctacccgcgaggcaccacattctccatcctctcggatgttcacaatcgcctgctgaagcaaacgtccaagacgggcgtcttcgtgaggaccttgcagatggacaaagtggagcagagctaccctggcaggagccactactactgggacgaggactcagggtgagcaggcgcccacttggctgcaggaaagtggctcaacctcatcttgtccccttggcctttccaataagtctaagaacagccatgtagttaatgccaattaatgtaagacacctttctaggcattttgactctaaggctgactgtcccatacattaacgacatttttaaagctattaagctttaaaagtaaaataaacaccctattaaatata

SEQ ID NO: 116273 - DNA, 3536 bp, Homo sapiens
  Payload ID: 2679
  Gene Symbol: CEMIP
  Gene Name: cell migration inducing protein, hyaluronan binding
  Uniprot ID: Q8WUJ3
  ENST ID: ENST00000611615
  CDS Start-End: 237-3215
gcgcggtgctatcggacagagcctggcgagcgcaagcggcgcggggagccagcggggctgagcgcggccagggtctgaacccagatttcccagactagctaccactccgcttgcccacgccccgggagctcgcggcgcctggcggtcagcgaccagacgtccggggccgctgcgctcctggcccgcgaggcgtgacactgtctcggctacagacccagagggagcacactgccaggatgggagctgctgggaggcaggacttcctcttcaaggccatgctgaccatcagctggctcactctgacctgcttccctggggccacatccacagtggctgctgggtgccctgaccagagccctgagttgcaaccctggaaccctggccatgaccaagaccaccatgtgcatatcggccagggcaagacactgctgctcacctcttctgccacggtctattccatccacatctcagagggaggcaagctggtcattaaagaccacgacgagccgattgttttgcgaacccggcacatcctgattgacaacggaggagagctgcatgctgggagtgccctctgccctttccagggcaatttcaccatcattttgtatggaagggctgatgaaggtattcagccggatccttactatggtctgaagtacattggggttggtaaaggaggcgctcttgagttgcatggacagaaaaagctctcctggacatttctgaacaagacccttcacccaggtggcatggcagaaggaggctatttttttgaaaggagctggggccaccgtggagttattgttcatgtcatcgaccccaaatcaggcacagtcatccattctgaccggtttgacacctatagatccaagaaagagagtgaacgtctggtccagtatttgaacgcggtgcccgatggcaggatcctttctgttgcagtgaatgatgaaggttctcgaaatctggatgacatggccaggaaggcgatgaccaaattgggaagcaaacacttcctgcaccttggatttagacacccttggagttttctaactgtgaaaggaaatccatcatcttcagtggaagaccatattgaatatcatggacatcgaggctctgctgctgcccgggtattcaaattgttccagacagagcatggcgaatatttcaatgtttctttgtccagtgagtgggttcaagacgtggagtggacggagtggttcgatcatgataaagtatctcagactaaaggtggggagaaaatttcagacctctggaaagctcacccaggaaaaatatgcaatcgtcccattgatatacaggccactacaatggatggagttaacctcagcaccgaggttgtctacaaaaaaggccaggattataggtttgcttgctacgaccggggcagagcctgccggagctaccgtgtacggttcctctgtgggaagcctgtgaggcccaaactcacagtcaccattgacaccaatgtgaacagcaccattctgaacttggaggataatgtacagtcatggaaacctggagataccctggtcattgccagtactgattactccatgtaccaggcagaagagttccaggtgcttccctgcagatcctgcgcccccaaccaggtcaaagtggcagggaaaccaatgtacctgcacatcggggaggagatagacggcgtggacatgcgggcggaggttgggcttctgagccggaacatcatagtgatgggggagatggaggacaaatgctacccctacagaaaccacatctgcaatttctttgacttcgatacctttgggggccacatcaagtttgctctgggatttaaggcagcacacttggagggcacggagctgaagcatatgggacagcagctggtgggtcagtacccgattcacttccacctggccggtgatgtagacgaaaggggaggttatgacccacccacatacatcagggacctctccatccatcatacattctctcgctgcgtcacagtccatggctccaatggcttgttgatcaaggacgttgtgggctataactctttgggccactgcttcttcacggaagatgggccggaggaacgcaacacttttgaccactgtcttggcctccttgtcaagtctggaaccctcctcccctcggaccgtgacagcaagatgtgcaagatgatcacagaggactcctacccggggtacatccccaagcccaggcaagactgcaatgctgtgtccaccttctggatggccaatcccaacaacaacctcatcaactgtgccgctgcaggatctgaggaaactggattttggtttatttttcaccacgtaccaacgggcccctccgtgggaatgtactccccaggttattcagagcacattccactgggaaaattctataacaaccgagcacattccaactaccgggctggcatgatcatagacaacggagtcaaaaccaccgaggcctctgccaaggacaagcggccgttcctctcaatcatctctgccagatacagccctcaccaggacgccgacccgctgaagccccgggagccggccatcatcagacacttcattgcctacaagaaccaggaccacggggcctggctgcgcggcggggatgtgtggctggacagctgccggtttgctgacaatggcattggcctgaccctggccagtggtggaaccttcccgtatgacgacggctccaagcaagagataaagaacagcttgtttgttggcgagagtggcaacgtggggacggaaatgatggacaataggatctggggccctggcggcttggaccatagcggaaggaccctccctataggccagaattttccaattagaggaattcagttatatgatggccccatcaacatccaaaactgcactttccgaaagtttgtggccctggagggccggcacaccagcgccctggccttccgcctgaataatgcctggcagagctgcccccataacaacgtgaccggcattgcctttgaggacgttccgattacttccagagtgttcttcggagagcctgggccctggttcaaccagctggacatggatggggataagacatctgtgttccatgacgtcgacggctccgtgtccgagtaccctggctcctacctcacgaagaatgacaaatggcattcgttggcttcaaaggcagcttccggcccatctgggtgacactggacactgaggatcacaaagccaaaatcttccaagttgtgcccatccctgtggtgaagaagaagaagttgtgaggacagctgccgcccggtgccacctcgtggtagactatgacggtgactcttggcagcagaccagtgggggatggctgggtcccccagcccctgccagcagctgcctgggaaggccgtgtttcagccctgatgggccaagggaaggctatcagagaccctggtgctgccacctgcccctactcaagtgtctacctggagcccctggggcggtgctggccaatgctggaaacattcactttcctgc

SEQ ID NO: 116274 - DNA, 2472 bp, Homo sapiens
  Payload ID: 2680
  Gene Symbol: CWH43
  Gene Name: cell wall biogenesis 43 C-terminal homolog
  Uniprot ID: Q9H720
  ENST ID: ENST00000226432
  CDS Start-End: 184-2283
cacactgcctcggttcggcaagtgggtcagttggctggggctcacttggcaacgggacgcgggaacgaggggcgcggacgcaggcccgggaggacgcggcggcgggaacctgggggcgcagggctagggcagcgggcccgacccgcacggctttcctggaaagcgctgcccctcgccgcggcgatgccctcgctgtggagagaaatcctcttggagtcgctgctgggatgtgtttcttggtctctctaccatgacctgggaccgatgatctattactttcctttgcaaacactagaactcactgggcttgaaggttttagtatagcatttctttctccaatattcctaacaattactcctttctggaaattggttaacaagaagtggatgctaaccctgctgaggataatcactattggcagcatagcctccttccaggctccaaatgccaaacttcgactgatggttcttgcgcttggggtgtcttcctcactgatagtgcaagctgtgacttggtggtcaggaagtcatttgcaaaggtacctcagaatttggggattcattttaggacagattgttcttgttgttctacgcatatggtatacttcactaaacccaatctggagttatcagatgtccaacaaagtgatactgacattaagtgccatagccacacttgatcgtattggcacagatggtgactgcagtaaacctgaagaaaagaagactggtgaggtagccacggggatggcctctagacccaactggctgctggcaggggctgcttttggtagccttgtgttcctcacccactgggtttttggagaagtctctcttgtttccagatgggcagtgagtgggcatccacatccagggccagatcctaacccatttggaggtgcagtactgctgtgcttggcaagtggattgatgcttccatcttgtttgtggtttcgtggtactggtttgatctggtgggttacaggaacagcttcagctgcggggctcctttacctgcacacatgggcagctgctgtgtctggctgtgtcttcgccatctttactgcatccatgtggccccaaacacttggacaccttattaactcagggacaaaccctgggaaaaccatgaccattgccatgatattttatcttctagaaatatttttctgtgcctggtgcacagcttttaagtttgtcccaggaggtgtctacgctagagaaagatcagatgtgcttttggggacaatgatgttaattatcgggctgaatatgctatttggtcctaagaaaaaccttgacttgcttcttcaaacaaaaaacagttctaaagtgcttttcagaaagagtgaaaaatacatgaaactttttctgtggctgcttgttggtgtgggattgttgggattaggactacggcataaagcctatgagagaaaactgggcaaagtggcaccaaccaaagaggtctctgctgccatctggcctttcaggtttggatatgacaatgaagggtggtctagtctagaaagatcagctcacctgctcaatgaaacaggtgcagatttcataacaattttggagagtgatgcttctaagccctatatggggaacaatgacttaaccatgtggctaggggaaaagttgggtttctatacagactttggtccaagcacaaggtatcacacttgggggattatggctttgtcaagatacccaattgtgaaatctgagcatcaccttcttccgtcaccagagggcgagatcgcaccagccatcacattgaccgttaacatttcgggcaagctggtggattttgtcgtgacacactttgggaaccacgaagatgacctcgacaggaaactgcaggctattgctgtttcaaaactactgaaaagtagctctaatcaagtgatatttctgggatatatcacttcagcacctggctccagagattatctacagctcactgaacatggcaatgtgaaggatatcgacagcactgatcatgacagatggtgtgaatacattatgtatcgagggctgatcaggttgggttatgcaagaatctcccatgctgaactgagtgattcagaaattcagatggcaaaatttaggatccctgatgaccccactaattatagagacaaccagaaagtggtcatagaccacagagaagtttctgagaaaattcattttaatcccagatttggatcctacaaagaaggacacaattatgaaaacaaccatcattttcatatgaatactcccaaatactttttatgaaacatttaaaacaagaagttattggctgggaaaatctaagaaaaaaagtatgtaagataaaaagaagagattaatgaaagtgggaaaatacacatgaagaacctcaacttaaaaaacacatggtatctatgcagtgggaaattacctccatttgtaaactatgttgcttaataaaaacatttctctaaa

SEQ ID NO: 116275 - DNA, 2390 bp, Homo sapiens
  Payload ID: 2680
  Gene Symbol: CWH43
  Gene Name: cell wall biogenesis 43 C-terminal homolog
  ENST ID: ENST00000513409
  CDS Start-End: 186-2204
aataaaggaaaagacctagattgaagtcttcaagctgagtctgcgaggcgcccgcgagagaccccgtcgcccgagttcccagcagccctgggattgtgcccaaggagcgcgaattctcctcgtgtcggccttgaccccgcgcggccggatgtgtttcttggtctctctaccatgacctgggaccgatgatctattactttcctttgcaaacactagaactcactgggcttgaaggttttagtatagcatttctttctccaatattcctaacaattactcctttctggaaattggttaacaagaagtggatgctaaccctgctgaggataatcactattggcagcatagcctccttccaggctccaaatgccaaacttcgactgatggttcttgcgcttggggtgtcttcctcactgatagtgcaagctgtgacttggtggtcaggaagtcatttgcaaaggtacctcagaatttggggattcattttaggacagattgttcttgttgttctacgcatatggtatacttcactaaacccaatctggagttatcagatgtccaacaaagtgatactgacattaagtgccatagccacacttgatcgtattggcacagatggtgactgcagtaaacctgaagaaaagaagactggtgaggtagccacggggatggcctctagacccaactggctgctggcaggggctgcttttggtagccttgtgttcctcacccactgggtttttggagaagtctctcttgtttccagatgggcagtgagtgggcatccacatccagggccagatcctaacccatttggaggtgcagtactgctgtgcttggcaagtggattgatgcttccatcttgtttgtggtttcgtggtactggtttgatctggtgggttacaggaacagcttcagctgcggggctcctttacctgcacacatgggcagctgctgtgtctggctgtgtcttcgccatctttactgcatccatgtggccccaaacacttggacaccttattaactcagggacaaaccctgggaaaaccatgaccattgccatgatattttatcttctagaaatatttttctgtgcctggtgcacagcttttaagtttgtcccaggaggtgtctacgctagagaaagatcagatgtgcttttggggacaatgatgttaattatcgggctgaatatgctatttggtcctaagaaaaaccttgacttgcttcttcaaacaaaaaacagttctaaagtgcttttcagaaagagtgaaaaatacatgaaactttttctgtggctgcttgttggtgtgggattgttgggattaggactacggcataaagcctatgagagaaaactgggcaaagtggcaccaaccaaagaggtctctgctgccatctggcctttcaggtttggatatgacaatgaagggtggtctagtctagaaagatcagctcacctgctcaatgaaacaggtgcagatttcataacaattttggagagtgatgcttctaagccctatatggggaacaatgacttaaccatgtggctaggggaaaagttgggtttctatacagactttggtccaagcacaaggtatcacacttgggggattatggctttgtcaagatacccaattgtgaaatctgagcatcaccttcttccgtcaccagagggcgagatcgcaccagccatcacattgaccgttaacatttcgggcaagctggtggattttgtcgtgacacactttgggaaccacgaagatgacctcgacaggaaactgcaggctattgctgtttcaaaactactgaaaagtagctctaatcaagtgatatttctgggatatatcacttcagcacctggctccagagattatctacagctcactgaacatggcaatgtgaaggatatcgacagcactgatcatgacagatggtgtgaatacattatgtatcgagggctgatcaggttgggttatgcaagaatctcccatgctgaactgagtgattcagaaattcagatggcaaaatttaggatccctgatgaccccactaattatagagacaaccagaaagtggtcatagaccacagagaagtttctgagaaaattcattttaatcccagatttggatcctacaaagaaggacacaattatgaaaacaaccatcattttcatatgaatactcccaaatactttttatgaaacatttaaaacaagaagttattggctgggaaaatctaagaaaaaaagtatgtaagataaaaagaagagattaatgaaagtgggaaaatacacatgaagaacctcaacttaaaaaacacatggtatctatgcagtgggaaattacctccatttgtaaactatgttgcttaataaaaacatttctct

SEQ ID NO: 116276 - DNA, 2135 bp, Homo sapiens
  Payload ID: 2680
  Gene Symbol: CWH43
  Gene Name: cell wall biogenesis 43 C-terminal homolog
  ENST ID: ENST00000514053
  CDS Start-End: 118-834
gaggggcgcggacgcaggcccgggaggacgcggcggcgggaacctgggggcgcagggctagggcagcgggcccgacccgcacggctttcctggaaagcgctgcccctcgccgcggcgatgccctcgctgtggagagaaatcctcttggagtcgctgctgggatgtgtttcttggtctctctaccatgacctgggaccgatgatctattactttcctttgcaaacactagaactcactgggcttgaaggttttagtatagcatttctttctccaatattcctaacaattactcctttctggaaattggttaacaagaagtggatgctaaccctgctgaggataatcactattggcagcatagcctccttccaggctccaaatgccaaacttcgactgatggttcttgcgcttggggtgtcttcctcactgatagtgcaagctgtgacttggtggtcaggaagtcatttgcaaaggtacctcagaatttggggattcattttaggacagattgttcttgttgttctacgcatatggtatacttcactaaacccaatctggagttatcagatgtccaacaaagtgatactgacattaagtgccatagccacacttgatcgtattggcacagatggtgactgcagtaaacctgaagaaaagaagactggtgaggtagccacggggatggcctctagacccaactggctgctggcaggggctgcttttggtagccttgtgttcctcacccactgggtttttggagaagtctctcttgtttccagatgggcagtgagtgggcatccacatccagggccagatcctaacccatttgggtgactgctggaatacaacattggaaggatttttggatcagactataacatattctttctttctcttataacagggacaatgatgttaattatcgggctgaatatgctatttggtcctaagaaaaaccttgacttgcttcttcaaacaaaaaacagttctaaagtgcttttcagaaagagtgaaaaatacatgaaactttttctgtggctgcttgttggtgtgggattgttgggattaggactacggcataaagcctatgagagaaaactgggcaaagtggcaccaaccaaagaggtctctgctgccatctggcctttcaggtttggatatgacaatgaagggtggtctagtctagaaagatcagctcacctgctcaatgaaacaggtgcagatttcataacaattttggagagtgatgcttctaagccctatatggggaacaatgacttaaccatgtggctaggggaaaagttgggtttctatacagactttggtccaagcacaaggtatcacacttgggggattatggctttgtcaagatacccaattgtgaaatctgagcatcaccttcttccgtcaccagagggcgagatcgcaccagccatcacattgaccgttaacatttcgggcaagctggtggattttgtcgtgacacactttgggaaccacgaagatgacctcgacaggaaactgcaggctattgctgtttcaaaactactgaaaagtagctctaatcaagtgatatttctgggatatatcacttcagcacctggctccagagattatctacagctcactgaacatggcaatgtgaaggatatcgacagcactgatcatgacagatggtgtgaatacattatgtatcgagggctgatcaggttgggttatgcaagaatctcccatgctgaactgagtgattcagaaattcagatggcaaaatttaggatccctgatgaccccactaattatagagacaaccagaaagtggtcatagaccacagagaagtttctgagaaaattcattttaatcccagatttggatcctacaaagaaggacacaattatgaaaacaaccatcattttcatatgaatactcccaaatactttttatgaaacatttaaaacaagaagttattggctgggaaaatctaagaaaaaaagtatgtaagataaaaagaagagattaatgaaagtgggaaaatacacatgaagaacctcaacttaaaaaacacatggtatctatgcagtgggaaattacctccatttgtaaactatgttgcttaataaaaacatttctctaaatt

SEQ ID NO: 116277 - DNA, 1974 bp, Homo sapiens
  Payload ID: 2681
  Gene Symbol: CREG1
  Gene Name: cellular repressor of E1A-stimulated genes 1
  Uniprot ID: O75629
  ENST ID: ENST00000370509
  CDS Start-End: 27-689
ccgggactcttcctggagacaccgccatggccgggctatcccgcgggtccgcgcgcgcactgctcgccgccctgctggcgtcgacgctgttggcgctgctcgtgtcgcccgcgcggggtcgcggcggccgggaccacggggactgggacgaggcctcccggctgccgccgctaccaccccgcgaggacgcggcgcgcgtggcccgcttcgtgacgcacgtctccgactggggcgctctggccaccatctccacgctggaggcggtgcgcggccggcccttcgccgacgtcctctcgctcagcgacgggcccccgggcgcgggcagcggcgtgccctatttctacctgagcccgctgcagctctccgtgagcaacctgcaggagaatccatatgctacactgaccatgactttggcacagaccaacttctgcaagaaacatggatttgatccacaaagtcccctttgtgttcacataatgctgtcaggaactgtgaccaaggtgaatgaaacagaaatggatattgcaaagcattcgttattcattcgacaccctgagatgaaaacctggccttccagccataattggttctttgctaagttgaatataaccaatatctgggtcctggactactttggtggaccaaaaatcgtgacaccagaagaatattataatgtcacagttcagtgaagcagactgtggtgaatttagcaacacttatgaagtttcttaaagtggctcatacacacttaaaaggcttaatgtttctctggaaagcgtcccagaatattagccagttttctgtcacatgctggtttgtttgcttgcttgtttacttgcttgtttaccaatagagttgacctgttattggatttcctggaagatgtggtagctacttttttcctattttgaagccattttcgtagagaaatatccttcactataatcaaataagttttgtcccatcaattccaaagatgtttccagtggtgctcttgaagaggaatgagtaccagttttaaattgcccattggcatttgaaggtagttgagtatgtgttctttattcctagaagccactgtgcttggtagagtgcatcactcaccacagctgcctcctgagctgcctgagcctggtgcaaaaggattggcccccattatggtgcttctgaataaatcttgccaagatagacaaacaatgatgaaactcagatggagcttcctactcacgttgatttatgtctcacaatcctgggtattgttaattcaacatagggtgaaactatttctgataaagaacttttgaaaaactttttatactctaaagtgatactcagaacaaaagaaagtcataaaactcctgaatttaatttccccacctaagtcgaaacagtattatcaaaacacatgtgcacacagattattttttggctccaaaactggattgcaaaagaaagaggagaagaatattttgtgtgttcctggtattcttttataagtaaagtttacccaggcatggaccagcttcagccagggacaaaatcccctcccaaaccactctccacagctttttaaaaatacttctactcttaacaattacctaaggcttcctcaactgccccaaatctcttaatagcttctagtgctgctacaatctaagtcaggtcaccagagggaagagaacatggcattaaaagaatcacatcttcagaagagaagacactaatattattacccatatacatgatttcagaagatgacataagattcctcttaaagaggaaatgtcaggaatcaagccactgaatccttaaagagaaaagttgaatatgagtcattgtgtctgaaaactgcaaagtgaacttaactgagatccagcaaacaggttctgtttaagaaaaataatttatactaaatttagtaaaatggacttcttattcaaagcatcaataattaaaagaattattttaatgaaa

SEQ ID NO: 116278 - DNA, 6383 bp, Homo sapiens
  Payload ID: 2682
  Gene Symbol: CREG2
  Gene Name: cellular repressor of E1A-stimulated genes 2
  Uniprot ID: Q8IUH2
  ENST ID: ENST00000324768
  CDS Start-End: 139-1011
gcgggggaccgcgcccggggatcctgcaggggcgggaagggggctcgggctccttgcttccgccgcagtggggcgctgccgggctccccggcactagcgctgctggcggccccggcggccgggcgtgctgcctgcaagatgtccgtgcgccgcggccggcggccggcgcggccggggacccgcctctcctggctgctgtgctgcagcgccctgctgtccccggccgcgggctacgtgatcgtgagctccgtgtcttgggccgtcaccaacgaggtggacgaggagctggacagcgcctccactgaggaggctatgcccgcgctgctagaggattcgggcagcatctggcagcaaagcttccccgcctctgcccacaaggaggacgcgcacctgcggccccgggcgggcgccgcccgggccaggccgccccccgcgccacccgggatgttctcctaccggcgcgagggcggccagacggccagtgcgcccccgggccctagactgcgcgccgccaccgcccgctccctggcccatgccagcgtctggggctgcctggccaccgtgtccacccacaagaagatccaaggactgccatttgggaactgcctgcccgtcagtgatggccccttcaacaatagcactgggattcctttcttctacatgacagccaaggaccccgtggtggctgatctgatgaagaaccccatggcctcgctgatgctgccagaatcagaaggggagttctgcagaaaaaacatcgttgatccggaagatccccgatgtgtccagttaacgctcactggccagatgatcgcagtgtctccagaagaagtagaatttgccaagcaagccatgttttcaaggcacccagggatgaggaagtggcctcgtcaatatgaatggttctttatgaagatgaggatagaacatatctggcttcagaaatggtatggaggcgcatccagtatttcaagggaggaatatttcaaagcagttcccagaaaggcctgatggagtgagaagaaagtccttggtgtttgcacttaaatgaaaaccttttcagtgatgcagccagacagctattgaccactgtctctttgttgaagggttcatagcagccctgccatccctgcagcagaatgagagagggtgaacagggaactctatgctagatttgagattaaagtggtcatttgcagatctccaactcacacagatacttcacgtagatagtctttattccattgtattcaatccagactcatcgattcagaaatcatataatagctggtggtcaaaatgacatgttgagatcattgttgtttcattgtttaaggaaaaaaaaaaatgcctgtacctacaatgtgattgctttgtattgtgagagtatctttgttgcttgctctgccaaatgcagtcttggttctaagttcactgtgaccacgaagcagctgactgtgcatcacgcagtcacaatattgtttttagggtgagggtggaggactgtgtgtccgtggattactcctcctgctggtggattgcagatgcattattaggtcatactggctagaatgcagcttttctcccaccataacatgaaaacagtgtaagaacatagggtgctttgtgcatagcccttctctatgtaagcagccatggcagtcattaaagagaaaggagtagctttgacattaagctccccagatccctgctgctcatacttctggcaagggttcccctctctcatgcatgaacaggggcatccaaaataagaagctctccattctgtggtggggaaagcggagaggggagtgggtgaagctgggaaagtaaaggcagcacgttacagaaggaagaaaggaagccagtaactgagggcccactgcctgcccggccctgggccaggccctcaacagaagccatctcatttaagccctgcaaccaatgagatgcacgtcatcattggctcttacagacaagaaaactagactcagaggggctgagtccacatcccagacagctcactgcagacacaggtggagtggttcctacaagacatccagttttaacaacaaaagagttattgaaatgcatgggtagaaattgaaccaggaaaatcagtaaagtgattgtaaaaaagaaggactagcttgcctggagatgatgtttcttgcttttggaaaaaaaaaaaaagtctctgaaatttgattcttactacagatttaaaactttctacatattatatgtaggagctcctagtgtttttgagaaattagactgtacctgtgtacacttctaaggtctacatggacctatgtatatatatctaagacctctgatcattaaaacctataaagggttgagctgtcccaagttttctgtctttctgtaatggctacaaactttctttggtaggttagggaggttgtataacataaaaaacacatcactatatgtaggaaatatacatttttcaagtaaataagagtgttattaatgattatgaacttttgcttaacaaaataacatacgacgagagcttgagttgtcaaaatatattttaattatctattgctaaaaacatagtaagatgcagagaattctttatttgtcataagccagtcctcaaaagagttcctaacagtagtgatttctaatatataagaataaggtacttctgagggaattttatattttcagagtttaaaattattgctactcccaatttagaaaaatggggagaaagctggaagaacaaatgacatgctcaaatgtattgcataagtcaacctcacaccttaatactgggagcttctctgcctcctgatcctgtcttgcagataaggtcccctggctaggtttgcgtttatagtcaggttccatttagctcattaaaggtcactgctgcttcaaaggactttgcccagtggatgccattcataaccactgatgaatgttatcagctatttatccaaattacaggaaatgaaacctgaaaaggttgggtaagaatagtgttgaaaattcacagttttaagtttgatggtctccattcaggcaagtgtgtttcagcaaatctctagaaatttacattgattaaaatgttagaggctgttctggaagttctagacatggcaataaggcaagaaaaagagattaaatgcatacagatcgaaagaaaaaaaaagtacccctatttagagatgagaggattgcctacatagaaattccaaataatctattttttttaaaaaaaaactctggaactagtatgtgagtgcaacaaggtctcaggacacaagatcagcatacaaaagtcaattgcatttctctatgctaacgatgaacatgtggggaaaaaaactaaaaacacaataccatttgcaatcactccaaagtgaaatacttccgtataaacaaaacttacccaggacctatgtagtgaaaatttttaaatgctaagaaaagaaattaatgacctaaacaaagaaagagagataccatgttcttggattggaagatacaaacagtaaagatatcagttctccccatctccatctctaggtttaatgcaattcctatcaaaatctcaacaaggattttgtagacctatacaagcttattttaaaagttacatggaaaggcacaggcattgaaatagctaaaacagtcttgtaaaagcagaataaggtaggagaaatcattctatttaatatagagttatgatgtagctacagtattcaagaagtgtggtatttggtggaggcatagaaacacattgatggaacagaatagggaatctagaaataggcccacacaaatatgctcaactgattttcttttacaaaagtacaaaactaattcaacagaggatagccttttcaataagtgtggagtaagtggacatccataggaaaataaaatgaaccttggactaaacttcataccttatgcaaaaattaactcagatcatatctgtaaaaataaaatgtaaaactataaaactataggatatagaaaatcttttggaactagggctaagcaaagggttgttagacttgataccaaaagcacaattcataaaagaaaatttgataaattaaacttcatcagaatttaaaacatttgttctgcaaaagaccatgttaaaaggccgagaagacaggccacatactgggagaaaatatttccaaaccacatatccaacaaaagattagtatctagaatatataaagaactgtcaaaactcaacagctaaaaaattctaattagaaaatggagcacatgaacagacatttcactgcagaggatataaaaatggcaaataagcgcatgaaaagacatgaaaagacagtcaacagcactagtcactaggggaactgcaaactaatactacaatgagatatcactacatagctaccaaaattgctaaaataaaaaataatgataacaccaaacgctgacaaggatgcagataaaccgggtcagtcatacactagtggtgggaatagaaaatggaacagccactccgcaaaaccatttgccagtttctcataaaactaaacatacaactgccatactgaccctcaattgctcctgggcatttatacaagagaaatgaaaagaggttcacacaaaaacttgtgcatgaatgttcatatcagttttatccataatgttcaaaaacttggagaaatcagatggcctttaacgggtggctggtgaaacagtggatggtgcctctatgcccggaatactactcagcgataaaaaagaactaattactgacatgggcaaccactgggatgaattccagagaattgtgctgagtgagcaaagccaatcataaaagtttgcacactgtatgattccatttacataacattttgaaatgcaaaattataggaatggagaatagattaggggttgccagggaggagtggggagaacaagagagttgggcataactataaaaggatagcacaagagatccttgtggtgatggacatattcagtatcttgaccaaatcaatgtgaaaatcctggttgggatattgtactgtagtttagcaagatgtgccattggggaaaactgggtaaaaagaacacaggatctctgtattatttcttacaactgcatgtgaatctacagttatctacaactatctcagaatctacaattatctctgagtaaaaagcttaacataaacaagatttagggcttagcttaataaagcatttatactctctctcttattagtccctaataaaatgaggaactgagctataagccaaaacctagtacaaagagacagcatttcatttgttaaccgttaatatatccatttgcagaagaggtgtaaaattctttaaaattttcctaaatatgttcaatttaatgttaaatacaaattaacaagaattcaacaaatctgctgtatagattttaagtgggtcacttaggaggagaggacatcttcgaatttctgatataaacacgttgagtaagctataggtgtatataagtatccaagtgtgtatataatgattctccactgattttatagagaagaactatatttccagtaatcttcccctaaatattgtgggaaataattctgttttagtgaataagctaattaaagtctatccagaccaccatgtttttatttacagtgactatatatatccatgattttgacatagagtataattctgatgttacttatttcaatatgccttgtatatattagctgtttataagagagtcgctttttggttgaaaagtatttctaggctgagcaaggtagctcatgcctgtaatccaaacactttgggaggccaaggcaggaggatcacttgaggtcaggagttcaagagcagcctgggcaacatagtgagacctcatctctacaaaaaatatttattaaaaaaaaaaaaaaaaaagcccagcatggtggtgcacacctgtagttctagctactcaagaggctgaggtgggaggattgctttgaggccaggagtttgacctcctgagctgtgatcatgccaccacacttgagtgatagagtgagactttgtctcttaaaaaaaaaaaaaggtatttctacaatttttccaaaaagtctgtatttatttaaataattgaactatcaaatactgttctgaaaataaaacctctctaggataatttattgatgcttatttgattgctataacagaaagtcaattattgtacaatttgaattgtaatgatgtgattatttgtgccatgtaatgcatgtaaaatgtaaaatctgttttcaaaactagatctatttaaccaaagactatttcattcctgatatgatttgtgtgcttgattaaatgaatttatgatattg

SEQ ID NO: 116279 - DNA, 772 bp, Homo sapiens
  Payload ID: 2683
  Gene Symbol: CRABP1
  Gene Name: cellular retinoic acid binding protein 1
  Uniprot ID: P29762
  ENST ID: ENST00000299529
  CDS Start-End: 106-519
aaggcgcgcagcgctgggcgcaaagcgccagtctccgccttgcgagctcagagtgtgcccgctgcgccgccgctgtccgtacctgccgccgccgccaccgccaccatgcccaacttcgccggcacctggaagatgcgcagcagcgagaatttcgacgagctgctcaaggcactgggtgtgaacgccatgctgaggaaagtggccgtagcggctgcgtccaagccgcacgtggagatccgccaggacggggatcagttctacatcaagacatccaccacggtgcgcaccactgagatcaacttcaaggtcggagaaggctttgaggaggagaccgtggacggacgcaagtgcaggagtttagccacttgggagaatgagaacaagatccactgcacgcaaactcttcttgaaggggacggccccaaaacctactggacccgtgagctggccaacgatgaacttatcctgacgtttggcgccgatgacgtggtctgcaccagaatttatgtccgagagtgaaggcagctggcttgctcctactttcaggaagggatgcaggctcccctgaggaatatgtcatagttctgagctgccagtggaccgcccttttcccctaccaatattaggtgatcccgttttccccatgacaatgttgtagtgtcccccacccccaccccccaggccttggtgcctcttgtatccctagtgctccatagtttggcatttgcacggtttcgaagtcattaaactggttagacgtgtctcaaccttt

SEQ ID NO: 116280 - DNA, 583 bp, Homo sapiens
  Payload ID: 2683
  Gene Symbol: CRABP1
  Gene Name: cellular retinoic acid binding protein 1
  ENST ID: ENST00000406419
  CDS Start-End: 1-340
cgacgagctgctcaaggcactgggtgtgaacgccatgctgaggaaagtggccgtagcggctgcgtccaagccgcacgtggagatccgccaggacggggatcagttctacatcaagacatccaccacggtgcgcaccactgagatcaacttcaaggtcggagaaggctttgaggaggagaccgtggacggacgcaagtgcagggtgaggccccagagccactacagcgtccccgtgtccccgctcggtgcccatggcccactgctgctggaggaacctgtgtctccctttgcagcctgtggcgcgccttccttgcaggagtttagccacttgggagaatgagaacaagatccactgcacgcaaactcttcttgaaggggacggccccaaaacctactggacccgtgagctggccaacgatgaacttatcctgacgtttggcgccgatgacgtggtctgcaccagaatttatgtccgagagtgaaggcagctggcttgctcctactttcaggaagggatgcaggctcccctgaggaatatgtcatagttctgagctgccagtggaccgcccttttcccctaccaa

SEQ ID NO: 116281 - DNA, 456 bp, Homo sapiens
  Payload ID: 2684
  Gene Symbol: CRABP2
  Gene Name: cellular retinoic acid binding protein 2
  ENST ID: ENST00000368220
  CDS Start-End: 209-456
gattcaagtgctggctttgcgtccgcttccccatccacttactagcgcaggagaaggctatctcggtccccagagaagcctggacccacacgcgggctagatccagagaacctgacgacccggcgacggcgacgtctcttttgactaaaagacagtgtccagtgctccagcctaggagtctacggggaccgcctcccgcgccgccaccatgcccaacttctctggcaactggaaaatcatccgatcggaaaacttcgaggaattgctcaaagtgctgggggtgaatgtgatgctgaggaagattgctgtggctgcagcgtccaagccagcagtggagatcaaacaggagggagacactttctacatcaaaacctccaccaccgtgcgcaccacagagattaacttcaaggttggggaggagtttgaggagcagactgtggatgggaggccctgtaa

SEQ ID NO: 116282 - DNA, 783 bp, Homo sapiens
  Payload ID: 2684
  Gene Symbol: CRABP2
  Gene Name: cellular retinoic acid binding protein 2
  Uniprot ID: P29373
  ENST ID: ENST00000368221
  CDS Start-End: 97-513
ccagagaagcctggacccacacgcgggctagatccagagacagtgtccagtgctccagcctaggagtctacggggaccgcctcccgcgccgccaccatgcccaacttctctggcaactggaaaatcatccgatcggaaaacttcgaggaattgctcaaagtgctgggggtgaatgtgatgctgaggaagattgctgtggctgcagcgtccaagccagcagtggagatcaaacaggagggagacactttctacatcaaaacctccaccaccgtgcgcaccacagagattaacttcaaggttggggaggagtttgaggagcagactgtggatgggaggccctgtaagagcctggtgaaatgggagagtgagaataaaatggtctgtgagcagaagctcctgaagggagagggccccaagacctcgtggaccagagaactgaccaacgatggggaactgatcctgaccatgacggcggatgacgttgtgtgcaccagggtctacgtccgagagtgagtggccacaggtagaaccgcggccgaagcccaccactggccatgctcaccgccctgcttcactgccccctccgtcccaccccctccttctaggatagcgctccccttaccccagtcacttctgggggtcactgggatgcctcttgcagggtcttgctttctttgacctcttctctcctcccctacaccaacaaagaggaatggctgcaagagcccagatcacccattccgggttcactccccgcctccccaagtcagcagtcctagcccc

SEQ ID NO: 116283 - DNA, 992 bp, Homo sapiens
  Payload ID: 2684
  Gene Symbol: CRABP2
  Gene Name: cellular retinoic acid binding protein 2
  Uniprot ID: P29373
  ENST ID: ENST00000368222
  CDS Start-End: 156-572
cgcgcgggagcccaggccagctttggggttgtccctggacttgtcttggttccagaacctgacgacccggcgacggcgacgtctcttttgactaaaagacagtgtccagtgctccagcctaggagtctacggggaccgcctcccgcgccgccaccatgcccaacttctctggcaactggaaaatcatccgatcggaaaacttcgaggaattgctcaaagtgctgggggtgaatgtgatgctgaggaagattgctgtggctgcagcgtccaagccagcagtggagatcaaacaggagggagacactttctacatcaaaacctccaccaccgtgcgcaccacagagattaacttcaaggttggggaggagtttgaggagcagactgtggatgggaggccctgtaagagcctggtgaaatgggagagtgagaataaaatggtctgtgagcagaagctcctgaagggagagggccccaagacctcgtggaccagagaactgaccaacgatggggaactgatcctgaccatgacggcggatgacgttgtgtgcaccagggtctacgtccgagagtgagtggccacaggtagaaccgcggccgaagcccaccactggccatgctcaccgccctgcttcactgccccctccgtcccaccccctccttctaggatagcgctccccttaccccagtcacttctgggggtcactgggatgcctcttgcagggtcttgctttctttgacctcttctctcctcccctacaccaacaaagaggaatggctgcaagagcccagatcacccattccgggttcactccccgcctccccaagtcagcagtcctagccccaaaccagcccagagcagggtctctctaaaggggacttgagggcctgagcaggaaagactggccctctagcttctaccctttgtccctgtagcctatacagtttagaatatttatttgttaattttattaaaatgctttaaaaaaataaaa

SEQ ID NO: 116284 - DNA, 1033 bp, Homo sapiens
  Payload ID: 2684
  Gene Symbol: CRABP2
  Gene Name: cellular retinoic acid binding protein 2
  Uniprot ID: P29373
  ENST ID: ENST00000621784
  CDS Start-End: 209-625
gattcaagtgctggctttgcgtccgcttccccatccacttactagcgcaggagaaggctatctcggtccccagagaagcctggacccacacgcgggctagatccagagaacctgacgacccggcgacggcgacgtctcttttgactaaaagacagtgtccagtgctccagcctaggagtctacggggaccgcctcccgcgccgccaccatgcccaacttctctggcaactggaaaatcatccgatcggaaaacttcgaggaattgctcaaagtgctgggggtgaatgtgatgctgaggaagattgctgtggctgcagcgtccaagccagcagtggagatcaaacaggagggagacactttctacatcaaaacctccaccaccgtgcgcaccacagagattaacttcaaggttggggaggagtttgaggagcagactgtggatgggaggccctgtaagagcctggtgaaatgggagagtgagaataaaatggtctgtgagcagaagctcctgaagggagagggccccaagacctcgtggaccagagaactgaccaacgatggggaactgatcctgaccatgacggcggatgacgttgtgtgcaccagggtctacgtccgagagtgagtggccacaggtagaaccgcggccgaagcccaccactggccatgctcaccgccctgcttcactgccccctccgtcccaccccctccttctaggatagcgctccccttaccccagtcacttctgggggtcactgggatgcctcttgcagggtcttgctttctttgacctcttctctcctcccctacaccaacaaagaggaatggctgcaagagcccagatcacccattccgggttcactccccgcctccccaagtcagcagtcctagccccaaaccagcccagagcagggtctctctaaaggggacttgagggcctgagcaggaaagactggccctctagcttctaccctttgtccctgtagcctatacagtttagaatatttatttgttaattttattaaaatgcttt

SEQ ID NO: 116285 - DNA, 519 bp, Homo sapiens
  Payload ID: 2685
  Gene Symbol: CEMP1
  Gene Name: cementum protein 1
  ENST ID: ENST00000565480
  CDS Start-End: 345-491
ttacgatagttacttttgttatgtattttaccacaatttttaaaaagcaaaccaaaaccaaccaagagtgcttcccccacacctcaaaatcatcctgcagcagctccctggcccagctctctctcaccctgaccctgggcccctctcccaccacccagggctagccctgtggaccaaccatctctgccagcccctccccgaccctccagccagggaggtggggcgctggccggtgaatggggcaggccaggcccaaaggctggcccagggctcaccagctctggactgggcgtcccgtctgaggtggggatgaccaacatgccagctctgggttttagctgaggatgggcacatcaagcactgacagccagcaagctgggcacaggcgatgctcaacctctaacacatcggctgagaacctcacctgcctctccctgcctgggagccctggcaagacagctcctctcccaggcccagcacaggcaggatgacactaatggggtgagcagggcacactgg

SEQ ID NO: 116286 - DNA, 1374 bp, Homo sapiens
  Payload ID: 2685
  Gene Symbol: CEMP1
  Gene Name: cementum protein 1
  Uniprot ID: Q6PRD7
  ENST ID: ENST00000567119
  CDS Start-End: 336-1079
ttacttttgttatgtattttaccacaatttttaaaaagcaaaccaaaaccaaccaagagtgcttcccccacacctcaaaatcatcctgcagcagctccctggcccagctctctctcaccctgaccctgggcccctctcccaccacccagggctagccctgtggaccaaccatctctgccagcccctccccgaccctccagccagggaggtggggcgctggccggtgaatggggcaggccaggcccaaaggctggcccagggctcaccagctctggactgggcgtcccgtctgaggtggggatgaccaacatgccagctctgggttttagctgaggatgggcacatcaagcactgacagccagcaagctgggcacaggcgatgctcaacctctaacacatcggctgagaacctcacctgcctctccctgcctgggagccctggcaagacagctcctctcccaggcccagcacaggcaggcgctggacagccacttcctaaggggtgcgcggccgtcaaggcagaggtgggtatccctgcacctcacacctctcaggaggtcaggatccacatccgtcgcctgctttcctgggctgcccctggggcttgtgggctgagatcaaccccttgtgccctgccccaggccctccctcaggcgaggccctgcccaggcaggtggttcttccctggctgttcccttccaacaggtggggcccagaccatcctatctctttggacctggagacatttccttaactgggctttgcagcagagggaagagaacagtggcagagccaggcgcgtacctcctgtgcccaggacagcacctgtaagcaagggggaagggagccacccaccccagaactcaaatggagagaaagtcaagacaatcacccctgacgtggggctgcaccaatccctgacgtctgaccccactgtggctgtcctcagagccaagagggctccagaagcccacccgcctcgaagctgttcagggagcctcacggcccgtgtttgccacatgggtgtgtgccagggccaaggggacacagaagatggcaggatgacactaatggggtgagcagggcacactggtgcctcccatactgccctccagcaccaggcagggtcaccacagccggcaagcactgggcctggggatgtgtgaagagatagggttattgagaagagaaaacagaacgctggtcatccgtggcactcagggctaggcagtccagggagcagaaaacaggggtcccgggcccagtctccctcctggaggtcagagcggagcccctggcactgtgccctggcccagaaccaggctgtgggctccacgctgcacaccccaactcaggagcagaaagcaaacccct

SEQ ID NO: 116287 - DNA, 2744 bp, Homo sapiens
  Payload ID: 2686
  Gene Symbol: CENPBD1
  Gene Name: CENPB DNA-binding domains containing 1
  Uniprot ID: B2RD01
  ENST ID: ENST00000314994
  CDS Start-End: 613-1176
ggcaggggcgcggcgccggctggggccccgtcttgggtgtccacgccgtcgcctgaccgttcgagggtttgatcgccagcgcagcctcgccctgcccagacagctgggccctaaggggatagccagcgcctttagacttatcttaaatcgggcatcggcatcaacacttatttctggggtcctccatggaaagcagctcccgaaacaacacccgcccggtccgccctccgctgcactggaaaaccgcccctggacgtttctgccgcagtgtccccctcacggagttccgtttgtctgcttggtcggttgttctctggagccccaggacccaggccgcttgtatgtgcctgcggccgcacggccccaacacgcggacttcgagcggtaccgggagacccgcgcggcctcctcggagtggacagtgaagcagcagctgggctaggcagtggggctgggcctgcccatggggacccgtccacgtctccaggacatcagcctgagcctcttcgcagcctcgttttctgttgaccgagttctgcaaggggacgtagaggaaccacagcgttcttgcgcttgagaccgctgtgattttctgacattttggaggcagaaatgcctggggaaaggcccacagatgcaactgtcatccctagtgccaaaagggaacggaaagcgattacccttgacctcaaattggaagtgttacgacgatttgaagcgggtgagaagctcagtcagatcgcaaaggccttagatcttgctatctctacagtggcgaccattcgagatagtaaagaaaaaatcaaagcgagttcacaaatagctactcctctgagagcctctcggttgactcgccatcgaagtgcagtgatggagagcatggagcagctgctgagcttgtggctggaagaccagagccagccaaatgcgaccttgagcgccgccatcgttcaggagaaggctgagtttgatgacttacagcgtgaacatggcgaaggttctcaaacggagaggtttcatgcaagtcaagggtggcttgtgagattcaaggagtgccactgtttgccccacttcaagatgaacagcgcagctcccagcaacaaggacatgtacacagaaatgctgaaaagcatcatcgaagaaggtgagtacaccccccaggtgtctttaacgtagatgagacgagacttgattggaagagaatgcccaaaggaacgtttatttccgaggaagagaatgctgagccagggtttaagtcatccaaagatcgcttgatgctgctgcttggtggcagtgcagctggggactttaagttgaagcccttactggtgtaccgctcagaaacccgcaaggctctgaagggttcttgaagcccagtttgcccgtgatttggcgctccaacagaaaggcttgggtgaccaggagcatctttcatgaatggttcacttactttttttgccgttgaaaaatacagtgcccaaaataatctcaccaacaaagcactgctcatactagacagtgcgtcatgccactctgtaaatttgagcgacctttctgataactaagagtagaataccttcaggccaggcgcggtggctcacgcctgtaatcccagcactttgggaggccgagacgggcggatcacctgaggtcaggagttcgagaccagcctcaacatggagaaaccccgtctctattaaaaatacaaatttagccgggcgtggtggtgcaggcctgtaatcccagctactcgggaggctaaagcaggagaattgcttgaacctgggaggcggaggttgtggtgagccgagatcgcgccattgcactccatcctggacaacaggagtgaaactccgtctcaaaaaaaaaaaagaaaaaaaagaagtacaagagtataataccttcatgacagtacagctgactcaatccggaccacgtgtcaaggtgtaatctcgaccttgaaagctcattatctgagaaggacttttcagcacatcctagaagcagcggatggtgaggacacagctatgatcagggaattttggagaaactacagcatcatggatgctgtggacatggccatcgcatgggaggagctcaaaccagcactaatgaacagcatgtggaagaagatttggcctgagtgtgttcaggcccagcgtttttcccaggcagataacattgcacagcttcaaaaaaacattgtgacccttgccagaaatgtggcctttgaagaggttgctgaggctgctgtggaccagttgctgcagtcccatgaagaagatctctcaaatgaggaactgatgcggctggaacaggagctggcagtgggggaggaggagagggaagatggtccctgggcactgtggcagctaaccacaggaagactgtcggcagccctctcacattttgaggctggcttgtaggtccttgctagtaacagccctaatgatgactggaaactgagaggttccagagaaatcagtgttgcagtaaactgctagcaggagctgtacaatgagaaaaagcgccactcaaaacaactctcttaggtcatttttcaatgtgtgtaaccaaaagttaatcagaataaagcggaagcaccatgatgacctcaacagtggaggcccagccaggcctccctgctctgtggtgttggacatccctggaaaccttgctgttggtatttccattttgatacttgagagcatcaaattttgtcattaaaatgttatttaaatata

SEQ ID NO: 116288 - DNA, 2058 bp, Homo sapiens
  Payload ID: 2687
  Gene Symbol: CTGLF11P
  Gene Name: centaurin, gamma-like family, member 11 pseudogene
  ENST ID: ENST00000624701
  CDS Start-End: 1-2058
atggggaacatactgacctgtcgtgtgcaccctagcgtcagcctcgagtttgaccagcagcaggggtcggtgtgtccctctgaatctgagatctatgaggcaggagctgaggacaggatggcaggagcgcccatggctgctgctgtacagcctgctgaggtgactgttgaagttggtgaggacctccacatgcaccacgttcgtgaccgggagatgcctgaagctttggagtttaacctttctgccaatccagaggcaagcacaatattacagaggaactctcaaacagatgctttggagtttaacccttctgccaatccagaggcaagcacaatattccagaggaactctcaaacagatgttgtagaaataagaagaagcaactgtacaaaccatgtatctactgagcgtttcagtcaacaatacagctcgtgttcgacaatattccttgatgacagcacagccagccagcattatcttacaatgacaataatatctgtgaccttggagatacctcatcatatcacacaaagagatgcagatagatctttgagcatacctgatgaacagttatcatttgcggtttccaccgtgcacattacgaagaacagaaatggaggtgggagtttaaataactattcctcctccattccatcgactcccagcaccagccaggaggaccctcagttcagtgttcctcccactgccaacacacccacccccgtttgcaagcggtccatgtgctggtccaacctgtttacatctgagaaagggagtcacccagacaaagagaggaaagccccggagaatcatgctgacaccatcgggagcagcagagccatccccattaaacagggcatgctcttaaagcgaagtgggaaatggctgaagacatggaaaaagaaatacgtcaccctgtgttccaatggcgtgctcacctattattcaagcttaggtgattatatgaagaatattcataaaaaagagattgaccttcggacatctaccatcaaagtcccaggaaagtggccatccctagccacatcggcctctgcacccatctccagctctaaaagcaatggcctatccaaggacatggacaccgggctgggtgactccatatgcttcagccccagtatctccagcaccaccagccccaagctcaacctgcccccttctcctcatgccaataaaaagaaacacctaaagaagaaaagcaccaacaactttatgattgtgtctgccactggccaaacgtggcactttgaagccacgacatatgaggagcgggatgcctgggtccaagccatccagagccagatcgtggccagcctgcagtcatgcgagagcagtaaaagcaagtcccagctgaccagccagagcgaggccatggccctgcagtcgatccaaaacatgcgtgggaatgcccactgtgtggactgtgagacccagaatcctaagtgggccagtttgaacttgggagtcctcatgtgtattgaatgctcaggaatccactgcagtcttggcacccgcctttcccgtgtgcgatctctggagctggatgactggccagttgagctcaggaaggttatgtcatctattggcaatgacctagccaacagcatctgggaagggagcagccaggggcagacaaaaccctcagtaaagtccacgagggaagagaaggaacggtggatccgttccaaatatgagaagaagctctttctggccccactaccctgcactgagctgtccctgggccagcacctgctgcgggccaccgctgatgaggacctgcagacagccatcctgctgctggcacatggctcccgtgaggaggtgaacgagacctgtggggagggagacggctgcacggcgctccatctggcctgccgcaaggggaatgtggtcctggcgcagctcctgatctggtacagggtggacgtcatggcccgagatgcccacgggaacacagcgctgacctacgcccggcaggcctccagccaggagtgcatcaacgtgcttctgcagtacggctgccccgatgagtgcgtgtag

SEQ ID NO: 116289 - DNA, 4871 bp, Homo sapiens
  Payload ID: 2688
  Gene Symbol: CNTLN
  Gene Name: centlein, centrosomal protein
  Uniprot ID: Q9NXG0
  ENST ID: ENST00000380641
  CDS Start-End: 27-1202
aacttgacccgttagcagccgcagccatggcggcgcgttcgcctccctcaccgcacccttcgcccccagcgcgacagctgggccccaggtccccacgtgttgggcggggagctgaagtacacgcaatgcgcagcgaggcctcgggttttgccggcgcagcgcgggaggtggtcgcggacgaaagtgataaaatctgggtgggtgaagaagggtcagggggccggcgagggcctgggggggcagctccggctcatgctcccctcctcagcgcgcccatggggtccagacggctagagggcatctcggtagaggaggcgatggtgacccggacgcagctgctggaggaagagctgagcagcctaaaggaggagttggccctgtgtcaggctgataaagaatttgtatggtctttgtggaaacgtctccaggttacaaacccagatctcacacaagtggtcagtttggttgtggaaagagaaaaacagaaatctgaagctaaagacagaaaagttctagaaattctgcaagtcaaggatgccaaaatacaagaatttgaacagagagagtcagtactgaaacaggaaataaatgaccttgtaaaacggaaaattgcagtagatgaagaaaatgctttcttaaggaaagaattcagtgacttggagaagaaatttaaagataaaagtcaagaaattaaggacactaaggagtgtgtacagaacaaagaagagcaaaacagactagttataaaaaatctggaggaggaaaacaagaaattaagtacccgctgcactgacctgctaaatgacctggagaaattgaggaagcaggaagcacatttgagaaaagaaaaatatagcactgatgcaaaaataaagacctttgaagacaatttaattgaagcaaggaaagaagttgaagtatcacagagtaaatacaatgctctatcattacagttgagtaataaacagactgaacttatccagaaggatatggatattaccctggtcaggaaggaactgcaggagctgcagaatctttacaaacagaacagtacacatacagcccagcaagcagagctgatccagcagcttcaggttctcaatatggacacacaaaaagtactgagaaatcaggaagatgttcacacagctgaaagtatatcatatcaaaaagtatgcttttattctgtaataaagatgtaaatgtttatgtatgaacttatgaacatatatagaattcagattttttcaaatttcagcatttaatttttacttccttttacatgtgtttcctcaaaatttagaagtgaaggatggttcaatttgataacatttaaaattttttgaattttctttatggtaattagagctgaatcacttaaaatatagatacaaacttactctatagggtattatttttataaattggcattcagacagcttctgtgaaacatactaggagtatagtctcaaaactggaatggaattcctcggcctgctattacaagaaattattttgtcaagtatggcagactttcattgtaaaatttgtacattatttttcggcaaatcttcacaaatacaaaggggattgctgaggagggctttaggatcaatattttccaggatttttctctgtttattttgtgtgtttctgttcagtagtcttttactttacagttgttttaggagcctttcaagaaggtttacccaagtatttaggtgtgctaactgactcagcagcaataatttaatctactaattaaaaaaaatacctttattggccgggcatggtggctcatgcctgtaatcccagcactttgggaggctgaggcgggcgaatcacaaggtcaagagatcgagaccatcctggccaacatgatgaaaccctgtttctactaaaaatacaaaaagttagctgagcatggtggttcatgcctgtagtcccagctacttgggaggctgaggcaggagaatcacttgaacctgggaggcggaggtcgcagtgagccaagatcgcaccattgcactccagccaggcgacagggggagacaacgtctcaaaaaaaaaaaaaaaaaaaaaaaaaacctttactgaattcttcatatgttttgtgtagtgtgctaaattattttaataaataatgtagtttatatagtgttattctcatttaatgatagtagttgaggcaagtgaggcttagagaggttaaataatacacagttcatattatccctctagaattactggatttttacttctgatcttacttttctaaaaaatcactgtgaaaatcgaatgtctataattaacatgaaattaattaccttaaaacttaaacacatatttttaaatgatgctttgtaacagtggttttcagtgtgtgttttgtgttgcctttgtgttttcccaaggacctagatgatagcaagcaggaagatacagtcttccacttcagctagagcagtgctgcctttttgttttatggggtgacattgcccactgtgttttttgtttctaaagcacgttccattgctaaaatgatttgaaacactgtactttattaatacttgttaattgttattaatactaattaattgttttctctttttcccccattgatgactttctgttgcttggaacattttttttctgttgcttgaaacatttttttcccctcttggcttccattgtactataattgggtggctttcttccttcagtttttagctgtccctttttaatttctttgtggtcctccccagtctccatgtcctgtaaagtgtgaaaatgttccaggcctcactcttaggatctctccttttttttctgtttatcctcacaccctaggtgatttcatctaatcaccttgactttcaaagttacactgcaggttcaatatcccttatctgaagtgcttggaacctgaaacctgaagtgcttcacatttttagcttttgagattttggaatatttgcattacatttactggctgagcatcccaaatctgaaaaattgaaatctgaaatgctccaatgagcatttcctttgagcatcatactggtgctcaaaaatgttttggattttggagcatttcagattttttgatttgtatgctctacctgtgtctataggctgatgattcccaaatttgtaaatttgtttatctaccttggatctcttctgtatactctaggaaagagtatatctaattgcctacttaatatctcttcacttggattcctaatgggcatctcatactgaacgtgttcaaaacaaagctattgccttttatgttttcagtacaggtgcagaattcgactacttcccaccacccttgctgtcaccattctgtccaggccactatcacatattacctggattattgcagtaacttgccagtttctttgttctgatcttaagccttttgacataggtgccaggatattattgccaaaactttgtgagtcaaatcagatcactgctctcttcaagtccctccagtggtttcccagaccattaaaaataaaaaacctaagttcttactacaacctgtgggactctacatgttccgactctacattacctctctgatctcatctttgccttcttttcttattcactccagcaacacaaaccatgtttttattccttgaacataacaggtatttaacctttcaaggtaatactttcttccagtgcctgaaagctttcctgcccagttatctgcatagataccattttacttcctttattctacaactcttacagtttaaaattagttgatagcagacattaaatggtagaagcaagaaaagaatgatgtatgttgtaatagtagtagagggaaatatgggagcataactgggggcctgttccaagactaaggataaagaaagctctccttgatggtgtcataccagtaatactttgctgagaagataagatatcaaagagacaaattaatttctgataacttttccaaatggactctagttcaaaccagaaattccctagtgtatgtctttactaaattgggagaagtagagcttatatgcccctatttggcgaacttgccgtaacctaaattgtgatctggggtacattttgaaaccgtaaacacttttcttctaggattatgtttatcccttccaagaatcattatagaaaatgagagatgtaaatgatggggttatgttgtgtttgtgaatgatattgaggcagaataaaaataaaagagaacaaactgagatgtgctaacctaataattggcttacttttccttgtgtttagtctgttttttgtcatttctttctctagattgaatatcatttttcttttatttttgtttctcagagattaccttggggagtgtgggagtagggggcttcactgatacttaagttgattctcactttgaaattgtacctcccactgtaatattttaattttgtagttgttttagatgcttgtagttgttcatacagttttcattagtatcctcaactagactcaatttgaaaatattcttcttatttatttattctttataaattttgtctacagttagtagacattacaattgttttggtggctgtatgtagttattttaaaaaacaaagtcttttataattccatctcccagaggcaaatactgtgaacattttgaatatttcacttttaaaaatgcatcttaacatatttgttagcacactagtatttttcactttaacattatattttaaaaaatcataacatataactattttagatggtcatataatttatttttctactgttggttatatatgttatttgttttactattgtaaataaagctgcaataaacatttctttgtcagttcagacta

SEQ ID NO: 116290 - DNA, 5576 bp, Homo sapiens
  Payload ID: 2688
  Gene Symbol: CNTLN
  Gene Name: centlein, centrosomal protein
  Uniprot ID: Q9NXG0
  ENST ID: ENST00000380647
  CDS Start-End: 85-4305
cggttcggcgttccgggctcgccgggttggggaaagggaggtggagtttccaacagggaacttgacccgttagcagccgcagccatggcggcgcgttcgcctccctcaccgcacccttcgcccccagcgcgacagctgggccccaggtccccacgtgttgggcggggagctgaagtacacgcaatgcgcagcgaggcctcgggttttgccggcgcagcgcgggaggtggtcgcggacgaaagtgataaaatctgggtgggtgaagaagggtcagggggccggcgagggcctgggggggcagctccggctcatgctcccctcctcagcgcgcccatggggtccagacggctagagggcatctcggtagaggaggcgatggtgacccggacgcagctgctggaggaagagctgagcagcctaaaggaggagttggccctgtgtcaggctgataaagaatttgtatggtctttgtggaaacgtctccaggttacaaacccagatctcacacaagtggtcagtttggttgtggaaagagaaaaacagaaatctgaagctaaagacagaaaagttctagaaattctgcaagtcaaggatgccaaaatacaagaatttgaacagagagagtcagtactgaaacaggaaataaatgaccttgtaaaacggaaaattgcagtagatgaagaaaatgctttcttaaggaaagaattcagtgacttggagaagaaatttaaagataaaagtcaagaaattaaggacactaaggagtgtgtacagaacaaagaagagcaaaacagactagttataaaaaatctggaggaggaaaacaagaaattaagtacccgctgcactgacctgctaaatgacctggagaaattgaggaagcaggaagcacatttgagaaaagaaaaatatagcactgatgcaaaaataaagacctttgaagacaatttaattgaagcaaggaaagaagttgaagtatcacagagtaaatacaatgctctatcattacagttgagtaataaacagactgaacttatccagaaggatatggatattaccctggtcaggaaggaactgcaggagctgcagaatctttacaaacagaacagtacacatacagcccagcaagcagagctgatccagcagcttcaggttctcaatatggacacacaaaaagtactgagaaatcaggaagatgttcacacagctgaaagtatatcatatcaaaaactttacaatgagttacatatttgttttgaaaccacaaaatcaaatgaagctatgctccggcaaagtgttactaatcttcaggatcagctattacaaaaagagcaagaaaatgctaagttaaaagaaaaacttcaggaatcacagggagcacctcttcctttacctcaagaaagtgatccagactactcagcacaggtacctcatcgcccatccttatcaagcttagaaacgttaatggtttcacagaagtctgaaattgagtatttacaggagaaactaaagatagcaaatgaaaaactgtcagaaaacatatctgccaacaagggtttctcccgaaagagcatcatgacaagtgctgaaggaaaacataaggaaccacctgtgaaacgttcaaggtctttgtccccaaagagctctttcacagactcagaagagctacagaagctgagaaaagctgaaagaaagattgaaaacttagagaaggcactacaactaaagagccaagaaaatgatgagctaagagatgcccatgaaaaacgcaaggaacggctacagatgttacagaccaactacagagcagtaaaagagcaattaaaacagtgggaagaaggcagtggcatgactgaaatcaggaaaataaagagagcagatccccaacaacttcgacaagaagattctgacgctgtgtggaatgaactggcatatttcaaaagggaaaaccaggagctaatgattcaaaagatgaatcttgaagaagaattagatgaacttaaagtacatatatctattgataaggcagcaatacaagaattgaatagatgtgtggcagagagaagagaagaacagctctttagatctggtgaagatgatgaggtcaagaggagtactccagagaagaatggaaaagaaatgttggagcagacattacagaaggtcactgagttggaaaatcggctgaaatcttttgagaaaaggtcgagaaaattaaaagaagggaataaaaaattaatgaaagaaaatgattttctgaaatccctcttaaaacagcaacaagaagatacagagaccagagaaaaagagctagaacagataataaaggggagtaaagatgtagaaaaagaaaatactgaacttcaagtaaaaatcagtgagctggagacagaagtcacttccctgaggagacaagtggcagaagctaatgcattgagaaatgaaaatgaagagctgatcaacccaatggagaaatcacaccagtcagcagacagagctaaatccgagatggccaccatgaaagtgagatctggacgatatgattgtaagacaactatgaccaaggttaaatttaaagctgcgaagaaaaattgctctgtgggtcgtcaccacactgttctcaatcattccatcaaggttatgagcaatgtgtttgagaacctcagcaaggacggctgggaggatgtgagtgaaagcagcagtgattctgaagcacagacctctcaaactttgggaacaattattgtagaaacatcccagaaaataagtcctacggaagatggaaaagaccagaaagaaagtgatccaacagaagacagccaaacacaaggaaaagaaatagtacagacatatttaaatatagatggcaagaccccaaaggactattttcatgataagaatgccaaaaaaccaacttttcaaaagaagaattgcaagatgcaaaagagttcacatacagcagttcctactagagtcaacagagaaaagtacaaaaatataactgcccagaaatcaagtagcaatattattttattacgagaacggattatatccttgcaacaacaaaacagtgtacttcagaatgccaagaaaacagcagaattgtctgttaaagaatataaagaagttaatgaaaagctcctccatcaacagcaagtatccgatcaacgatttcagacaagcaggcagacaataaagaagctaaatttggatttggctgggcttcggaaagaaaaagaagatttactaaagaaattggagtcctcatctgaaatcacaagtttggcagaagaaaattcccaggtaacatttccacggatacaagttacatcacttagtccttcaaggagcatggatttggaaatgaagcaattgcagtataaactaaagaatgctactaatgaactcactaaacagtcatcaaatgtgaagactttgaaatttgaactcctagcaaaagaagaacacataaaggaaatgcatgaaaagatatctcgaatggagagggatataactatgaaaagacatttgatagaggacttgaaatttcgacagaaagtaaatttggaaagtaacaagagttttagtgaaatgttacaaaatcttgataaaaaggtaaagacattaactgaagaatgttccaacaagaaggtatcaattgattcactaaagcaaagacttaacgttgctgtaaaagaaaagtcacagtatgaacagatgtatcagaaatctaaagaggagttagaaaaaaaggatctcaagcttactctcctagtatcaagaataagtgagactgaatctgcaatggcagaaattgaaacagcagcatctaagcagcttcaagaattagcattgcaaagtgaacaggtcctagaaggtgcacagaagacattgctgttagccaatgaaaaagtagaagagttcaccacatttgtgaaggctttggccaaagagttgcaaaatgatgtccatgtggtaaggcgacaaataagagagcttaaaaaaatgaagaaaaacagggacgcctgtaaaacctcaacccataaagcccagaccttggcagcttctatcctgaacatttcacggtcagatttagaggaaatattagacacagaagatcaagtggaaattgaaaaaacaaaaattgatgctgaaaatgacaaggaatggatgttgtacattcagaaacttcttgaaggacagcttccttttgcctcatatttactagaagcagtactggaaaaaataaatgaaaaaaagaaactagttgaaggatatttcacaattatgaaagatattagatgatattaaaatggagagctttattgcaaatgtgaaaactttttatgtggtgtgattggaatacatgcattgcaatcctgacacggtatctgctccaactatcaatagtcaggttcaataccaaaataagaagtctctgaaaataattaattgctgaacaagtgaaactaattaagtacatagccatttaaaaggaaatagtgtagcatctgatggtcgaatacaaatattgccacaaatcagtgcaaacttaaaaatgattttccttctagtgcattaaaagaaactgagcaggcttggtacacacaaattggcctgagcataagaagaaaaagtatcaactaaggatttaatgttttacgtttcatgaagaaactagactttttacataaaactgctatagatggccataagtggtccagggagcaacagatttgtagtatgagcaaatataaaatgaagcatcataacttgagcatttattgaaataaattgtgtggtccaattgaatctgttctcattgatgtgctggtttatgtaggagatactgtgtatttctacaactctttggcaaaaacaaaaacattttcttcttctctctcttaacttcacaatactatacgttgtgtagtcatataaatttgcagggaaccacaaacccaatgtataaaattaggctctatttaacagaactactactgtggtcagctaatttaagttacattcttaaccatgatgtcatccttatttagattcctggacattcccacctcatttcacctcttcaccgtgttcctgccataccctttttggttcctctaattcaccatactggtgcctgcctcccacatttgcccttggtcttctctctttctagaatactctgcactcaactttcctcatggctggctccttgtcatcattcagctccaccttccccggtccctcagagacacattctctgaccagcttactattttatttcctcatagcacaaaattatctatctgttcatgtatttgttttcttgtttattttcttcttttccctctttagtatgtaggtcccatgagattaaggcaagggttggcagattatagcctgcagggcgaatctggcctgccacctgttttgtatggcccacaagctaagaatggtttttgccttattaaatggtttttaaaaaatcaaaaggagaataatattttgtagcatgtgaaaattatataaaattcaaattttggtgtctgttaataaagttttattggaacaca

SEQ ID NO: 116291 - DNA, 1758 bp, Homo sapiens
  Payload ID: 2689
  Gene Symbol: CETN1
  Gene Name: centrin, EF-hand protein, 1
  Uniprot ID: Q12798
  ENST ID: ENST00000327228
  CDS Start-End: 53-571
gaatgagagcgcggggcggtgccgttgggaccacggcggccagagcggcaggatggcttccggcttcaagaagcccagcgctgcctccaccggccaaaagagaaaggtggcacctaagcccgagctcactgaggatcagaagcaagaagttcgggaagcatttgacctcttcgacgtggacggaagtgggaccatcgacgcgaaggagctgaaggtggccatgagagcgctgggcttcgaacccaggaaggaagagatgaagaaaatgatctccgaggtggacagggaaggcacggggaagatcagcttcaatgacttcctggccgtgatgacgcagaagatgtccgagaaggacaccaaagaagaaatcctgaaggccttcaggctctttgatgacgatgagaccgggaagatctcgttcaaaaacctgaagcgtgtggccaacgagctgggggagaacctcacggatgaggagctgcaggagatgatcgacgaagctgatcgggatggggacggcgaagtgaacgaggaggagttccttcggatcatgaagaagaccagcctttactgaagtcggttcagaagctaaagtgactctctgggttgcctgcttccattttgtgaaaccttagaggacagcggctgcctgtcccttcttcaccccctcacccccataatttgtctagatctatttccatatctctagttcaataatagaatttgaaagatgcttgtaatgtgagttttgggttttaattctcaagagtcaacctggagcacatgaggttaaacaaagggccctgaagtttgagtgcgccctccatttgccctgtgctgaacttgctgttcatctgttgatctggaggcaggacagcttctgggacacacaaaaatgtggttccctttgtcacttctttggtggtcttaaattatcttgcttcatatatcattccttaaattccagtcattgttccagcataatgagatggaatctgccagtagatttgcctagcctgtccacttagctgaataccagtttgaaggaaaacagggtggccacttacaaacttacggagctcaggacagataatcttataaagaatagacttgcttgggtggtagtacgttgtgcaattttgactattcactggctttatacctgcaaatgattcttcgttcatgtgtaaattgtccaccatgggtttatctagggctagtatgtatacctgggctacagaataaaaataaaatctaatactggcccaagcaaagtataatttgcttaagaggttacgctaacaaacgattttgagtaaatatttacaaatgtaggatcttagtttaggaaattataacaaataccttaatataacattttaagctacttatagtccttggaaatagcaacaaatatcttagttattggactattataaccttagtcatcttattactgcttgattatgagacactctccctgctaatccttagaacatcttggttcttggtacttgacttttagcccctctgacatatagttgatgtcagagtgtctggcatttcagtagtgctctattttacaaatcccagtaaactgctccactgtggcttgtttatgtgttaatactgcttgttttctgttataaattattttttgctttggagtaagatatcatcattttgcatagctacaaatctgaagttaaagaaaattttaaaaatgtaattgtgggaaaataacaaatagatctgctgaga

SEQ ID NO: 116292 - DNA, 1454 bp, Homo sapiens
  Payload ID: 2690
  Gene Symbol: CETN2
  Gene Name: centrin, EF-hand protein, 2
  Uniprot ID: P41208
  ENST ID: ENST00000370277
  CDS Start-End: 68-586
ggtgggaacggcgccgagtcagtgtacacgtcggttgcctaacaaccggcagcggactcctttggctatggcctccaactttaagaaggcaaacatggcatcaagttctcagcgaaaaagaatgagccctaagcctgagcttactgaagagcaaaagcaggagatccgggaagcttttgatcttttcgatgcggatggaactggcaccatagatgttaaagaactgaaggtggcaatgagggccctgggctttgaacccaagaaagaagaaattaagaaaatgataagtgaaattgataaggaagggacaggaaaaatgaactttggtgactttttaactgtgatgacccagaaaatgtctgagaaagatactaaagaagaaatcctgaaagctttcaagctctttgatgatgatgaaactgggaagatttcgttcaaaaatctgaaacgcgtggccaaggagttgggtgagaacctgactgatgaggagctgcaggaaatgattgatgaagctgatcgagatggagatggagaggtcagtgagcaagagttcctgcgcatcatgaaaaagaccagcctctattaagatcagtgtcttctttttctactgcaagcacatgtaactagatttagtgcctgccatggtgtgaaatctggcttttgagaacacaaacttttcccccacggacctccctttatcactttaatagtgaccttgagcctattttagccgtttggaagtgttctttgatattacagttctttgtaaaatgacctgcgaattaccctaattctcaaaagcaaaacaagagcacacaagcgtgaagaaaaggatcttaaagctttgagcacctgccattttgccttgcatcgtttccctcgtcatgcatttccacatatccacaaacacagaacgactttagacaagcacatgttacacctgtgttgccacaagcagtcattcttgacggctccagtttttatttgacacttgagtttagttttctcttttataaacccagtgaactcctgcactggcatttggatgtgtgttaatgctatttgttttgtcttaaaagtaaaacctttctcagtttgaacttgtattctctaaggatgagttctttagctttgcttatgagttcctcttctcaattattgtgttgaaggcagcctattagatacaaaactccttaccagcctatggacagaaaatgaataatcctttgctactttcctggcatgaattgctttttgccttggaaggctgctggtttgtaaaactagcagaatttttatatcacctaagcctaaatgatgctctaaaaatagttttggcaaagctaagactggaaaagagtcttgttagtaatttgtgcttgaataaaatggggagagccaggctaacgcaacactaggatggattcagccaacctctcgtgaatttatttgct

SEQ ID NO: 116293 - DNA, 2432 bp, Homo sapiens
  Payload ID: 2691
  Gene Symbol: CETN3
  Gene Name: centrin, EF-hand protein, 3
  Uniprot ID: O15182
  ENST ID: ENST00000283122
  CDS Start-End: 126-629
atgttgtgggaggtccctgaggccgctgaggtcgttcgtgtctgttgaacggctgtgggcgtcttgctgccttgggtagggggttaaaatcgttcttgagaggaacgtctctgtgcgaagagataatgagtttagctctgagaagtgagcttgtagtggacaaaacaaagaggaaaaaaagaagagaactgtctgaggaacagaaacaagaaattaaagatgcttttgaactatttgatacagacaaagatgaagcaatagattatcatgaattaaaggtggcaatgagagccttggggtttgatgtaaaaaaagctgatgtactgaagattcttaaagattatgacagagaagccacagggaaaatcacctttgaagattttaatgaagttgtgacagactggatattggaaagagatccccatgaagaaatactcaaggcatttaaactatttgatgatgatgattcaggtaaaataagcttgaggaatttgcgacgtgttgctagagaattgggtgaaaacatgagtgatgaagaacttcgagctatgatagaagaatttgacaaagatggtgatggagaaataaaccaagaggagttcattgctattatgactggtgacatttaaagaattacaaggataaacactaagaatgttgcagttaccatcttatattctatttttgtgcctggagccatgtgaaaaaaaccaacttagttcttttatcctaaaggaccaaaaataagcatcttatatatctgtattttactactgttaagtttctttgtatgaactgtgttgttagtactcagatagtttagctttgtatttataatagagcttttatataaagttttaaaaattgaatgtgtgatatgtgttctttgaaggttttttaatttaacatttatagtcactttttagtgcacacattttccagactttcgttaataaaatatttattttattagaattttaaagtttggtaaatttgtttttattcctagtatctgttaaccctcaagagtggatttcttaaatcttccctttataattttactagtttctgaaacaaaaattgaaatacaattagcaatagagtggcacatttttccattacctaacatttcatcaattttgacattctatattttaatacaagctgactcaatataagcctaattccttttttaagagtcctgtctttgagtttagaaggaataagtattgtgcagatagacccatttatccttgtgtattatgtttcttaacttggtatcattgtaagtatgaaagttaattttcttctgaatatttccttaaacaaattgaatgaatacaatttgaattttctaacttcttgactgagagatttaaattttggaattttgatttgttaaggtaattatcactcaattacatgtcacagtgatgaaaatagaaaactgtaagccacagaaataatttaagtctatgttttacctatatgaaggaacagtctgtgattcaccaggaaatagtagagacacagtttccaagtactggtgggctcttctgccttgtagaagtgtatgttagggggaaacaagtggttatggagatcgatcatagaaaaaaatagtacctatatggatccttcactcatatctagtactcggtgttatgggctctcccaggaacggaattgagttgtctatttcagcaatctttctttagaattcttgttttaaatttttaagtttaaagtgtagtatcatttgaggcgctttaaatgttgtgagccttttaagagtattacattaagggttgtccactagaaatttaacacaaaatcagtagggaatactatagcagtagtgacatttcaaacagttatctaggaagcaagtgtatattaagtcattcttgtattgctacgaagaaatacccaagactgcatattttataaagaaaagaagcttaattggcttacggttctgcaggctttacaggaagcatggtgcttctgcttttggggaggcctcaggaagcttacagtcatggtagaaggcaaagggggagcaggcacatcacatggtgaaaaccagagtgaacaagtgagagaagtgccaagtactttgaaaccaccagatctcatgagaactcactattgtgaggacatctaatcacctcccaccagacctcacctccagtactggggattacaattcaacatgatatttgagtggggacagatatacaaactatatcagcaggttaactagagtaaaacttaattttgaatacaaattcaatggtcacagtcattatattcagggcaacagaccttgaaattaaaaaatttttgtcgcacactgatgagttccctctgtcttgatcatgaaatatattgatttccaggaaagtgaaaaataaaacagtaaaagtaaa

SEQ ID NO: 116294 - DNA, 1026 bp, Homo sapiens
  Payload ID: 2691
  Gene Symbol: CETN3
  Gene Name: centrin, EF-hand protein, 3
  ENST ID: ENST00000522083
  CDS Start-End: 97-672
ggtcgttcgtgtctgttgaacggctgtgggcgtcttgctgccttgggtagggggttaaaatcgttcttgagaggaacgtctctgtgcgaagagataatgagtttagctctgagaagtgagcttgtagtggacaaaacaaagaggaaaaaaagaagagaactgtctgaggaacagaaacaagaaattaaagatgcttttgaactatttgatacagacaaagatgaagcaatagattatcatgaattaaaggtggcaatgagagccttggggtttgatgtaaaaaaagctgatgtactgaagattcttaaagattatgacagagaagccacagggaaaatcacctttgaagattttaatgaagttgtgacagactggatattggaaagagatccccatgaagaaatactcaaggcatttaaactatttgatgatgatgattcaggtaaaataagcttgaggaatttgcgacgtgttgctagagaattgggtgaaaacatgagtgatgaagaacttcgagctatgatagaagaatttgacaaagatggtgatggagaaattcttaagaacatactcttgcttcctatttggtctagatgcctcagtctaaatcgggagttcttcagtgaagtaaaccaagaggagttcattgctattatgactggtgacatttaaagaattacaaggataaacactaagaatgttgcagttaccatcttatattctatttttgtgcctggagccatgtgaaaaaaaccaacttagttcttttatcctaaaggaccaaaaataagcatcttatatatctgtattttactactgttaagtttctttgtatgaactgtgttgttagtactcagatagtttagctttgtatttataatagagcttttatataaagttttaaaaattgaatgtgtgatatgtgttctttgaaggttttttaatttaacatttatagtcactttttagtgcacacattttccagactttcgttaataaaatatttattttattagaattttaaag

SEQ ID NO: 116295 - DNA, 610 bp, Homo sapiens
  Payload ID: 2691
  Gene Symbol: CETN3
  Gene Name: centrin, EF-hand protein, 3
  ENST ID: ENST00000518458
  CDS Start-End: 1-246
gagcttgtagtggacaaaacaaagaggaaaaaaagaagagaactgtctgaggaacagaaacaagaaattaaagatgcttttgaactatttgatacagacaaagatgaagcaatagattatcatgaattaaaggtggcaatgagagccttggggtttgatgtaaaaaaagctgatgtactgaagattcttaaagattatgacagagaagccacagggaaaatcacctttgaagattttaatgaatgacagactggatattggaaagagatccccatgaagaaatactcaaggcatttaaactatttgatgatgatgattcaggtaaaataagcttgaggaatttgcgacgtgttgctagagaattgggtgaaaacatgagtgatgaagaacttcgagctatgatagaagaatttgacaaagatggtgatggagaaataaaccaagaggagttcattgctattatgactggtgacatttaaagaattacaaggataaacactaagaatgttgcagttaccatcttatattctatttttgtgcctggagccatgtgaaaaaaaccaacttagttcttttatcctaaaggaccaaaaataagcatcttatatat

SEQ ID NO: 116296 - DNA, 664 bp, Homo sapiens
  Payload ID: 2691
  Gene Symbol: CETN3
  Gene Name: centrin, EF-hand protein, 3
  ENST ID: ENST00000522842
  CDS Start-End: 106-441
ggccgctgaggtcgttcgtgtctgttgaacggctgtgggcgtcttgctgccttgggtagggggttaaaatcgttcttgagaggaacgtctctgtgcgaagagataatgagtttagctctgagaagtgagcttgtagtggacaaaacaaagaggaaaaaaagaagagaactgtctgaggaacagaaacaagaaattaaagatgcttttgaactatttgatacagacaaagatgaagcaatagattatcatgaattaaaggtggcaatgagagccttggggtttgatgtaaaaaaagctgatgtactgaagattcttaaagattatgacagagaagccacagggaaaatcacctttgaagattttaatgaagttggtgtgtattttaatagtctttgtaatcagcagctgttaggaaattgtctgattaatatcactttttaaattttaaattctctaggttatggaattttcttatagaacactggtgtataatgtgactcttactcagttttgttttgttggtttttttttcaaagaaaaaatatggctttgctctgagatttatagttttgtcttttgttttgttgtgaagattctaaccaaggaactattgtgtagctttttatagaaagatgcttttccaagttgtttgtatttatattat

SEQ ID NO: 116297 - DNA, 738 bp, Homo sapiens
  Payload ID: 2691
  Gene Symbol: CETN3
  Gene Name: centrin, EF-hand protein, 3
  ENST ID: ENST00000522864
  CDS Start-End: 72-533
gtgggcgtcttgctgccttgggtagggggttaaaatcgttcttgagaggaacgtctctgtgcgaagagataatgagtttagctctgagaagtgagcttgtagtggacaaaacaaagaggaaaaaaagaagagaactgtctgaggaacagaaacaagaaattaaagatgcttttgaactatttgatacagacaaagatgaagcaatagattatcatgaattaaaggtggcaatgagagccttggggtttgatgtaaaaaaagctgatgtactgaagattcttaaagattatgacagagaagccacagggaaaatcacctttgaagattttaatgaagttgtgacagactggatattggaaagagatccccatgaagaaatactcaaggcatttaaactatttgatgatgatgattcagttcttaagaacatactcttgcttcctatttggtctagatgcctcagtctaaatcgggagttcttcagtgaagtaaaccaagaggagttcattgctattatgactggtgacatttaaagaattacaaggataaacactaagaatgttgcagttaccatcttatattctatttttgtgcctggagccatgtgaaaaaaaccaacttagttcttttatcctaaaggaccaaaaataagcatcttatatatctgtattttactactgttaagtttctttgtatgaactgtgttgttagtactcagatagtttagctttgtattta

SEQ ID NO: 116298 - DNA, 867 bp, Homo sapiens
  Payload ID: 2691
  Gene Symbol: CETN3
  Gene Name: centrin, EF-hand protein, 3
  ENST ID: ENST00000522565
  CDS Start-End: 97-567
ggtcgttcgtgtctgttgaacggctgtgggcgtcttgctgccttgggtagggggttaaaatcgttcttgagaggaacgtctctgtgcgaagagataatgagtttagctctgagaagtgagcttgtagtggacaaaacaaagaggaaaaaaagaagagaactgtctgaggaacagaaacaagaaattaaagatgcttttgaactatttgatacagacaaagatgaagcaatagattatcatgaattaaaggtggcaatgagagccttggggtttgatgtaaaaaaagctgatgtactgaagattcttaaagattatgacagagaagccacagggaaaatcacctttgaagattttaatgaagttgtgacagactggatattggaaagagatccccatgaagaaatactcaaggcatttaaactatttgatgatgatgattcaggtaaaataagcttgaggaatttgcgacgtgttgctagagaattgggtgaaaacatgagtgatgaagaacttcgagctatgatagaagaatttgacaaagatggtgatggagaaagtaagttttaagtgaaacgtattttccaggttttcctgatgctacacatgtaatacatttttctaaaaccaaatgacttgcaagacttttttgtaaacttaactgcttcttgtaatggaccttctgtctaaataattcacatattcaatttagaatgaagcagatctctaaaaccaattatacttcaagaaggtccttcacttttctctgaaggtgaaaccaccaaaatttcagcctttcaatataatttcagtctttaatggcttctccctcaacctacatgctaagttctaagttctattgattttccc

SEQ ID NO: 116299 - DNA, 5446 bp, Homo sapiens
  Payload ID: 2692
  Gene Symbol: CCP110
  Gene Name: centriolar coiled coil protein 110kDa
  Uniprot ID: O43303
  ENST ID: ENST00000381396
  CDS Start-End: 248-3286
cagcccgggaatcaaccaccggaagtgccggccctgagaggtggagtcggggtggcagcggcggcggttgccaggagcccgcgttgcagcctgagatccgtaatatggcggggaggaggaggagaaggcggcggcggaccgagctgcgctctgtcagtaccatttgagccattcgcttcctgacaaggcccgtggcgaggggagaggagctgaaggggccgtgggggatcagtgtgactgtgggaagatggaggagtatgagaagttctgtgaaaaaagtcttgccagaatacaagaagcatcactatccacagagagctttctccctgctcagtctgaaagtatctcacttattcgctttcatggagtggctatcctttctccactgcttaacattgagaaaagaaaggaaatgcaacaagaaaagcagaaagcacttgatgtagaagcaagaaagcaggttaacaggaagaaagctttactgactcgtgtccaggagattcttgacaatgttcaggttagaaaagcacctaatgccagtgattttgatcagtgggagatggaaacagtttactctaattcagaagtcagaaacttgaatgttcctgctacatttccaaatagctttccaagccatacggaacactctactgcagcaaagcttgataagatagctgggattttgccattggataatgaggaccaatgtaaaactgatggaatagacttagctagagattcagaaggatttaattctccgaagcaatgtgatagttccaatattagtcatgtagaaaatgaagcttttccaaagacctcttcagcaaccccacaagaaactcttatttctgatggtcccttctcagtaaatgaacaacaggatctaccacttttggcagaagtcatcccagatccctatgtaatgagtcttcagaatctgatgaaaaagtcaaaggaatatatagaaagagaacaatctagacgcagtctgagaggtagtatcaacagaattgttaatgagagtcatttagacaaagaacatgatgctgttgaagtggctgactgtgtaaaagagaaaggccagttgacaggcaaacactgtgtctcagttattcctgacaaaccaagccttaataaatcaaatgttcttctccaaggtgcttccactcaagcaagcagcatgagtatgccagttttagctagcttttcgaaagtggacatacctatacgaactggccatcccactgttctagagtctaattctgattttaaagttattcccacttttgttaccgaaaataatgttatcaaaagtcttacaggttcatatgccaaattacctagtccagagccaagtatgagtcctaaaatgcaccgaagacgttccaggacatcatcagcgtgtcatatacttataaataacccaataaatgcctgtgaattaagccctaaaggaaaagaacaggcaatggacttaattattcaagatactgatgaaaacacaaatgtgcccgaaattatgccaaagttaccaactgatttagcgggagtttgttcaagcaaggtttatgtgggcaaaaatacatctgaagtcaaagaagatgtggttttaggtaaatcaaatcaggtatgtcaatcttcaggaaatcatttagaaaataaagttactcatggacttgttactgtggaaggtcagttaacatccgatgagagaggcgcacacataatgaacagtacctgtgctgcgatgccaaagctgcatgaaccatatgccagcagtcagtgtatagcaagtccaaactttggaactgtgagtggactcaagccagccagtatgttagagaaaaactgcagtttgcaaacagaactgaataagtcttatgatgtaaaaaacccttctcctttattgatgcaaaaccagaatacgagacagcagatggacacacctatggtgtcctgtggaaatgaacaatttttggataacagttttgagaaagttaaacggagacttgatttagatattgatggtttgcaaaaagaaaactgcccttatgtcataacaagtggaataactgaacaagaaaggcaacatttgccagaaaaaagataccctaagggatctggcttcgttaacaagaataaaatgttaggaactagttccaaagaaagcgaggagttactaaaaagcaagatgttagcttttgaagaaatgcggaagagactagaagaacagcacgcccagcaattatcactactcatagctgagcaggaaagggaacaagaaagactgcaaaaggaaatagaagagcaggagaaaatgttaaaagagaagaaggcaatgacagcggaagcctctgagttggacattaacaatgcagtggaattagaatggagaaaaataagtgactctagtttgctggaaacaatgctgtctcaagcggactcactccatacttcaaattcaaatagttctggtttcacaaattctgccatgcaatatagctttgtttctgcaaacgaagcaccattctacctctggggatcatcaactagtggcttgaccaaactctcagtaacaaggccttttggaagagccaaaactagatggtctcaagtttttagtctggaaatacaagcaaaatttaacaaaataactgcagtggcaaaaggatttcttactcgtagacttatgcagacagataagctgaagcaacttcgacaaactgtaaaagatactatggaattcataagaagttttcagtcagaagcaccattaaagagaggcattgtttcagctcaagatgcttcacttcaggaaagagtgttagctcagttgcgagctgccttgtacggtattcatgacatattctttgtaatggatgcagctgaaagaatgtctattctacatcatgatcgagaagttcgcaaagagaaaatgctcaggcaaatggataaaatgaaaagtccacgagtggctctttcagctgcaacacagaagtctcttgataggaagaaatacatgaaagctgctgaaatgggaatgccaaataagaaatttctggttaaacaaaatccttctgaaacaagagtccttcagccaaaccaaggacagaatgcacctgttcataggctacttagtagacaaggaacccctaagacatcagtgaagggggttgtgcaaaatagacagaagccttcacagagcagagtgcctaacagagtgcctgtttcaggagtatatgcaggaaaaatccaaagaaagcggccaaatgttgcgacaatttaagaagacaacattcattaggataaaatggggggaaggattattattcatgttattttccctgcccaagactttatttaaccctggactccgtttacacagacaaagtgacatcagaaggctgagcacttatctggatcatttggtcagtttggtaattcctgctccacacccctattttcctcttaataatacgtttgggtgaagacaaattagtgtttagtaattgcatcatctctgtgcttacctatacaaacataagtttattttatatgcccagatgtctacagagaccctttttgtaaatgtcaaggacatttggatttacttttacagaatattgaaaagataagacaaattataaataagttctaaaacataaatttaattcatctctgcatagtgatttttgaatttgattcaaagggaaattattgcagaagaatgcctttccctcattttataactttaaaaacttggattaaccactcaatgtccactttctttgacttacagtataaccatgtagccaattgtggcccactaaaatctacagaagttaatgtgggtcaccattttggtcagaagcatacattcctgtcagacaactagttgtctgacagaaatgttaggcttcatgtatgttaccccagtactgttagaaacatttgtactaggttataagatctttctgtgacaggtaacaaatttggggaagacagcacaatcttcttgaatgtagctcttgggaatgcattattacatccatttctgtaacataataatatgttgcatgcagttatattttctatttagtctgtatattttgttcttcatagtctgttttttctagcatgcttgatttaggagagaataaagggctatataataataaatccagatttccggataagaatattgcctggttaaaattctgcattgcttaaagacacccatgtttaagatttttcatcactaacatatccattaaaagtatcaactggccaggcagggtggctcacgcctgtactcccagcattttgtgaggccaaggtgggtggatcacctgaggtcaggagtttgagaccagcctgaccaaacatggcgaaaccccatctgtactgaaaatacaaaaattaggcatggtggtgcatgcctgtagttccagctacttgggaggctgagacaggcgaattgcttgaacctgggaggcagaggttgcagtgagctgagactgtgccattgcactccagtcgggttaacagagcaagacactgtctcaaaaaaaaaaaaaaaaaaaagtatcaaccaacaaatgttaccaagataacgtgacttcatgagggagaatgtcactattaatttatcataccatttccaaaaagggctttgtgcttttcacataaaattgagacagtgtatatttaatctaatttaaattttaaagagatactggtattttgaaaatgcaacctatatatattcttaatatccttttaagaatatggagatgaagattgttttctccaattttctgtgccattttaaatttaactttgacatccagctatagacagaaataataagccaccctgggtgtaaacttgattttctttattgagatgtatcatgtattgaatgagtgaaccagaaaattagaagatggtcaaaaaaagtccaagttaccaattttttaaaatttataggcaaagtatcaaattgtcttcttaatatgataaactgtgctttatcattctgaaaactcaggatacagcttattcatagcattgtgggtctctccagtaagaaagatgctaaaagttttgtgcactttttgtgtgtgtaatgcaaattagttaaaacaaatagttttggagaaagttaaaactagctttagagtaaggatgagaaacttgagtgtttttaatttaaagataaaagcctgtgttttacacattcttttttggtgttcatagcttcttctcatacaggtgccagacactgtttgtgcttttgatggatttttatttatatactttttttgcttatttttactttgagtggaatgttcattaatgtaaattgtatttatttttatacttttattttcactagttttgcttctaggcaaaaagcaaaataaacttttcatcttaaagaaaa

SEQ ID NO: 116300 - DNA, 5151 bp, Homo sapiens
  Payload ID: 2692
  Gene Symbol: CCP110
  Gene Name: centriolar coiled coil protein 110kDa
  Uniprot ID: O43303
  ENST ID: ENST00000396208
  CDS Start-End: 47-3022
acattaaaaataacatttttctctcttgtagtgtgactgtgggaagatggaggagtatgagaagttctgtgaaaaaagtcttgccagaatacaagaagcatcactatccacagagagctttctccctgctcagtctgaaagtatctcacttattcgctttcatggagtggctatcctttctccactgcttaacattgagaaaagaaaggaaatgcaacaagaaaagcagaaagcacttgatgtagaagcaagaaagcaggttaacaggaagaaagctttactgactcgtgtccaggagattcttgacaatgttcaggttagaaaagcacctaatgccagtgattttgatcagtgggagatggaaacagtttactctaattcagaagtcagaaacttgaatgttcctgctacatttccaaatagctttccaagccatacggaacactctactgcagcaaagcttgataagatagctgggattttgccattggataatgaggaccaatgtaaaactgatggaatagacttagctagagattcagaaggatttaattctccgaagcaatgtgatagttccaatattagtcatgtagaaaatgaagcttttccaaagacctcttcagcaaccccacaagaaactcttatttctgatggtcccttctcagtaaatgaacaacaggatctaccacttttggcagaagtcatcccagatccctatgtaatgagtcttcagaatctgatgaaaaagtcaaaggaatatatagaaagagaacaatctagacgcagtctgagaggtagtatcaacagaattgttaatgagagtcatttagacaaagaacatgatgctgttgaagtggctgactgtgtaaaagagaaaggccagttgacaggcaaacactgtgtctcagttattcctgacaaaccaagccttaataaatcaaatgttcttctccaaggtgcttccactcaagcaagcagcatgagtatgccagttttagctagcttttcgaaagtggacatacctatacgaactggccatcccactgttctagagtctaattctgattttaaagttattcccacttttgttaccgaaaataatgttatcaaaagtcttacaggttcatatgccaaattacctagtccagagccaagtatgagtcctaaaatgcaccgaagacgttccaggacatcatcagcgtgtcatatacttataaataacccaataaatgcctgtgaattaagccctaaaggaaaagaacaggcaatggacttaattattcaagatactgatgaaaacacaaatgtgcccgaaattatgccaaagttaccaactgatttagcgggagtttgttcaagcaaggtttatgtgggcaaaaatacatctgaagtcaaagaagatgtggttttaggtaaatcaaatcaggtatgtcaatcttcaggaaatcatttagaaaataaagttactcatggacttgttactgtggaaggtcagttaacatccgatgagagaggcgcacacataatgaacagtacctgtgctgcgatgccaaagctgcatgaaccatatgccagcagtcagtgtatagcaagtccaaactttggaactgtgagtggactcaagccagccagtatgttagagaaaaactgcagtttgcaaacagaactgaataagtcttatgatgtaaaaaacccttctcctttattgatgcaaaaccagaatacgagacagcagatggacacacctatggtgtcctgtggaaatgaacaatttttggataacagttttgagaaagttaaacggagacttgatttagatattgatggtttgcaaaaagaaaactgcccttatgtcataacaagtggaataactgaacaagaaaggcaacatttgccagaaaaaagataccctaagggatctggcttcgttaacaagaataaaatgttaggaactagttccaaagaaagcgaggagttactaaaaagcaagatgttagcttttgaagaaatgcggaagagactagaagaacagcacgcccagcaattatcactactcatagctgagcaggaaagggaacaagaaagactgcaaaaggaaatagaagagcaggagaaaatgttaaaagagaagaaggcaatgacagcggaagcctctgagttggacattaacaatgcagtggaattagaatggagaaaaataagtgactctagtttgctggaaacaatgctgtctcaagcggactcactccatacttcaaattcaaatagttctggtttcacaaattctgccatgcaatatagctttgtttctgcaaacgaagcaccattctacctctggggatcatcaactagtggcttgaccaaactctcagtaacaaggccttttggaagagccaaaactagatggtctcaagtttttagtctggaaatacaagcaaaatttaacaaaataactgcagtggcaaaaggatttcttactcgtagacttatgcagacagataagctgaagcaacttcgacaaactgtaaaagatactatggaattcataagaagttttcagtcagaagcaccattaaagagaggcattgtttcagctcaagatgcttcacttcaggaaagagtgttagctcagttgcgagctgccttgtacggtattcatgacatattctttgtaatggatgcagctgaaagaatgtctattctacatcatgatcgagaagttcgcaaagagaaaatgctcaggcaaatggataaaatgaaaagtccacgagtggctctttcagctgcaacacagaagtctcttgataggaagaaatacatgaaagctgctgaaatgggaatgccaaataagaaatttctggttaaacaaaatccttctgaaacaagagtccttcagccaaaccaaggacagaatgcacctgttcataggctacttagtagacaagggagtatatgcaggaaaaatccaaagaaagcggccaaatgttgcgacaatttaagaagacaacattcattaggataaaatggggggaaggattattattcatgttattttccctgcccaagactttatttaaccctggactccgtttacacagacaaagtgacatcagaaggctgagcacttatctggatcatttggtcagtttggtaattcctgctccacacccctattttcctcttaataatacgtttgggtgaagacaaattagtgtttagtaattgcatcatctctgtgcttacctatacaaacataagtttattttatatgcccagatgtctacagagaccctttttgtaaatgtcaaggacatttggatttacttttacagaatattgaaaagataagacaaattataaataagttctaaaacataaatttaattcatctctgcatagtgatttttgaatttgattcaaagggaaattattgcagaagaatgcctttccctcattttataactttaaaaacttggattaaccactcaatgtccactttctttgacttacagtataaccatgtagccaattgtggcccactaaaatctacagaagttaatgtgggtcaccattttggtcagaagcatacattcctgtcagacaactagttgtctgacagaaatgttaggcttcatgtatgttaccccagtactgttagaaacatttgtactaggttataagatctttctgtgacaggtaacaaatttggggaagacagcacaatcttcttgaatgtagctcttgggaatgcattattacatccatttctgtaacataataatatgttgcatgcagttatattttctatttagtctgtatattttgttcttcatagtctgttttttctagcatgcttgatttaggagagaataaagggctatataataataaatccagatttccggataagaatattgcctggttaaaattctgcattgcttaaagacacccatgtttaagatttttcatcactaacatatccattaaaagtatcaactggccaggcagggtggctcacgcctgtactcccagcattttgtgaggccaaggtgggtggatcacctgaggtcaggagtttgagaccagcctgaccaaacatggcgaaaccccatctgtactgaaaatacaaaaattaggcatggtggtgcatgcctgtagttccagctacttgggaggctgagacaggcgaattgcttgaacctgggaggcagaggttgcagtgagctgagactgtgccattgcactccagtcgggttaacagagcaagacactgtctcaaaaaaaaaaaaaaaaaaaagtatcaaccaacaaatgttaccaagataacgtgacttcatgagggagaatgtcactattaatttatcataccatttccaaaaagggctttgtgcttttcacataaaattgagacagtgtatatttaatctaatttaaattttaaagagatactggtattttgaaaatgcaacctatatatattcttaatatccttttaagaatatggagatgaagattgttttctccaattttctgtgccattttaaatttaactttgacatccagctatagacagaaataataagccaccctgggtgtaaacttgattttctttattgagatgtatcatgtattgaatgagtgaaccagaaaattagaagatggtcaaaaaaagtccaagttaccaattttttaaaatttataggcaaagtatcaaattgtcttcttaatatgataaactgtgctttatcattctgaaaactcaggatacagcttattcatagcattgtgggtctctccagtaagaaagatgctaaaagttttgtgcactttttgtgtgtgtaatgcaaattagttaaaacaaatagttttggagaaagttaaaactagctttagagtaaggatgagaaacttgagtgtttttaatttaaagataaaagcctgtgttttacacattcttttttggtgttcatagcttcttctcatacaggtgccagacactgtttgtgcttttgatggatttttatttatatactttttttgcttatttttactttgagtggaatgttcattaatgtaaattgtatttatttttatacttttattttcactagttttgcttctaggcaaaaagcaaaataaacttttcatctt

SEQ ID NO: 116301 - DNA, 5549 bp, Homo sapiens
  Payload ID: 2692
  Gene Symbol: CCP110
  Gene Name: centriolar coiled coil protein 110kDa
  Uniprot ID: O43303
  ENST ID: ENST00000396212
  CDS Start-End: 437-3412
aatgcacctcggggatggtagtgttctggtggcccaacggttttaacagcccgggaatcaaccaccggaagtgccggccctgagaggtggagtcggggtggcagcggcggcggttgccaggagcccgcgttgcagcctgagatccgtaatatggcggggaggaggaggagaaggcggcggcggaccgagctgcgctctgtcagtaccatttgagccattcgcttcctgacaaggcccgtggcgaggggagaggagctgaaggggccgtgggggatcagtgcctgctgtgtgctgatactgttctgtgtaatggggattcagtgaacaagactgaaaaggtacctgtacttatggcgcttacattttggtggaggaagacagacaaaaatcaaggaaataaacacgataatttcagatagtgtgtgactgtgggaagatggaggagtatgagaagttctgtgaaaaaagtcttgccagaatacaagaagcatcactatccacagagagctttctccctgctcagtctgaaagtatctcacttattcgctttcatggagtggctatcctttctccactgcttaacattgagaaaagaaaggaaatgcaacaagaaaagcagaaagcacttgatgtagaagcaagaaagcaggttaacaggaagaaagctttactgactcgtgtccaggagattcttgacaatgttcaggttagaaaagcacctaatgccagtgattttgatcagtgggagatggaaacagtttactctaattcagaagtcagaaacttgaatgttcctgctacatttccaaatagctttccaagccatacggaacactctactgcagcaaagcttgataagatagctgggattttgccattggataatgaggaccaatgtaaaactgatggaatagacttagctagagattcagaaggatttaattctccgaagcaatgtgatagttccaatattagtcatgtagaaaatgaagcttttccaaagacctcttcagcaaccccacaagaaactcttatttctgatggtcccttctcagtaaatgaacaacaggatctaccacttttggcagaagtcatcccagatccctatgtaatgagtcttcagaatctgatgaaaaagtcaaaggaatatatagaaagagaacaatctagacgcagtctgagaggtagtatcaacagaattgttaatgagagtcatttagacaaagaacatgatgctgttgaagtggctgactgtgtaaaagagaaaggccagttgacaggcaaacactgtgtctcagttattcctgacaaaccaagccttaataaatcaaatgttcttctccaaggtgcttccactcaagcaagcagcatgagtatgccagttttagctagcttttcgaaagtggacatacctatacgaactggccatcccactgttctagagtctaattctgattttaaagttattcccacttttgttaccgaaaataatgttatcaaaagtcttacaggttcatatgccaaattacctagtccagagccaagtatgagtcctaaaatgcaccgaagacgttccaggacatcatcagcgtgtcatatacttataaataacccaataaatgcctgtgaattaagccctaaaggaaaagaacaggcaatggacttaattattcaagatactgatgaaaacacaaatgtgcccgaaattatgccaaagttaccaactgatttagcgggagtttgttcaagcaaggtttatgtgggcaaaaatacatctgaagtcaaagaagatgtggttttaggtaaatcaaatcaggtatgtcaatcttcaggaaatcatttagaaaataaagttactcatggacttgttactgtggaaggtcagttaacatccgatgagagaggcgcacacataatgaacagtacctgtgctgcgatgccaaagctgcatgaaccatatgccagcagtcagtgtatagcaagtccaaactttggaactgtgagtggactcaagccagccagtatgttagagaaaaactgcagtttgcaaacagaactgaataagtcttatgatgtaaaaaacccttctcctttattgatgcaaaaccagaatacgagacagcagatggacacacctatggtgtcctgtggaaatgaacaatttttggataacagttttgagaaagttaaacggagacttgatttagatattgatggtttgcaaaaagaaaactgcccttatgtcataacaagtggaataactgaacaagaaaggcaacatttgccagaaaaaagataccctaagggatctggcttcgttaacaagaataaaatgttaggaactagttccaaagaaagcgaggagttactaaaaagcaagatgttagcttttgaagaaatgcggaagagactagaagaacagcacgcccagcaattatcactactcatagctgagcaggaaagggaacaagaaagactgcaaaaggaaatagaagagcaggagaaaatgttaaaagagaagaaggcaatgacagcggaagcctctgagttggacattaacaatgcagtggaattagaatggagaaaaataagtgactctagtttgctggaaacaatgctgtctcaagcggactcactccatacttcaaattcaaatagttctggtttcacaaattctgccatgcaatatagctttgtttctgcaaacgaagcaccattctacctctggggatcatcaactagtggcttgaccaaactctcagtaacaaggccttttggaagagccaaaactagatggtctcaagtttttagtctggaaatacaagcaaaatttaacaaaataactgcagtggcaaaaggatttcttactcgtagacttatgcagacagataagctgaagcaacttcgacaaactgtaaaagatactatggaattcataagaagttttcagtcagaagcaccattaaagagaggcattgtttcagctcaagatgcttcacttcaggaaagagtgttagctcagttgcgagctgccttgtacggtattcatgacatattctttgtaatggatgcagctgaaagaatgtctattctacatcatgatcgagaagttcgcaaagagaaaatgctcaggcaaatggataaaatgaaaagtccacgagtggctctttcagctgcaacacagaagtctcttgataggaagaaatacatgaaagctgctgaaatgggaatgccaaataagaaatttctggttaaacaaaatccttctgaaacaagagtccttcagccaaaccaaggacagaatgcacctgttcataggctacttagtagacaagggagtatatgcaggaaaaatccaaagaaagcggccaaatgttgcgacaatttaagaagacaacattcattaggataaaatggggggaaggattattattcatgttattttccctgcccaagactttatttaaccctggactccgtttacacagacaaagtgacatcagaaggctgagcacttatctggatcatttggtcagtttggtaattcctgctccacacccctattttcctcttaataatacgtttgggtgaagacaaattagtgtttagtaattgcatcatctctgtgcttacctatacaaacataagtttattttatatgcccagatgtctacagagaccctttttgtaaatgtcaaggacatttggatttacttttacagaatattgaaaagataagacaaattataaataagttctaaaacataaatttaattcatctctgcatagtgatttttgaatttgattcaaagggaaattattgcagaagaatgcctttccctcattttataactttaaaaacttggattaaccactcaatgtccactttctttgacttacagtataaccatgtagccaattgtggcccactaaaatctacagaagttaatgtgggtcaccattttggtcagaagcatacattcctgtcagacaactagttgtctgacagaaatgttaggcttcatgtatgttaccccagtactgttagaaacatttgtactaggttataagatctttctgtgacaggtaacaaatttggggaagacagcacaatcttcttgaatgtagctcttgggaatgcattattacatccatttctgtaacataataatatgttgcatgcagttatattttctatttagtctgtatattttgttcttcatagtctgttttttctagcatgcttgatttaggagagaataaagggctatataataataaatccagatttccggataagaatattgcctggttaaaattctgcattgcttaaagacacccatgtttaagatttttcatcactaacatatccattaaaagtatcaactggccaggcagggtggctcacgcctgtactcccagcattttgtgaggccaaggtgggtggatcacctgaggtcaggagtttgagaccagcctgaccaaacatggcgaaaccccatctgtactgaaaatacaaaaattaggcatggtggtgcatgcctgtagttccagctacttgggaggctgagacaggcgaattgcttgaacctgggaggcagaggttgcagtgagctgagactgtgccattgcactccagtcgggttaacagagcaagacactgtctcaaaaaaaaaaaaaaaaaaaagtatcaaccaacaaatgttaccaagataacgtgacttcatgagggagaatgtcactattaatttatcataccatttccaaaaagggctttgtgcttttcacataaaattgagacagtgtatatttaatctaatttaaattttaaagagatactggtattttgaaaatgcaacctatatatattcttaatatccttttaagaatatggagatgaagattgttttctccaattttctgtgccattttaaatttaactttgacatccagctatagacagaaataataagccaccctgggtgtaaacttgattttctttattgagatgtatcatgtattgaatgagtgaaccagaaaattagaagatggtcaaaaaaagtccaagttaccaattttttaaaatttataggcaaagtatcaaattgtcttcttaatatgataaactgtgctttatcattctgaaaactcaggatacagcttattcatagcattgtgggtctctccagtaagaaagatgctaaaagttttgtgcactttttgtgtgtgtaatgcaaattagttaaaacaaatagttttggagaaagttaaaactagctttagagtaaggatgagaaacttgagtgtttttaatttaaagataaaagcctgtgttttacacattcttttttggtgttcatagcttcttctcatacaggtgccagacactgtttgtgcttttgatggatttttatttatatactttttttgcttatttttactttgagtggaatgttcattaatgtaaattgtatttatttttatacttttattttcactagttttgcttctaggcaaaaagcaaaataaacttttcatcttaaagaaaa

SEQ ID NO: 116302 - DNA, 698 bp, Homo sapiens
  Payload ID: 2692
  Gene Symbol: CCP110
  Gene Name: centriolar coiled coil protein 110kDa
  ENST ID: ENST00000565376
  CDS Start-End: 549-698
gttgcagcctgagatccgtaatatggcggggaggaggaggagaaggcggcggcggaccgagctgcgctctgtcagtaccatttgagccattcgcttcctgacaaggcccgtggcgaggggagaggagctgaaggggccgtgggggatcagtttcatttgaaacctacggggaaccaagcactgtcgctgccctccaggaattcatactctactgctaaaaatcgtcatcatcattatcctcttaataagaaaagcagtccccattatttgttgctttctgcgtgttctgcactacgttaattgccctacatgcattagctcattgaattcttacaacattcctttgagacggataccgtgatcatccctcttttacagaggacgaaacagtgcctgctgtgtgctgatactgttctgtgtaatggggattcagtgaacaagactgaaaaggtacctgtacttatggcgcttacattttggtggaggaagacagacaaaaatcaaggaaataaacacgataatttcagatagtgtgtgactgtgggaagatggaggagtatgagaagttctgtgaaaaaagtcttgccagaatacaagaagcatcactatccacagagagctttctccctgctcagtctgaaagtatctcacttattcgctttcatggagtggctatcctttctccactggtaaacttg

SEQ ID NO: 116303 - DNA, 595 bp, Homo sapiens
  Payload ID: 2692
  Gene Symbol: CCP110
  Gene Name: centriolar coiled coil protein 110kDa
  ENST ID: ENST00000562083
  CDS Start-End: 144-302
atggcggggaggaggaggagaaggcggcggcggaccgagctgcgctctgtcagtaccatttgagccattcgcttcctgacaaggcccgtggcgaggggagaggagctgaaggggccgtgggggatcagtgtgactgtgggaagatggaggagtatgagaagttctgtgaaaaaagtcttgccagaatacaagaagcatcactatccacagagagctttctccctgctcagtctgaaagtatctcacttattcgctttcatggagtggctatcctttctccactgaaagcgaggagttactaaaaagcaagatgttagcttttgaagaaatgcggaagagactagaagaacagcacgcccagcaattatcactactcatagctgagcaggaaagggaacaagaaagactgcaaaaggaaatagaagagcaggagaaaatgttaaaagagaagaaggcaatgacagcggaagcctctgagttggacattaacaatgcagtggaattagaatggagaaaaataagtgactctagtttgctggaaacaatgctgtctcaagcggactcactccatacttcaaattcaaatagttctggt

SEQ ID NO: 116304 - DNA, 360 bp, Homo sapiens
  Payload ID: 2692
  Gene Symbol: CCP110
  Gene Name: centriolar coiled coil protein 110kDa
  ENST ID: ENST00000561888
  CDS Start-End: 1-360
agaatacaagaagcatcactatccacagagagctttctccctgctcagtctgaaagtatctcacttattcgctttcatggagtggctatcctttctccactggttagaaaagcacctaatgccagtgattttgatcagtgggagatggaaacagtttactctaattcagaagtcagaaacttgaatgttcctgctacatttccaaatagctttccaagccatacggaacactctactgcagcaaagcttgataagatagctgggattttgccattggataatgaggaccaatgtaaaactgatggaatagacttagctagagattcagaaggatttaattctccgaagcaatgtgatagt

SEQ ID NO: 116305 - DNA, 5121 bp, Homo sapiens
  Payload ID: 2693
  Gene Symbol: CCSAP
  Gene Name: centriole, cilia and spindle-associated protein
  Uniprot ID: Q6IQ19
  ENST ID: ENST00000284617
  CDS Start-End: 79-891
agaggatcggccgggcgcggcgggaaggaggctgcgggcagcgaggagcggctggcgctcgaggcggcggacggcaccatgtccccggggagcggggtgaagagcgagtacatgaagcgctaccaggagccgcgctgggaggagtacgggccgtgctaccgcgagctgctgcactaccgcctaggccgccggctgctggagcaggcgcacgcgccctggctctgggacgactggggcccggccggctcctcggaggactcggcgtcgtcagagtcgtcgggcgccgggggccccgcaccccggtgcgccccgccctcgcccccgccgcccgtagagccggcgacccaggaggaggcggaacggcgggcgcgcggggccccggaggagcaggacgcggaggccggggacgcggaggccgaggacgcggaggacgcggctctgccagcactgccagtgaaagatgtagaagataaacctgaacaacaaaccagaacaagagagactgacaaatcacccaccagtactgagcctcgacagcaaccaagtgccttatttgctagaggaaacaggaaagcggtcaaaagtccccaaagatcatcgagtaaaataaaagaaaacaagcatccatttgctctttatggctggggagaaaaacagaccgatacaggaagccagaagactcacaacgtctgtgcgtccgctcctgtgcacgagattcatgaatcagcattacgagccaagaacagaagacaggtggaaaaaaggaaactggttgctcaaaggcagcgagctcactctgtggatgtggagaagaacagaaagatgaaggcttcctcctcagagaacccgtggatgacagaatacatgaggtgctattcggcaagagcttaaagaaacacttgcgtggacagcctcttttaaaaagtgtaaatgactgaaaggaaaaacaaaacaaaaaccatcaaaagaaacggacacaggtttaagaaaccaactgattatgcaaggttttttttagggaatttgtaaaagattgttttattttgatgaatattggtcacctacctcggcagtagggcagacagttgaagccatagacatttggttatttatgaagataattccctaaatctttgatattcttataaggtttttgttttaaagcatcttaatcttttaagatactgacaccaaatgcctttaaatggcaacagatgcttacagttcagtattcttttcataagcttaggtagagcctattatcatcttgttctaaataactttccagattccatagctataagatcattccatcctacagcataagactcgttttccttatatgccgttttgtttgtgaaagaatatcaagtcaaaaatgagtgtcagcactactactgattccatgtataatgaaagtagaactttgctagttcctgaaaatttttaacttatttgtatttcagttcagcagcatctttatgtagattgtgatatttaagaattatctgggctgggcgagggtctctttttctctttcagtgatcatctaggcagttattatttaatagtttaatagctcaagtacattccaatagacgaagtgcacacaacacaatatgtgtgtacagtagtagtaaagtttcttttgagtagtcaaagactcactttttttattgcctttttttttttttttaaagaatacatactgtggattcagtcccttgtcacacttgaccttttggcatacacccactgtggacttttgcctcttctgtaatggctggcaatgacatttcaaacttacaatctggaattgcacttggtacattggcattgcttgttccactgggatggggaccagtgtgaagatgcctgttagatagactgcccacccctactttctctttttctttatagcacttaacaataacaaagtcttgatgatgtacagtattcaaactttaggttgaaatacgttactctttgattcctagccagtagatcttatctacactttaatgggagagaatggtggtgtgtgggtaggcacaaatttatgtaaatagtgctccttctctttagtatgtttgctttgggggtagaaaaatggttttaacaaacactggtttccatcaaatgaatgatgtcttctccatcctgtggagacaagaatctgctagaaggatatgtgctaagttccttataagagataatggtgctctgcctatgccagcttggcacccgaagatgtgtgagtggacgtgaggctgagtattaccttagtatttttctctgggtctttggaaaaccatagtcaatttttagaacatattgctttcattccccataaactcttcacacatgataactgtttaagctttgaaaacacatactgaagtattgtgagcttaaaaaaactttttaaatatttgcatagttttgaggtgaatttgtttccttacagatctctcctaatcattgagatgtatatttcaaaagaggaaattttacatgttgtccaaaacagccttgctagtaactggtgaattttggtattaactattattaaagtctttaaacgacacaggtacctaaagatcaccttaatgtggcaatttgtgatggtgtagctagctgattgtgaaaactgttcctttaaagtcgcttcttgcatgttcggtgttagtcatccagctcaggcttgtgttgcagctgacaatctaggaaagacggccttagagagtggtgcaggccccacactgacggactgccttagaaacccgacttcctctagactttgaaccgccagacttttctcttgtttagaaaacaaacttatatttaatgtacttactacttaaaactccagacagagatataatgtagaaggcaaatattggccaattttttcctctttttaagtggaagacaaatgaacgggatttttaaagtgcttttaaagtgcatgaatggttaataaatcagtatgaattgtaagccttcatcttacatccaagtccttagttggttagggtttcttttctttcttttttaaagagtgtcaattaccttttgaacctgtgaaaatttgatagttgttaacagtctgatggtcctaattctttcttttcattctagaaatgaatgtggttgtaatcatgttcctaattcttgggacaacctgcaagacagtgagacagtttaaaaattacctttcatgttgaaaaagtctgaaacagagaacccaatgatatttaaaataaatgctacataaaactctttttaaaattttgattttaacttaattaaaacaatgtcataaatatgctttttgattttgttactgcttttaatattaaagtaatagaatattgaagcaatattgtctagcactctgctggacattaagtccgcgggaggagaagtgaacaggaatcgattctttgtcttttaactgcccttagttaggagatgttaaaatacttggcacctctggttatatgtatgttatgtgtgttctcccccctaaaatttctaagcacatttattcacttttaaaatgaatctttaaaagattatagttagtagttatagttaatattctatttacttggaaaaatgtgaataaatggatcttcaaaagattcattttaaaaatgaataaatgtataataggctataggtgatcttacttgcgtattaggtaggaggcacatatttataccatttcatatgtaatatctttgtcattgtgtttcatcgaagatcaattgctagcaacttgaagggtatttatacttgggtcacttgaactcagctgactaaattgtaagaacgagagcaagcaagatggctgttattggaagccataacttccagaagataattctgcacaattcgtaagttaaaaaaaatctgtagggtcttccactatcctttttcaggttgataatgctgttctgggcacacactttgtaaatggaatgttatggtacagtcgcctctcagtatccatggggcattggttccaggcctcccttaggatgccaaactccatggatactcaaaccccttctataaaatggtgtagtatttgcatatatcctagacacatcctcctgtatgctttaaatcatctctagattacttaaaatacctaatacaatgtaaatgctctgtaaatagttgttatactatattgtttagggaataatgacaaggaaaaaaaagcctgtacatgttcagcacaagtgaaaccatcctttttgcccccaaatattttcaatttgtatttggttgaatccatggatgcagaactcacggatacagagggccgactgtactttctttaaagtgttcaaaagtattactagcaaagaggaggaggagcaaagcatatatcagaagtaaaacaatttttcttgttgactgctttggtaaaaaacagtttgatggatagttttacatttcactggactagataaaaaatggtgctaatatttatgtagcttgatgctatagttgctttggtatcaaacttaatacctaacccatataagatccttattatataattttgtgatcagtaaaatgatattttaaagagtgatcttaaaaatatgacctggtcattgcacaacgtttgcatttgaaatgaatttttgtactatagggtggatatggagttattcagtgcaagtgtgtgcttaatatcaaaccctatgcaaggagctatgtctagatttttggtccaaatttgcctccttcaagcctactagtgtgagatggaaaaaaatcgattgctcttttaatattatttccattttgaaattctcgacacttgaatgaaggcagtagaggcctctttttggatttctcttctaataacaaaactttatttagggaaggtttccctgtgctatcgtaagtttgttttgagcactgcattcactttaaaattctggaggaacaaaggctgggcacataatcacaaagcccaggccacacaataattcggggttgtattttctaagaactatgtattgtttttagcttatagttaatattgtatttacttggaaaaatgtgaataaagttaattaacattacaagctgaga

SEQ ID NO: 116306 - DNA, 4399 bp, Homo sapiens
  Payload ID: 2693
  Gene Symbol: CCSAP
  Gene Name: centriole, cilia and spindle-associated protein
  Uniprot ID: Q6IQ19
  ENST ID: ENST00000366686
  CDS Start-End: 209-679
ctgctagaaatgcaaataacagaaggtggagggggtagggaacatgccttccagattattcctgtgggtactgatctgctagctaaattgagatgtactttatcaggctaaatggcttttctctccccgatcttttattgtttgtgatggagttgtcaaatatttgcatgcaatataaatacaatttttaggcagcgttgtgatatggatggtgcctgtatttaccagctcagcactgccagtgaaagatgtagaagataaacctgaacaacaaaccagaacaagagagactgacaaatcacccaccagtactgagcctcgacagcaaccaagtgccttatttgctagaggaaacaggaaagcggtcaaaagtccccaaagatcatcgagtaaaataaaagaaaacaagcatccatttgctctttatggctggggagaaaaacagaccgatacaggaagccagaagactcacaacgtctgtgcgtccgctcctgtgcacgagattcatgaatcagcattacgagccaagaacagaagacaggtggaaaaaaggaaactggttgctcaaaggcagcgagctcactctgtggatgtggagaagaacagaaagatgaaggcttcctcctcagagaacccgtggatgacagaatacatgaggtgctattcggcaagagcttaaagaaacacttgcgtggacagcctcttttaaaaagtgtaaatgactgaaaggaaaaacaaaacaaaaaccatcaaaagaaacggacacaggtttaagaaaccaactgattatgcaaggttttttttagggaatttgtaaaagattgttttattttgatgaatattggtcacctacctcggcagtagggcagacagttgaagccatagacatttggttatttatgaagataattccctaaatctttgatattcttataaggtttttgttttaaagcatcttaatcttttaagatactgacaccaaatgcctttaaatggcaacagatgcttacagttcagtattcttttcataagcttaggtagagcctattatcatcttgttctaaataactttccagattccatagctataagatcattccatcctacagcataagactcgttttccttatatgccgttttgtttgtgaaagaatatcaagtcaaaaatgagtgtcagcactactactgattccatgtataatgaaagtagaactttgctagttcctgaaaatttttaacttatttgtatttcagttcagcagcatctttatgtagattgtgatatttaagaattatctgggctgggcgagggtctctttttctctttcagtgatcatctaggcagttattatttaatagtttaatagctcaagtacattccaatagacgaagtgcacacaacacaatatgtgtgtacagtagtagtaaagtttcttttgagtagtcaaagactcactttttttattgcctttttttttttttttaaagaatacatactgtggattcagtcccttgtcacacttgaccttttggcatacacccactgtggacttttgcctcttctgtaatggctggcaatgacatttcaaacttacaatctggaattgcacttggtacattggcattgcttgttccactgggatggggaccagtgtgaagatgcctgttagatagactgcccacccctactttctctttttctttatagcacttaacaataacaaagtcttgatgatgtacagtattcaaactttaggttgaaatacgttactctttgattcctagccagtagatcttatctacactttaatgggagagaatggtggtgtgtgggtaggcacaaatttatgtaaatagtgctccttctctttagtatgtttgctttgggggtagaaaaatggttttaacaaacactggtttccatcaaatgaatgatgtcttctccatcctgtggagacaagaatctgctagaaggatatgtgctaagttccttataagagataatggtgctctgcctatgccagcttggcacccgaagatgtgtgagtggacgtgaggctgagtattaccttagtatttttctctgggtctttggaaaaccatagtcaatttttagaacatattgctttcattccccataaactcttcacacatgataactgtttaagctttgaaaacacatactgaagtattgtgagcttaaaaaaactttttaaatatttgcatagttttgaggtgaatttgtttccttacagatctctcctaatcattgagatgtatatttcaaaagaggaaattttacatgttgtccaaaacagccttgctagtaactggtgaattttggtattaactattattaaagtctttaaacgacacaggtacctaaagatcaccttaatgtggcaatttgtgatggtgtagctagctgattgtgaaaactgttcctttaaagtcgcttcttgcatgttcggtgttagtcatccagctcaggcttgtgttgcagctgacaatctaggaaagacggccttagagagtggtgcaggccccacactgacggactgccttagaaacccgacttcctctagactttgaaccgccagacttttctcttgtttagaaaacaaacttatatttaatgtacttactacttaaaactccagacagagatataatgtagaaggcaaatattggccaattttttcctctttttaagtggaagacaaatgaacgggatttttaaagtgcttttaaagtgcatgaatggttaataaatcagtatgaattgtaagccttcatcttacatccaagtccttagttggttagggtttcttttctttcttttttaaagagtgtcaattaccttttgaacctgtgaaaatttgatagttgttaacagtctgatggtcctaattctttcttttcattctagaaatgaatgtggttgtaatcatgttcctaattcttgggacaacctgcaagacagtgagacagtttaaaaattacctttcatgttgaaaaagtctgaaacagagaacccaatgatatttaaaataaatgctacataaaactctttttaaaattttgattttaacttaattaaaacaatgtcataaatatgctttttgattttgttactgcttttaatattaaagtaatagaatattgaagcaatattgtctagcactctgctggacattaagtccgcgggaggagaagtgaacaggaatcgattctttgtcttttaactgcccttagttaggagatgttaaaatacttggcacctctggttatatgtatgttatgtgtgttctcccccctaaaatttctaagcacatttattcacttttaaaatgaatctttaaaagattatagttagtagttatagttaatattctatttacttggaaaaatgtgaataaatggatcttcaaaagattcattttaaaaatgaataaatgtataataggctataggtgatcttacttgcgtattaggtaggaggcacatatttataccatttcatatgtaatatctttgtcattgtgtttcatcgaagatcaattgctagcaacttgaagggtatttatacttgggtcacttgaactcagctgactaaattgtaagaacgagagcaagcaagatggctgttattggaagccataacttccagaagataattctgcacaattcgtaagttaaaaaaaatctgtagggtcttccactatcctttttcaggttgataatgctgttctgggcacacactttgtaaatggaatgttatggtacagtcgcctctcagtatccatggggcattggttccaggcctcccttaggatgccaaactccatggatactcaaaccccttctataaaatggtgtagtatttgcatatatcctagacacatcctcctgtatgctttaaatcatctctagattacttaaaatacctaatacaatgtaaatgctctgtaaatagttgttatactatattgtttagggaataatgacaaggaaaaaaaagcctgtacatgttcagcacaagtgaaaccatcctttttgcccccaaatattttcaatttgtatttggttgaatccatggatgcagaactcacggatacagagggccgactgtactttctttaaagtgttcaaaagtattactagcaaagaggaggaggagcaaagcatatatcagaagtaaaacaatttttcttgttgactgctttggtaaaaaacagtttgatggatagttttacatttcactggactagataaaaaatggtgctaatatttatgtagcttgatgctatagttgctttggtatcaaacttaatacctaacccatataagatccttattatataattttgtgatcagtaaaatgatattttaaagagtg

SEQ ID NO: 116307 - DNA, 5089 bp, Homo sapiens
  Payload ID: 2693
  Gene Symbol: CCSAP
  Gene Name: centriole, cilia and spindle-associated protein
  Uniprot ID: Q6IQ19
  ENST ID: ENST00000366687
  CDS Start-End: 53-865
gtaggctgcgggcagcgaggagcggctggcgctcgaggcggcggacggcaccatgtccccggggagcggggtgaagagcgagtacatgaagcgctaccaggagccgcgctgggaggagtacgggccgtgctaccgcgagctgctgcactaccgcctaggccgccggctgctggagcaggcgcacgcgccctggctctgggacgactggggcccggccggctcctcggaggactcggcgtcgtcagagtcgtcgggcgccgggggccccgcaccccggtgcgccccgccctcgcccccgccgcccgtagagccggcgacccaggaggaggcggaacggcgggcgcgcggggccccggaggagcaggacgcggaggccggggacgcggaggccgaggacgcggaggacgcggctctgccagcactgccagtgaaagatgtagaagataaacctgaacaacaaaccagaacaagagagactgacaaatcacccaccagtactgagcctcgacagcaaccaagtgccttatttgctagaggaaacaggaaagcggtcaaaagtccccaaagatcatcgagtaaaataaaagaaaacaagcatccatttgctctttatggctggggagaaaaacagaccgatacaggaagccagaagactcacaacgtctgtgcgtccgctcctgtgcacgagattcatgaatcagcattacgagccaagaacagaagacaggtggaaaaaaggaaactggttgctcaaaggcagcgagctcactctgtggatgtggagaagaacagaaagatgaaggcttcctcctcagagaacccgtggatgacagaatacatgaggtgctattcggcaagagcttaaagaaacacttgcgtggacagcctcttttaaaaagtgtaaatgactgaaaggaaaaacaaaacaaaaaccatcaaaagaaacggacacaggtttaagaaaccaactgattatgcaaggttttttttagggaatttgtaaaagattgttttattttgatgaatattggtcacctacctcggcagtagggcagacagttgaagccatagacatttggttatttatgaagataattccctaaatctttgatattcttataaggtttttgttttaaagcatcttaatcttttaagatactgacaccaaatgcctttaaatggcaacagatgcttacagttcagtattcttttcataagcttaggtagagcctattatcatcttgttctaaataactttccagattccatagctataagatcattccatcctacagcataagactcgttttccttatatgccgttttgtttgtgaaagaatatcaagtcaaaaatgagtgtcagcactactactgattccatgtataatgaaagtagaactttgctagttcctgaaaatttttaacttatttgtatttcagttcagcagcatctttatgtagattgtgatatttaagaattatctgggctgggcgagggtctctttttctctttcagtgatcatctaggcagttattatttaatagtttaatagctcaagtacattccaatagacgaagtgcacacaacacaatatgtgtgtacagtagtagtaaagtttcttttgagtagtcaaagactcactttttttattgcctttttttttttttttaaagaatacatactgtggattcagtcccttgtcacacttgaccttttggcatacacccactgtggacttttgcctcttctgtaatggctggcaatgacatttcaaacttacaatctggaattgcacttggtacattggcattgcttgttccactgggatggggaccagtgtgaagatgcctgttagatagactgcccacccctactttctctttttctttatagcacttaacaataacaaagtcttgatgatgtacagtattcaaactttaggttgaaatacgttactctttgattcctagccagtagatcttatctacactttaatgggagagaatggtggtgtgtgggtaggcacaaatttatgtaaatagtgctccttctctttagtatgtttgctttgggggtagaaaaatggttttaacaaacactggtttccatcaaatgaatgatgtcttctccatcctgtggagacaagaatctgctagaaggatatgtgctaagttccttataagagataatggtgctctgcctatgccagcttggcacccgaagatgtgtgagtggacgtgaggctgagtattaccttagtatttttctctgggtctttggaaaaccatagtcaatttttagaacatattgctttcattccccataaactcttcacacatgataactgtttaagctttgaaaacacatactgaagtattgtgagcttaaaaaaactttttaaatatttgcatagttttgaggtgaatttgtttccttacagatctctcctaatcattgagatgtatatttcaaaagaggaaattttacatgttgtccaaaacagccttgctagtaactggtgaattttggtattaactattattaaagtctttaaacgacacaggtacctaaagatcaccttaatgtggcaatttgtgatggtgtagctagctgattgtgaaaactgttcctttaaagtcgcttcttgcatgttcggtgttagtcatccagctcaggcttgtgttgcagctgacaatctaggaaagacggccttagagagtggtgcaggccccacactgacggactgccttagaaacccgacttcctctagactttgaaccgccagacttttctcttgtttagaaaacaaacttatatttaatgtacttactacttaaaactccagacagagatataatgtagaaggcaaatattggccaattttttcctctttttaagtggaagacaaatgaacgggatttttaaagtgcttttaaagtgcatgaatggttaataaatcagtatgaattgtaagccttcatcttacatccaagtccttagttggttagggtttcttttctttcttttttaaagagtgtcaattaccttttgaacctgtgaaaatttgatagttgttaacagtctgatggtcctaattctttcttttcattctagaaatgaatgtggttgtaatcatgttcctaattcttgggacaacctgcaagacagtgagacagtttaaaaattacctttcatgttgaaaaagtctgaaacagagaacccaatgatatttaaaataaatgctacataaaactctttttaaaattttgattttaacttaattaaaacaatgtcataaatatgctttttgattttgttactgcttttaatattaaagtaatagaatattgaagcaatattgtctagcactctgctggacattaagtccgcgggaggagaagtgaacaggaatcgattctttgtcttttaactgcccttagttaggagatgttaaaatacttggcacctctggttatatgtatgttatgtgtgttctcccccctaaaatttctaagcacatttattcacttttaaaatgaatctttaaaagattatagttagtagttatagttaatattctatttacttggaaaaatgtgaataaatggatcttcaaaagattcattttaaaaatgaataaatgtataataggctataggtgatcttacttgcgtattaggtaggaggcacatatttataccatttcatatgtaatatctttgtcattgtgtttcatcgaagatcaattgctagcaacttgaagggtatttatacttgggtcacttgaactcagctgactaaattgtaagaacgagagcaagcaagatggctgttattggaagccataacttccagaagataattctgcacaattcgtaagttaaaaaaaatctgtagggtcttccactatcctttttcaggttgataatgctgttctgggcacacactttgtaaatggaatgttatggtacagtcgcctctcagtatccatggggcattggttccaggcctcccttaggatgccaaactccatggatactcaaaccccttctataaaatggtgtagtatttgcatatatcctagacacatcctcctgtatgctttaaatcatctctagattacttaaaatacctaatacaatgtaaatgctctgtaaatagttgttatactatattgtttagggaataatgacaaggaaaaaaaagcctgtacatgttcagcacaagtgaaaccatcctttttgcccccaaatattttcaatttgtatttggttgaatccatggatgcagaactcacggatacagagggccgactgtactttctttaaagtgttcaaaagtattactagcaaagaggaggaggagcaaagcatatatcagaagtaaaacaatttttcttgttgactgctttggtaaaaaacagtttgatggatagttttacatttcactggactagataaaaaatggtgctaatatttatgtagcttgatgctatagttgctttggtatcaaacttaatacctaacccatataagatccttattatataattttgtgatcagtaaaatgatattttaaagagtgatcttaaaaatatgacctggtcattgcacaacgtttgcatttgaaatgaatttttgtactatagggtggatatggagttattcagtgcaagtgtgtgcttaatatcaaaccctatgcaaggagctatgtctagatttttggtccaaatttgcctccttcaagcctactagtgtgagatggaaaaaaatcgattgctcttttaatattatttccattttgaaattctcgacacttgaatgaaggcagtagaggcctctttttggatttctcttctaataacaaaactttatttagggaaggtttccctgtgctatcgtaagtttgttttgagcactgcattcactttaaaattctggaggaacaaaggctgggcacataatcacaaagcccaggccacacaataattcggggttgtattttctaagaactatgtattgtttttagcttatagttaatattgtatttacttggaaaaatgtgaataaagttaattaacattacaag

SEQ ID NO: 116308 - DNA, 7431 bp, Homo sapiens
  Payload ID: 2694
  Gene Symbol: CNTRL
  Gene Name: centriolin
  Uniprot ID: Q7Z7A1
  ENST ID: ENST00000238341
  CDS Start-End: 32-7009
gttttgatgaacacctggctttattcttgcaatgaagaaaggttctcaacaaaaaatattctccaaagcaaagataccatcatcatctcactctcctatcccatcatctatgtccaatatgagatctaggtcactttcacctttgattggatcagagactctaccttttcattctggaggacagtggtgtgagcaagttgagattgcagatgaaaacaatatgcttttggactatcaagaccataaaggagctgattcacatgcaggagttagatatattacagaggccctcattaaaaaacttactaaacaggataatttggctttgataaaatctctgaacctttcactttctaaagacggtggcaagaaatttaagtatattgagaatttggaaaaatgtgttaaacttgaagtactgaatctcagctataatctaatagggaagattgaaaagttggacaagctgttaaaattacgtgaactcaacttatcatataacaaaatcagcaaaattgaaggcatagaaaatatgtgtaatctgcaaaagcttaaccttgcaggaaatgaaattgagcatattccagtatggttagggaagaagttaaaatctttgcgagtcctcaatttgaaaggcaacaagatatcatcgctccaagatataagcaagttgaaaccgcttcaagatttgatttctctgatcctagttgaaaatccagttgtgacccttcctcattacctccagtttaccattttccacctccgttcattggaaagtttggaaggtcagccagtaaccactcaggatagacaggaggcttttgagagattcagtttagaagaggtagaaagactggaaagagacctagaaaaaaagatgatagaaactgaagagcttaagagcaaacaaacaaggttccttgaggaaattaaaaatcaagataaattgaataaatcattaaaagaggaggccatgttacagaaacagagctgtgaggaactcaagagtgacttaaacacaaaaaatgaattgctaaaacagaagaccatagaattaacacgagcatgtcagaagcaatatgagctggaacaggaattggccttttataaaattgatgctaaatttgagccactaaattattatccatcagagtatgctgaaattgataaagccccagatgaaagcccttacattggcaaatccagatacaagagaaatatgtttgccacagagagttatattattgacagtgctcaggcagtacagatcaagaagatggagccagatgaacaacttagaaatgatcacatgaacttgagaggccacacaccactggacacgcaactggaagacaaagaaaaaaaaataagtgcagcacaaactcgactatcagaactgcatgatgaaatagaaaaggcagaacaacaaattttgagagctactgaagaatttaaacaactggaagaagctatacaactaaaaaagatttcagaagcagggaaagaccttctttacaagcagttgagtggtagactacaacttgtaaataaattacgccaggaagctctggatctagaactgcagatggaaaagcaaaagcaggaaattgccggaaagcagaaggagattaaggacctgcaaatagccatagatagcctggattccaaagacccaaaacattcccatatgaaggctcaaaagagcggtaaagaacaacagcttgacattatgaacaagcagtaccaacaacttgaaagtcgtttggatgagatactttctagaattgctaaggaaacggaagagattaaggaccttgaagaacagcttactgaaggccagatagcagcaaatgaagccctgaagaaggatttagaaggtgttatcagtgggttgcaagaatacctggggaccattaaaggccaggcaactcaggcccagaatgagtgcaggaagctgcgggatgagaaagagacattgttgcagagattgacagaagtcgagcaggagagagaccagctggaaatagttgccatggatgcagaaaatatgaggaaggagcttgcagagctagaaagtgccctccaagagcagcatgaggtgaatgcatctttgcagcagacccagggagatctcagtgcctatgaagctgagctagaggctcggctaaacctaagggatgctgaagccaaccagctcaaggaagagttggaaaaagtaacaagacttacccagttagaacaatcagcccttcaagcagaacttgagaaggaaaggcaagccctcaagaatgcccttggaaaagcccagttctcagaagaaaaggagcaagagaacagtgagctccatgcaaaacttaaacacttgcaggatgacaataatctgttaaaacagcaacttaaagatttccagaatcaccttaaccatgtggttgatggtttggttcgtccagaagaagtggcagctcgtgtggatgagctaagaagaaaactgaaattaggaactggggaaatgaacatccatagtccttcagatgtcttagggaaaagtcttgctgatttacagaaacaattcagtgaaattcttgcacgctccaagtgggaaagagatgaagcacaagttagagagagaaaactccaagaagaaatggctctgcagcaagagaaactggcaactggacaagaagagttcaggcaggcctgtgagagagccctggaagcaagaatgaattttgataagaggcaacatgaagcaagaatccagcaaatggagaatgaaattcactatttgcaagaaaatctaaaaagtatggaggaaatccaaggccttacagatctccaacttcaggaagctgatgaagagaaggagagaattctggcccaactccgagagttagagaaaaagaagaaacttgaagatgccaaatctcaggagcaagtttttggtttagataaagaactgaagaaactaaagaaagccgtggccacctctgataagctagccacagctgagctcaccattgccaaagaccagctgaagtcccttcatggaactgttatgaaaattaaccaggagcgagcagaggagttgcaggaagcagagaggttcagcagaaaggcagcacaagcagccagagatctcacccgagcagaagctgagatcgaactcctgcagaatctcctcaggcagaagggggagcagtttcgacttgagatggagaaaacaggtgtaggtactggagcaaactcacaggtcctagaaattgagaaactgaatgagacaatggaacgacaaaggacagagattgcaaggctgcagaatgtactagacctcactggaagtgacaacaaaggaggctttgaaaatgttttagaagaaattgctgaacttcgacgtgaagtttcttatcagaatgattacataagcagcatggcagatcctttcaaaagacgaggctattggtactttatgccaccaccaccatcatcaaaagtttccagccatagttcccaggccaccaaggactctggtgttggccttaagtactcagcctcaactcctgttagaaaaccacgccctgggcagcaggatgggaaggaaggcagtcaacctccccctgcctcaggatactgggtttattctcccatcaggagtgggttacataaactgtttccaagtagagatgcagacagtggaggagatagtcaggaagagagtgagctggatgaccaagaagaacccccatttgtgcctcctcctggatacatgatgtatactgtgcttcctgatggttctcctgtaccccagggcatggccctgtatgcaccacctcctcccttgccaaacaatagccgacctctcacccctggcactgttgtttatggcccacctcctgctggggcccccatggtgtatgggcctccaccccccaacttctccatccccttcatccctatgggtgtgctgcattgcaacgtccctgaacaccataacttagagaatgaagtttctagattagaagacataatgcagcatttaaaatcaaagaagcgggaagaaaggtggatgagagcatccaagcggcagtcggagaaagaaatggaagaactgcatcataatattgatgatcttttgcaagagaagaaaagcttagagtgtgaagtagaagaattacatagaactgtccagaaacgtcaacagcaaaaggacttcattgatggaaatgttgagagtcttatgactgaactagaaatagaaaaatcactcaaacatcatgaagatattgtagatgaaattgagtgcattgagaagactcttctgaaacgtcgctcagagctcagggaagctgaccgactcctggcagaggctgagagtgaactttcatgcactaaagaaaagacaaaaaatgctgttgaaaagttcactgatgccaagagaagtttattgcaaactgagtcagatgctgaggaattagaaaggagagctcaggaaactgctgttaacctcgtcaaagctgatcagcagctaagatcgctccaggctgatgcaaaggatttggagcagcacaaaatcaagcaagaagaaatcttgaaagaaataaacaaaattgtagcagcaaaagactcagacttccaatgtttaagcaagaagaaggaaaaactgacagaagagcttcagaaactacagaaagacatagagatggcagaacgcaatgaggatcaccacctgcaggtccttaaagaatctgaggtgcttcttcaggccaaaagagccgagctggaaaagctgaaaagccaggtgacaagtcagcagcaggagatggctgtcttggacaggcagttagggcataaaaaggaggagctgcatctactccaaggaagcatggtccaggcaaaagctgacctccaggaagctctgagactgggagagactgaagtaactgagaagtgcaatcacattagggaagtaaaatctcttctggaagaactgagttttcagaaaggagaactaaatgttcagattagtgaaagaaaaactcaacttacacttataaagcaggaaattgaaaaagaggaagaaaatcttcaggttgttttaaggcagatgtctaaacataaaaccgaactaaagaatattctggacatgttgcaacttgaaaaccatgagctacaaggtttgaagctacaacatgaccaaagggtatctgaattagagaagactcaggtggcagtgctagaggagaaactggagttagagaatttgcagcagatatcccagcagcagaaaggggaaatagagtggcagaagcagctccttgagagggataaacgagaaatagaacgaatgactgctgagtcccgagctttacaatcgtgtgttgagtgtttgagcaaagaaaaggaagatctccaagagaaatgtgacatttgggaaaaaaagttggcacaaaccaaaagggttttagcagcagcagaagaaaatagcaaaatggagcaatcaaacttagaaaagttggaattgaatgtcagaaaactgcagcaggaactagaccaactaaacagagacaagttgtcactgcataacgacatttcagcaatgcaacagcagctccaagaaaaacgagaagcagtaaactcactgcaggaggaactagctaatgtccaagaccatttgaacctagcaaaacaggacctgcttcacaccaccaagcatcaggatgtgttgctcagtgagcagacccgactccagaaggacatcagtgaatgggcaaataggtttgaagactgtcagaaagaagaggagacaaaacaacaacaacttcaagtgcttcagaatgagattgaagaaaacaagctcaaactagtccaacaagaaatgatgtttcagagactccagaaagagagagaaagtgaagaaagcaaattagaaaccagtaaagtgacactgaaggagcaacagcaccagctggaaaaggaattaacagaccagaaaagcaaactggaccaagtgctctcaaaggtgctggcagctgaagagcgtgttaggactctgcaggaagaggagaggtggtgtgagagcctggagaagacactctcccaaactaaacggcagctttcagaaagggagcagcaattggtggagaaatcaggtgagctgttggccctccagaaagaggcagattctatgagggcagacttcagccttctgcggaaccagttcttgacagaaagaaagaaagctgagaagcaggtggccagcctgaaggaagcacttaagatccagcggagccagctggagaaaaaccttcttgagcaaaaacaggagaacagctgcatacaaaaggaaatggcaacaattgaactggtagcccaggacaaccatgagcgggccaggcgcctgatgaaggagctcaaccagatgcagtatgagtacacggagctcaagaaacagatggcaaaccaaaaagatttggagagaagacaaatggaaatcagtgatgcaatgaggacacttaaatctgaggtgaaggatgaaatcagaaccagcttgaagaatcttaatcagtttcttccagaactaccagcagatctagaagctattttggaaagaaacgaaaacctagaaggagaattggaaagcttgaaagagaaccttccatttaccatgaatgagggaccttttgaagaaaaactgaacttttcccaagttcacataatggatgaacactggcgtggagaagcactccgggagaaactgcgtcaccgggaagaccgactcaaggcccaactccgacactgtatgtccaagcaagcagaagtattaattaaaggaaagcggcagacagagggcactttacacagtttgaggagacaagtagatgctttaggggaattggtcaccagcacctctgcagattcagcgtcatcacccagtctgtctcagctggagtcttccctcacagaggactctcaacttggacaaaatcaggaaaagaatgcctcagccagatgaggaatactgtcttgtgtaaatatattcaaggaaaacacctccactacctcactgacttcataattggaatgtcacatggtttttttaatcaagatgcagtgaactgagattctgaaactccactgtagtttactttgcctgtaccattaatgccaatgtttttataaatcacttgtacatagtacatatgggaatagttgcatatgggaatttaaaccaacatgtggctgagcctttttttttttaatcttcgtaacatgtttaaaaaaaaacagtgattttaactgcatatttgaacctacaaactggtaaatcttattaacaaaaagaatgtacttaaggccctctttatttatagtgtcgagttatttttgaattttgcttaaaatctatttttcatatgaaaataaaagataacaatc

SEQ ID NO: 116309 - DNA, 713 bp, Homo sapiens
  Payload ID: 2694
  Gene Symbol: CNTRL
  Gene Name: centriolin
  ENST ID: ENST00000373844
  CDS Start-End: 67-504
caatgtttaagcaagaagaaggaaaaactgacagaagagcttcagaaactacagaaagacatagagatggcagaacgcaatgaggatcaccacctgcaggtccttaaagaatctgaggtgcttcttcaggccaaaagagccgagctggaaaagctgaaaagccaggtgacaagtcagcagcaggagatggctgtcttggacaggcagttagggcataaaaaggaggagctgcatctactccaaggaagcatggtccaggcaaaagctgacctccaggaagctctgagactgggagagactgaagtaactgagaagtgcaatcacattagggaagtaaaatctcttctggaagaactgagttttcagaaaggagaactaaatgttcagattagtgaaagaaaaactcaacttacacttataaagcaggaaattgaaaaagaggaagaaaatcttcaggttgttttaaggcagatgtctaaacataaaaccgcttttctacagtaagcaagtatctctatgatcagaaaaaaagttaatatttaaatatctgtatttcaaaggccaaaaaattgttatataaatctcagtctgtatttcaaagtatttttaatttattttgatcaattttatataaaatgcttttagttgattcttttatgtagaagcaaatgctttggaaccagatctttgttaattaaatgtttttgttaaaa

SEQ ID NO: 116310 - DNA, 3372 bp, Homo sapiens
  Payload ID: 2694
  Gene Symbol: CNTRL
  Gene Name: centriolin
  ENST ID: ENST00000373847
  CDS Start-End: 158-3142
gcgaagttacagaggctcggaggcgcttgcaaaaatgtggctgtcagagagggaagtgcacatgaatttgaagacagcattagaaagcgttccgcccacagtttctctgttctcaacggctcagttttaacaggataaattttaagttaagtcccatatgaaggctcaaaagagcggtaaagaacaacagcttgacattatgaacaagcagtaccaacaacttgaaagtcgtttggatgagatactttctagaattgctaaggaaacggaagagattaaggaccttgaagaacagcttactgaaggccagatagcagcaaatgaagccctgaagaaggatttagaaggtgttatcagtgggttgcaagaatacctggggaccattaaaggccaggcaactcaggcccagaatgagtgcaggaagctgcgggatgagaaagagacattgttgcagagattgacagaagtcgagcaggagagagaccagctggaaatagttgccatggatgcagaaaatatgaggaaggagcttgcagagctagaaagtgccctccaagagcagcatgaggtgaatgcatctttgcagcagacccagggagatctcagtgcctatgaagctgagctagaggctcggctaaacctaagggatgctgaagccaaccagctcaaggaagagttggaaaaagtaacaagacttacccagttagaacaatcagcccttcaagcagaacttgagaaggaaaggcaagccctcaagaatgcccttggaaaagcccagttctcagaagaaaaggagcaagagaacagtgagctccatgcaaaacttaaacacttgcaggatgacaataatctgttaaaacagcaacttaaagatttccagaatcaccttaaccatgtggttgatggtttggttcgtccagaagaagtggcagctcgtgtggatgagctaagaagaaaactgaaattaggaactggggaaatgaacatccatagtccttcagatgtcttagggaaaagtcttgctgatttacagaaacaattcagtgaaattcttgcacgctccaagtgggaaagagatgaagcacaagttagagagagaaaactccaagaagaaatggctctgcagcaagagaaactggcaactggacaagaagagttcaggcaggcctgtgagagagccctggaagcaagaatgaattttgataagaggcaacatgaagcaagaatccagcaaatggagaatgaaattcactatttgcaagaaaatctaaaaagtatggaggaaatccaaggccttacagatctccaacttcaggaagctgatgaagagaaggagagaattctggcccaactccgagagttagagaaaaagaagaaacttgaagatgccaaatctcaggagcaagtttttggtttagataaagaactgaagaaactaaagaaagccgtggccacctctgataagctagccacagctgagctcaccattgccaaagaccagctgaagtcccttcatggaactgttatgaaaattaaccaggagcgagcagaggagttgcaggaagcagagaggttcagcagaaaggcagcacaagcagccagagatctcacccgagcagaagctgagatcgaactcctgcagaatctcctcaggcagaagggggagcagtttcgacttgagatggagaaaacaggtgtaggtactggagcaaactcacaggtcctagaaattgagaaactgaatgagacaatggaacgacaaaggacagagattgcaaggctgcagaatgtactagacctcactggaagtgacaacaaaggaggctttgaaaatgttttagaagaaattgctgaacttcgacgtgaagtttcttatcagaatgattacataagcagcatggcagatcctttcaaaagacgaggctattggtactttatgccaccaccaccatcatcaaaagtttccagccatagttcccaggccaccaaggactctggtgttggccttaagtactcagcctcaactcctgttagaaaaccacgccctgggcagcaggatgggaaggaaggcagtcaacctccccctgcctcaggatactgggtttattctcccatcaggagtgggttacataaactgtttccaagtagagatgcagacagtggaggagatagtcaggaagagagtgagctggatgaccaagaagaacccccatttgtgcctcctcctggatacatgatgtatactgtgcttcctgatggttctcctgtaccccagggcatggccctgtatgcaccacctcctcccttgccaaacaatagccgacctctcacccctggcactgttgtttatggcccacctcctgctggggcccccatggtgtatgggcctccaccccccaacttctccatccccttcatccctatgggtgtgctgcattgcaacgtccctgaacaccataacttagagaatgaagtttctagattagaagacataatgcagcatttaaaatcaaagaagcgggaagaaaggtggatgagagcatccaagcggcagtcggagaaagaaatggaagaactgcatcataatattgatgatcttttgcaagagaagaaaagcttagagtgtgaagtagaagaattacatagaactgtccagaaacgtcaacagcaaaaggacttcattgatggaaatgttgagagtcttatgactgaactagaaatagaaaaatcactcaaacatcatgaagatattgtagatgaaattgagtgcattgagaagactcttctgaaacgtcgctcagagctcagggaagctgaccgactcctggcagaggctgagagtgaactttcatgcactaaagaaaagacaaaaaatgctgttgaaaagttcactgatgccaagagaagtttattgcaaactgagtcagatgctgaggaattagaaaggagagctcaggaaactgctgttaacctcgtcaaagctgatcagcagctaagatcgctccaggctgatgcaaaggatttggagcagcacaaaatcaagcaagaagaaatcttgaaagaaataaacaaaattgtagcagcaaaagactcagacttccaatgtttaagcaagaagaaggaaaaactgacagaagagtaagtaaggcctctgtagggctacaaggggtttgtgctggaagacagctctggggttccgagtcccttaggatctgctctagtgttgctggtgctttgtaggcttcagaaactacagaaagacatagagatggcagaacgcaatgaggatcaccacctgcaggtccttaaagaatctgaggtgcttcttcaggccaaaagagccgagctggaaaagctgaaaagccaggtatg

SEQ ID NO: 116311 - DNA, 5824 bp, Homo sapiens
  Payload ID: 2694
  Gene Symbol: CNTRL
  Gene Name: centriolin
  Uniprot ID: Q7Z7A1
  ENST ID: ENST00000373850
  CDS Start-End: 79-5400
gccggaaagcagaaggagattaaggacctgcaaatagccatagatagcctggattccaaagacccaaaacattcccatatgaaggctcaaaagagcggtaaagaacaacagcttgacattatgaacaagcagtaccaacaacttgaaagtcgtttggatgagatactttctagaattgctaaggaaacggaagagattaaggaccttgaagaacagcttactgaaggccagatagcagcaaatgaagccctgaagaaggatttagaaggtgttatcagtgggttgcaagaatacctggggaccattaaaggccaggcaactcaggcccagaatgagtgcaggaagctgcgggatgagaaagagacattgttgcagagattgacagaagtcgagcaggagagagaccagctggaaatagttgccatggatgcagaaaatatgaggaaggagcttgcagagctagaaagtgccctccaagagcagcatgaggtgaatgcatctttgcagcagacccagggagatctcagtgcctatgaagctgagctagaggctcggctaaacctaagggatgctgaagccaaccagctcaaggaagagttggaaaaagtaacaagacttacccagttagaacaatcagcccttcaagcagaacttgagaaggaaaggcaagccctcaagaatgcccttggaaaagcccagttctcagaagaaaaggagcaagagaacagtgagctccatgcaaaacttaaacacttgcaggatgacaataatctgttaaaacagcaacttaaagatttccagaatcaccttaaccatgtggttgatggtttggttcgtccagaagaagtggcagctcgtgtggatgagctaagaagaaaactgaaattaggaactggggaaatgaacatccatagtccttcagatgtcttagggaaaagtcttgctgatttacagaaacaattcagtgaaattcttgcacgctccaagtgggaaagagatgaagcacaagttagagagagaaaactccaagaagaaatggctctgcagcaagagaaactggcaactggacaagaagagttcaggcaggcctgtgagagagccctggaagcaagaatgaattttgataagaggcaacatgaagcaagaatccagcaaatggagaatgaaattcactatttgcaagaaaatctaaaaagtatggaggaaatccaaggccttacagatctccaacttcaggaagctgatgaagagaaggagagaattctggcccaactccgagagttagagaaaaagaagaaacttgaagatgccaaatctcaggagcaagtttttggtttagataaagaactgaagaaactaaagaaagccgtggccacctctgataagctagccacagctgagctcaccattgccaaagaccagctgaagtcccttcatggaactgttatgaaaattaaccaggagcgagcagaggagttgcaggaagcagagaggttcagcagaaaggcagcacaagcagccagagatctcacccgagcagaagctgagatcgaactcctgcagaatctcctcaggcagaagggggagcagtttcgacttgagatggagaaaacaggtgtaggtactggagcaaactcacaggtcctagaaattgagaaactgaatgagacaatggaacgacaaaggacagagattgcaaggctgcagaatgtactagacctcactggaagtgacaacaaaggaggctttgaaaatgttttagaagaaattgctgaacttcgacgtgaagtttcttatcagaatgattacataagcagcatggcagatcctttcaaaagacgaggctattggtactttatgccaccaccaccatcatcaaaagtttccagccatagttcccaggccaccaaggactctggtgttggccttaagtactcagcctcaactcctgttagaaaaccacgccctgggcagcaggatgggaaggaaggcagtcaacctccccctgcctcaggatactgggtttattctcccatcaggagtgggttacataaactgtttccaagtagagatgcagacagtggaggagatagtcaggaagagagtgagctggatgaccaagaagaacccccatttgtgcctcctcctggatacatgatgtatactgtgcttcctgatggttctcctgtaccccagggcatggccctgtatgcaccacctcctcccttgccaaacaatagccgacctctcacccctggcactgttgtttatggcccacctcctgctggggcccccatggtgtatgggcctccaccccccaacttctccatccccttcatccctatgggtgtgctgcattgcaacgtccctgaacaccataacttagagaatgaagtttctagattagaagacataatgcagcatttaaaatcaaagaagcgggaagaaaggtggatgagagcatccaagcggcagtcggagaaagaaatggaagaactgcatcataatattgatgatcttttgcaagagaagaaaagcttagagtgtgaagtagaagaattacatagaactgtccagaaacgtcaacagcaaaaggacttcattgatggaaatgttgagagtcttatgactgaactagaaatagaaaaatcactcaaacatcatgaagatattgtagatgaaattgagtgcattgagaagactcttctgaaacgtcgctcagagctcagggaagctgaccgactcctggcagaggctgagagtgaactttcatgcactaaagaaaagacaaaaaatgctgttgaaaagttcactgatgccaagagaagtttattgcaaactgagtcagatgctgaggaattagaaaggagagctcaggaaactgctgttaacctcgtcaaagctgatcagcagctaagatcgctccaggctgatgcaaaggatttggagcagcacaaaatcaagcaagaagaaatcttgaaagaaataaacaaaattgtagcagcaaaagactcagacttccaatgtttaagcaagaagaaggaaaaactgacagaagagcttcagaaactacagaaagacatagagatggcagaacgcaatgaggatcaccacctgcaggtccttaaagaatctgaggtgcttcttcaggccaaaagagccgagctggaaaagctgaaaagccaggtgacaagtcagcagcaggagatggctgtcttggacaggcagttagggcataaaaaggaggagctgcatctactccaaggaagcatggtccaggcaaaagctgacctccaggaagctctgagactgggagagactgaagtaactgagaagtgcaatcacattagggaagtaaaatctcttctggaagaactgagttttcagaaaggagaactaaatgttcagattagtgaaagaaaaactcaacttacacttataaagcaggaaattgaaaaagaggaagaaaatcttcaggttgttttaaggcagatgtctaaacataaaaccgaactaaagaatattctggacatgttgcaacttgaaaaccatgagctacaaggtttgaagctacaacatgaccaaagggtatctgaattagagaagactcaggtggcagtgctagaggagaaactggagttagagaatttgcagcagatatcccagcagcagaaaggggaaatagagtggcagaagcagctccttgagagggataaacgagaaatagaacgaatgactgctgagtcccgagctttacaatcgtgtgttgagtgtttgagcaaagaaaaggaagatctccaagagaaatgtgacatttgggaaaaaaagttggcacaaaccaaaagggttttagcagcagcagaagaaaatagcaaaatggagcaatcaaacttagaaaagttggaattgaatgtcagaaaactgcagcaggaactagaccaactaaacagagacaagttgtcactgcataacgacatttcagcaatgcaacagcagctccaagaaaaacgagaagcagtaaactcactgcaggaggaactagctaatgtccaagaccatttgaacctagcaaaacaggacctgcttcacaccaccaagcatcaggatgtgttgctcagtgagcagacccgactccagaaggacatcagtgaatgggcaaataggtttgaagactgtcagaaagaagaggagacaaaacaacaacaacttcaagtgcttcagaatgagattgaagaaaacaagctcaaactagtccaacaagaaatgatgtttcagagactccagaaagagagagaaagtgaagaaagcaaattagaaaccagtaaagtgacactgaaggagcaacagcaccagctggaaaaggaattaacagaccagaaaagcaaactggaccaagtgctctcaaaggtgctggcagctgaagagcgtgttaggactctgcaggaagaggagaggtggtgtgagagcctggagaagacactctcccaaactaaacggcagctttcagaaagggagcagcaattggtggagaaatcaggtgagctgttggccctccagaaagaggcagattctatgagggcagacttcagccttctgcggaaccagttcttgacagaaagaaagaaagctgagaagcaggtggccagcctgaaggaagcacttaagatccagcggagccagctggagaaaaaccttcttgagcaaaaacaggagaacagctgcatacaaaaggaaatggcaacaattgaactggtagcccaggacaaccatgagcgggccaggcgcctgatgaaggagctcaaccagatgcagtatgagtacacggagctcaagaaacagatggcaaaccaaaaagatttggagagaagacaaatggaaatcagtgatgcaatgaggacacttaaatctgaggtgaaggatgaaatcagaaccagcttgaagaatcttaatcagtttcttccagaactaccagcagatctagaagctattttggaaagaaacgaaaacctagaaggagaattggaaagcttgaaagagaaccttccatttaccatgaatgagggaccttttgaagaaaaactgaacttttcccaagttcacataatggatgaacactggcgtggagaagcactccgggagaaactgcgtcaccgggaagaccgactcaaggcccaactccgacactgtatgtccaagcaagcagaagtattaattaaaggaaagcggcagacagagggcactttacacagtttgaggagacaagtagatgctttaggggaattggtcaccagcacctctgcagattcagcgtcatcacccagtctgtctcagctggagtcttccctcacagaggactctcaacttggacaaaatcaggaaaagaatgcctcagccagatgaggaatactgtcttgtgtaaatatattcaaggaaaacacctccactacctcactgacttcataattggaatgtcacatggtttttttaatcaagatgcagtgaactgagattctgaaactccactgtagtttactttgcctgtaccattaatgccaatgtttttataaatcacttgtacatagtacatatgggaatagttgcatatgggaatttaaaccaacatgtggctgagcctttttttttttaatcttcgtaacatgtttaaaaaaaaacagtgattttaactgcatatttgaacctacaaactggtaaatcttattaacaaaaagaatgtacttaaggccctctttatttatagtgtcgagttatttttgaattttgcttaaaatctatttttcatatgaaaataaaagataacaatcaa

SEQ ID NO: 116312 - DNA, 7660 bp, Homo sapiens
  Payload ID: 2694
  Gene Symbol: CNTRL
  Gene Name: centriolin
  Uniprot ID: Q7Z7A1
  ENST ID: ENST00000373855
  CDS Start-End: 261-7238
cgaacttctcccgctctacctcagcctgcgggactgctcggctcggcttctaggcgagacaggggctccctgtgtttcccaggctgcagtgcagtggccagtcacaaggttgatcatagcacattgtagcctggagctcctgggatcaagcaatcctcctgcctcatcctctggagtaactgggactgcaagtatacataccgtgcctgacgaaatatcacaatatttggttttgatgaacacctggctttattcttgcaatgaagaaaggttctcaacaaaaaatattctccaaagcaaagataccatcatcatctcactctcctatcccatcatctatgtccaatatgagatctaggtcactttcacctttgattggatcagagactctaccttttcattctggaggacagtggtgtgagcaagttgagattgcagatgaaaacaatatgcttttggactatcaagaccataaaggagctgattcacatgcaggagttagatatattacagaggccctcattaaaaaacttactaaacaggataatttggctttgataaaatctctgaacctttcactttctaaagacggtggcaagaaatttaagtatattgagaatttggaaaaatgtgttaaacttgaagtactgaatctcagctataatctaatagggaagattgaaaagttggacaagctgttaaaattacgtgaactcaacttatcatataacaaaatcagcaaaattgaaggcatagaaaatatgtgtaatctgcaaaagcttaaccttgcaggaaatgaaattgagcatattccagtatggttagggaagaagttaaaatctttgcgagtcctcaatttgaaaggcaacaagatatcatcgctccaagatataagcaagttgaaaccgcttcaagatttgatttctctgatcctagttgaaaatccagttgtgacccttcctcattacctccagtttaccattttccacctccgttcattggaaagtttggaaggtcagccagtaaccactcaggatagacaggaggcttttgagagattcagtttagaagaggtagaaagactggaaagagacctagaaaaaaagatgatagaaactgaagagcttaagagcaaacaaacaaggttccttgaggaaattaaaaatcaagataaattgaataaatcattaaaagaggaggccatgttacagaaacagagctgtgaggaactcaagagtgacttaaacacaaaaaatgaattgctaaaacagaagaccatagaattaacacgagcatgtcagaagcaatatgagctggaacaggaattggccttttataaaattgatgctaaatttgagccactaaattattatccatcagagtatgctgaaattgataaagccccagatgaaagcccttacattggcaaatccagatacaagagaaatatgtttgccacagagagttatattattgacagtgctcaggcagtacagatcaagaagatggagccagatgaacaacttagaaatgatcacatgaacttgagaggccacacaccactggacacgcaactggaagacaaagaaaaaaaaataagtgcagcacaaactcgactatcagaactgcatgatgaaatagaaaaggcagaacaacaaattttgagagctactgaagaatttaaacaactggaagaagctatacaactaaaaaagatttcagaagcagggaaagaccttctttacaagcagttgagtggtagactacaacttgtaaataaattacgccaggaagctctggatctagaactgcagatggaaaagcaaaagcaggaaattgccggaaagcagaaggagattaaggacctgcaaatagccatagatagcctggattccaaagacccaaaacattcccatatgaaggctcaaaagagcggtaaagaacaacagcttgacattatgaacaagcagtaccaacaacttgaaagtcgtttggatgagatactttctagaattgctaaggaaacggaagagattaaggaccttgaagaacagcttactgaaggccagatagcagcaaatgaagccctgaagaaggatttagaaggtgttatcagtgggttgcaagaatacctggggaccattaaaggccaggcaactcaggcccagaatgagtgcaggaagctgcgggatgagaaagagacattgttgcagagattgacagaagtcgagcaggagagagaccagctggaaatagttgccatggatgcagaaaatatgaggaaggagcttgcagagctagaaagtgccctccaagagcagcatgaggtgaatgcatctttgcagcagacccagggagatctcagtgcctatgaagctgagctagaggctcggctaaacctaagggatgctgaagccaaccagctcaaggaagagttggaaaaagtaacaagacttacccagttagaacaatcagcccttcaagcagaacttgagaaggaaaggcaagccctcaagaatgcccttggaaaagcccagttctcagaagaaaaggagcaagagaacagtgagctccatgcaaaacttaaacacttgcaggatgacaataatctgttaaaacagcaacttaaagatttccagaatcaccttaaccatgtggttgatggtttggttcgtccagaagaagtggcagctcgtgtggatgagctaagaagaaaactgaaattaggaactggggaaatgaacatccatagtccttcagatgtcttagggaaaagtcttgctgatttacagaaacaattcagtgaaattcttgcacgctccaagtgggaaagagatgaagcacaagttagagagagaaaactccaagaagaaatggctctgcagcaagagaaactggcaactggacaagaagagttcaggcaggcctgtgagagagccctggaagcaagaatgaattttgataagaggcaacatgaagcaagaatccagcaaatggagaatgaaattcactatttgcaagaaaatctaaaaagtatggaggaaatccaaggccttacagatctccaacttcaggaagctgatgaagagaaggagagaattctggcccaactccgagagttagagaaaaagaagaaacttgaagatgccaaatctcaggagcaagtttttggtttagataaagaactgaagaaactaaagaaagccgtggccacctctgataagctagccacagctgagctcaccattgccaaagaccagctgaagtcccttcatggaactgttatgaaaattaaccaggagcgagcagaggagttgcaggaagcagagaggttcagcagaaaggcagcacaagcagccagagatctcacccgagcagaagctgagatcgaactcctgcagaatctcctcaggcagaagggggagcagtttcgacttgagatggagaaaacaggtgtaggtactggagcaaactcacaggtcctagaaattgagaaactgaatgagacaatggaacgacaaaggacagagattgcaaggctgcagaatgtactagacctcactggaagtgacaacaaaggaggctttgaaaatgttttagaagaaattgctgaacttcgacgtgaagtttcttatcagaatgattacataagcagcatggcagatcctttcaaaagacgaggctattggtactttatgccaccaccaccatcatcaaaagtttccagccatagttcccaggccaccaaggactctggtgttggccttaagtactcagcctcaactcctgttagaaaaccacgccctgggcagcaggatgggaaggaaggcagtcaacctccccctgcctcaggatactgggtttattctcccatcaggagtgggttacataaactgtttccaagtagagatgcagacagtggaggagatagtcaggaagagagtgagctggatgaccaagaagaacccccatttgtgcctcctcctggatacatgatgtatactgtgcttcctgatggttctcctgtaccccagggcatggccctgtatgcaccacctcctcccttgccaaacaatagccgacctctcacccctggcactgttgtttatggcccacctcctgctggggcccccatggtgtatgggcctccaccccccaacttctccatccccttcatccctatgggtgtgctgcattgcaacgtccctgaacaccataacttagagaatgaagtttctagattagaagacataatgcagcatttaaaatcaaagaagcgggaagaaaggtggatgagagcatccaagcggcagtcggagaaagaaatggaagaactgcatcataatattgatgatcttttgcaagagaagaaaagcttagagtgtgaagtagaagaattacatagaactgtccagaaacgtcaacagcaaaaggacttcattgatggaaatgttgagagtcttatgactgaactagaaatagaaaaatcactcaaacatcatgaagatattgtagatgaaattgagtgcattgagaagactcttctgaaacgtcgctcagagctcagggaagctgaccgactcctggcagaggctgagagtgaactttcatgcactaaagaaaagacaaaaaatgctgttgaaaagttcactgatgccaagagaagtttattgcaaactgagtcagatgctgaggaattagaaaggagagctcaggaaactgctgttaacctcgtcaaagctgatcagcagctaagatcgctccaggctgatgcaaaggatttggagcagcacaaaatcaagcaagaagaaatcttgaaagaaataaacaaaattgtagcagcaaaagactcagacttccaatgtttaagcaagaagaaggaaaaactgacagaagagcttcagaaactacagaaagacatagagatggcagaacgcaatgaggatcaccacctgcaggtccttaaagaatctgaggtgcttcttcaggccaaaagagccgagctggaaaagctgaaaagccaggtgacaagtcagcagcaggagatggctgtcttggacaggcagttagggcataaaaaggaggagctgcatctactccaaggaagcatggtccaggcaaaagctgacctccaggaagctctgagactgggagagactgaagtaactgagaagtgcaatcacattagggaagtaaaatctcttctggaagaactgagttttcagaaaggagaactaaatgttcagattagtgaaagaaaaactcaacttacacttataaagcaggaaattgaaaaagaggaagaaaatcttcaggttgttttaaggcagatgtctaaacataaaaccgaactaaagaatattctggacatgttgcaacttgaaaaccatgagctacaaggtttgaagctacaacatgaccaaagggtatctgaattagagaagactcaggtggcagtgctagaggagaaactggagttagagaatttgcagcagatatcccagcagcagaaaggggaaatagagtggcagaagcagctccttgagagggataaacgagaaatagaacgaatgactgctgagtcccgagctttacaatcgtgtgttgagtgtttgagcaaagaaaaggaagatctccaagagaaatgtgacatttgggaaaaaaagttggcacaaaccaaaagggttttagcagcagcagaagaaaatagcaaaatggagcaatcaaacttagaaaagttggaattgaatgtcagaaaactgcagcaggaactagaccaactaaacagagacaagttgtcactgcataacgacatttcagcaatgcaacagcagctccaagaaaaacgagaagcagtaaactcactgcaggaggaactagctaatgtccaagaccatttgaacctagcaaaacaggacctgcttcacaccaccaagcatcaggatgtgttgctcagtgagcagacccgactccagaaggacatcagtgaatgggcaaataggtttgaagactgtcagaaagaagaggagacaaaacaacaacaacttcaagtgcttcagaatgagattgaagaaaacaagctcaaactagtccaacaagaaatgatgtttcagagactccagaaagagagagaaagtgaagaaagcaaattagaaaccagtaaagtgacactgaaggagcaacagcaccagctggaaaaggaattaacagaccagaaaagcaaactggaccaagtgctctcaaaggtgctggcagctgaagagcgtgttaggactctgcaggaagaggagaggtggtgtgagagcctggagaagacactctcccaaactaaacggcagctttcagaaagggagcagcaattggtggagaaatcaggtgagctgttggccctccagaaagaggcagattctatgagggcagacttcagccttctgcggaaccagttcttgacagaaagaaagaaagctgagaagcaggtggccagcctgaaggaagcacttaagatccagcggagccagctggagaaaaaccttcttgagcaaaaacaggagaacagctgcatacaaaaggaaatggcaacaattgaactggtagcccaggacaaccatgagcgggccaggcgcctgatgaaggagctcaaccagatgcagtatgagtacacggagctcaagaaacagatggcaaaccaaaaagatttggagagaagacaaatggaaatcagtgatgcaatgaggacacttaaatctgaggtgaaggatgaaatcagaaccagcttgaagaatcttaatcagtttcttccagaactaccagcagatctagaagctattttggaaagaaacgaaaacctagaaggagaattggaaagcttgaaagagaaccttccatttaccatgaatgagggaccttttgaagaaaaactgaacttttcccaagttcacataatggatgaacactggcgtggagaagcactccgggagaaactgcgtcaccgggaagaccgactcaaggcccaactccgacactgtatgtccaagcaagcagaagtattaattaaaggaaagcggcagacagagggcactttacacagtttgaggagacaagtagatgctttaggggaattggtcaccagcacctctgcagattcagcgtcatcacccagtctgtctcagctggagtcttccctcacagaggactctcaacttggacaaaatcaggaaaagaatgcctcagccagatgaggaatactgtcttgtgtaaatatattcaaggaaaacacctccactacctcactgacttcataattggaatgtcacatggtttttttaatcaagatgcagtgaactgagattctgaaactccactgtagtttactttgcctgtaccattaatgccaatgtttttataaatcacttgtacatagtacatatgggaatagttgcatatgggaatttaaaccaacatgtggctgagcctttttttttttaatcttcgtaacatgtttaaaaaaaaacagtgattttaactgcatatttgaacctacaaactggtaaatcttattaacaaaaagaatgtacttaaggccctctttatttatagtgtcgagttatttttgaattttgcttaaaatctatttttcatatgaaaataaaagataacaatc

SEQ ID NO: 116313 - DNA, 1917 bp, Homo sapiens
  Payload ID: 2694
  Gene Symbol: CNTRL
  Gene Name: centriolin
  ENST ID: ENST00000373865
  CDS Start-End: 237-1617
gggaaacgcctccgcgtcccttccaacagtaccggagagggagaggggcgtggctgagactagccccgaccacgcgcgcgcggcccctcggcaaccggcacaacacaacaaaatggctgccgcgccgctgggcccctgaggaaagagcccgaacttctcccgctctacctcagcctgcgggactgctcggctcggcttctaggcggttttgatgaacacctggctttattcttgcaatgaagaaaggttctcaacaaaaaatattctccaaagcaaagataccatcatcatctcactctcctatcccatcatctatgtccaatatgagatctaggtcactttcacctttgattggatcagagactctaccttttcattctggaggacagtggtgtgagcaagttgagattgcagatgaaaacaatatgcttttggactatcaagaccataaaggagctgattcacatgcaggagttagatatattacagaggccctcattaaaaaacttactaaacaggataatttggctttgataaaatctctgaacctttcactttctaaagacggtggcaagaaatttaagtatattgagaatttggaaaaatgtgttaaacttgaagtactgaatctcagctataatctaatagggaagattgaaaagttggacaagctgttaaaattacgtgaactcaacttatcatataacaaaatcagcaaaattgaaggcatagaaaatatgtgtaatctgcaaaagcttaaccttgcaggaaatgaaattgagcatattccagtatggttagggaagaagttaaaatctttgcgagtcctcaatttgaaaggcaacaagatatcatcgctccaagatataagcaagttgaaaccgcttcaagatttgatttctctgatcctagttgaaaatccagttgtgacccttcctcattacctccagtttaccattttccacctccgttcattggaaagtttggaaggtcagccagtaaccactcaggatagacaggaggcttttgagagattcagtttagaagaggtagaaagactggaaagagacctagaaaaaaagatgatagaaactgaagagcttaagagcaaacaaacaaggttccttgaggaaattaaaaatcaagataaattgaataaatcattaaaagaggaggccatgttacagaaacagagctgtgaggaactcaagagtgacttaaacacaaaaaatgaattgctaaaacagaagaccatagaattaacacgagcatgtcagaagcaatatgagctggaacaggaattggccttttataaaattgatgctaaatttgagccactaaattattatccatcagagtatgctgaaattgataaagccccagatgaaagcccttacattggcaaatccagatacaagagaaatatgtttgccacagagagttatattattgacagtgctcaggcagtacagatcaagaagatggagccagatgaacaacttagaaatgatcacatgaacttgagaggccacacaccactggacacgcaactggaagacaaagaaaaaaaaataagtgcagcacaaactcgactatcagaactgcatgatgaaatagaaaaggcagaacaacaaattttgagagctactgaagaatttaaacaactggaagaagctatacaactaaaaaagatttcagaagcagggaaagaccttctttacaagcagttgagtggtagactacaacttgtaaataaattacgccaggaagctctggatctagaactgcagatggaaaagcaaaagcaggaaattgccggaaagcagaaggagattaaggacctgcaaatagccatagatagcctggattccaaagacccaaaacatgtgagtaaattaagaaattttgacttgttct

SEQ ID NO: 116314 - DNA, 1833 bp, Homo sapiens
  Payload ID: 2694
  Gene Symbol: CNTRL
  Gene Name: centriolin
  ENST ID: ENST00000431571
  CDS Start-End: 795-1833
gttatgaaaattaaccaggagcgagcagaggagttgcaggaagcagagaggttcagcagaaaggcagcacaagcagccagagatctcacccgagcagaagctgagatcgaactcctgcagaatctcctcaggcagaagggggagcagtttcgacttgagatggagaaaacaggtgtaggtactggagcaaactcacaggtcctagaaattgagaaactgaatgagacaatggaacgacaaaggacagagattgcaaggctgcagaatgtactagacctcactggaagtgacaacaaaggaggctttgaaaatgttttagaagaaattgctgaacttcgacgtgaagtttcttatcagaatgattacataagcagcatggcagatcctttcaaaagacgaggctattggtactttatgccaccaccaccatcatcaaaagtttccagccatagttcccaggccaccaaggactctggtgttggccttaagtactcagcctcaactcctgttagaaaaccacgccctgggcagcaggatgggaaggaaggcagtcaacctccccctgcctcaggatactgggtttattctcccatcaggagtgggttacataaactgtttccaagtagagatgcagacagtggaggagatagtcaggaagagagtgagctggatgaccaagaagaacccccatttgtgcctcctcctggatacatgatgtatactgtgcttcctgatggttctcctgtaccccagggcatggccctgagaatgaagtttctagattagaagacataatgcagcatttaaaatcaaagaagcgggaagaaaggtggatgagagcatccaagcggcagtcggagaaagaaatggaagaactgcatcataatattgatgatcttttgcaagagaagaaaagcttagagtgtgaagtagaagaattacatagaactgtccagaaacgtcaacagcaaaaggacttcattgatggaaatgttgagagtcttatgactgaactagaaatagaaaaatcactcaaacatcatgaagatattgtagatgaaattgagtgcattgagaagactcttctgaaacgtcgctcagagctcagggaagctgaccgactcctggcagaggctgagagtgaactttcatgcactaaagaaaagacaaaaaatgctgttgaaaagttcactgatgccaagagaagtttattgcaaactgagtcagatgctgaggaattagaaaggagagctcaggaaactgctgttaacctcgtcaaagctgatcagcagctaagatcgctccaggctgatgcaaaggatttggagcagcacaaaatcaagcaagaagaaatcttgaaagaaataaacaaaattgtagcagcaaaagactcagacttccaatgtttaagcaagaagaaggaaaaactgacagaagagcttcagaaactacagaaagacatagagatggcagaacgcaatgaggatcaccacctgcaggtccttaaagaatctgaggtgcttcttcaggccaaaagagccgagctggaaaagctgaaaagccaggtgacaagtcagcagcaggagatggctgtcttggacaggcagttagggcataaaaaggaggagctgcatctactccaaggaagcatggtccaggcaaaagctgacctccaggaagctctgagactgggagagactgaagtaactgagaagtgcaatcacattagggaagtaaaatctcttctggaagaactgagttttcagaaaggagaactaaatgttcagattagtgaaagaaaaactcaacttacacttataaagcaggaaattg

SEQ ID NO: 116315 - DNA, 2418 bp, Homo sapiens
  Payload ID: 2694
  Gene Symbol: CNTRL
  Gene Name: centriolin
  Uniprot ID: Q7Z7A1
  ENST ID: ENST00000613863
  CDS Start-End: 549-1997
tagaaaggagagctcaggaaactgctgttaacctcgtcaaagctgatcagcagctaagatcgctccaggctgatgcaaaggatttggagcagcacaaaatcaagcaagaagaaatcttgaaagaaataaacaaaattgtagcagcaaaagactcagacttccaatgtttaagcaagaagaaggaaaaactgacagaagagcttcagaaactacagaaagacatagagatggcagttagggcataaaaaggaggagctgcatctactccaaggaagcatggtccaggcaaaagctgacctccaggaagctctgagactgggagagactgaagtaactgagaagtgcaatcacattagggaagtaaaatctcttctggaagaactgagttttcagaaaggagaactaaatgttcagattagtgaaagaaaaactcaacttacacttataaagcaggaaattgaaaaagaggaagaaaatcttcaggttgttttaaggcagatgtctaaacataaaaccgggttttagcagcagcagaagaaaatagcaaaatggagcaatcaaacttagaaaagttggaattgaatgtcagaaaactgcagcaggaactagaccaactaaacagagacaagttgtcactgcataacgacatttcagcaatgcaacagcagctccaagaaaaacgagaagcagtaaactcactgcaggaggaactagctaatgtccaagaccatttgaacctagcaaaacaggacctgcttcacaccaccaagcatcaggatgtgttgctcagtgagcagacccgactccagaaggacatcagtgaatgggcaaataggtttgaagactgtcagaaagaagaggagacaaaacaacaacaacttcaagtgcttcagaatgagattgaagaaaacaagctcaaactagtccaacaagaaatgatgtttcagagactccagaaagagagagaaagtgaagaaagcaaactggaccaagtgctctcaaaggtgctggcagctgaagagcgtgttaggactctgcaggaagaggagaggtggtgtgagagcctggagaagacactctcccaaactaaacggcagctttcagaaagggagcagcaattggtggagaaatcaggtgagctgttggccctccagaaagaggcagattctatgagggcagacttcagccttctgcggaaccagttcttgacagaaagaaagaaagctgagaagcaggtggccagcctgaaggaagcacttaagatccagcggagccagctggagaaaaaccttcttgagcaaaaacaggagaacagctgcatacaaaaggaaatggcaacaattgaactggtagcccaggacaaccatgagcgggccaggcgcctgatgaaggagctcaaccagatgcagtatgagtacacggagctcaagaaacagatggcaaaccaaaaagatttggagagaagacaaatggaaatcagtgatgcaatgaggacacttaaatctgaggtgaaggatgaaatcagaaccagcttgaagaatcttaatcagtttcttccagaactaccagcagatctagaagctattttggaaagaaacgaaaacctagaaggagaattggaaagcttgaaagagaaccttccatttaccatgaatgagggaccttttgaagaaaaactgaacttttcccaagttcacataatggatgaacactggcgtggagaagcactccgggagaaactgcgtcaccgggaagaccgactcaaggcccaactccgacactgtatgtccaagcaagcagaagtattaattaaaggaaagcggcagacagagggcactttacacagtttgaggagacaagtagatgctttaggggaattggtcaccagcacctctgcagattcagcgtcatcacccagtctgtctcagctggagtcttccctcacagaggactctcaacttggacaaaatcaggaaaagaatgcctcagccagatgaggaatactgtcttgtgtaaatatattcaaggaaaacacctccactacctcactgacttcataattggaatgtcacatggtttttttaatcaagatgcagtgaactgagattctgaaactccactgtagtttactttgcctgtaccattaatgccaatgtttttataaatcacttgtacatagtacatatgggaatagttgcatatgggaatttaaaccaacatgtggctgagcctttttttttttaatcttcgtaacatgtttaaaaaaaaacagtgattttaactgcatatttgaacctacaaactggtaaatcttattaacaaaaagaatgtacttaaggccctctttatttatagtgtcgagttatttttgaattttgcttaaaatctatttttcatatgaaaataaaagataacaat

SEQ ID NO: 116316 - DNA, 3769 bp, Homo sapiens
  Payload ID: 2695
  Gene Symbol: CNTROB
  Gene Name: centrobin, centrosomal BRCA2 interacting protein
  Uniprot ID: Q8N137
  ENST ID: ENST00000380262
  CDS Start-End: 926-3703
gtggtctcgcgggcgggtgacgtcatcgaggcgagagaggcggagccgtggacagtgggcgggaggctgccaacggttttgagcgtagggggaggcgtgagagggggatctcaggggaggaggtcaatcgcttgccccccactttggcaaattggggactgaggactggaagggtggagagtaggcggaaccaggtggtcgtcggggcagaggatctcgggctaggcttgagggcggcgtgcttcttagggacgacttagggcgtgactgagggttcacaaggtttcttttggggtggtcgggagggagagattctagggaacaaggaagctcgctatggctttcttgccaggaggggtcgaagggaaagtacaagggagctggagctgaccctgggtagaacgggtgaagggatgggggagcgtgaggttccgccctctcttgagactggaaccaattgagggactagtagggcagggggacagaaattgggctcctagtggatttgggtccgtttccgttgggacgttttgggtgtgagaacttaagagctcagttgaccggggatagcctgtgccggagttgatctgcagcttccagcactcgtagtcgggaagaggagcttcagcagcgctgttgtcccacagtaggtcttctgtccgcacccgctctgcgctgcaccctcttaacgctgttcccaggagctggggaaagggatgcttttgcccactcccatggcccctggaactggtggaaacctttcctctaaccagaaagcctcgatatccttaattcaccaaggatccttggcgtggagtcttcctcccttctcccaagtctttctccgtgaacttttcctcctggactttgctaaagcagaacctcccagctctttgctgtctccggttgtctcttccctgtattcatggcaacatcagctgacagccccagttcacccctcggggcggaggatctcctgagtgattcatcagaaccccctgggctcaaccaagtgtcgtctgaagtgacctcccagctctatgcttctttgcgcctcagccggcaggcggaggccacggcccgagcccagctgtatttaccctccacctccccgcctcatgaagggttagacggcttcgcccaagaattgagtcgaagcttgtcagtcggattggaaaagaacttgaagaaaaaggatggttctaagcatatctttgagatggaaagtgttcggggtcagctccagaccatgctccaaacctcacgtgatacagcctatcgggatcctctcattcctggcgctggctcagagagacgggaagaggactcctttgacagtgatagcacagccaccttgctcaacacccggcccctgcaagacttgtctccatctagctcagcccaagccctggaggagctgtttccccgctacaccagccttcggccagggcctccactcaatcccccagattttcaggggctgagagatgcattggattcagagcatacccgccgcaagcattgtgagcgccatattcagagcctgcagacccgagtgttagagctacagcaacaattagccgtggctgtggctgccgaccgcaagaaagataccatgattgaacaactggacaagaccctggcccgtgtggtggagggctggaaccggcatgaggctgagcggacagaggttctcaggggacttcaagaggaacaccaggcagcagagctcaccagaagcaagcagcaggagacagtaacccgcctggaacaaagcctttctgaggccatggaggccctgaatcgtgagcaggaaagtgccagactgcagcaacgggaaagagagacactggaggaggaaaggcaagctctgactctgaggttggaggcagaacagcagcggtgctgtgtcctgcaggaagagcgggatgcagctcgggctgggcaactgagtgagcatcgagagttggagactcttcgggctgccctagaagaagaacggcagacctgggcccagcaagagcaccagcttaaggaacactaccaggcgctgcaggaggagagccaggctcagctggaaagggagaaggagaagagccagagggaagcccaggccgcctgggagacccagcaccagttggcattggtgcagtctgaggtgcggcggctggaaggagagctggatacagctcggagagagagagatgccctgcagctggaaatgagcttggtgcaggcccggtatgaaagccagcggatccagctggagtcggagctggctgtgcagctggagcagcgggtgacagagcggctggcgcaggctcaggagagcagcctacggcaagcagcctccctcagggaacatcacaggaagcagctgcaggacctgagtggacagcaccagcaggagctggccagtcagctagctcagttcaaggtggaaatggcagaacgagaggaacggcaacagcaggtggctgaggactacgagctcagactggcccgggagcaagcgcgagtgtgcgaactgcagagtgggaaccagcagctggaggagcagcgggtggagctggtggaaagactgcaggccatgctgcaggcccactgggatgaggccaaccagctgctcagcaccactctcccgccgcccaaccctccagctcctcctgctggaccctccagccccgggcctcaggagcccgagaaggaggagaggagggtctggactatgcctcccatggccgtggccctgaagcctgtattgcagcagagccgggaagcaagggacgagctacctggagcgcctcctgttctttgcagttcctcctcagatcttagcctcctgttgggcccctcttttcagagccagcattctttccagcccctggagcccaaaccagacctcacttcatccacagctggggccttctctgcacttggggccttccatcccgatcatagggcagaaaggccattccctgaggaagatcctggacctgacggggagggcctcctaaagcaagggctgccgcctgctcagctggagggcctcaagaattttttgcaccagttgctggagacagtgccccagaacaatgagaacccttctgtcgacctgttgccccctaagtctggtcctctgactgtcccatcttgggaggaagcccctcaagtgccacgtattccaccgcctgtccacaaaaccaaagttcccttagccatggcatccagtcttttccgggtccctgagcctccctcctcccattcacaaggcagtggtcccagcagtggttccccagagagaggtggagatgggcttacattcccaaggcagctgatggaggtgtctcaactgttgcgactctaccaggctcggggctggggggctctgcctgctgaggatctcctgctctacctgaagaggctggaacacagcgggtacaagcctgggaggaaggaggaaggattctccgggtggaagctggattatggggagtggagtgggactgatggccgaggggataatgtccccagaaggaacacagactcccgcttgggtgagatcccccggaaagagattccctcccaggctgtccctcgccgccttgctacagcccccaagactgaaaaacctcccgcacggaagaaaagtgggcaccctgccccgagtagcatgaggagccgggggggagtctggagatgagcccccctaccctctctcctctttgttctctcattgttgttattttaataaatgctcattagtctg

SEQ ID NO: 116317 - DNA, 2783 bp, Homo sapiens
  Payload ID: 2695
  Gene Symbol: CNTROB
  Gene Name: centrobin, centrosomal BRCA2 interacting protein
  Uniprot ID: Q8N137
  ENST ID: ENST00000565740
  CDS Start-End: 1-2715
atggcaacatcagctgacagccccagttcacccctcggggcggaggatctcctgagtgattcatcagaaccccctgggctcaaccaagtgtcgtctgaagtgacctcccagctctatgcttctttgcgcctcagccggcaggcggaggccacggcccgagcccagctgtatttaccctccacctccccgcctcatgaagggttagacggcttcgcccaagaattgagtcgaagcttgtcagtcggattggaaaagaacttgaagaaaaaggatggttctaagcatatctttgagatggaaagtgttcggggtcagctccagaccatgctccaaacctcacgtgatacagcctatcgggatcctctcattcctggcgctggctcagagagacgggaagaggactcctttgacagtgatagcacagccaccttgctcaacacccggcccctgcaagacttgtctccatctagctcagcccaagccctggaggagctgtttccccgctacaccagccttcggccagggcctccactcaatcccccagattttcaggggctgagagatgcattggattcagagcatacccgccgcaagcattgtgagcgccatattcagagcctgcagacccgagtgttagagctacagcaacaattagccgtggctgtggctgccgaccgcaagaaagataccatgattgaacaactggacaagaccctggcccgtgtggtggagggctggaaccggcatgaggctgagcggacagaggttctcaggggacttcaagaggaacaccaggcagcagagctcaccagaagcaagcagcaggagacagtaacccgcctggaacaaagcctttctgaggccatggaggccctgaatcgtgagcaggaaagtgccagactgcagcaacgggaaagagagacactggaggaggaaaggcaagctctgactctgaggttggaggcagaacagcagcggtgctgtgtcctgcaggaagagcgggatgcagctcgggctgggcaactgagtgagcatcgagagttggagactcttcgggctgccctagaagaagaacggcagacctgggcccagcaagagcaccagcttaaggaacactaccaggcgctgcaggaggagagccaggctcagctggaaagggagaaggagaagagccagagggaagcccaggccgcctgggagacccagcaccagttggcattggtgcagtctgaggtgcggcggctggaaggagagctggatacagctcggagagagagagatgccctgcagctggaaatgagcttggtgcaggcccggtatgaaagccagcggatccagctggagtcggagctggctgtgcagctggagcagcgggtgacagagcggctggcgcaggctcaggagagcagcctacggcaagcagcctccctcagggaacatcacaggaagcagctgcaggacctgagtggacagcaccagcaggagctggccagtcagctagctcagttcaaggtggaaatggcagaacgagaggaacggcaacagcaggtggctgaggactacgagctcagactggcccgggagcaagcgcgagtgtgcgaactgcagagtgggaaccagcagctggaggagcagcgggtggagctggtggaaagactgcaggccatgctgcaggcccactgggatgaggccaaccagctgctcagcaccactctcccgccgcccaaccctccagctcctcctgctggaccctccagccccgggcctcaggagcccgagaaggaggagaggagggtctggactatgcctcccatggccgtggccctgaagcctgtattgcagcagagccgggaagcaagggacgagctacctggagcgcctcctgttctttgcagttcctcctcagatcttagcctcctgttgggcccctcttttcagagccagcattctttccagcccctggagcccaaaccagacctcacttcatccacagctggggccttctctgcacttggggccttccatcccgatcatagggcagaaaggccattccctgaggaagatcctggacctgacggggagggcctcctaaagcaagggctgccgcctgctcagctggagggcctcaagaattttttgcaccagttgctggagacagtgccccagaacaatgagaacccttctgtcgacctgttgccccctaagtctggtcctctgactgtcccatcttgggaggaagcccctcaagtgccacgtattccaccgcctgtccacaaaaccaaagttcccttagccatggcatccagtcttttccgggtccctgagcctccctcctcccattcacaaggcagtggtcccagcagtggttccccagagagaggtggagatgggcttacattcccaaggcagctgatggaggtgtctcaactgttgcgactctaccaggctcggggctggggggctctgcctgctgaggatctcctgctctacctgaagaggctggaacacagcggcaggactgatggccgaggggataatgtccccagaaggaacacagactcccgcttgggtgagatcccccggaaagagattccctcccaggctgtccctcgccgccttgctacagcccccaagactgaaaaacctcccgcacggaagaaaagtgggcaccctgccccgagtagcatgaggagccgggggggagtctggagatgagcccccctaccctctctcctctttgttctctcattgttgttattttaataaatgctcattagtctgta

SEQ ID NO: 116318 - DNA, 3705 bp, Homo sapiens
  Payload ID: 2695
  Gene Symbol: CNTROB
  Gene Name: centrobin, centrosomal BRCA2 interacting protein
  Uniprot ID: Q8N137
  ENST ID: ENST00000563694
  CDS Start-End: 926-3637
gtggtctcgcgggcgggtgacgtcatcgaggcgagagaggcggagccgtggacagtgggcgggaggctgccaacggttttgagcgtagggggaggcgtgagagggggatctcaggggaggaggtcaatcgcttgccccccactttggcaaattggggactgaggactggaagggtggagagtaggcggaaccaggtggtcgtcggggcagaggatctcgggctaggcttgagggcggcgtgcttcttagggacgacttagggcgtgactgagggttcacaaggtttcttttggggtggtcgggagggagagattctagggaacaaggaagctcgctatggctttcttgccaggaggggtcgaagggaaagtacaagggagctggagctgaccctgggtagaacgggtgaagggatgggggagcgtgaggttccgccctctcttgagactggaaccaattgagggactagtagggcagggggacagaaattgggctcctagtggatttgggtccgtttccgttgggacgttttgggtgtgagaacttaagagctcagttgaccggggatagcctgtgccggagttgatctgcagcttccagcactcgtagtcgggaagaggagcttcagcagcgctgttgtcccacagtaggtcttctgtccgcacccgctctgcgctgcaccctcttaacgctgttcccaggagctggggaaagggatgcttttgcccactcccatggcccctggaactggtggaaacctttcctctaaccagaaagcctcgatatccttaattcaccaaggatccttggcgtggagtcttcctcccttctcccaagtctttctccgtgaacttttcctcctggactttgctaaagcagaacctcccagctctttgctgtctccggttgtctcttccctgtattcatggcaacatcagctgacagccccagttcacccctcggggcggaggatctcctgagtgattcatcagaaccccctgggctcaaccaagtgtcgtctgaagtgacctcccagctctatgcttctttgcgcctcagccggcaggcggaggccacggcccgagcccagctgtatttaccctccacctccccgcctcatgaagggttagacggcttcgcccaagaattgagtcgaagcttgtcagtcggattggaaaagaacttgaagaaaaaggatggttctaagcatatctttgagatggaaagtgttcggggtcagctccagaccatgctccaaacctcacgtgatacagcctatcgggatcctctcattcctggcgctggctcagagagacgggaagaggactcctttgacagtgatagcacagccaccttgctcaacacccggcccctgcaagacttgtctccatctagctcagcccaagccctggaggagctgtttccccgctacaccagccttcggccagggcctccactcaatcccccagattttcaggggctgagagatgcattggattcagagcatacccgccgcaagcattgtgagcgccatattcagagcctgcagacccgagtgttagagctacagcaacaattagccgtggctgtggctgccgaccgcaagaaagataccatgattgaacaactggacaagaccctggcccgtgtggtggagggctggaaccggcatgaggctgagcggacagaggttctcaggggacttcaagaggaacaccaggcagcagagctcaccagaagcaagcagcaggagacagtaacccgcctggaacaaagcctttctgaggccatggaggccctgaatcgtgagcaggaaagtgccagactgcagcaacgggaaagagagacactggaggaggaaaggcaagctctgactctgaggttggaggcagaacagcagcggtgctgtgtcctgcaggaagagcgggatgcagctcgggctgggcaactgagtgagcatcgagagttggagactcttcgggctgccctagaagaagaacggcagacctgggcccagcaagagcaccagcttaaggaacactaccaggcgctgcaggaggagagccaggctcagctggaaagggagaaggagaagagccagagggaagcccaggccgcctgggagacccagcaccagttggcattggtgcagtctgaggtgcggcggctggaaggagagctggatacagctcggagagagagagatgccctgcagctggaaatgagcttggtgcaggcccggtatgaaagccagcggatccagctggagtcggagctggctgtgcagctggagcagcgggtgacagagcggctggcgcaggctcaggagagcagcctacggcaagcagcctccctcagggaacatcacaggaagcagctgcaggacctgagtggacagcaccagcaggagctggccagtcagctagctcagttcaaggtggaaatggcagaacgagaggaacggcaacagcaggtggctgaggactacgagctcagactggcccgggagcaagcgcgagtgtgcgaactgcagagtgggaaccagcagctggaggagcagcgggtggagctggtggaaagactgcaggccatgctgcaggcccactgggatgaggccaaccagctgctcagcaccactctcccgccgcccaaccctccagctcctcctgctggaccctccagccccgggcctcaggagcccgagaaggaggagaggagggtctggactatgcctcccatggccgtggccctgaagcctgtattgcagcagagccgggaagcaagggacgagctacctggagcgcctcctgttctttgcagttcctcctcagatcttagcctcctgttgggcccctcttttcagagccagcattctttccagcccctggagcccaaaccagacctcacttcatccacagctggggccttctctgcacttggggccttccatcccgatcatagggcagaaaggccattccctgaggaagatcctggacctgacggggagggcctcctaaagcaagggctgccgcctgctcagctggagggcctcaagaattttttgcaccagttgctggagacagtgccccagaacaatgagaacccttctgtcgacctgttgccccctaagtctggtcctctgactgtcccatcttgggaggaagcccctcaagtgccacgtattccaccgcctgtccacaaaaccaaagttcccttagccatggcatccagtcttttccgggtccctgagcctccctcctcccattcacaaggcagtggtcccagcagtggttccccagagagaggtggagatgggcttacattcccaaggcagctgatggaggtgtctcaactgttgcgactctaccaggctcggggctggggggctctgcctgctgaggatctcctgctctacctgaagaggctggaacacagcgggactgatggccgaggggataatgtccccagaaggaacacagactcccgcttgggtgagatcccccggaaagagattccctcccaggctgtccctcgccgccttgctacagcccccaagactgaaaaacctcccgcacggaagaaaagtgggcaccctgccccgagtagcatgaggagccgggggggagtctggagatgagcccccctaccctctctcctctttgttctctcattgttgttattttaataaatgctcattagtctgta

SEQ ID NO: 116319 - DNA, 561 bp, Homo sapiens
  Payload ID: 2695
  Gene Symbol: CNTROB
  Gene Name: centrobin, centrosomal BRCA2 interacting protein
  ENST ID: ENST00000576536
  CDS Start-End: 1-561
ccattccctgaggaagatcctggacctgacggggagggcctcctaaagcaagggctgccgcctgctcagctggagggcctcaagaattttttgcaccagttgctggagacagtgccccagaacaatgagaacccttctgtcgacctgttgccccctaagtctggtcctctgactgtcccatcttgggaggaagcccctcaagtgccacgtattccaccgcctgtccacaaaaccaaagttcccttagccatggcatccagtcttttccgggtccctgagcctccctcctcccattcacaaggcagtggtcccagcagtggttccccagagagaggtggagatgggcttacattcccaaggcagctgatggaggtgtctcaactgttgcgactctaccaggctcggggctggggggctctgcctgctgaggatctcctgctctacctgaagaggctggaacacagcgggactgatggccgaggggataatgtccccagaaggaacacagactcccgcttggattccctcccaggctgtccctcgccgccttgctacagcccc

SEQ ID NO: 116320 - DNA, 1209 bp, Homo sapiens
  Payload ID: 2695
  Gene Symbol: CNTROB
  Gene Name: centrobin, centrosomal BRCA2 interacting protein
  ENST ID: ENST00000571540
  CDS Start-End: 1-728
gggcggaggatctcctgagtgattcatcagaaccccctgggctcaaccaagtgtcgtctgaagtgacctcccagctctatgcttctttgcgcctcagccggcaggcggaggccacggcccgagcccagctgtatttaccctccacctccccgcctcatgaagggttagacggcttcgcccaagaattgagtcgaagcttgtcagtcggattggaaaagaacttgaagaaaaaggatggttctaagcatatctttgagatggaaagtgttcggggtcagctccagaccatgctccaaacctcacgtgatacagcctatcgggatcctctcattcctggcgctggctcagagagacgggaagaggactcctttgacagtgatagcacagccaccttgctcaacacccggcccctgcaagacttgtctccatctagctcagcccaagccctggaggagctgtttccccgctacaccagccttcggccagggcctccactcaatcccccagattttcaggggctgagagatgcattggattcagagcatacccgccgcaagacctattctgttcttgggacccaagcttcttggctccagcccactcccccactagaggagctggaaagtttggtgctgtggtcataccaaagatgggcaacacccagactcctcacccttttccccagcattgtgagcgccatattcagagcctgcagacccgagtgttagagctacagcaacaattagccgtggctgtggctgccgaccgcaagaaagataccatgattgaacaactggacaagaccctggcccgtgtggtggagggctggaaccggcatgaggctgagcggacagaggttctcaggggacttcaagaggaacaccaggcagcagagctcaccagaagcaagcagcaggagacagtaacccgcctggaacaaagcctttctgaggccatggaggccctgaatcgtgagcaggaaagtgccagactgcagcaacgggaaagagagacactggaggaggaaaggcaagctctgactctgaggttggaggcagaacagcagcggtgctgtgtcctgcaggaagagcgggatgcagctcgggctgggcaactgagtgagcatcgagagttggagactcttcgggctgccctagaagaagaacggcagacctgggcccagcaagagcaccagcttaaggaacacta

SEQ ID NO: 116321 - DNA, 917 bp, Homo sapiens
  Payload ID: 2695
  Gene Symbol: CNTROB
  Gene Name: centrobin, centrosomal BRCA2 interacting protein
  ENST ID: ENST00000575408
  CDS Start-End: 320-917
gtcgggaagaggagcttcagcagcgctgttgtcccacactgacagccccagttcacccctcggggcggaggatctcctgagtgattcatcagaaccccctgggctcaaccaagtgtcgtctgaagtgacctcccagctctatgcttctttgcgcctcagccggcaggcggaggccacggcccgagcccagctgtatttaccctccacctccccgcctcatgaagggttagacggcttcgcccaagaattgagtcgaagcttgtcagtcggattggaaaagaacttgaagaaaaaggatggttctaagcatatctttgagatggaaagtgttcggggtcagctccagaccatgctccaaacctcacgtgatacagcctatcgggatcctctcattcctggcgctggctcagagagacgggaagaggactcctttgacagtgatagcacagccaccttgctcaacacccggcccctgcaagacttgtctccatctagctcagcccaagccctggaggagctgtttccccgctacaccagccttcggccagggcctccactcaatcccccagattttcaggggctgagagatgcattggattcagagcatacccgccgcaagcattgtgagcgccatattcagagcctgcagacccgagtgttagagctacagcaacaattagccgtggctgtggctgccgaccgcaagaaagataccatgattgaacaactggacaagaccctggcccgtgtggtggagggctggaaccggcatgaggctgagcggacagaggttctcaggggacttcaagaggaacaccaggcagcagagctcaccagaagcaagcagcaggagacagtaacccgcctggaacaaagcctttctgaggccatggaggccctgaatcgtgagcaggaaa

SEQ ID NO: 116322 - DNA, 2960 bp, Homo sapiens
  Payload ID: 2695
  Gene Symbol: CNTROB
  Gene Name: centrobin, centrosomal BRCA2 interacting protein
  ENST ID: ENST00000571632
  CDS Start-End: 1-79
cacagccaccttgctcaaaatatcacagttggacaagtggattccaaaagctttcccagccctaacattctctacctgatttgctcagcacccggcccctgcaagacttgtctccatctagctcagcccaagccctggaggagctgtttccccgctacaccagccttcggccagggcctccactcaatcccccagattttcaggggctgagagatgcattggattcagagcatacccgccgcaagcattgtgagcgccatattcagagcctgcagacccgagtgttagagctacagcaacaattagccgtggctgtggctgccgaccgcaagaaagataccatgattgaacaactggacaagaccctggcccgtgtggtggagggctggaaccggcatgaggctgagcggacagaggttctcaggggacttcaagaggaacaccaggcagcagagctcaccagaagcaagcagcaggagacagtaacccgcctggaacaaagcctttctgaggccatggaggccctgaatcgtgagcaggaaagtgccagactgcagcaacgggaaagagagacactggaggaggaaaggcaagctctgactctgaggttggaggcagaacagcagcggtgctgtgtcctgcaggaagagcgggatgcagctcgggctgggcaactgagtgagcatcgagagttggagactcttcgggctgccctagaagaagaacggcagacctgggcccagcaagagcaccagcttaaggaacactaccaggcgctgcaggaggagagccaggctcagctggaaagggagaaggagaagagccagagggaagcccaggccgcctgggagacccagcaccagttggcattggtgcagtctgaggtgcggcggctggaaggagagctggatacagctcggagagagagagatgccctgcagctggaaatgagcttggtgcaggcccggtatgaaagccagcggatccagctggagtcggagctggctgtgcagctggagcagcgggtgacagagcggctggcgcaggctcaggagagcagcctacggcaagcagcctccctcagggaacatcacaggaagcagctgcaggacctgagtggacagcaccagcaggagctggccagtcagctagctcagttcaaggtggaaatggcagaacgagaggaacggcaacagcaggtggctgaggactacgagctcaggctcctcctgctggaccctccagccccgggcctcaggagcccgagaaggaggagaggagggtctggactatgcctcccatggccgtggccctgaagcctgtattgcagcagagccgggaagcaagggacgagctacctggagcgcctcctgttctttgcagttcctcctcagatcttagcctcctgttgggcccctcttttcagagccagcattctttccagcccctggagcccaaaccagacctcacttcatccacagctggggccttctctgcacttggggccttccatcccgatcatagggcagaaaggccattccctgaggaagatcctggacctgacggggagggcctcctaaagcaagggctgccgcctgctcagctggagggcctcaagaattttttgcaccagttgctggagacagtgccccagaacaatgagaacccttctgtcgacctgttgccccctaagtctggtcctctgactgtcccatcttgggaggaagcccctcaagtgccacgtattccaccgcctgtccacaaaaccaaagttcccttagccatggcatccagtcttttccgggtccctgagcctccctcctcccattcacaaggcagtggtcccagcagtggttccccagagagaggtggagatgggcttacattcccaaggcagctgatggaggtgtctcaactgttgcgactctaccaggctcggggctggggggctctgcctgctgaggatctcctgctctacctgaagaggctggaacacagcgggtacaagcctgggaggaaggaggaaggattctccgggtggaagctggattatggggagtggagtgggtgtgttttacactgaattgaatcgttgtccttttctggggaggaaagtgaaggatgagaggtggatccacagatcttctctaactgccccacacttttcttttatctcctcctttctattgcttttttcttctaaacaaaaaaatcttttccccgggtctctctaccttcgtttttttcctctttacccctcagctcaaaactcagaatcctagacttttgactagctagtgtaactcgttatttacttccactaatgtctcctcccagttgatgcccaggtctatcgagtttgatcttattcttaagagatagaattggggagtagttcttccatccagtattgggtaaccggggggacggagatccccatcctcatacctttgatttgtgtagcaggactgatggccgaggggataatgtccccagaaggaacacagactcccgcttgggtgagatcccccggaaagaggtgagggaaagtcaggcagggaccaggggagaaaagggctctcactgaccagctccttcacctctgcacactcctggctggcccctccattccacccctgcattctgtagcatggcctttcctccctgcagactcatctggccctctccacgtgcatttcctcagtggggtggggaattgagaggatctgacgctgatttcttcctctctcttccctcaactctcagattccctcccaggctgtccctcgccgccttgctacagcccccaagactgaaaaacctcccgcacggaagaaaagtgggcaccctgccccgagtagcatgaggagccgggggggagtctggagatgagcccccctaccctctctcctctttgttctctcattgttgttattttaataaatgctcattagtctgta

SEQ ID NO: 116323 - DNA, 784 bp, Homo sapiens
  Payload ID: 2695
  Gene Symbol: CNTROB
  Gene Name: centrobin, centrosomal BRCA2 interacting protein
  ENST ID: ENST00000576538
  CDS Start-End: 191-784
gcgcacgcgcggccaggcgctcgggatacagaagtgataaagcctcgatatccttaattcaccaaggatccttggcgtggagtcttcctcccttctcccaagtctttctccgtgaacttttcctcctggactttgctaaagcagaacctcccagctctttgctgtctccggttgtctcttccctgtattcatggcaacatcagctgacagccccagttcacccctcggggcggaggatctcctgagtgattcatcagaaccccctgggctcaaccaagtgtcgtctgaagtgacctcccagctctatgcttctttgcgcctcagccggcaggcggaggccacggcccgagcccagctgtatttaccctccacctccccgcctcatgaagggttagacggcttcgcccaagaattgagtcgaagcttgtcagtcggattggaaaagaacttgaagaaaaaggatggttctaagcatatctttgagatggaaagtgttcggggtcagctccagaccatgctccaaacctcacgtgatacagcctatcgggatcctctcattcctggcgctggctcagagagacgggaagaggactcctttgacagtgatagcacagccaccttgctcaacacccggcccctgcaagacttgtctccatctagctcagcccaagccctggaggagctgtttccccgctacaccagccttcggccagggcctccactcaatcccccagattttcaggggctgagagatgcattggattcagagcatacccgccgcaag

SEQ ID NO: 116324 - DNA, 752 bp, Homo sapiens
  Payload ID: 2695
  Gene Symbol: CNTROB
  Gene Name: centrobin, centrosomal BRCA2 interacting protein
  ENST ID: ENST00000570782
  CDS Start-End: 712-752
gggggaggcgtgagagggggatctcaggggaggaggtcaatcgcttgccccccactttggcaaattggggactgaggactggaagggtggagagtaggcggaaccaggtggtcgtcggggcagaggatctcgggctaggcttgagggcggcgtgcttcttagggacgacttagggcgtgactgagggttcacaaggtttcttttggggtggtcgggagggagagattctagggaacaaggaagctcgctatggctttcttgccaggaggggtcgaagggaaagtacaagggagctggagctgaccctgggtagaacgggtgaagggatgggggagcgtgaggttccgccctctcttgagactggaaccaattgagggactagtagggcagggggacagaaattgggctcctagtggatttgggtccgtttccgttgggacgttttgggtgtgagaacttaagagctcagttgaccggggatagcctgtgccggagttgatctgcagcttccagcactcgtagtcgggaagaggagcttcagcagcgctgttgtcccacaaaagcctcgatatccttaattcaccaaggatccttggcgtggagtcttcctcccttctcccaagtctttctccgtgaacttttcctcctggactttgctaaagcagaacctcccagctctttgctgtctccggttgtctcttccctgtattcatggcaacatcagctgacagccccagttcacccctcggggc

SEQ ID NO: 116325 - DNA, 695 bp, Homo sapiens
  Payload ID: 2695
  Gene Symbol: CNTROB
  Gene Name: centrobin, centrosomal BRCA2 interacting protein
  ENST ID: ENST00000570784
  CDS Start-End: 465-695
gagagattctagggaacaaggaagctcgctatggctttcttgccaggaggggtcgaagggaaagtacaagggagctggagctgaccctgggtagaacgggtgaagggatgggggagcgtgaggttccgccctctcttgagactggaaccaattgagggactagtagggcagggggacagaaattgggctcctagtggatttgggtccgtttccgttgggacgttttgggtgtgagaacttaagagctcagttgaccggggatagcctgtgccggagttgatctgcagcttccagcactcgtagtcgggaagaggagcttcagcagcgctgttgtcccacagatccttggcgtggagtcttcctcccttctcccaagtctttctccgtgaacttttcctcctggactttgctaaagcagaacctcccagctctttgctgtctccggttgtctcttccctgtattcatggcaacatcagctgacagccccagttcacccctcggggcggaggatctcctgagtgattcatcagaaccccctgggctcaaccaagtgtcgtctgaagtgacctcccagctctatgcttctttgcgcctcagccggcaggcggaggccacggcccgagcccagctgtatttaccctccacctccccgcctcatgaagggttagacggcttcgcccaagaattgagtcga

SEQ ID NO: 116326 - DNA, 1299 bp, Homo sapiens
  Payload ID: 2696
  Gene Symbol: CENPA
  Gene Name: centromere protein A
  Uniprot ID: P49450
  ENST ID: ENST00000233505
  CDS Start-End: 130-474
agcaccggctcatgtgaggctcgcggcacagcgttctctgggctccccagaagccagcctttcgctcccggacccggcagcccgagcaggagccgtgggaccgggcgccagcaccctctgcggcgtgtcatgggcccgcgccgccggagccgaaagcccgaggccccgaggaggcgcagcccgagcccgaccccgacccccggcccctcccggcggggcccctccttaggcgcttcctcccatcaacacagtcggcggagacaaggttggctaaaggagatccgaaagcttcagaagagcacacacctcttgataaggaagctgcccttcagccgcctggcagcagaagcatttctagttcatctctttgaggacgcctatctcctcaccttacatgcaggccgagttactctcttcccaaaggatgtgcaactggcccggaggatccggggccttgaggagggactcggctgagctcctgcacccagtgtttctgtcagtctttcctgctcagccaggggggatgataccggggactctccagagccatgactagatccaatggattctgcgatgctgtctggactttgctgtctctgaacagtatgtgtgtgttgctttaaatatttttcttttttttgagaaggagaagactgcatgactttcctctgtaacagaggtaatatatgagacaatcaacaccgttccaaaggcctgaaaataattttcagataaagagactccaaggttgactttagtttgtgagttactcatgtgactatttgaggattttgaaaacatcagatttgctgtggtatgggagaaaaggctatgtacttattattttagctctttctgtaatatttacattttttaccatatgtacatttgtacttttattttacacataagggaaaaaataagaccactttgagcagttgcctggaaggctgggcatttccatcatatagacctctgcccttcagagtagcctcaccattagtggcagcatcatgtaactgagtggactgtgcttgtcaacggatgtgtagcttttcagaaacttaattggggatgaatagaaaacctgtaagctttgatgttctggttacttctagtaaattcctgtcaaaatcaattcagaaattctaacttggagaatttaacattttactcttgtaaatcatagaagatgtatcataacagttcagaattttaaagtacattttcgatgcttttatgggtatttttgtagtttctttgtagagagataataaaaatcaaaatatttaatgaaaa

SEQ ID NO: 116327 - DNA, 1452 bp, Homo sapiens
  Payload ID: 2696
  Gene Symbol: CENPA
  Gene Name: centromere protein A
  Uniprot ID: P49450
  ENST ID: ENST00000335756
  CDS Start-End: 201-623
gttttaaaaaacgccggccgtgaagtgggcggagcgagcgatttgaacgcgagcggcgcggacttctgccaagcaccggctcatgtgaggctcgcggcacagcgttctctgggctccccagaagccagcctttcgctcccggacccggcagcccgagcaggagccgtgggaccgggcgccagcaccctctgcggcgtgtcatgggcccgcgccgccggagccgaaagcccgaggccccgaggaggcgcagcccgagcccgaccccgacccccggcccctcccggcggggcccctccttaggcgcttcctcccatcaacacagtcggcggagacaaggttggctaaaggagatccgaaagcttcagaagagcacacacctcttgataaggaagctgcccttcagccgcctggcaagagaaatatgtgttaaattcactcgtggtgtggacttcaattggcaagcccaggccctattggccctacaagaggcagcagaagcatttctagttcatctctttgaggacgcctatctcctcaccttacatgcaggccgagttactctcttcccaaaggatgtgcaactggcccggaggatccggggccttgaggagggactcggctgagctcctgcacccagtgtttctgtcagtctttcctgctcagccaggggggatgataccggggactctccagagccatgactagatccaatggattctgcgatgctgtctggactttgctgtctctgaacagtatgtgtgtgttgctttaaatatttttcttttttttgagaaggagaagactgcatgactttcctctgtaacagaggtaatatatgagacaatcaacaccgttccaaaggcctgaaaataattttcagataaagagactccaaggttgactttagtttgtgagttactcatgtgactatttgaggattttgaaaacatcagatttgctgtggtatgggagaaaaggctatgtacttattattttagctctttctgtaatatttacattttttaccatatgtacatttgtacttttattttacacataagggaaaaaataagaccactttgagcagttgcctggaaggctgggcatttccatcatatagacctctgcccttcagagtagcctcaccattagtggcagcatcatgtaactgagtggactgtgcttgtcaacggatgtgtagcttttcagaaacttaattggggatgaatagaaaacctgtaagctttgatgttctggttacttctagtaaattcctgtcaaaatcaattcagaaattctaacttggagaatttaacattttactcttgtaaatcatagaagatgtatcataacagttcagaattttaaagtacattttcgatgcttttatgggtatttttgtagtttctttgtagagagataataaaaatcaaaatatttaatgaaaatgga

SEQ ID NO: 116328 - DNA, 950 bp, Homo sapiens
  Payload ID: 2696
  Gene Symbol: CENPA
  Gene Name: centromere protein A
  ENST ID: ENST00000419525
  CDS Start-End: 96-356
tctctgggctccccagaagccagcctttcgctcccggacccggcagcccgagcaggagccgtgggaccgggcgccagcaccctctgcggcgtgtcatgggcccgcgccgccggagccgaaagcccgaggccccgaggaggcgcagcccgagcccgaccccgacccccggcccctcccggcggggcccctccttaggcgcttcctcccatcaacacagtcggcggagacaaggttggctaaaggagatccgaaagcttcagaagagcacacacctcttgataaggaagctgcccttcagccgcctgatcccttttcctatcctgggagattgcctctcatcacccaattactggtgatttccccatcaccagtaagagatccgccagttcctaagctcccaggagtcaacacctgctcctaattgggtcctaagattaagagccaggaaaaaataatggaaaggaagattcactggaactcatggagagcatcattgtcccttgaatctctcttctgttactccctactcctactcctccccttccccactccttcacaggcaagagaaatatgtgttaaattcactcgtggtgtggacttcaattggcaagcccaggccctattggccctacaagaggcagcagaagcatttctagttcatctctttgaggacgcctatctcctcaccttacatgcaggccgagttactctcttcccaaaggatgtgcaactggcccggaggatccggggccttgaggagggactcggctgagctcctgcacccagtgtttctgtcagtctttcctgctcagccaggggggatgataccggggactctccagagccatgactagatccaatggattctgcgatgctgtctggactttgctgtctctgaacagtatgtgtgtgttgctttaaatatttttcttttttttgagaaggagaag

SEQ ID NO: 116329 - DNA, 2840 bp, Homo sapiens
  Payload ID: 2697
  Gene Symbol: CENPB
  Gene Name: centromere protein B, 80kDa
  Uniprot ID: P07199
  ENST ID: ENST00000379751
  CDS Start-End: 208-2007
gcccgccgcccggcgacgcgcccgccggcgtccccggaggtgcccccggcccggccgggtcgtcgccccgccgccgcgcccgcgagccgctttgtctcgggcggggcgcgcgggagaggccgccaggtgccccccgccacgggcccgggccccccgccccggggcggcggcggcggcgccgggccccggggcggggggcgcgccgggatgggccccaagaggcgacagctgacgttccgggagaagtcacggatcatccaggaggtggaggagaatccggacctgcgcaagggcgagatcgcgcggcgcttcaacatcccgccgtccacgctgagcacgatcctgaagaacaagcgcgccatcctggcgtcggagcgcaagtacggggtggcctccacctgccgcaagaccaacaagctgtctccctacgacaagctcgagggcttgctcatcgcctggttccagcagatccgcgccgccggcctgccggtcaagggcatcatcctcaaggagaaggcgctgcgcatagccgaggagctgggcatggacgacttcaccgcctccaacggctggctggaccgcttccgccggcgccacggcgtggtgtcctgcagcggcgtggcccgcgcccgcgcgcgaaacgctgccccccgcaccccggcggcgcctgccagtccggccgcggtgccctcggagggcagtggcgggagcactactggttggcgcgctcgggaggagcagccgccgtcggtggccgagggctacgcctcgcaggacgtgttcagcgccaccgagaccagtctatggtacgacttcctgcccgaccaggccgcggggctgtgcggaggcgacggacggccgcgtcaagccacccagcgcctgagcgtcctgctatgcgccaatgccgacggcagcgagaagctgcccccgctggtggccggcaagtcggccaagccccgcgcaggccaagccggcctgccctgcgactacaccgccaactccaagggtggtgtcaccacccaggccctggccaagtacttgaaggccttggacacccgaatggctgcagagtctcgccgggtcctgctgttggccggccgcttggctgcccagtccttggacacctcgggcctgcggcatgtgcagctggccttcttccctcccggcaccgtgcatccgctggagaggggagtggtccagcaggtgaagggccactaccgccaggccatgctgctcaaggccatggccgcgctagagggccaggatccctcaggcctgcagctgggtctcacggaggccctgcactttgtggctgccgcctggcaggcagtggagccttcggacatagccgcctgctttcgtgaggctggctttgggggtggccctaatgccaccatcaccacttccctcaagagtgagggagaggaagaggaggaggaggaggaagaagaggaggaggaagagggtgaaggagaggaagaggaggaggaaggggaggaggaggaggaggaagggggggaaggagaggaattgggggaggaagaggaggtggaggaggagggtgatgttgatagtgatgaagaagaggaggaagatgaggagagctcctcggagggcttggaggctgaggactgggcccagggagtagtggaggccggtggcagcttcggggcttatggtgcccaggaggaagcccagtgccctactctgcatttcctggaaggtggggaggactctgattcagacagtgaggaagaggacgatgaggaagaggatgatgaagatgaagacgacgatgatgatgaggaggatggtgatgaggtgcctgtacccagctttggggaggccatggcttactttgccatggtcaagaggtacctgacctccttccccattgatgaccgcgtgcagagccacatcctccacttggaacacgatctggttcatgtgaccaggaagaaccacgccaggcaggcgggagttcgaggtcttggacatcaaagctgagtcactggacctagctgtgcccccaacctagattggcagcaccaccccagggcagaggactctctgggcacccgctgtgcatggagccagagtgcagagccccagatcctttagtaatgcttcccctggtcctgcaacaggcccggtcacctcggccgggcccggggctgaggtcagcctcactgcctgcttattgcctctttctcagaatcctctttcctccccatttggccctgggctcaggggaccaggtggggcgggtggggagctgtccggtgctaccacaccgtgccctcagtggactaaccacagcagcagccagggatgggccctggaggttcccggccggagagtgcctctcccctctgccatccacgtcaggtctttggtggggggaccccaaagccattctgggaagggctccagaagaaggtccagcctaggccccctgcaaggctggcagcccccacccccaccccccaggccgccttgagaagcacagtttaactcactgcgggctcctgagcctgcttctgcctgctttccacctccccagtccctttctctggccctgtccatgtgactttggcccttggttttctttccagattggaggtttccaagaggccccccaccgtggaagtaaccaagggcgcttccttgtgggcagctgcaggccccatgcctctcctccctctctggcagggccccatcctgggcagaggggcctggggctgggcccagagtccagccgtccagctgctcctttcccagtttgatttcaataaatctgtccactccccttttgtgggggtgaacgttttaacagccaa

SEQ ID NO: 116330 - DNA, 6940 bp, Homo sapiens
  Payload ID: 2698
  Gene Symbol: CENPC
  Gene Name: centromere protein C
  Uniprot ID: Q03188
  ENST ID: ENST00000273853
  CDS Start-End: 252-3083
atgtgtctccgggttcaaacccaggcacaggccaagcgttcttgtttgttgagggcggagccaatggcgggggagtgttgttagcgcgcgccttccggatcgcagctctcgcggcagtcgcctgagacttaaggttattgcttggccgcggcctggtattccggcgattcgtttcttgctcggcttcctggagctgtggtccgtgtgggcttccacctcagacagttgcgctggctcagcggggccggaacatggctgcgtccggtctggatcatctcaaaaatggctacagaagaagattttgtcgaccttccagggcacgtgacattaacacagagcaaggccagaatgttctggaaatcttacaagactgttttgaagaaaaaagtcttgccaatgattttagtacaaattctacaaaatcagtgcctaattcaacacgcaaaataaaagacacttgtattcagtcaccaagcaaagagtgccagaaatcacatccaaagtcagttccagtttcttcaaagaagaaagaagcctctctacagtttgttgtagaaccaagtgaagccacaaacagatcagttcaggcccatgaagttcatcagaaaattctggcaactgatgttagttccaaaaatacacctgactcgaaaaaaatatcaagtagaaacataaatgatcatcacagtgaagctgatgaagaattttacttatccgttggctcaccttctgttcttttggatgcaaaaacatctgtatcacaaaatgttattccatctagtgcccaaaagagagagacttacacttttgaaaattcagtaaatatgctgccttcaagtacagaggtttcagttaaaaccaaaaaaaggttaaactttgatgataaagttatgttaaagaaaatagaaatagataataaagtatcagatgaagaggataaaacatcggaaggacaagaaagaaaaccatcaggatcatctcagaatagaatacgagattcagaatatgaaattcaacgacaagctaaaaaaagtttttcaacattgtttttagaaacagtaaaacgaaaaagtgaatccagtcccattgttaggcatgcggcaactgctccacctcattcgtgtcctcccgatgatacgaagttgatagaggatgaatttataattgatgagtcggatcaaagttttgccagtagatcttggattacaataccaagaaaggcagggtctctgaaacaacgcacaatatccccggctgagagcactgcactccttcaaggtagaaagtcaagagaaaagcatcataatatattacctaagactttggcaaatgacaaacattcccataaacctcacccagtagagacatctcagccctctgataaaacagtactggatacaagttatgctttgataggtgaaacagtaaataattatagatctacaaaatatgaaatgtattccaagaatgcagaaaaaccatctagaagcaaaaggactataaaacaaaaacagagaagaaaattcatggctaaaccagctgaagaacagcttgatgtgggacagtctaaagatgaaaacatacatacatcacatattacccaagacgaatttcaaagaaattcagacagaaatatggaagagcatgaagagatgggaaatgattgtgtttccaaaaaacagatgccacctgtgggaagcaagaaaagtagcactagaaaagataaggaagaatctaaaaagaagcgcttttccagtgagtccaagaacaaacttgtacctgaagaagtgacttcaactgtcacgaaaagtcgaagaatttccaggcgtccatctgattggtgggtggtaaaatcagaggagagtcctgtttatagcaattcttcagtaagaaatgaattaccaatgcatcacaatagtagccgaaaatctactaagaaaacaaatcagtcatctaagaatattaggaaaaaaactattccacttaaaaggcagaagacagcaactaaaggcaaccaaagagtacagaagtttttaaatgctgaaggttctggaggtatcgttggtcatgatgaaatttccagatgttcgctgagtgagccattggaaagtgatgaggcagacttggctaagaagaaaaatcttgattgttctagatctacaagaagctcaaagaatgaagataacattatgactgcacagaatgttcccctaaagcctcagaccagtggatatacatgtaatataccaacagagtcaaacttggattctggagagcataagacttcagttttagaggaaagtggaccttccaggctcaataataattatttaatgtctggaaagaatgatgtggatgatgaggaagttcatggaagttcagatgactcaaaacaatctaaagtgataccaaagaacagaatccatcacaaactagtattgccctccaacacaccaaatgttcgcaggaccaagagaacacgtttgaaacctttggagtactggcgaggagagcgaatagattatcaaggaaggccatcaggaggattcgtgattagtggagtactatctccagacacaatatcgtctaaaaggaaggcaaaagaaaatattggaaaagtcaacaaaaaatctaataagaaaaggatctgtcttgataacgatgaaagaaagactaacttaatggtaaatctaggtatacctcttggagatcctttgcagccaacgagggtaaaggacccagaaacaagagagattattctcatggatcttgtaaggccacaagatacatatcaattttttgttaagcatggtgagttgaaggtatacaagacattggatacaccctttttttctactgggaaattgatattaggaccacaagaagaaaagggaaagcagcatgttggccaggatatattggttttttatgttaactttggtgaccttttgtgtactttacatgaaacaccttatatattaagtactggggattcgttctatgttccttcaggtaactattataacatcaaaaatctccggaatgaggaaagtgttcttctttttactcagataaaaagatgaaagatcaaccaaccttaaatatatgtatgtatatatgtatatgtgaaaaacagtttgtatagttggaatatttgtctttgtaattacttgtgatgttttaaaataaaaattttattcagttttctgtagacttgtatttgataaacatttctaactcacatgttttttctgatttttcagtgactgtacataatagcttgtagcgatgtccatatttatgatattatttttataatttgacaagaatatgaaaatgaaatatagaacatttctgtgtcaaaagagacctgattaatatgtctactcattaaaaaacatcttttccaaatactaattttaaatcatttattattaaataatccaatgggagagaactgtggtaaaaggcatgtttgtattaatttcctagaactgctgtaacaaaataccacaaaatgagtgacttaaagcaacagaaatttattatctcagttctagaggctagaagtctgaaatcaaggtgttgtcaaggccgtgatgtctttgaaaacctgtaagggagagaatccttccttattcctaacttctggtggtttactggcaatttctggcattccttggcttgcaccggtagcatttcaatctacttgcattatcacatggtattctcaccttgtgtgtctgtgttggcatgacatctatttagtatattacatgtaaatgtttttccattatgctttttggttcatattttctgttggaggcagtgtccttcgccattgctttctgtatgtggcctcaactttccctttttaatatcaatcaatacatctaagctaaaaattctaatcaaggtttttggtatggttagcatataattctcattaactctgaagaaattgatgttttacggtaaaaatatttttaggccaactcccttttcaggtcttatttaaccattaaatacacacatttaaagcaactctggtgtaggacttaggaagaatgaagtgtgatggctctttttttatactttataattttctattgtgatttctcttttattgagtcatttttaattttttttttacttttatttctttgaatatatttgttatgaagtcttattgaaggcttgactaatcaagtatctgggcccatacagatttagttttcactgaatgctttttttcctttagtatatttcactttcatatgtttttacatgtctaataatttttggttgacagctggacattttaggtagcatattgtagcaactcaattttgttttatatctaagggatttgtattgttttaaatttagcattttgactggactcaaattgtggaatctatcttatatatgatgtgaagttattgctgtctgtgctcagtttttaagttctttatttcaatatttattcttgcttgctaggggtagttcctgtgtctgcatagcttagcagtcagccaatcatttggacaaaggttaagatcaaacacttgagtctataagccttccacccactgttggttgttctgtgtgggatgggggatgcattcattgtaggaggcagttcccaaattccccttggtttttacatttgccatgctctcttgagtctcccctgtgcatgcatcatttcagtttgccaaagatgtttggagagctcatgttacccttttctgcccttctgtttccaggaccttgttaaatgtctggctgctctgttgctcttcaagaactaggactgtaacctttggttagcaactacagatactccttgtccattcctaagtgatttttttacttttgacttacaaagttgtaggtttatacctctgctgtaaatcaagactcctcttacggcaaagttgctagtttttcagttagctacagccagacaaaactgtagtttttaccaatcaacctaggggtgggtgagacctcactcaaggaggccacagattccaacagttcttttccaaagctttagcaatattttttctttattttcttttttcttttcttttctttttttttttttttgaggcagagtttcactcttgttgcctgggctggagtgcgatggtgtgatctcggctcactgcaacctccacctcccgggttcaagcaattctcctgcgtcagcctcctgagtagctgggattacagttgcttgccaccacgcctggctagtttttgtgtttttagtagagacagattttcaccatgttggccagggctgtctcgaattcctgacctcagggtgatccacccacctcagcctcccaaagtgttgggattacaggtgtgagccactgtgcccagcttaagtgtagcctttctttgtctaaactgaaagcccatatggttcagcaaaggctctccattctgcttggtcagagccacgtctgatttttgccacctctgtactctgttcagctcataggcttctgtcatgtctcagaattttgctctgcacatttgcagcctactgttcagccaactgttcagccaacttctagggctataatggctgatacagtagtcacaagttgtagctatttaaaattaatttaaaatattgtttcttacttgcatttgccacatttcaagtgcttagtagcacatggtactggtggctaccacattagatgtcacagatacaagttgcagaaagttctgttcttgggcacctcgtgcagatttctggagctctttttcagtggagtttccacttctgtaccctgcatcacaattcagttttctcaacagccctaaattgtgatctttctgtgcccattaagaccactgttctttttgagcttaactctctgtgtccagttttggagagtgcccccaggcataaaactgggtgactatggagttaatttcatgtctttaaagaatcacagtcctgcctactttgtcaggcagccctcatgctcatgaagggtcttaaagaaagagacttctacccgggcatggtggctcatgcctgtaatcccaacactttgggaggctaagtcgggtggatcatgaggtcaggagttcgagaccagcctggctaacatggtgaaaccccgtctctactaaaatacaaaagttagccgggcatgatggcaggtgcctgtaatcccagctactcagaggctgaggcaggagaattgcttgaacctgggagatgatggttgcagtgagccaagatcacgcaactgcactccaggctgggcagccgagcaagactctgactcaaaaaaagaaaacaaaagaatcaccgtccttcacttttgtccaatgtctgcatagagttaccttttatctttttctattttaaagtttgttggaggagggcaaatttgatacccattaatccatcgtgggcatcacccatgagagtttttttaatgatttttctaatttttattgttggataggattccacagtttgttgtccatttacttaccacatggatgcatgtgtctttaatttcttccaatggttacttacatctatgtaactacaatgcagaaaacaggaatttggcaaggatacaatgcatgtgtatagttctatttcatcatatgtgtgaatttgtgtaactactgcaatcaacatagaactgtttcatcatcactaatttgttcttcatctctgtaatattgtcacttatatattgttgtagcaatggaataatatagtgtatgacctttggtttttctcactcagcataaagcccttaagatcatccaagcagttatacctatcaatagctcatttcttttttattgctaagtggtattctctagtatggatgactgtaccacaaataaagatgaagtgaacacttcctacaggtttttgtgtaaa

SEQ ID NO: 116331 - DNA, 2799 bp, Homo sapiens
  Payload ID: 2698
  Gene Symbol: CENPC
  Gene Name: centromere protein C
  ENST ID: ENST00000513216
  CDS Start-End: 1-2187
gaagcctctctacagtttgttgtagaaccaagtgaagccacaaacagatcagttcaggcccatgaagttcatcagaaaattctggcaactgatgttagttccaaaaatacacctgactcgaaaaaaatatcaagtagaaacataaatgatcatcacagtgaagctgatgaagaattttacttatccgttggctcaccttctgttcttttggatgcaaaaacatctgtatcacaaaatgttattccatctagtgcccaaaagagagagacttacacttttgaaaattcagtaaatatgctgccttcaagtacagaggtttcagttaaaaccaaaaaaaggttaaactttgatgataaagttatgttaaagaaaatagaaatagataataaagtatcagatgaagaggataaaacatcggaaggacaagaaagaaaaccatcaggatcatctcagaatagaatacgagattcagaatatgaaattcaacgacaagctaaaaaaagtttttcaacattgtttttagaaacagtaaaacgaaaaagtgaatccagtcccattgttaggcatgcggcaactgctccacctcattcgtgtcctcccgatgatacgaagttgatagaggatgaatttataattgatgagtcggatcaaagttttgccagtagatcttggattacaataccaagaaaggcagggtctctgaaacaacgcacaatatccccggctgagagcactgcactccttcaaggtagaaagtcaagagaaaagcatcataatatattacctaagactttggcaaatgacaaacattcccataaacctcacccagtagagacatctcagccctctgataaaacagtactggatacaagttatgctttgataggtgaaacagtaaataattatagatctacaaaatatgaaatgtattccaagaatgcagaaaaaccatctagaagcaaaaggactataaaacaaaaacagagaagaaaattcatggctaaaccagctgaagaacagcttgatgtgggacagtctaaagatgaaaacatacatacatcacatattacccaagacgaatttcaaagaaattcagacagaaatatggaagagcatgaagagatgggaaatgattgtgtttccaaaaaacagatgccacctgtgggaagcaagaaaagtagcactagaaaagataaggaagaatctaaaaagaagcgcttttccagtgagtccaagaacaaacttgtacctgaagaagtgacttcaactgtcacgaaaagtcgaagaatttccaggcgtccatctgattggtgggtggtaaaatcagaggagagtcctgtttatagcaattcttcagtaagaaatgaattaccaatgcatcacaatagtagccgaaaatctactaagaaaacaaatcagtcatctaagaatattaggaaaaaaactattccacttaaaaggcagaagacagcaactaaaggcaaccaaagagtacagaagtttttaaatgctgaaggttctggaggtatcgttggtcatgatgaaatttccagatgttcgctgagtgagccattggaaagtgatgaggcagacttggctaagaagaaaaatcttgattgttctagatctacaagaagctcaaagaatgaagataacattatgactgcacagaatgttcccctaaagcctcagaccagtggatatacatgtaatataccaacagagtcaaacttggattctggagagcataagacttcagttttagaggaaagtggaccttccaggctcaataataattatttaatgtctggaaagaatgatgtggatgatgaggaagttcatggaagttcagatgactcaaaacaatctaaagtgataccaaagaacagaatccatcacaaactagtattgccctccaacacaccaaatgttcgcaggaccaagagaacacgtttgaaacctttggagtactggcgaggagagcgaatagattatcaaggaaggccatcaggaggattcgtgattagtggagtactatctccagacacaatatcgtctaaaaggaaggcaaaagaaaatattggaaaagtcaacaaaaaatctaataagaaaaggatctgtcttgataacgatgaaagaagtatgaacttatttctgaaagtaacttttagattttattttaaataggagtactttgagaagaagctctttgcaaaatatgaaatttacttccaaaaacttcagaaataataccatagagactaacttaatggtaaatctaggtatacctcttggagatcctttgcagccaacgagggtaaaggacccagaaacaagagagattattctcatggatcttgtaaggccacaagatacatatcaattttttgttaagcatggtgagttgaaggtatacaagacattggatacaccctttttttctactgggaaattgatattaggaccacaagaagaaaagggaaagcagcatgttggccaggatatattggttttttatgttaactttggtgaccttttgtgtactttacatgaaacaccttatatattaagtactggggattcgttctatgttccttcaggtaactattataacatcaaaaatctccggaatgaggaaagtgttcttctttttactcagataaaaagatgaaagatcaaccaaccttaaatatatgtatgtatatatgtatatgtgaaaaacagtttgtatagttggaatatttgtctttgtaattacttgtgatgttttaaaataaaaattttattcagttttctgta

SEQ ID NO: 116332 - DNA, 933 bp, Homo sapiens
  Payload ID: 2698
  Gene Symbol: CENPC
  Gene Name: centromere protein C
  ENST ID: ENST00000515140
  CDS Start-End: 1-324
caatctaaagtgataccaaagaacagaatccatcacaaactagtattgccctccaacacaccaaatgttcgcaggaccaagagaacacgtttgaaacctttggagtactggcgaggagagcgaatagattatcaaggaaggccatcaggaggattcgtgattagtggagtactatctccagacacaatatcgtctaaaaggaaggcaaaagaaaatattggaaaagtcaacaaaaaatctaataagaaaaggatctgtcttgataacgatgaaagaagtatgaacttatttctgaaagtaacttttagattttattttaaataggagtactttgagaagaagctctttgcaaaatatgaaatttacttccaaaaacttcagaaataataccatagagactaacttaatggtaaatctaggtatacctcttggagatcctttgcagccaacgagggtaaaggacccagaaacaagagagattattctcatggatcttgtaaggccacaagatacatatcaattttttgttaagcatggtgagttgaaggtatacaagacattggatacaccctttttttctactgggaaattgatattaggaccacaagaagaaaagggaaagcagcatgttggccaggatatattggttttttatgttaactttggtgaccttttgtgtactttacatgaaacaccttatatattaagtactggggattcgttctatgttccttcaggtaagacaatttatttcacttagacaacatgtatatagttgtttttgggcactatggaaatggaagccacagtggtcaaaatgaagtgtgatatgactgatggatgtcagaacagtttggtacatattttcctttcatttgatcattaggtaagtgtattagcattttgtggtggtttttttttgtttttgagaca

SEQ ID NO: 116333 - DNA, 3436 bp, Homo sapiens
  Payload ID: 2698
  Gene Symbol: CENPC
  Gene Name: centromere protein C
  Uniprot ID: Q03188
  ENST ID: ENST00000506882
  CDS Start-End: 129-1757
gagacttaaggttattgcttggccgcggcctggtattccggcgattcgtttcttgctcggcttcctggagctgtggtccgtgtgggcttccacctcagacagttgcgctggctcagcggggccggaacatggctgcgtccggtctggatcatctcaaaaatggctacagaagaagattttgtcgaccttccagggcacgtgacattaacacagagcaaggccagaatgttctggaaatcttacaagactgttttgaagaaaaaagtcttgccaatgattttagtacaaattctacaaaatcagtgcctaattcaacacgcaaaataaaagacacttgtattcagtcaccaagcaaagagtgccagaaatcacatccaaagtcagttccagtttcttcaaagaagaaagaagcctctctacagtttgttgtagaaccaagtgaagccacaaacagatcagttcaggcccatgaagttcatcagaaaattctggcaactgatgttagttccaaaaatacacctgactcgaaaaaaatatcaagtagaaacataaatgatcatcacagtgaagctgatgaagaattttacttatccgttggctcaccttctgttcttttggatgcaaaaacatctgtatcacaaaatgttattccatctagtgcccaaaagagagagacttacacttttgaaaattcagtaaatatgctgccttcaagtacagaggtttcagttaaaaccaaaaaaaggttaaactttgatgataaagttatgttaaagaaaatagaaatagataataaagtatcagatgaagaggataaaacatcggaaggacaagaaagaaaaccatcaggatcatctcagaatagaatacgagattcagaatatgaaattcaacgacaagctaaaaaaagtttttcaacattgtttttagaaacagtaaaacgaaaaagtgaatccagtcccattgttaggcatgcggcaactgctccacctcattcgtgtcctcccgatgatacgaagttgatagaggatgaatttataattgatgagtcggatcaaagttttgccagtagatcttggattacaataccaagaaaggcagggtctctgaaacaacgcacaatatccccggctgagagcactgcactccttcaaggtagaaagtcaagagaaaagcatcataatatattacctaagactttggcaaatgacaaacattcccataaacctcacccagtagagacatctcagccctctgataaaacagtactggatacaagttatgctttgataggtgaaacagtaaataattatagatctacaaaatatgaaatgtattccaagaatgcagaaaaaccatctagaagcaaaaggactataaaacaaaaacagagaagaaaattcatggctaaaccagctgaagaacagcttgatgtgggacagtctaaagatgaaaacatacatacatcacatattacccaagacgaatttcaaagaaattcagacagaaatatggaagagcatgaagagatgggaaatgattgtgtttccaaaaaacagatgccacctgtgggaagcaagaaaagtagcactagaaaagataaggaagaatctaaaaagaagcgcttttccagtgagtccaagaacaaacttgtacctgaagaagtgacttcaactgtcacgaaaagtcgaagaatttccaggcgtccatctgattggtgggtggtaaaatcagaggagagttgcctgaaatgctaagtactatgtggcagatgaatacataaacagatgggtaaataaattcttacagaacttggataaatgtgctagatctctgaaactatcaaaaaacacttatttaagagtcctgaaatagatgttggatttttgatcaagctgggagtcgaaaaagtggaggaatctttatatatcatatagtctaaactctcatctgatggaagaagaaactgaagtctgaagttaagaagaacaacttgacctgcccccagcctgcctgtcgtacgtgtgacactgttgcccttccatatatatgaagaaatgtatatggagtacttgccatggggcaggaatgaggtcctgtttatagcaattcttcagtaagaaatgaattaccaatgcatcacaatagtagccgaaaatctactaagaaaacaaatcagtcatctaagaatattaggaaaaaaactattccacttaaaaggcagaagacagcaactaaaggcaaccaaagagtacagaagtttttaaatgctgaaggttctggaggtatcgttggtcatgatgaaatttccagatgttcgctgagtgagccattggaaagtgatgaggcagacttggctaagaagaaaaatcttgattgttctagatctacaagaagctcaaagaatgaagataacattatgactgcacagaatgttcccctaaagcctcagaccagtggatatacatgtaatataccaacagagtcaaacttggattctggagagcataagacttcagttttagaggaaagtggaccttccaggctcaataataattatttaatgtctggaaagaatgatgtggatgatgaggaagttcatggaagttcagatgactcaaaacaatctaaagtgataccaaagaacagaatccatcacaaactagtattgccctccaacacaccaaatgttcgcaggaccaagagaacacgtttgaaacctttggagtactggcgaggagagcgaatagattatcaaggaaggccatcaggaggattcgtgattagtggagtactatctccagacacaatatcgtctaaaaggaaggcaaaagaaaatattggaaaagtcaacaaaaaatctaataagaaaaggatctgtcttgataacgatgaaagaaagactaacttaatggtaaatctaggtatacctcttggagatcctttgcagccaacgagggtaaaggacccagaaacaagagagattattctcatggatcttgtaaggccacaagatacatatcaattttttgttaagcatggtgagttgaaggtatacaagacattggatacaccctttttttctactgggaaattgatattaggaccacaagaagaaaagggaaagcagcatgttggccaggatatattggttttttatgttaactttggtgaccttttgtgtactttacatgaaacaccttatatattaagtactggggattcgttctatgttccttcaggtaactattataacatcaaaaatctccggaatgaggaaagtgttcttctttttactcagataaaaagatgaaagatcaaccaaccttaaatatatgtatgtatatatgtatatgtgaaaaacagtttgtatagttggaatatttgtctttgtaattacttgtgatgttttaaaataaaaattttattcagtttt

SEQ ID NO: 116334 - DNA, 8612 bp, Homo sapiens
  Payload ID: 2699
  Gene Symbol: CENPE
  Gene Name: centromere protein E, 312kDa
  Uniprot ID: Q02224
  ENST ID: ENST00000265148
  CDS Start-End: 91-8196
taaatttaaaggcggggcggcctgtgagccctgaagtgccggccgcggagggtcctggccattttcctgggaccagttcagcctgataggatggcggaggaaggagccgtggccgtctgcgtgcgagtgcggccgctgaacagcagagaagaatcacttggagaaactgcccaagtttactggaaaactgacaataatgtcatttatcaagttgatggaagtaaatccttcaattttgatcgtgtctttcatggtaatgaaactaccaaaaatgtgtatgaagaaatagcagcaccaatcatcgattctgccatacaaggctacaatggtactatatttgcctatggacagactgcttcaggaaaaacatataccatgatgggttcagaagatcatttgggagttatacccagggcaattcatgacattttccaaaaaattaagaagtttcctgatagggaatttctcttacgtgtatcttacatggaaatatacaatgaaaccattacagatttactctgtggcactcaaaaaatgaaacctttaattattcgagaagatgtcaataggaatgtgtatgttgctgatctcacagaagaagttgtatatacatcagaaatggctttgaaatggattacaaagggagaaaagagcaggcattatggagaaacaaaaatgaatcaaagaagcagtcgttctcataccatctttaggatgattttggaaagcagagagaagggtgaaccttctaattgtgaaggatctgttaaggtatcccatttgaatttggttgatcttgcaggcagtgaaagagctgctcaaacaggcgctgcaggtgtgcggctcaaggaaggctgtaatataaatcgaagcttatttattttgggacaagtgatcaagaaacttagtgatggacaagttggtggtttcataaattatcgagatagcaagttaacacgaattctccagaattccttgggaggaaatgcaaagacacgtattatctgcacaattactccagtatcttttgatgaaacacttactgctctccagtttgccagtactgctaaatatatgaagaatactccttatgttaatgaggtatcaactgatgaagctctcctgaaaaggtatagaaaagaaataatggatcttaaaaaacaattagaggaggtttctttagagacgcgggctcaggcaatggaaaaagaccaattggcccaacttttggaagaaaaagatttgcttcagaaagtacagaatgagaaaattgaaaacttaacacggatgctggtgacctcttcttccctcacgttgcaacaggaattaaaggctaaaagaaaacgaagagttacttggtgccttggcaaaattaacaaaatgaagaactcaaactatgcagatcaatttaatataccaacaaatataacaacaaaaacacataagctttctataaatttattacgagaaattgatgaatctgtctgttcagagtctgatgttttcagtaacactcttgatacattaagtgagatagaatggaatccagcaacaaagctactaaatcaggagaatatagaaagtgagttgaactcacttcgtgctgactatgataatctggtattagactatgaacaactacgaacagaaaaagaagaaatggaattgaaattaaaagaaaagaatgatttggatgaatttgaggctctagaaagaaaaactaaaaaagatcaagagatgcaactaattcatgaaatttcgaacttaaagaatttagttaagcatgcagaagtatataatcaagatcttgagaatgaactcagttcaaaagtagagctgcttagagaaaaggaagaccagattaagaagctacaggaatacatagactctcaaaagctagaaaatataaaaatggacttgtcatactcattggaaagcattgaagacccaaaacaaatgaagcagactctgtttgatgctgaaactgtagcccttgatgccaagagagaatcagcctttcttagaagtgaaaatctggagctgaaggagaaaatgaaagaacttgcaactacatacaagcaaatggaaaatgatattcagttatatcaaagccagttggaggcaaaaaagaaaatgcaagttgatctggagaaagaattacaatctgcttttaatgagataacaaaactcacctcccttatagatggcaaagttccaaaagatttgctctgtaatttggaattggaaggaaagattactgatcttcagaaagaactaaataaagaagttgaagaaaatgaagctttgcgggaagaagtcattttgctttcagaattgaaatctttaccttctgaagtagaaaggctgaggaaagagatacaagacaaatctgaagagctccatataataacatcagaaaaagataaattgttttctgaagtagttcataaggagagtagagttcaaggtttacttgaagaaattgggaaaacaaaagatgacctagcaactacacagtcgaattataaaagcactgatcaagaattccaaaatttcaaaacccttcatatggactttgagcaaaagtataagatggtccttgaggagaatgagagaatgaatcaggaaatagttaatctctctaaagaagcccaaaaatttgattcgagtttgggtgctttgaagaccgagctttcttacaagacccaagaacttcaggagaaaacacgtgaggttcaagaaagactaaatgagatggaacagctgaaggaacaattagaaaatagagattctacgctgcaaactgtagaaagggagaaaacactgattactgagaaactgcagcaaactttagaagaagtaaaaactttaactcaagaaaaagatgatctaaaacaactccaagaaagcttgcaaattgagagggaccaactcaaaagtgatattcacgatactgttaacatgaatatagatactcaagaacaattacgaaatgctcttgagtctctgaaacaacatcaagaaacaattaatacactaaaatcgaaaatttctgaggaagtttccaggaatttgcatatggaggaaaatacaggagaaactaaagatgaatttcagcaaaagatggttggcatagataaaaaacaggatttggaagctaaaaatacccaaacactaactgcagatgttaaggataatgagataattgagcaacaaaggaagatattttctttaatacaggagaaaaatgaactccaacaaatgttagagagtgttatagcagaaaaggaacaattgaagactgacctaaaggaaaatattgaaatgaccattgaaaaccaggaagaattaagacttcttggggatgaacttaaaaagcaacaagagatagttgcacaagaaaagaaccatgccataaagaaagaaggagagctttctaggacctgtgacagactggcagaagttgaagaaaaactaaaggaaaagagccagcaactccaagaaaaacagcaacaacttcttaatgtacaagaagagatgagtgagatgcagaaaaagattaatgaaatagagaatttaaagaatgaattaaagaacaaagaattgacattggaacatatggaaacagagaggcttgagttggctcagaaacttaatgaaaattatgaggaagtgaaatctataaccaaagaaagaaaagttctaaaggaattacagaagtcatttgaaacagagagagaccaccttagaggatatataagagaaattgaagctacaggcctacaaaccaaagaagaactaaaaattgctcatattcacctaaaagaacaccaagaaactattgatgaactaagaagaagcgtatctgagaagacagctcaaataataaatactcaggacttagaaaaatcccataccaaattacaagaagagatcccagtgcttcatgaggaacaagagttactgcctaatgtgaaagaagtcagtgagactcaggaaacaatgaatgaactggagttattaacagaacagtccacaaccaaggactcaacaacactggcaagaatagaaatggaaaggctcaggttgaatgaaaaatttcaagaaagtcaggaagagataaaatctctaaccaaggaaagagacaaccttaaaacgataaaagaagcccttgaagttaaacatgaccagctgaaagaacatattagagaaactttggctaaaatccaggagtctcaaagcaaacaagaacagtccttaaatatgaaagaaaaagacaatgaaactaccaaaatcgtgagtgagatggagcaattcaaacccaaagattcagcactactaaggatagaaatagaaatgctcggattgtccaaaagacttcaagaaagtcatgatgaaatgaaatctgtagctaaggagaaagatgacctacagaggctgcaagaagttcttcaatctgaaagtgaccagctcaaagaaaacataaaagaaattgtagctaaacacctggaaactgaagaggaacttaaagttgctcattgttgcctgaaagaacaagaggaaactattaatgagttaagagtgaatctttcagagaaggaaactgaaatatcaaccattcaaaagcagttagaagcaatcaatgataaattacagaacaagatccaagagatttatgagaaagaggaacaatttaatataaaacaaattagtgaggttcaggaaaaagtgaatgaactgaaacaattcaaggagcatcgcaaagccaaggattcagcactacaaagtatagaaagtaagatgctcgagttgaccaacagacttcaagaaagtcaagaagaaatacaaattatgattaaggaaaaagaggaaatgaaaagagtacaggaggcccttcagatagagagagaccaactgaaagaaaacactaaagaaattgtagctaaaatgaaagaatctcaagaaaaagaatatcagtttcttaagatgacagctgtcaatgagactcaggagaaaatgtgtgaaatagaacacttgaaggagcaatttgagacccagaagttaaacctggaaaacatagaaacggagaatataaggttgactcagatactacatgaaaaccttgaagaaatgagatctgtaacaaaagaaagagatgaccttaggagtgtggaggagactctcaaagtagagagagaccagctcaaggaaaaccttagagaaactataactagagacctagaaaaacaagaggagctaaaaattgttcacatgcatctgaaggagcaccaagaaactattgataaactaagagggattgtttcagagaaaacaaatgaaatatcaaatatgcaaaaggacttagaacactcaaatgatgccttaaaagcacaggatctgaaaatacaagaggaactaagaattgctcacatgcatctgaaagagcagcaggaaactattgacaaactcagaggaattgtttctgagaagacagataaactatcaaatatgcaaaaagatttagaaaattcaaatgctaaattacaagaaaagattcaagaacttaaggcaaatgaacatcaacttattacgttaaaaaaagatgtcaatgagacacagaaaaaagtgtctgaaatggagcaactaaagaaacaaataaaagaccaaagcttaactctgagtaaattagaaatagagaatttaaatttggctcagaaacttcatgaaaaccttgaagaaatgaaatctgtaatgaaagaaagagataatctaagaagagtagaggagacactcaaactggagagagaccaactcaaggaaagcctgcaagaaaccaaagctagagatctggaaatacaacaggaactaaaaactgctcgtatgctatcaaaagaacacaaagaaactgttgataaacttagagaaaaaatttcagaaaagacaattcaaatttcagacattcaaaaggatttagataaatcaaaagatgaattacagaaaaagatccaagaacttcagaaaaaagaacttcaactgcttagagtgaaagaagatgtcaatatgagtcataaaaaaattaatgaaatggaacagttgaagaagcaatttgaggcccaaaacttatctatgcaaagtgtgagaatggataacttccagttgactaagaaacttcatgaaagccttgaagaaataagaattgtagctaaagaaagagatgagctaaggaggataaaagaatctctcaaaatggaaagggaccaattcatagcaaccttaagggaaatgatagctagagaccgacagaaccaccaagtaaaacctgaaaaaaggttactaagtgatggacaacagcaccttacggaaagcctgagagaaaagtgctctagaataaaagagcttttgaagagatactcagagatggatgatcattatgagtgcttgaatagattgtctcttgacttggagaaggaaattgaattccaaaaagagctttcaatgagagttaaagcaaacctctcacttccctatttacaaaccaaacacattgaaaaactttttactgcaaaccagagatgctccatggaattccacagaatcatgaagaaactgaagtatgtgttaagctatgttacaaaaataaaagaagaacaacatgaatccatcaataaatttgaaatggattttattgatgaagtggaaaagcaaaaggaattgctaattaaaatacagcaccttcaacaagattgtgatgtaccatccagagaattaagggatctcaaattgaaccagaatatggatctacatattgaggaaattctcaaagatttctcagaaagtgagttccctagcataaagactgaatttcaacaagtactaagtaataggaaagaaatgacacagtttttggaagagtggttaaatactcgttttgatatagaaaagcttaaaaatggcatccagaaagaaaatgataggatttgtcaagtgaataacttctttaataacagaataattgccataatgaatgaatcaacagagtttgaggaaagaagtgctaccatatccaaagagtgggaacaggacctgaaatcactgaaagagaaaaatgaaaaactatttaaaaactaccaaacattgaagacttccttggcatctggtgcccaggttaatcctaccacacaagacaataagaatcctcatgttacatcaagagctacacagttaaccacagagaaaattcgagagctggaaaattcactgcatgaagctaaagaaagtgctatgcataaggaaagcaagattataaagatgcagaaagaacttgaggtgactaatgacataatagcaaaacttcaagccaaagttcatgaatcaaataaatgccttgaaaaaacaaaagagacaattcaagtacttcaggacaaagttgctttaggagctaagccatataaagaagaaattgaagatctcaaaatgaagcttgtgaaaatagacctagagaaaatgaaaaatgccaaagaatttgaaaaggaaatcagtgctacaaaagccactgtagaatatcaaaaggaagttataaggctattgagagaaaatctcagaagaagtcaacaggcccaagatacctcagtgatatcagaacatactgatcctcagccttcaaataaacccttaacttgtggaggtggcagcggcattgtacaaaacacaaaagctcttattttgaaaagtgaacatataaggctagaaaaagaaatttctaagttaaagcagcaaaatgaacagctaataaaacaaaagaatgaattgttaagcaataatcagcatctttccaatgaggtcaaaacttggaaggaaagaacccttaaaagagaggctcacaaacaagtaacttgtgagaattctccaaagtctcctaaagtgactggaacagcttctaaaaagaaacaaattacaccctctcaatgcaaggaacggaatttacaagatcctgtgccaaaggaatcaccaaaatcttgtttttttgatagccgatcaaagtctttaccatcacctcatccagttcgctattttgataactcaagtttaggcctttgtccagaggtgcaaaatgcaggagcagagagtgtggattctcagccaggtccttggcacgcctcctcaggcaaggatgtgcctgagtgcaaaactcagtagactcctctttgtcacttctctggagatccagcattccttatttggaaatgactttgtttatgtgtctatccctggtaatgatgttgtagtgcagcttaatttcaattcagtctttactttgccactagagttgaaagataagggaacaggaaatgaatgcattgtggtaatttagaatggtgatagcaataccttcttcttgcatatggtaatacttttaaaagttgaattgttttatttatttgtatattttgtaaagaataaagttattgaaagaaatgtaaagttatctacatgacttagcatattccaaagcataatacatacattaatataaaacatcattttattaacaaaattgtaaatgtttttaataccttacacattcaataaatgtttagtagttctgaatcacc

SEQ ID NO: 116335 - DNA, 8241 bp, Homo sapiens
  Payload ID: 2699
  Gene Symbol: CENPE
  Gene Name: centromere protein E, 312kDa
  Uniprot ID: Q02224
  ENST ID: ENST00000380026
  CDS Start-End: 90-7832
aaatttaaaggcggggcggcctgtgagccctgaagtgccggccgcggagggtcctggccattttcctgggaccagttcagcctgataggatggcggaggaaggagccgtggccgtctgcgtgcgagtgcggccgctgaacagcagagaagaatcacttggagaaactgcccaagtttactggaaaactgacaataatgtcatttatcaagttgatggaagtaaatccttcaattttgatcgtgtctttcatggtaatgaaactaccaaaaatgtgtatgaagaaatagcagcaccaatcatcgattctgccatacaaggctacaatggtactatatttgcctatggacagactgcttcaggaaaaacatataccatgatgggttcagaagatcatttgggagttatacccagggcaattcatgacattttccaaaaaattaagaagtttcctgatagggaatttctcttacgtgtatcttacatggaaatatacaatgaaaccattacagatttactctgtggcactcaaaaaatgaaacctttaattattcgagaagatgtcaataggaatgtgtatgttgctgatctcacagaagaagttgtatatacatcagaaatggctttgaaatggattacaaagggagaaaagagcaggcattatggagaaacaaaaatgaatcaaagaagcagtcgttctcataccatctttaggatgattttggaaagcagagagaagggtgaaccttctaattgtgaaggatctgttaaggtatcccatttgaatttggttgatcttgcaggcagtgaaagagctgctcaaacaggcgctgcaggtgtgcggctcaaggaaggctgtaatataaatcgaagcttatttattttgggacaagtgatcaagaaacttagtgatggacaagttggtggtttcataaattatcgagatagcaagttaacacgaattctccagaattccttgggaggaaatgcaaagacacgtattatctgcacaattactccagtatcttttgatgaaacacttactgctctccagtttgccagtactgctaaatatatgaagaatactccttatgttaatgaggtatcaactgatgaagctctcctgaaaaggtatagaaaagaaataatggatcttaaaaaacaattagaggaggtttctttagagacgcgggctcaggcaatggaaaaagaccaattggcccaacttttggaagaaaaagatttgcttcagaaagtacagaatgagaaaattgaaaacttaacacggatgctggtgacctcttcttccctcacgttgcaacaggaattaaaggctaaaagaaaacgaagagttacttggtgccttggcaaaattaacaaaatgaagaactcaaactatgcagatcaatttaatataccaacaaatataacaacaaaaacacataagctttctataaatttattacgagaaattgatgaatctgtctgttcagagtctgatgttttcagtaacactcttgatacattaagtgagatagaatggaatccagcaacaaagctactaaatcaggagaatatagaaagtgagttgaactcacttcgtgctgactatgataatctggtattagactatgaacaactacgaacagaaaaagaagaaatggaattgaaattaaaagaaaagaatgatttggatgaatttgaggctctagaaagaaaaactaaaaaagatcaagagaatgaactcagttcaaaagtagagctgcttagagaaaaggaagaccagattaagaagctacaggaatacatagactctcaaaagctagaaaatataaaaatggacttgtcatactcattggaaagcattgaagacccaaaacaaatgaagcagactctgtttgatgctgaaactgtagcccttgatgccaagagagaatcagcctttcttagaagtgaaaatctggagctgaaggagaaaatgaaagaacttgcaactacatacaagcaaatggaaaatgatattcagttatatcaaagccagttggaggcaaaaaagaaaatgcaagttgatctggagaaagaattacaatctgcttttaatgagataacaaaactcacctcccttatagatggcaaagttccaaaagatttgctctgtaatttggaattggaaggaaagattactgatcttcagaaagaactaaataaagaagttgaagaaaatgaagctttgcgggaagaagtcattttgctttcagaattgaaatctttaccttctgaagtagaaaggctgaggaaagagatacaagacaaatctgaagagctccatataataacatcagaaaaagataaattgttttctgaagtagttcataaggagagtagagttcaaggtttacttgaagaaattgggaaaacaaaagatgacctagcaactacacagtcgaattataaaagcactgatcaagaattccaaaatttcaaaacccttcatatggactttgagcaaaagtataagatggtccttgaggagaatgagagaatgaatcaggaaatagttaatctctctaaagaagcccaaaaatttgattcgagtttgggtgctttgaagaccgagctttcttacaagacccaagaacttcaggagaaaacacgtgaggttcaagaaagactaaatgagatggaacagctgaaggaacaattagaaaatagagattctacgctgcaaactgtagaaagggagaaaacactgattactgagaaactgcagcaaactttagaagaagtaaaaactttaactcaagaaaaagatgatctaaaacaactccaagaaagcttgcaaattgagagggaccaactcaaaagtgatattcacgatactgttaacatgaatatagatactcaagaacaattacgaaatgctcttgagtctctgaaacaacatcaagaaacaattaatacactaaaatcgaaaatttctgaggaagtttccaggaatttgcatatggaggaaaatacaggagaaactaaagatgaatttcagcaaaagatggttggcatagataaaaaacaggatttggaagctaaaaatacccaaacactaactgcagatgttaaggataatgagataattgagcaacaaaggaagatattttctttaatacaggagaaaaatgaactccaacaaatgttagagagtgttatagcagaaaaggaacaattgaagactgacctaaaggaaaatattgaaatgaccattgaaaaccaggaagaattaagacttcttggggatgaacttaaaaagcaacaagagatagttgcacaagaaaagaaccatgccataaagaaagaaggagagctttctaggacctgtgacagactggcagaagttgaagaaaaactaaaggaaaagagccagcaactccaagaaaaacagcaacaacttcttaatgtacaagaagagatgagtgagatgcagaaaaagattaatgaaatagagaatttaaagaatgaattaaagaacaaagaattgacattggaacatatggaaacagagaggcttgagttggctcagaaacttaatgaaaattatgaggaagtgaaatctataaccaaagaaagaaaagttctaaaggaattacagaagtcatttgaaacagagagagaccaccttagaggatatataagagaaattgaagctacaggcctacaaaccaaagaagaactaaaaattgctcatattcacctaaaagaacaccaagaaactattgatgaactaagaagaagcgtatctgagaagacagctcaaataataaatactcaggacttagaaaaatcccataccaaattacaagaagagatcccagtgcttcatgaggaacaagagttactgcctaatgtgaaagaagtcagtgagactcaggaaacaatgaatgaactggagttattaacagaacagtccacaaccaaggactcaacaacactggcaagaatagaaatggaaaggctcaggttgaatgaaaaatttcaagaaagtcaggaagagataaaatctctaaccaaggaaagagacaaccttaaaacgataaaagaagcccttgaagttaaacatgaccagctgaaagaacatattagagaaactttggctaaaatccaggagtctcaaagcaaacaagaacagtccttaaatatgaaagaaaaagacaatgaaactaccaaaatcgtgagtgagatggagcaattcaaacccaaagattcagcactactaaggatagaaatagaaatgctcggattgtccaaaagacttcaagaaagtcatgatgaaatgaaatctgtagctaaggagaaagatgacctacagaggctgcaagaagttcttcaatctgaaagtgaccagctcaaagaaaacataaaagaaattgtagctaaacacctggaaactgaagaggaacttaaagttgctcattgttgcctgaaagaacaagaggaaactattaatgagttaagagtgaatctttcagagaaggaaactgaaatatcaaccattcaaaagcagttagaagcaatcaatgataaattacagaacaagatccaagagatttatgagaaagaggaacaatttaatataaaacaaattagtgaggttcaggaaaaagtgaatgaactgaaacaattcaaggagcatcgcaaagccaaggattcagcactacaaagtatagaaagtaagatgctcgagttgaccaacagacttcaagaaagtcaagaagaaatacaaattatgattaaggaaaaagaggaaatgaaaagagtacaggaggcccttcagatagagagagaccaactgaaagaaaacactaaagaaattgtagctaaaatgaaagaatctcaagaaaaagaatatcagtttcttaagatgacagctgtcaatgagactcaggagaaaatgtgtgaaatagaacacttgaaggagcaatttgagacccagaagttaaacctggaaaacatagaaacggagaatataaggttgactcagatactacatgaaaaccttgaagaaatgagatctgtaacaaaagaaagagatgaccttaggagtgtggaggagactctcaaagtagagagagaccagctcaaggaaaaccttagagaaactataactagagacctagaaaaacaagaggagctaaaaattgttcacatgcatctgaaggagcaccaagaaactattgataaactaagagggattgtttcagagaaaacaaatgaaatatcaaatatgcaaaaggacttagaacactcaaatgatgccttaaaagcacaggatctgaaaatacaagaggaactaagaattgctcacatgcatctgaaagagcagcaggaaactattgacaaactcagaggaattgtttctgagaagacagataaactatcaaatatgcaaaaagatttagaaaattcaaatgctaaattacaagaaaagattcaagaacttaaggcaaatgaacatcaacttattacgttaaaaaaagatgtcaatgagacacagaaaaaagtgtctgaaatggagcaactaaagaaacaaataaaagaccaaagcttaactctgagtaaattagaaatagagaatttaaatttggctcagaaacttcatgaaaaccttgaagaaatgaaatctgtaatgaaagaaagagataatctaagaagagtagaggagacactcaaactggagagagaccaactcaaggaaagcctgcaagaaaccaaagctagagatctggaaatacaacaggaactaaaaactgctcgtatgctatcaaaagaacacaaagaaactgttgataaacttagagaaaaaatttcagaaaagacaattcaaatttcagacattcaaaaggatttagataaatcaaaagatgaattacagaaaaagcaggaccgacagaaccaccaagtaaaacctgaaaaaaggttactaagtgatggacaacagcaccttacggaaagcctgagagaaaagtgctctagaataaaagagcttttgaagagatactcagagatggatgatcattatgagtgcttgaatagattgtctcttgacttggagaaggaaattgaattccaaaaagagctttcaatgagagttaaagcaaacctctcacttccctatttacaaaccaaacacattgaaaaactttttactgcaaaccagagatgctccatggaattccacagaatcatgaagaaactgaagtatgtgttaagctatgttacaaaaataaaagaagaacaacatgaatccatcaataaatttgaaatggattttattgatgaagtggaaaagcaaaaggaattgctaattaaaatacagcaccttcaacaagattgtgatgtaccatccagagaattaagggatctcaaattgaaccagaatatggatctacatattgaggaaattctcaaagatttctcagaaagtgagttccctagcataaagactgaatttcaacaagtactaagtaataggaaagaaatgacacagtttttggaagagtggttaaatactcgttttgatatagaaaagcttaaaaatggcatccagaaagaaaatgataggatttgtcaagtgaataacttctttaataacagaataattgccataatgaatgaatcaacagagtttgaggaaagaagtgctaccatatccaaagagtgggaacaggacctgaaatcactgaaagagaaaaatgaaaaactatttaaaaactaccaaacattgaagacttccttggcatctggtgcccaggttaatcctaccacacaagacaataagaatcctcatgttacatcaagagctacacagttaaccacagagaaaattcgagagctggaaaattcactgcatgaagctaaagaaagtgctatgcataaggaaagcaagattataaagatgcagaaagaacttgaggtgactaatgacataatagcaaaacttcaagccaaagttcatgaatcaaataaatgccttgaaaaaacaaaagagacaattcaagtacttcaggacaaagttgctttaggagctaagccatataaagaagaaattgaagatctcaaaatgaagcttgtgaaaatagacctagagaaaatgaaaaatgccaaagaatttgaaaaggaaatcagtgctacaaaagccactgtagaatatcaaaaggaagttataaggctattgagagaaaatctcagaagaagtcaacaggcccaagatacctcagtgatatcagaacatactgatcctcagccttcaaataaacccttaacttgtggaggtggcagcggcattgtacaaaacacaaaagctcttattttgaaaagtgaacatataaggctagaaaaagaaatttctaagttaaagcagcaaaatgaacagctaataaaacaaaagaatgaattgttaagcaataatcagcatctttccaatgaggtcaaaacttggaaggaaagaacccttaaaagagaggctcacaaacaagtaacttgtgagaattctccaaagtctcctaaagtgactggaacagcttctaaaaagaaacaaattacaccctctcaatgcaaggaacggaatttacaagatcctgtgccaaaggaatcaccaaaatcttgtttttttgatagccgatcaaagtctttaccatcacctcatccagttcgctattttgataactcaagtttaggcctttgtccagaggtgcaaaatgcaggagcagagagtgtggattctcagccaggtccttggcacgcctcctcaggcaaggatgtgcctgagtgcaaaactcagtagactcctctttgtcacttctctggagatccagcattccttatttggaaatgactttgtttatgtgtctatccctggtaatgatgttgtagtgcagcttaatttcaattcagtctttactttgccactagagttgaaagataagggaacaggaaatgaatgcattgtggtaatttagaatggtgatagcaataccttcttcttgcatatggtaatacttttaaaagttgaattgttttatttatttgtatattttgtaaagaataaagttattgaaagaaatgtaaagttatctacatgacttagcatattccaaagcataatacatacattaatataaaacatcattttattaacaaaattgtaaatgtttttaataccttacacattcaataaatgtttagtagttctg

SEQ ID NO: 116336 - DNA, 3468 bp, Homo sapiens
  Payload ID: 2699
  Gene Symbol: CENPE
  Gene Name: centromere protein E, 312kDa
  ENST ID: ENST00000503705
  CDS Start-End: 90-3468
aaatttaaaggcggggcggcctgtgagccctgaagtgccggccgcggagggtcctggccattttcctgggaccagttcagcctgataggatggcggaggaaggagccgtggccgtctgcgtgcgagtgcggccgctgaacagcagagaagaatcacttggagaaactgcccaagtttactggaaaactgacaataatgtcatttatcaagttgatggaagtaaatccttcaattttgatcgtgtctttcatggtaatgaaactaccaaaaatgtgtatgaagaaatagcagcaccaatcatcgattctgccatacaaggctacaatggtactatatttgcctatggacagactgcttcaggaaaaacatataccatgatgggttcagaagatcatttgggagttatacccagggcaattcatgacattttccaaaaaattaagaagtttcctgatagggaatttctcttacgtgtatcttacatggaaatatacaatgaaaccattacagatttactctgtggcactcaaaaaatgaaacctttaattattcgagaagatgtcaataggaatgtgtatgttgctgatctcacagaagaagttgtatatacatcagaaatggctttgaaatggattacaaagggagaaaagagcaggcattatggagaaacaaaaatgaatcaaagaagcagtcgttctcataccatctttaggatgattttggaaagcagagagaagggtgaaccttctaattgtgaaggatctgttaaggtatcccatttgaatttggttgatcttgcaggcagtgaaagagctgctcaaacaggcgctgcaggtgtgcggctcaaggaaggctgtaatataaatcgaagcttatttattttgggacaagtgatcaagaaacttagtgatggacaagttggtggtttcataaattatcgagatagcaagttaacacgaattctccagaattccttgggaggaaatgcaaagacacgtattatctgcacaattactccagtatcttttgatgaaacacttactgctctccagtttgccagtactgctaaatatatgaagaatactccttatgttaatgaggtatcaactgatgaagctctcctgaaaaggtatagaaaagaaataatggatcttaaaaaacaattagaggaggtttctttagagacgcgggctcaggcaatggaaaaagaccaattggcccaacttttggaagaaaaagatttgcttcagaaagtacagaatgagaaaattgaaaacttaacacggatgctggtgacctcttcttccctcacgttgcaacaggaattaaaggctaaaagaaaacgaagagttacttggtgccttggcaaaattaacaaaatgaagaactcaaactatgcagatcaatttaatataccaacaaatataacaacaaaaacacataagctttctataaatttattacgagaaattgatgaatctgtctgttcagagtctgatgttttcagtaacactcttgatacattaagtgagatagaatggaatccagcaacaaagctactaaatcaggagaatatagaaagtgagttgaactcacttcgtgctgactatgataatctggtattagactatgaacaactacgaacagaaaaagaagaaatggaattgaaattaaaagaaaagaatgatttggatgaatttgaggctctagaaagaaaaactaaaaaagatcaagagatgcaactaattcatgaaatttcgaacttaaagaatttagttaagcatgcagaagtatataatcaagatcttgagaatgaactcagttcaaaagtagagctgcttagagaaaaggaagaccagattaagaagctacaggaatacatagactctcaaaagctagaaaatataaaaatggacttgtcatactcattggaaagcattgaagacccaaaacaaatgaagcagactctgtttgatgctgaaactgtagcccttgatgccaagagagaatcagcctttcttagaagtgaaaatctggagctgaaggagaaaatgaaagaacttgcaactacatacaagcaaatggaaaatgatattcagttatatcaaagccagttggaggcaaaaaagaaaatgcaagttgatctggagaaagaattacaatctgcttttaatgagataacaaaactcacctcccttatagatggcaaagttccaaaagatttgctctgtaatttggaattggaaggaaagattactgatcttcagaaagaactaaataaagaagttgaagaaaatgaagctttgcgggaagaagtcattttgctttcagaattgaaatctttaccttctgaagtagaaaggctgaggaaagagatacaagacaaatctgaagagctccatataataacatcagaaaaagataaattgttttctgaagtagttcataaggagagtagagttcaaggtttacttgaagaaattgggaaaacaaaagatgacctagcaactacacagtcgaattataaaagcactgatcaagaattccaaaatttcaaaacccttcatatggactttgagcaaaagtataagatggtccttgaggagaatgagagaatgaatcaggaaatagttaatctctctaaagaagcccaaaaatttgattcgagtttgggtgctttgaagaccgagctttcttacaagacccaagaacttcaggagaaaacacgtgaggttcaagaaagactaaatgagatggaacagctgaaggaacaattagaaaatagagattctacgctgcaaactgtagaaagggagaaaacactgattactgagaaactgcagcaaactttagaagaagtaaaaactttaactcaagaaaaagatgatctaaaacaactccaagaaagcttgcaaattgagagggaccaactcaaaagtgatattcacgatactgttaacatgaatatagatactcaagaacaattacgaaatgctcttgagtctctgaaacaacatcaagaaacaattaatacactaaaatcgaaaatttctgaggaagtttccaggaatttgcatatggaggaaaatacaggagaaactaaagatgaatttcagcaaaagatggttggcatagataaaaaacaggatttggaagctaaaaatacccaaacactaactgcagatgttaaggataatgagataattgagcaacaaaggaagatattttctttaatacaggagaaaaatgaactccaacaaatgttagagagtgttatagcagaaaaggaacaattgaagactgacctaaaggaaaatattgaaatgaccattgaaaaccaggaagaattaagacttcttggggatgaacttaaaaagcaacaagagatagttgcacaagaaaagaaccatgccataaagaaagaaggagagctttctaggacctgtgacagactggcagaagttgaag

SEQ ID NO: 116337 - DNA, 581 bp, Homo sapiens
  Payload ID: 2699
  Gene Symbol: CENPE
  Gene Name: centromere protein E, 312kDa
  ENST ID: ENST00000514974
  CDS Start-End: 31-581
attttcctgggaccagttcagcctgataggatggcggaggaaggagccgtggccgtctgcgtgcgagtgcggccgctgaacagcagagaagaatcacttggagaaactgcccaagtttactggaaaactgacaataatgtcatttatcaagttgatggaagtaaatccttcaattttgatcgtgtctttcatggtaatgaaactaccaaaaatgtgtatgaagaaatagcagcaccaatcatcgattctgccatacaaggctacaatggtactatatttgcctatggacagactgcttcaggaaaaacatataccatgatgggttcagaagatcatttgggagttatacccagggcaattcatgacattttccaaaaaattaagaagaggaatgtgtatgttgctgatctcacagaagaagttgtatatacatcagaaatggctttgaaatggattacaaagggagaaaagagcaggcattatggagaaacaaaaatgaatcaaagaagcagtcgttctcataccatctttaggatgattttggaaagcagagagaagggtgaaccttctaattgtgaagg

SEQ ID NO: 116338 - DNA, 8260 bp, Homo sapiens
  Payload ID: 2699
  Gene Symbol: CENPE
  Gene Name: centromere protein E, 312kDa
  ENST ID: ENST00000611174
  CDS Start-End: 91-8085
taaatttaaaggcggggcggcctgtgagccctgaagtgccggccgcggagggtcctggccattttcctgggaccagttcagcctgataggatggcggaggaaggagccgtggccgtctgcgtgcgagtgcggccgctgaacagcagagaagaatcacttggagaaactgcccaagtttactggaaaactgacaataatgtcatttatcaagttgatggaagtaaatccttcaattttgatcgtgtctttcatggtaatgaaactaccaaaaatgtgtatgaagaaatagcagcaccaatcatcgattctgccatacaaggctacaatggtactatatttgcctatggacagactgcttcaggaaaaacatataccatgatgggttcagaagatcatttgggagttatacccagggcaattcatgacattttccaaaaaattaagaagtttcctgatagggaatttctcttacgtgtatcttacatggaaatatacaatgaaaccattacagatttactctgtggcactcaaaaaatgaaacctttaattattcgagaagatgtcaataggaatgtgtatgttgctgatctcacagaagaagttgtatatacatcagaaatggctttgaaatggattacaaagggagaaaagagcaggcattatggagaaacaaaaatgaatcaaagaagcagtcgttctcataccatctttaggatgattttggaaagcagagagaagggtgaaccttctaattgtgaaggatctgttaaggtatcccatttgaatttggttgatcttgcaggcagtgaaagagctgctcaaacaggcgctgcaggtgtgcggctcaaggaaggctgtaatataaatcgaagcttatttattttgggacaagtgatcaagaaacttagtgatggacaagttggtggtttcataaattatcgagatagcaagttaacacgaattctccagaattccttgggaggaaatgcaaagacacgtattatctgcacaattactccagtatcttttgatgaaacacttactgctctccagtttgccagtactgctaaatatatgaagaatactccttatgttaatgaggtatcaactgatgaagctctcctgaaaaggtatagaaaagaaataatggatcttaaaaaacaattagaggaggtttctttagagacgcgggctcaggcaatggaaaaagaccaattggcccaacttttggaagaaaaagatttgcttcagaaagtacagaatgagaaaattgaaaacttaacacggatgctggtgacctcttcttccctcacgttgcaacaggaattaaaggctaaaagaaaacgaagagttacttggtgccttggcaaaattaacaaaatgaagaactcaaactatgcagatcaatttaatataccaacaaatataacaacaaaaacacataagctttctataaatttattacgagaaattgatgaatctgtctgttcagagtctgatgttttcagtaacactcttgatacattaagtgagatagaatggaatccagcaacaaagctactaaatcaggagaatatagaaagtgagttgaactcacttcgtgctgactatgataatctggtattagactatgaacaactacgaacagaaaaagaagaaatggaattgaaattaaaagaaaagaatgatttggatgaatttgaggctctagaaagaaaaactaaaaaagatcaagagatgcaactaattcatgaaatttcgaacttaaagaatttagttaagcatgcagaagtatataatcaagatcttgagaatgaactcagttcaaaagtagagctgcttagagaaaaggaagaccagattaagaagctacaggaatacatagactctcaaaagctagaaaatataaaaatggacttgtcatactcattggaaagcattgaagacccaaaacaaatgaagcagactctgtttgatgctgaaactgtagcccttgatgccaagagagaatcagcctttcttagaagtgaaaatctggagctgaaggagaaaatgaaagaacttgcaactacatacaagcaaatggaaaatgatattcagttatatcaaagccagttggaggcaaaaaagaaaatgcaagttgatctggagaaagaattacaatctgcttttaatgagataacaaaactcacctcccttatagatggcaaagttccaaaagatttgctctgtaatttggaattggaaggaaagattactgatcttcagaaagaactaaataaagaagttgaagaaaatgaagctttgcgggaagaagtcattttgctttcagaattgaaatctttaccttctgaagtagaaaggctgaggaaagagatacaagacaaatctgaagagctccatataataacatcagaaaaagataaattgttttctgaagtagttcataaggagagtagagttcaaggtttacttgaagaaattgggaaaacaaaagatgacctagcaactacacagtcgaattataaaagcactgatcaagaattccaaaatttcaaaacccttcatatggactttgagcaaaagtataagatggtccttgaggagaatgagagaatgaatcaggaaatagttaatctctctaaagaagcccaaaaatttgattcgagtttgggtgctttgaagaccgagctttcttacaagacccaagaacttcaggagaaaacacgtgaggttcaagaaagactaaatgagatggaacagctgaaggaacaattagaaaatagagattctacgctgcaaactgtagaaagggagaaaacactgattactgagaaactgcagcaaactttagaagaagtaaaaactttaactcaagaaaaagatgatctaaaacaactccaagaaagcttgcaaattgagagggaccaactcaaaagtgatattcacgatactgttaacatgaatatagatactcaagaacaattacgaaatgctcttgagtctctgaaacaacatcaagaaacaattaatacactaaaatcgaaaatttctgaggaagtttccaggaatttgcatatggaggaaaatacaggagaaactaaagatgaatttcagcaaaagatggttggcatagataaaaaacaggatttggaagctaaaaatacccaaacactaactgcagatgttaaggataatgagataattgagcaacaaaggaagatattttctttaatacaggagaaaaatgaactccaacaaatgttagagagtgttatagcagaaaaggaacaattgaagactgacctaaaggaaaatattgaaatgaccattgaaaaccaggaagaattaagacttcttggggatgaacttaaaaagcaacaagagatagttgcacaagaaaagaaccatgccataaagaaagaaggagagctttctaggacctgtgacagactggcagaagttgaagaaaaactaaaggaaaagagccagcaactccaagaaaaacagcaacaacttcttaatgtacaagaagagatgagtgagatgcagaaaaagattaatgaaatagagaatttaaagaatgaattaaagaacaaagaattgacattggaacatatggaaacagagaggcttgagttggctcagaaacttaatgaaaattatgaggaagtgaaatctataaccaaagaaagaaaagttctaaaggaattacagaagtcatttgaaacagagagagaccaccttagaggatatataagagaaattgaagctacaggcctacaaaccaaagaagaactaaaaattgctcatattcacctaaaagaacaccaagaaactattgatgaactaagaagaagcgtatctgagaagacagctcaaataataaatactcaggacttagaaaaatcccataccaaattacaagaagagatcccagtgcttcatgaggaacaagagttactgcctaatgtgaaagaagtcagtgagactcaggaaacaatgaatgaactggagttattaacagaacagtccacaaccaaggactcaacaacactggcaagaatagaaatggaaaggctcaggttgaatgaaaaatttcaagaaagtcaggaagagataaaatctctaaccaaggaaagagacaaccttaaaacgataaaagaagcccttgaagttaaacatgaccagctgaaagaacatattagagaaactttggctaaaatccaggagtctcaaagcaaacaagaacagtccttaaatatgaaagaaaaagacaatgaaactaccaaaatcgtgagtgagatggagcaattcaaacccaaagattcagcactactaaggatagaaatagaaatgctcggattgtccaaaagacttcaagaaagtcatgatgaaatgaaatctgtagctaaggagaaagatgacctacagaggctgcaagaagttcttcaatctgaaagtgaccagctcaaagaaaacataaaagaaattgtagctaaacacctggaaactgaagaggaacttaaagttgctcattgttgcctgaaagaacaagaggaaactattaatgagttaagagtgaatctttcagagaaggaaactgaaatatcaaccattcaaaagcagttagaagcaatcaatgataaattacagaacaagatccaagagatttatgagaaagaggaacaatttaatataaaacaaattagtgaggttcaggaaaaagtgaatgaactgaaacaattcaaggagcatcgcaaagccaaggattcagcactacaaagtatagaaagtaagatgctcgagttgaccaacagacttcaagaaagtcaagaagaaatacaaattatgattaaggaaaaagaggaaatgaaaagagtacaggaggcccttcagatagagagagaccaactgaaagaaaacactaaagaaattgtagctaaaatgaaagaatctcaagaaaaagaatatcagtttcttaagatgacagctgtcaatgagactcaggagaaaatgtgtgaaatagaacacttgaaggagcaatttgagacccagaagttaaacctggaaaacatagaaacggagaatataaggttgactcagatactacatgaaaaccttgaagaaatgagatctgtaacaaaagaaagagatgaccttaggagtgtggaggagactctcaaagtagagagagaccagctcaaggaaaaccttagagaaactataactagagacctagaaaaacaagaggagctaaaaattgttcacatgcatctgaaggagcaccaagaaactattgataaactaagagggattgtttcagagaaaacaaatgaaatatcaaatatgcaaaaggacttagaacactcaaatgatgccttaaaagcacaggatctgaaaatacaagaggaactaagaattgctcacatgcatctgaaagagcagcaggaaactattgacaaactcagaggaattgtttctgagaagacagataaactatcaaatatgcaaaaagatttagaaaattcaaatgctaaattacaagaaaagattcaagaacttaaggcaaatgaacatcaacttattacgttaaaaaaagatgtcaatgagacacagaaaaaagtgtctgaaatggagcaactaaagaaacaaataaaagaccaaagcttaactctgagtaaattagaaatagagaatttaaatttggctcagaaacttcatgaaaaccttgaagaaatgaaatctgtaatgaaagaaagagataatctaagaagagtagaggagacactcaaactggagagagaccaactcaaggaaagcctgcaagaaaccaaagctagagatctggaaatacaacaggaactaaaaactgctcgtatgctatcaaaagaacacaaagaaactgttgataaacttagagaaaaaatttcagaaaagacaattcaaatttcagacattcaaaaggatttagataaatcaaaagatgaattacagaaaaagatccaagaacttcagaaaaaagaacttcaactgcttagagtgaaagaagatgtcaatatgagtcataaaaaaattaatgaaatggaacagttgaagaagcaatttgaggcccaaaactatctatgcaagtgtgagatggataacttccagttgactaagaaacttcatgaaagccttgaagaaataagaattgtagctaaagaaagagatgagctaaggaggataaaagaatctctcaaaatggaaagggaccaattcatagcaaccttaagggaaatgatagctagagaccgacagaaccaccaagtaaaacctgaaaaaaggttactaagtgatggacaacagcaccttacggaaagcctgagagaaaagtgctctagaataaaagagcttttgaagagatactcagagatggatgatcattatgagtgcttgaatagattgtctcttgacttggagaaggaaatggaattccacagaatcatgaagaaactgaagtatgtgttaagctatgttacaaaaataaaagaagaacaacatgaatccatcaataaatttgaaatggattttattgatgaagtggaaaagcaaaaggaattgctaattaaaatacagcaccttcaacaagattgtgatgtaccatccagagaattaagggatctcaaattgaaccagaatatggatctacatattgaggaaattctcaaagatttctcagaaagtgagttccctagcataaagactgaatttcaacaagtactaagtaataggaaagaaatgacacagtttttggaagagtggttaaatactcgttttgatatagaaaagcttaaaaatggcatccagaaagaaaatgataggatttgtcaagtgaataacttctttaataacagaataattgccataatgaatgaatcaacagagtttgaggaaagaagtgctaccatatccaaagagtgggaacaggacctgaaatcactgaaagagaaaaatgaaaaactatttaaaaactaccaaacattgaagacttccttggcatctggtgcccaggttaatcctaccacacaagacaataagaatcctcatgttacatcaagagctacacagttaaccacagagaaaattcgagagctggaaaattcactgcatgaagctaaagaaagtgctatgcataaggaaagcaagattataaagatgcagaaagaacttgaggtgactaatgacataatagcaaaacttcaagccaaagttcatgaatcaaataaatgccttgaaaaaacaaaagagacaattcaagtacttcaggacaaagttgctttaggagctaagccatataaagaagaaattgaagatctcaaaatgaagcttgtgaaaatagacctagagaaaatgaaaaatgccaaagaatttgaaaaggaaatcagtgctacaaaagccactgtagaatatcaaaaggaagttataaggctattgagagaaaatctcagaagaagtcaacaggcccaagatacctcagtgatatcagaacatactgatcctcagccttcaaataaacccttaacttgtggaggtggcagcggcattgtacaaaacacaaaagctcttattttgaaaagtgaacatataaggctagaaaaagaaatttctaagttaaagcagcaaaatgaacagctaataaaacaaaagaatgaattgttaagcaataatcagcatctttccaatgaggtcaaaacttggaaggaaagaacccttaaaagagaggctcacaaacaagtaacttgtgagaattctccaaagtctcctaaagtgactggaacagcttctaaaaagaaacaaattacaccctctcaatgcaaggaacggaatttacaagatcctgtgccaaaggaatcaccaaaatcttgtttttttgatagccgatcaaagtctttaccatcacctcatccagttcgctattttgataactcaagtttaggcctttgtccagaggtgcaaaatgcaggagcagagagtgtggattctcagccaggtccttggcacgcctcctcaggcaaggatgtgcctgagtgcaaaactcagtagactcctctttgtcacttctctggagatccagcattccttatttggaaatgactttgtttatgtgtctatccctggtaatgatgttgtagtgcagcttaatttcaattcagtctttactttgccactagagttgaaagataagggaacaggaaatgaatgcattgtggtaatttag

SEQ ID NO: 116339 - DNA, 10307 bp, Homo sapiens
  Payload ID: 2700
  Gene Symbol: CENPF
  Gene Name: centromere protein F, 350/400kDa
  Uniprot ID: P49454
  ENST ID: ENST00000366955
  CDS Start-End: 169-9513
agaagcgggcgaattgggcaccggtggcggctgcgggcagtttgaattagactctgggctccagcccgccgaagccgcgccagaactgtactctccgagaggtcgttttcccgtccccgagagcaagtttatttacaaatgttggagtaataaagaaggcagaacaaaatgagctgggctttggaagaatggaaagaagggctgcctacaagagctcttcagaaaattcaagagcttgaaggacagcttgacaaactgaagaaggaaaagcagcaaaggcagtttcagcttgacagtctcgaggctgcgctgcagaagcaaaaacagaaggttgaaaatgaaaaaaccgagggtacaaacctgaaaagggagaatcaaagattgatggaaatatgtgaaagtctggagaaaactaagcagaagatttctcatgaacttcaagtcaaggagtcacaagtgaatttccaggaaggacaactgaattcaggcaaaaaacaaatagaaaaactggaacaggaacttaaaaggtgtaaatctgagcttgaaagaagccaacaagctgcgcagtctgcagatgtctctctgaatccatgcaatacaccacaaaaaatttttacaactccactaacaccaagtcaatattatagtggttccaagtatgaagatctaaaagaaaaatataataaagaggttgaagaacgaaaaagattagaggcagaggttaaagccttgcaggctaaaaaagcaagccagactcttccacaagccaccatgaatcaccgcgacattgcccggcatcaggcttcatcatctgtgttctcatggcagcaagagaagaccccaagtcatctttcatctaattctcaaagaactccaattaggagagatttctctgcatcttacttttctggggaacaagaggtgactccaagtcgatcaactttgcaaatagggaaaagagatgctaatagcagtttctttgacaattctagcagtcctcatcttttggatcaattaaaagcgcagaatcaagagctaagaaacaagattaatgagttggaactacgcctgcaaggacatgaaaaagaaatgaaaggccaagtgaataagtttcaagaactccaactccaactggagaaagcaaaagtggaattaattgaaaaagagaaagttttgaacaaatgtagggatgaactagtgagaacaacagcacaatacgaccaggcgtcaaccaagtatactgcattggaacaaaaactgaaaaaattgacggaagatttgagttgtcagcgacaaaatgcagaaagtgccagatgttctctggaacagaaaattaaggaaaaagaaaaggagtttcaagaggagctctcccgtcaacagcgttctttccaaacactggaccaggagtgcatccagatgaaggccagactcacccaggagttacagcaagccaagaatatgcacaacgtcctgcaggctgaactggataaactcacatcagtaaagcaacagctagaaaacaatttggaagagtttaagcaaaagttgtgcagagctgaacaggcgttccaggcgagtcagatcaaggagaatgagctgaggagaagcatggaggaaatgaagaaggaaaacaacctccttaagagtcactctgagcaaaaggccagagaagtctgccacctggaggcagaactcaagaacatcaaacagtgtttaaatcagagccagaattttgcagaagaaatgaaagcgaagaatacctctcaggaaaccatgttaagagatcttcaagaaaaaataaatcagcaagaaaactccttgactttagaaaaactgaagcttgctgtggctgatctggaaaagcagcgagattgttctcaagaccttttgaagaaaagagaacatcacattgaacaacttaatgataagttaagcaagacagagaaagagtccaaagccttgctgagtgctttagagttaaaaaagaaagaatatgaagaattgaaagaagagaaaactctgttttcttgttggaaaagtgaaaacgaaaaacttttaactcagatggaatcagaaaaggaaaacttgcagagtaaaattaatcacttggaaacttgtctgaagacacagcaaataaaaagtcatgaatacaacgagagagtaagaacgctggagatggacagagaaaacctaagtgtcgagatcagaaaccttcacaacgtgttagacagtaagtcagtggaggtagagacccagaaactagcttatatggagctacagcagaaagctgagttctcagatcagaaacatcagaaggaaatagaaaatatgtgtttgaagacttctcagcttactgggcaagttgaagatctagaacacaagcttcagttactgtcaaatgaaataatggacaaagaccggtgttaccaagacttgcatgccgaatatgagagcctcagggatctgctaaaatccaaagatgcttctctggtgacaaatgaagatcatcagagaagtcttttggcttttgatcagcagcctgccatgcatcattcctttgcaaatataattggagaacaaggaagcatgccttcagagaggagtgaatgtcgtttagaagcagaccaaagtccgaaaaattctgccatcctacaaaatagagttgattcacttgaattttcattagagtctcaaaaacagatgaactcagacctgcaaaagcagtgtgaagagttggtgcaaatcaaaggagaaatagaagaaaatctcatgaaagcagaacagatgcatcaaagttttgtggctgaaacaagtcagcgcattagtaagttacaggaagacacttctgctcaccagaatgttgttgctgaaaccttaagtgcccttgagaacaaggaaaaagagctgcaacttttaaatgataaggtagaaactgagcaggcagagattcaagaattaaaaaagagcaaccatctacttgaagactctctaaaggagctacaacttttatccgaaaccctaagcttggagaagaaagaaatgagttccatcatttctctaaataaaagggaaattgaagagctgacccaagagaatgggactcttaaggaaattaatgcatccttaaatcaagagaagatgaacttaatccagaaaagtgagagttttgcaaactatatagatgaaagggagaaaagcatttcagagttatctgatcagtacaagcaagaaaaacttattttactacaaagatgtgaagaaaccggaaatgcatatgaggatcttagtcaaaaatacaaagcagcacaggaaaagaattctaaattagaatgcttgctaaatgaatgcactagtctttgtgaaaataggaaaaatgagttggaacagctaaaggaagcatttgcaaaggaacaccaagaattcttaacaaaattagcatttgctgaagaaagaaatcagaatctgatgctagagttggagacagtgcagcaagctctgagatctgagatgacagataaccaaaacaattctaagagcgaggctggtggtttaaagcaagaaatcatgactttaaaggaagaacaaaacaaaatgcaaaaggaagttaatgacttattacaagagaatgaacagctgatgaaggtaatgaagactaaacatgaatgtcaaaatctagaatcagaaccaattaggaactctgtgaaagaaagagagagtgagagaaatcaatgtaattttaaacctcagatggatcttgaagttaaagaaatttctctagatagttataatgcgcagttggtgcaattagaagctatgctaagaaataaggaattaaaacttcaggaaagtgagaaggagaaggagtgcctgcagcatgaattacagacaattagaggagatcttgaaaccagcaatttgcaagacatgcagtcacaagaaattagtggccttaaagactgtgaaatagatgcggaagaaaagtatatttcagggcctcatgagttgtcaacaagtcaaaacgacaatgcacaccttcagtgctctctgcaaacaacaatgaacaagctgaatgagctagagaaaatatgtgaaatactgcaggctgaaaagtatgaactcgtaactgagctgaatgattcaaggtcagaatgtatcacagcaactaggaaaatggcagaagaggtagggaaactactaaatgaagttaaaatattaaatgatgacagtggtcttctccatggtgagttagtggaagacataccaggaggtgaatttggtgaacaaccaaatgaacagcaccctgtgtctttggctccattggacgagagtaattcctacgagcacttgacattgtcagacaaagaagttcaaatgcactttgccgaattgcaagagaaattcttatctttacaaagtgaacacaaaattttacatgatcagcactgtcagatgagctctaaaatgtcagagctgcagacctatgttgactcattaaaggccgaaaatttggtcttgtcaacgaatctgagaaactttcaaggtgacttggtgaaggagatgcagctgggcttggaggaggggctcgttccatccctgtcatcctcttgtgtgcctgacagctctagtcttagcagtttgggagactcctccttttacagagctcttttagaacagacaggagatatgtctcttttgagtaatttagaaggggctgtttcagcaaaccagtgcagtgtagatgaagtattttgcagcagtctgcaggaggagaatctgaccaggaaagaaaccccttcggccccagcgaagggtgttgaagagcttgagtccctctgtgaggtgtaccggcagtccctcgagaagctagaagagaaaatggaaagtcaagggattatgaaaaataaggaaattcaagagctcgagcagttattaagttctgaaaggcaagagcttgactgccttaggaagcagtatttgtcagaaaatgaacagtggcaacagaagctgacaagcgtgactctggagatggagtccaagttggcggcagaaaagaaacagacggaacaactgtcacttgagctggaagtagcacgactccagctacaaggtctggacttaagttctcggtctttgcttggcatcgacacagaagatgctattcaaggccgaaatgagagctgtgacatatcaaaagaacatacttcagaaactacagaaagaacaccaaagcatgatgttcatcagatttgtgataaagatgctcagcaggacctcaatctagacattgagaaaataactgagactggtgcagtgaaacccacaggagagtgctctggggaacagtccccagataccaattatgagcctccaggggaagataaaacccagggctcttcagaatgcatttctgaattgtcattttctggtcctaatgctttggtacctatggatttcctggggaatcaggaagatatccataatcttcaactgcgggtaaaagagacatcaaatgagaatttgagattacttcatgtgatagaggaccgtgacagaaaagttgaaagtttgctaaatgaaatgaaagaattagactcaaaactccatttacaggaggtacaactaatgaccaaaattgaagcatgcatagaattggaaaaaatagttggggaacttaagaaagaaaactcagatttaagtgaaaaattggaatatttttcttgtgatcaccaggagttactccagagagtagaaacttctgaaggcctcaattctgatttagaaatgcatgcagataaatcatcacgtgaagatattggagataatgtggccaaggtgaatgacagctggaaggagagatttcttgatgtggaaaatgagctgagtaggatcagatcggagaaagctagcattgagcatgaagccctctacctggaggctgacttagaggtagttcaaacagagaagctatgtttagaaaaagacaatgaaaataagcagaaggttattgtctgccttgaagaagaactctcagtggtcacaagtgagagaaaccagcttcgtggagaattagatactatgtcaaaaaaaaccacggcactggatcagttgtctgaaaaaatgaaggagaaaacacaagagcttgagtctcatcaaagtgagtgtctccattgcattcaggtggcagaggcagaggtgaaggaaaagacggaactccttcagactttgtcctctgatgtgagtgagctgttaaaagacaaaactcatctccaggaaaagctgcagagtttggaaaaggactcacaggcactgtctttgacaaaatgtgagctggaaaaccaaattgcacaactgaataaagagaaagaattgcttgtcaaggaatctgaaagcctgcaggccagactgagtgaatcagattatgaaaagctgaatgtctccaaggccttggaggccgcactggtggagaaaggtgagttcgcattgaggctgagctcaacacaggaggaagtgcatcagctgagaagaggcatcgagaaactgagagttcgcattgaggccgatgaaaagaagcagctgcacatcgcagagaaactgaaagaacgcgagcgggagaatgattcacttaaggataaagttgagaaccttgaaagggaattgcagatgtcagaagaaaaccaggagctagtgattcttgatgccgagaattccaaagcagaagtagagactctaaaaacacaaatagaagagatggccagaagcctgaaagtttttgaattagaccttgtcacgttaaggtctgaaaaagaaaatctgacaaaacaaatacaagaaaaacaaggtcagttgtcagaactagacaagttactctcttcatttaaaagtctgttagaagaaaaggagcaagcagagatacagatcaaagaagaatctaaaactgcagtggagatgcttcagaatcagttaaaggagctaaatgaggcagtagcagccttgtgtggtgaccaagaaattatgaaggccacagaacagagtctagacccaccaatagaggaagagcatcagctgagaaatagcattgaaaagctgagagcccgcctagaagctgatgaaaagaagcagctctgtgtcttacaacaactgaaggaaagtgagcatcatgcagatttacttaagggtagagtggagaaccttgaaagagagctagagatagccaggacaaaccaagagcatgcagctcttgaggcagagaattccaaaggagaggtagagaccctaaaagcaaaaatagaagggatgacccaaagtctgagaggtctggaattagatgttgttactataaggtcagaaaaagaaaatctgacaaatgaattacaaaaagagcaagagcgaatatctgaattagaaataataaattcatcatttgaaaatattttgcaagaaaaagagcaagagaaagtacagatgaaagaaaaatcaagcactgccatggagatgcttcaaacacaattaaaagagctcaatgagagagtggcagccctgcataatgaccaagaagcctgtaaggccaaagagcagaatcttagtagtcaagtagagtgtcttgaacttgagaaggctcagttgctacaaggccttgatgaggccaaaaataattatattgttttgcaatcttcagtgaatggcctcattcaagaagtagaagatggcaagcagaaactggagaagaaggatgaagaaatcagtagactgaaaaatcaaattcaagaccaagagcagcttgtctctaaactgtcccaggtggaaggagagcaccaactttggaaggagcaaaacttagaactgagaaatctgacagtggaattggagcagaagatccaagtgctacaatccaaaaatgcctctttgcaggacacattagaagtgctgcagagttcttacaagaatctagagaatgagcttgaattgacaaaaatggacaaaatgtcctttgttgaaaaagtaaacaaaatgactgcaaaggaaactgagctgcagagggaaatgcatgagatggcacagaaaacagcagagctgcaagaagaactcagtggagagaaaaataggctagctggagagttgcagttactgttggaagaaataaagagcagcaaagatcaattgaaggagctcacactagaaaatagtgaattgaagaagagcctagattgcatgcacaaagaccaggtggaaaaggaagggaaagtgagagaggaaatagctgaatatcagctacggcttcatgaagctgaaaagaaacaccaggctttgcttttggacacaaacaaacagtatgaagtagaaatccagacataccgagagaaattgacttctaaagaagaatgtctcagttcacagaagctggagatagaccttttaaagtctagtaaagaagagctcaataattcattgaaagctactactcagattttggaagaattgaagaaaaccaagatggacaatctaaaatatgtaaatcagttgaagaaggaaaatgaacgtgcccaggggaaaatgaagttgttgatcaaatcctgtaaacagctggaagaggaaaaggagatactgcagaaagaactctctcaacttcaagctgcacaggagaagcagaaaacaggtactgttatggataccaaggtcgatgaattaacaactgagatcaaagaactgaaagaaactcttgaagaaaaaaccaaggaggcagatgaatacttggataagtactgttccttgcttataagccatgaaaagttagagaaagctaaagagatgttagagacacaagtggcccatctgtgttcacagcaatctaaacaagattcccgagggtctcctttgctaggtccagttgttccaggaccatctccaatcccttctgttactgaaaagaggttatcatctggccaaaataaagcttcaggcaagaggcaaagatccagtggaatatgggagaatggtagaggaccaacacctgctaccccagagagcttttctaaaaaaagcaagaaagcagtcatgagtggtattcaccctgcagaagacacggaaggtactgagtttgagccagagggacttccagaagttgtaaagaaagggtttgctgacatcccgacaggaaagactagcccatatatcctgcgaagaacaaccatggcaactcggaccagcccccgcctggctgcacagaagttagcgctatccccactgagtctcggcaaagaaaatcttgcagagtcctccaaaccaacagctggtggcagcagatcacaaaaggtcaaagttgctcagcggagcccagtagattcaggcaccatcctccgagaacccaccacgaaatccgtcccagtcaataatcttcctgagagaagtccgactgacagccccagagagggcctgagggtcaagcgaggccgacttgtccccagccccaaagctggactggagtccaacggcagtgagaactgtaaggtccagtgaaggcactttgtgtgtcagtacccctgggaggtgccagtcattgaatagataaggctgtgcctacaggacttctctttagtcagggcatgctttattagtgaggagaaaacaattccttagaagtcttaaatatattgtactctttagatctcccatgtgtaggtattgaaaaagtttggaagcactgatcacctgttagcattgccattcctctactgcaatgtaaatagtataaagctatgtatataaagctttttggtaatatgttacaattaaaatgacaagcactatatcacaatctctgtttgtatgtgggttttacactaaaaaaatgcaaaacacattttattcttctaattaacagctcctaggaaaatgtagacttttgctttatgatattctatctgtagtatgaggcatggaatagttttgtatcgggaatttctcagagctgagtaaaatgaaggaaaagcatgttatgtgtttttaaggaaaatgtgcacacatatacatgtaggagtgtttatctttctcttacaatctgttttagacatctttgcttatgaaacctgtacatatgtgtgtgtgggtatgtgtttatttccagtgagggctgcaggcttcctagaggtgtgctataccatgcgtctgtcgttgtgcttttttctgtttttagaccaattttttacagttctttggtaagcattgtcgtatctggtgatggattaacatatagcctttgttttctaataaaatagtcgccttcgttttctgtaagaatgattcctaagtgt

SEQ ID NO: 116340 - DNA, 528 bp, Homo sapiens
  Payload ID: 2700
  Gene Symbol: CENPF
  Gene Name: centromere protein F, 350/400kDa
  ENST ID: ENST00000614578
  CDS Start-End: 1-528
ttgatgattaaaggaagaaaaggtaaggtaaacaaaatgactgcaaaggaaactgagctgcagagggaaatgcatgagatggcacagaaaacagcagagctgcaagaagaactcagtggagagaaaaataggctagctggagagttgcagttactgttggaagaaataaagagcagcaaagatcaattgaaggagctcacactagaaaatagtgaattgaagaagagcctagattgcatgcacaaagaccaggtggaaaaggaagggaaagtgagagaggaaatagctgaatatcagctacggcttcatgaagctgaaaagaaacaccaggctttgcttttggacacaaacaaacagtatgaagtagaaatccagacataccgagagaaattgacttctaaagaagaatgtctcagttcacagaagctggagatagaccttttaaagtctagtaaagaagagctcaataattcattgaaagctactactcagattttggaagaattgaagaaaaccaaggaacaatga

SEQ ID NO: 116341 - DNA, 1389 bp, Homo sapiens
  Payload ID: 2701
  Gene Symbol: CENPH
  Gene Name: centromere protein H
  Uniprot ID: Q9H3R5
  ENST ID: ENST00000283006
  CDS Start-End: 88-831
tttcccggcgtccatttagtggcgggaaaagcgaccttttctgagcgcgtttgcctgttgagtggtagcctttcccctcaaccagcaatggaggagcagccccagatgcaagacgccgacgagcccgcggactccggaggggaaggccgggcaggcgggccaccgcaggtcgccggcgcccaggcggcgtgcagcgaggaccgcatgaccctgctcctcaggctgagagcacagacaaaacaacaactcttagaatataaatcaatggttgatgcaagtgaagaaaaaactccagaacaaattatgcaagaaaagcaaatcgaagctaaaattgaagacctggaaaatgaaattgaagaggtaaaagttgcttttgagataaaaaagcttgcattagacaggatgagactttcaactgcacttaaaaaaaacctggagaaaattagcagacagtctagtgtgctcatggataacatgaaacacctattagagctaaataaattaataatgaaatcacagcaggaatcttgggatttagaggaaaaactgcttgatattagaaagaagagattgcaattaaaacaagcttcagaaagtaagcttttagaaatacagactgaaaagaacaaacagaagattgatttggacagtatggaaaactcagagaggataaagatcatacgacaaaacctacagatggagataaaaattactactgttattcaacatgtgttccagaaccttattttggggagtaaagtcaattgggcagaggatcctgcccttaaggaaattgttctgcagcttgagaagaatgttgacatgatgtaataagaattcatttctgacatattttacatttctggcaatctcaactcttatttggaatacttctgtgcatttgtctgtccaccgtaattttagaaaagcatatccataacgtttacagttgtagtacagttgtggttagttatttgtagtgggattgaaagtaatttttttctttttatatttctatatttagtttgtttttttgttgttgttgttttttgagatggagtctcgctttgttgcccagactggagggcagtggcgcgatctcggctcactgcaacctctgcctcccgggttcaagcagttctgcctcagcctcccaagtagctgtgactaaaggtgcacgccgccatgcccagctaattttttgtattttagtagagacggggtttcaccgtgttgcccaggctgctctcagaactcctgagctcaggcagtccaccgcctcggcctaccgaagtgctaggattacagacgtaagccaccgagcctggtctagtttgcattttttttctatcagttttataagttaagaaataaaaggaattaatgtta

SEQ ID NO: 116342 - DNA, 437 bp, Homo sapiens
  Payload ID: 2701
  Gene Symbol: CENPH
  Gene Name: centromere protein H
  ENST ID: ENST00000513575
  CDS Start-End: 44-340
gcgcgtttgcctgttgagtggtagcctttcccctcaaccagcaatggaggagcagccccagatgcaagacgccgacgagcccgcggactccggaggggaaggccgggcaggcgggccaccgcaggtcgccggcgcccaggcggcgtgcagcgaggaccgcatgaccctgctcctcaggctgagagcacagacaaaacaacaactcttagaatataaatcaatggttgatgcaagtgaagaaaaaactccagaacaaattatgcaagaaaagcaaatcgaagctaaaattgaagacctggaaaatgaaattgaagaggatgagactttcaactgcacttaaaaaaaacctggagaaaattagcagacagtctagtgtgctcatggataacatgaaacacctattagagctaaataaattaataatgaaatcacagcag

SEQ ID NO: 116343 - DNA, 692 bp, Homo sapiens
  Payload ID: 2701
  Gene Symbol: CENPH
  Gene Name: centromere protein H
  ENST ID: ENST00000502689
  CDS Start-End: 1-562
cgaggaccgcatgaccctgctcctcaggctgagagcacagacaaaacaacaactcttagaatataaatcaatggttgatgcaagtgaagaaaaaactccagaacaaattatgcaagaaaagcaaatcgaagcgatgagactttcaactgcacttaaaaaaaacctggagaaaattagcagacagtctagtgtgctcatggataacatgaaacacctattagagctaaataaattaataatgaaatcacagcaggaatcttgggatttagaggaaaaactgcttgatattagaaagaagagattgcaattaaaacaagcttcagaaagtaagcttttagaaatacagactgaaaagaacaaacagaagattgatttggacagtatggaaaactcagagaggataaagatcatacgacaaaacctacagatggagataaaaattactactgttattcaacatgtgttccagaaccttattttggggagtaaagtcaattgggcagaggatcctgcccttaaggaaattgttctgcagcttgagaagaatgttgacatgatgtaataagaattcatttctgacatattttacatttctggcaatctcaactcttatttggaatacttctgtgcatttgtctgtccaccgtaattttagaaaagcatatccataacgtttacagttgtagtacagt

SEQ ID NO: 116344 - DNA, 1305 bp, Homo sapiens
  Payload ID: 2701
  Gene Symbol: CENPH
  Gene Name: centromere protein H
  ENST ID: ENST00000515001
  CDS Start-End: 62-748
aaaagcgaccttttctgagcgcgtttgcctgttgagtggtagcctttcccctcaaccagcaatggaggagcagccccagatgcaagacgccgacgagcccgcggactccggaggggaaggccgggcaggcgggccaccgcaggtcgccggcgcccaggcggcgtgcagcgaggaccgcatgaccctgctcctcaggctgagagcacagacaaaacaacaactcttagaatataaatcaatggttgatgcaagtgaagaaaaaactccagaacaaattatgcaagaaaagcaaatcgaagctaaaattgaagacctggaaaatgaaattgaagaggtaaaagttgcttttgagataaaaaagcttgcattagacagtgtgctcatggataacatgaaacacctattagagctaaataaattaataatgaaatcacagcaggaatcttgggatttagaggaaaaactgcttgatattagaaagaagagattgcaattaaaacaagcttcagaaagtaagcttttagaaatacagactgaaaagaacaaacagaagattgatttggacagtatggaaaactcagagaggataaagatcatacgacaaaacctacagatggagataaaaattactactgttattcaacatgtgttccagaaccttattttggggagtaaagtcaattgggcagaggatcctgcccttaaggaaattgttctgcagcttgagaagaatgttgacatgatgtaataagaattcatttctgacatattttacatttctggcaatctcaactcttatttggaatacttctgtgcatttgtctgtccaccgtaattttagaaaagcatatccataacgtttacagttgtagtacagttgtggttagttatttgtagtgggattgaaagtaatttttttctttttatatttctatatttagtttgtttttttgttgttgttgttttttgagatggagtctcgctttgttgcccagactggagggcagtggcgcgatctcggctcactgcaacctctgcctcccgggttcaagcagttctgcctcagcctcccaagtagctgtgactaaaggtgcacgccgccatgcccagctaattttttgtattttagtagagacggggtttcaccgtgttgcccaggctgctctcagaactcctgagctcaggcagtccaccgcctcggcctaccgaagtgctaggattacagacgtaagccaccgagcctggtctagtttgcattttttttctatcagttttataagttaagaaataaaaggaattaatgtt

SEQ ID NO: 116345 - DNA, 2375 bp, Homo sapiens
  Payload ID: 2702
  Gene Symbol: CENPI
  Gene Name: centromere protein I
  Uniprot ID: Q92674
  ENST ID: ENST00000372926
  CDS Start-End: 278-1846
acagggtctcactgtgtcacccaggctggagtgcagtagtgcaatctctgctcactgcagccttcacctcctgggttcaagtgattctcctgcctcagcctcccgagtagctgggattacaggtgtgtgccaccatgcccaactagtttttgtattttttagcagagacggggtttcctcatattggccaggctggtctcaaactcctgtacgcctgacctcaagtcaggcccacctcggcctcccagagtgctgggattacagaacatatgcagtaatgtcacctcaaaagagagttaagaacgtccaggcacaaaacaggacttcacaaggtagtagtagttttcagaccacgctttcagcctggaaagtaaaacaggatccaagcaactcgaagaacatctcaaaacatggacaaaacaatccagtgggagattatgaacatgctgatgatcaagctgaagaagatgctttgcaaatggcagtgggatattttgagaaaggtcccattaaagcttcacagaataaagataaaaccttggaaaaacacttgaaaactgtggaaaatgtggcttggaagaatgggttagcttcagaagaaattgatattctattaaatattgcactcagtggcaaatttggaaatgctgtaaacacacggatattgaagtgcatgatcccagcaacagtaatatcagaagattctgtggttaaggcagtctcctggctttgtgttggcaagtgttctggtagcaccaaggtacttttttatcgttggctggttgcaatgtttgacttcattgatcgtaaggagcaaattaacttgctctatggcttcttttttgcttcattgcaagatgatgcactgtgcccttatgtttgccatttgttatatttacttaccaaaaaagagaatgtcaaaccatttcgtgtgagaaaactgcttgatcttcaggccaaaatgggaatgcagcctcatctccaggctttgttgtcactgtataagttctttgctcctgctctgatttcagtatctttgcctgtaaggaagaagatatattttaagaattcagagaatctatggaagacggctctgcttgccgtgaagcaaagaaaccggggaccttctccagaacctctgaagttgatgttaggtccagctaatgttcgtcctctaaaaagaaagtggaattctctctcagttataccagtgctcaattccagtagctacactaaagaatgtggaaaaaaagagatgagtctttctgattgtctgaatagaagtggatcatttccactagaacaacttcaaagcttcccccaacttttacagaacatccattgcttagagctgccttctcagatgggctcagtgctaaacaactctctgctgcttcactacattaactgtgtcagagatgagccagtcttgctgaggttttattactggttgagtcaaacattacaagaagaatgtatttggtacaaggtgaataattatgaacatggaaaagaatttaccaacttcctggataccatcatcagggcagagtgcttcttacaagaggggttttattcctgtgaagcattcctgtataagagccttcctctctgggatggcctttgttgtcggtcacagttccttcagcttgtgagctggattccttttagtagcttctctgaggtgaaaccacttctttttgaccatctagcgcagctcttctttacatcaaccatttatttcaagtgtagtgtgcttcagagtctgaaagagctattgcagaattggctgttgtggctttctatggacattcacatgaaacctgttacaaacagtcctctgtgagttatctaacggtcttccacaagagacgatctgtatacaaatgtttgcatatgtttaatagtgtggcgtgaaacaatttttttcatgtaaatgcttagtagtacttttttggaagacttttttgtgacttttcactcttcttcccccacaatcctgaaaggaaggctaattctctaagttcctattgtgtaaatcagaaagcaacccttatctgctaaatgacttctttcaagagttaatataacaaaacactagagagatgagactagaatttgcaactttgacttccattcagtttaactcattttataaattatattcttatatttaaagccaattttcatgatggctagaaaaatctctaacgtaattttgcgtacaactttgtttttatgtttctgtgctgtattttggttatatgtgttaatttatcttaactttggagtttaaaataagagccctaaattgttaaatgtgtgctttaccttcaaagtaaaagtaaaagactaaatttcaaggaactgcataa

SEQ ID NO: 116346 - DNA, 3262 bp, Homo sapiens
  Payload ID: 2702
  Gene Symbol: CENPI
  Gene Name: centromere protein I
  Uniprot ID: Q92674
  ENST ID: ENST00000372927
  CDS Start-End: 278-2548
acagggtctcactgtgtcacccaggctggagtgcagtagtgcaatctctgctcactgcagccttcacctcctgggttcaagtgattctcctgcctcagcctcccgagtagctgggattacaggtgtgtgccaccatgcccaactagtttttgtattttttagcagagacggggtttcctcatattggccaggctggtctcaaactcctgtacgcctgacctcaagtcaggcccacctcggcctcccagagtgctgggattacagaacatatgcagtaatgtcacctcaaaagagagttaagaacgtccaggcacaaaacaggacttcacaaggtagtagtagttttcagaccacgctttcagcctggaaagtaaaacaggatccaagcaactcgaagaacatctcaaaacatggacaaaacaatccagtgggagattatgaacatgctgatgatcaagctgaagaagatgctttgcaaatggcagtgggatattttgagaaaggtcccattaaagcttcacagaataaagataaaaccttggaaaaacacttgaaaactgtggaaaatgtggcttggaagaatgggttagcttcagaagaaattgatattctattaaatattgcactcagtggcaaatttggaaatgctgtaaacacacggatattgaagtgcatgatcccagcaacagtaatatcagaagattctgtggttaaggcagtctcctggctttgtgttggcaagtgttctggtagcaccaaggtacttttttatcgttggctggttgcaatgtttgacttcattgatcgtaaggagcaaattaacttgctctatggcttcttttttgcttcattgcaagatgatgcactgtgcccttatgtttgccatttgttatatttacttaccaaaaaagagaatgtcaaaccatttcgtgtgagaaaactgcttgatcttcaggccaaaatgggaatgcagcctcatctccaggctttgttgtcactgtataagttctttgctcctgctctgatttcagtatctttgcctgtaaggaagaagatatattttaagaattcagagaatctatggaagacggctctgcttgccgtgaagcaaagaaaccggggaccttctccagaacctctgaagttgatgttaggtccagctaatgttcgtcctctaaaaagaaagtggaattctctctcagttataccagtgctcaattccagtagctacactaaagaatgtggaaaaaaagagatgagtctttctgattgtctgaatagaagtggatcatttccactagaacaacttcaaagcttcccccaacttttacagaacatccattgcttagagctgccttctcagatgggctcagtgctaaacaactctctgctgcttcactacattaactgtgtcagagatgagccagtcttgctgaggttttattactggttgagtcaaacattacaagaagaatgtatttggtacaaggtgaataattatgaacatggaaaagaatttaccaacttcctggataccatcatcagggcagagtgcttcttacaagaggggttttattcctgtgaagcattcctgtataagagccttcctctctgggatggcctttgttgtcggtcacagttccttcagcttgtgagctggattccttttagtagcttctctgaggtgaaaccacttctttttgaccatctagcgcagctcttctttacatcaaccatttatttcaagtgtagtgtgcttcagagtctgaaagagctattgcagaattggctgttgtggctttctatggacattcacatgaaacctgttacaaacagtcctctagagacaactttgggtggatccatgaactctgtgtctaaactgatccactatgtagggtggctatccactactgcaatgcgcttggagagcaacaatactttcttgctgcactttattttggatttctatgagaaggtgtgtgacatatatataaattataaccttccattagtggtattgtttcctcctgggatcttctattctgcactcctcagcctggataccagcatcctgaaccagctgtgttttattatgcacagatatcgtaaaaatttgactgccgcaaagaaaaatgagttggtacaaaagacaaaatcagagttcaatttcagcagcaagacttatcaagaatttaatcactatttgacatcaatggttggttgcctgtggacgtccaaaccctttgggaaaggaatatatattgaccctgaaatcctagaaaaaactggagtggctgaatataaaaacagtttaaatgtagtccatcatccttctttcttgagttacgctgtttcctttttgctacaggaaagcccagaagaaaggacagtaaatgtgagctctattcggggaaagaaatggagctggtatttggactatttattttcacaggggttacaaggcttgaaactttttataagaagtagtgttcatcattcttccattcccagagcagagggcataaactgcaacaatcaatattaaatgaatgttgacataaactgaacacactggactaaactcactcctcattgctagagcaaagtggctcatcttgagttcccattttcatttcactgacagactgccatcctcaaggagtactcagactggccttctgttcatggcttaggagagccttggtgtgcctaactgatttttcaaaatttagatttttttagcctaccagtgaaaaatgaccccttcatcatcaggctctgcgttctaccaaattgtatgtaaaaagacacatctgttttgtggtaggattttttcacatttttgggtactatgagctgcattgatggaagacagcaggcaatatgtggtgacagttaactcacagacataaacatgcaaaatactttgctgtctctggggatattgccatttttcttactgtgagcaacagcaccaacaccaagttaacaggatgcaacatgtgtatgactctaaaagccctaagtagttggtaacttcctgggccttcaatcatagcaatttgatgagggaaggaaggggagaggatttgttgggtaatcaagacattcccgtatatgtctgatttcatggaactgctctattttgtttgtgtgtattgtatatgtatatgtgtatgtgtgcgtgtatgtgtgtgtctgtagcttcagtttttaagtgtaaggactaaataaactaactgaaattttactttcagaa

SEQ ID NO: 116347 - DNA, 622 bp, Homo sapiens
  Payload ID: 2702
  Gene Symbol: CENPI
  Gene Name: centromere protein I
  ENST ID: ENST00000403304
  CDS Start-End: 398-622
ggcctgtgcggctgcaggtagagtgtcttaggaacctaggaaataactcggaacctgtaacgtcccactggtttggacatattcctctcctgatctggcctcatctgttccagggaggtgggattgaacaaagtcttgctctgtcacccaggctggagtgcagtggcgcaatcacggctctctgcagcctcgacccccggggctcaagctattctcctgcctcaccctcctgagtagataggactacaggcacgtgcggctatgcctagctaattttttaaatcttaagtagagacattgtctcactgtgttgcccagactggtcttgaactcctaggttgaagggatcttccagcctctgcctcccgaagtgctgtattacagaacatatgcagtaatgtcacctcaaaagagagttaagaacgtccaggcacaaaacaggacttcacaaggtagtagtagttttcagaccacgctttcagcctggaaagtaaaacaggatccaagcaactcgaagaacatctcaaaacatggacaaaacaatccagtgggagattatgaacatgctgatgatcaagctgaagaagatgctttgcaaatggcagtgggatattttgagaaa

SEQ ID NO: 116348 - DNA, 2314 bp, Homo sapiens
  Payload ID: 2702
  Gene Symbol: CENPI
  Gene Name: centromere protein I
  Uniprot ID: Q92674
  ENST ID: ENST00000423383
  CDS Start-End: 24-2294
ttctgtgtagaacatatgcagtaatgtcacctcaaaagagagttaagaacgtccaggcacaaaacaggacttcacaaggtagtagtagttttcagaccacgctttcagcctggaaagtaaaacaggatccaagcaactcgaagaacatctcaaaacatggacaaaacaatccagtgggagattatgaacatgctgatgatcaagctgaagaagatgctttgcaaatggcagtgggatattttgagaaaggtcccattaaagcttcacagaataaagataaaaccttggaaaaacacttgaaaactgtggaaaatgtggcttggaagaatgggttagcttcagaagaaattgatattctattaaatattgcactcagtggcaaatttggaaatgctgtaaacacacggatattgaagtgcatgatcccagcaacagtaatatcagaagattctgtggttaaggcagtctcctggctttgtgttggcaagtgttctggtagcaccaaggtacttttttatcgttggctggttgcaatgtttgacttcattgatcgtaaggagcaaattaacttgctctatggcttcttttttgcttcattgcaagatgatgcactgtgcccttatgtttgccatttgttatatttacttaccaaaaaagagaatgtcaaaccatttcgtgtgagaaaactgcttgatcttcaggccaaaatgggaatgcagcctcatctccaggctttgttgtcactgtataagttctttgctcctgctctgatttcagtatctttgcctgtaaggaagaagatatattttaagaattcagagaatctatggaagacggctctgcttgccgtgaagcaaagaaaccggggaccttctccagaacctctgaagttgatgttaggtccagctaatgttcgtcctctaaaaagaaagtggaattctctctcagttataccagtgctcaattccagtagctacactaaagaatgtggaaaaaaagagatgagtctttctgattgtctgaatagaagtggatcatttccactagaacaacttcaaagcttcccccaacttttacagaacatccattgcttagagctgccttctcagatgggctcagtgctaaacaactctctgctgcttcactacattaactgtgtcagagatgagccagtcttgctgaggttttattactggttgagtcaaacattacaagaagaatgtatttggtacaaggtgaataattatgaacatggaaaagaatttaccaacttcctggataccatcatcagggcagagtgcttcttacaagaggggttttattcctgtgaagcattcctgtataagagccttcctctctgggatggcctttgttgtcggtcacagttccttcagcttgtgagctggattccttttagtagcttctctgaggtgaaaccacttctttttgaccatctagcgcagctcttctttacatcaaccatttatttcaagtgtagtgtgcttcagagtctgaaagagctattgcagaattggctgttgtggctttctatggacattcacatgaaacctgttacaaacagtcctctagagacaactttgggtggatccatgaactctgtgtctaaactgatccactatgtagggtggctatccactactgcaatgcgcttggagagcaacaatactttcttgctgcactttattttggatttctatgagaaggtgtgtgacatatatataaattataaccttccattagtggtattgtttcctcctgggatcttctattctgcactcctcagcctggataccagcatcctgaaccagctgtgttttattatgcacagatatcgtaaaaatttgactgccgcaaagaaaaatgagttggtacaaaagacaaaatcagagttcaatttcagcagcaagacttatcaagaatttaatcactatttgacatcaatggttggttgcctgtggacgtccaaaccctttgggaaaggaatatatattgaccctgaaatcctagaaaaaactggagtggctgaatataaaaacagtttaaatgtagtccatcatccttctttcttgagttacgctgtttcctttttgctacaggaaagcccagaagaaaggacagtaaatgtgagctctattcggggaaagaaatggagctggtatttggactatttattttcacaggggttacaaggcttgaaactttttataagaagtagtgttcatcattcttccattcccagagcagagggcataaactgcaacaatcaatattaaatgaatgttgacataaactg

SEQ ID NO: 116349 - DNA, 390 bp, Homo sapiens
  Payload ID: 2702
  Gene Symbol: CENPI
  Gene Name: centromere protein I
  ENST ID: ENST00000435570
  CDS Start-End: 256-390
ctgtgcggctgcaggaacctaggaaataactcggaacctgtaacgtcccactggtttggacatattcctctcctgatctggcctcatctgttccagggaggtgggattgagcctagtgcaggctacagtcaaacctcttctggacttctgcgacagccttttatttggtttcttgccgctccttgacctctaacattctcgtctctgcactgcagctaacatgatcgtcaaacacaaatcagaacatatgcagtaatgtcacctcaaaagagagttaagaacgtccaggcacaaaacaggacttcacaaggtagtagtagttttcagaccacgctttcagcctggaaagtaaaacaggatccaagcaactcgaagaacatctcaaaacat

SEQ ID NO: 116350 - DNA, 4347 bp, Homo sapiens
  Payload ID: 2703
  Gene Symbol: CENPJ
  Gene Name: centromere protein J
  Uniprot ID: Q9HC77
  ENST ID: ENST00000381884
  CDS Start-End: 187-4203
aggacctcgggacgggggcggggctccgacagaggcggcgattgtggcggcccatttgtaaatgctgcggagattgaggtgtcggttcgtgctgctgagctgcccaggcttcacggagcggtgttggaaatcaatagctcttctagcctttgcattgtttaaatataatagtgtcattggactaagatgttcctgatgccaacctcttcagagttaaacagtgggcagaacttcctaacccagtggatgaccaatccttctcgggctggggtcatattaaatcgtggatttcctattttggaagcagacaaagagaagcgagcagctgtggacatttctaccagctttcctattaaaggcacacatttttctgatagcttcagctttataaatgaagaagattcacttcttgaagaacagaagttggagtcaaacaacccttacaaaccacagtcagataaatctgaaacccatacagcctttccttgcattaaaaagggaccacaggtagcggcatgtcacagtgctcctggacaccaggaagaaaacaaaaatgacttcatcccagatcttgcgagtgaattcaaagaaggggcttataaagacccactttttaaaaaacttgaacagctgaaagaagtacaacagaagaagcaggaacaattgaagaggcaacagttggagcaactacagagactcatggaagaacaagagaagctgctcaccatggtgtctgggcagtgcacacttccaggtttgagtttactgcctgatgatcagagccagaagcacaggtctccaggaaataccaccactggagagagagccacatgctgcttcccatcatatgtctacccggacccaacccaggaagaaacatacccgtccaacattttatcccatgagcaaagcaacttctgtagaactgctcatggagattttgtcttaacttcaaaacgtgcgtctcctaatttattttctgaggcacagtatcaagaagcacctgtggaaaaaaataatttaaaagaagaaaaccgtaaccatcctacaggagaaagtatcttatgttgggagaaagtgacagaacagattcaggaagcaaatgataagaacttacaaaaacatgatgattcctcagaagtggctaatattgaagaaaggcccattaaagctgctattggagaaaggaaacagacctttgaagattacttagaagaacaaattcagttggaagagcaagaactgaagcaaaaacagctgaaggaagcagaaggaccattgccaatcaaagcaaaaccaaaacaaccatttttaaaacgaggagaaggtttagctagatttactaatgccaaatctaagtttcaaaaaggcaaagaaagtaaactagtgactaaccagagcacttccgaggaccagccgctgtttaaaatggatagacagcaactccagcggaaaaccgctcttaaaaataaagagctgtgtgcagacaaccctatccttaaaaaggacagtaaagctagaaccaagagtggttctgtcaccctcagtcagaagccgaaaatgctgaagtgtagtaacaggaaaagtctttctccgtcaggattgaaaatacagacggggaagaaatgtgatgggcagtttagagaccagatcaaatttgaaaacaaagtcacatctaataataaagaaaatgtaactgagtgtccaaaaccttgcgatactggctgcacagggtggaataagacacaaggtaaagacagacttcctctttcaacagggccggccagccggctggctgctaagagccccataagggagaccatgaaagagtctgaatcttctcttgacgtttctcttcagaaaaagttagagacttgggaacgagaaaaggaaaaggaaaatttggaattagatgaatttttgtttttagaacaagctgctgatgaaatatcattttctagtaattcctcatttgtactgaaaatcttagaaagggatcaacagatctgcaaaggtcaccggatgtcttccacccctgtcaaagctgtgccacagaagacaaatccggcagatcccattagtcattgtaaccgcagtgaggatttggaccacactgcacgtgagaaggagagtgagtgtgaagtcgcacccaaacaacttcattcattgtcctcagctgatgaattgagggaacagccttgtaaaatcaggaaagccgtccaaaagagcacttctgaaaatcagactgaatggaatgcacgtgacgatgaaggtgttccaaatagtgacagtagcactgactctgaggaacagcttgatgttaccataaaaccatcgactgaggatagagagaggggcatcagcagcagagaggatagcccacaagtctgtgatgataaggggccttttaaggacaccaggacccaagaagataaaaggagagatgttgatctggatttgtctgataaagattacagtagcgatgagtctatcatggaaagcataaaacataaagtgtctgagccctcgagatcctcatccctaagtctgagtaaaatggactttgatgatgaaagaacttggactgaccttgaagagaatttgtgtaaccatgatgttgttcttgggaatgaatccacttatgggacgccgcagacatgctaccctaataatgaaataggtatcctggacaaaacaataaaaaggaagattgcaccagtcaagaggggagaagacttgagcaagtccaggaggagcagaagtcctcctacatcggagctgatgatgaaattctttccttctttgaaaccaaaaccaaagtcagattcacacttgggaaatgaactcaagttaaacataagtcaagaccaaccacctggtgacaatgctcgatcccaggttttgagagagaaaattattgaattggaaacagaaatagaaaagtttaaagctgagaacgcatctttagctaaacttcgcattgaacgagaaagtgccttggaaaaactcaggaaagaaattgcagacttcgaacaacagaaagcaaaagaattagctcgaatagaagagtttaaaaaggaggagatgaggaagctacaaaaggaacgtaaagtttttgaaaagtatactacagctgcaagaacttttccagataaaaaggaacgtgaagaaatacagactttaaaacagcaaatagcagatttacgggaagatttgaaaagaaaggaaaccaaatggtcaagtacacacagccgtctcagaagccagatacaaatgttagtcagagagaacacagacctccgggaagaaataaaagtgatggaaagattccgactggatgcctggaagagagcagaagccatagagagcagcctcgaggtggagaagaaggacaagcttgcgaacacatctgttcgatttcaaaacagtcagatttcttcaggaacccaggtagaaaaatacaagaaaaattatcttccaatgcaaggcaatccacctcgaagatccaagtctgcacctcctcgtgatttaggcaatttggataagggacaagctgcctctcccagggagccacttgaaccactgaacttcccagatcctgaatataaagaggaggaggaagaccaagacatacagggagaaatcagtcatcctgatggaaaggtggaaaaggtttataagaatgggtgccgtgttatactgtttcccaatggaactcgaaaggaagtgagtgcagatgggaagaccatcactgtcactttctttaatggtgacgtgaagcaggtcatgccagaccaaagagtgatctactactatgcagctgcccagaccactcacacgacatacccggagggactggaagtcttacatttctcaagtggacaaatagaaaaacattacccagatggaagaaaagaaatcacgtttcctgaccagactgttaaaaacttatttcctgatggacaagaagaaagcattttcccagatggtacaattgtcagagtacaacgtgatggcaacaaactcatagagtttaataatggccaaagagaactacatactgcccagttcaagagacgggaatacccagatggcactgttaaaaccgtatatgcaaacggtcatcaagaaacgaagtacagatccggtcggataagagttaaggacaaggagggtaatgtgctaatggacacggagctgtgacgatcctcatgtgatcatgaagtaacagtaactgactttttatgttaaaaaatgtacatttactgtggattctgtttaatttattgtgtatgtgtggggaaaagattagattctaaaataaaagtttaccctgtggcatcttca

SEQ ID NO: 116351 - DNA, 691 bp, Homo sapiens
  Payload ID: 2703
  Gene Symbol: CENPJ
  Gene Name: centromere protein J
  ENST ID: ENST00000418179
  CDS Start-End: 1-589
gtttaaagctgagaacgcatctttagctaaacttcgcattgaacgagaaagtgccttggaaaaactcaggaaagaaattgcagacttcgaacaacagaaagcaaaagaattagctcgaatagaagagtttaaaaaggaggagatgaggaagctacaaaaggaacgtaaagtttttgaaaagtatactacagctgcaagaacttttccagataaaaaggaacgtgaagaaatacagactttaaaacagcaaatagcagatttacgggaagatttgaaaagaaaggaaaccaaatggtcaagtacacacagccgtctcagaagccagatacaaatgttagtcagagagaacacagacctccgggaagaaataaaagtgatggaaagattccgactggatgcctggaagagagcagaagccatagagagcagcctcgaggtggagaagaaggacaagcttgcgaacacatctgttcgatttcaaaacagtcagatttcttcaggaacccaggtagaaaaatacaagaaaaattatcttccaatgcaaggtaagaggctgcatgatctttttataaaacatttcagaatgtaaggaataaacaatttatacccaacttaataaaacatttcttaataaatgtttttgaacatttgaatgaatttgaattaataaatgtaattgaagctcctgtgc

SEQ ID NO: 116352 - DNA, 4299 bp, Homo sapiens
  Payload ID: 2703
  Gene Symbol: CENPJ
  Gene Name: centromere protein J
  ENST ID: ENST00000545981
  CDS Start-End: 117-3527
agattgaggtgtcggttcgtgctgctgagctgcccaggcttcacggagcggtgttggaaatcaatagctcttctagcctttgcattgtttaaatataatagtgtcattggactaagatgttcctgatgccaacctcttcagagttaaacagtgggcagaacttcctaacccagtggatgaccaatccttctcgggctggggtcatattaaatcgtggatttcctattttggaagcagacaaagagaagcgagcagctgtggacatttctaccagctttcctattaaaggcacacatttttctgatagcttcagctttataaatgaagaagattcacttcttgaagaacagaagttggagtcaaacaacccttacaaaccacagtcagataaatctgaaacccatacagcctttccttgcattaaaaagggaccacaggtagcggcatgtcacagtgctcctggacaccaggaagaaaacaaaaatgacttcatcccagatcttgcgagtgaattcaaagaaggggcttataaagacccactttttaaaaaacttgaacagctgaaagaagtacaacagaagaagcaggaacaattgaagaggcaacagttggagcaactacagagactcatggaagaacaagagaagctgctcaccatggtgtctgggcagtgcacacttccaggtttgagtttactgcctgatgatcagagccagaagcacaggtctccaggaaataccaccactggagagagagccacatgctgcttcccatcatatgtctacccggacccaacccaggaagaaacatacccgtccaacattttatcccatgagcaaagcaacttctgtagaactgctcatggagattttgtcttaacttcaaaacgtgcgtctcctaatttattttctgaggcacagtatcaagaagcacctgtggaaaaaaataatttaaaagaagaaaaccgtaaccatcctacaggagaaagtatcttatgttgggagaaagtgacagaacagattcaggaagcaaatgataagaacttacaaaaacatgatgattcctcagaagtggctaatattgaagaaaggcccattaaagctgctattggagaaaggaaacagacctttgaagattacttagaagaacaaattcagttggaagagcaagaactgaagcaaaaacagctgaaggaagcagaaggaccattgccaatcaaagcaaaaccaaaacaaccatttttaaaacgaggagaaggtttagctagatttactaatgccaaatctaagtttcaaaaaggcaaagaaagtaaactagtgactaaccagagcacttccgaggaccagccgctgtttaaaatggatagacagcaactccagcggaaaaccgctcttaaaaataaagagctgtgtgcagacaaccctatccttaaaaaggacagtaaagctagaaccaagagtggttctgtcaccctcagtcagaagccgaaaatgctgaagtgtagtaacaggaaaagtctttctccgtcaggattgaaaatacagacggggaagaaatgtgatgggcagtttagagaccagatcaaatttgaaaacaaagtcacatctaataataaagaaaatgtaactgagtgtccaaaaccttgcgatactggctgcacagggtggaataagacacaaggtaaagacagacttcctctttcaacagggccggccagccggctggctgctaagagccccataagggagaccatgaaagagtctgaatcttctcttgacgtttctcttcagaaaaagttagagacttgggaacgagaaaaggaaaaggaaaatttggaattagatgaatttttgtttttagaacaagctgctgatgaaatatcattttctagtaattcctcatttgtactgaaaatcttagaaagggatcaacagatctgcaaaggtcaccggatgtcttccacccctgtcaaagctgtgccacagaagacaaatccggcagatcccattagtcattgtaaccgcagtgaggatttggaccacactgcacgtgagaaggagagtgagtgtgaagtcgcacccaaacaacttcattcattgtcctcagctgatgaattgagggaacagccttgtaaaatcaggaaagccgtccaaaagagcacttctgaaaatcagactgaatggaatgcacgtgacgatgaaggtgttccaaatagtgacagtagcactgactctgaggaacagcttgatgttaccataaaaccatcgactgaggatagagagaggggcatcagcagcagagaggatagcccacaagtctgtgatgataaggggccttttaaggacaccaggacccaagaagataaaaggagagatgttgatctggatttgtctgataaagattacagtagcgatgagtctatcatggaaagcataaaacataaagtgtctgagccctcgagatcctcatccctaagtctgagtaaaatggactttgatgatgaaagaacttggactgaccttgaagagaatttgtgtaaccatgatgttgttcttgggaatgaatccacttatgggacgccgcagacatgctaccctaataatgaaataggtatcctggacaaaacaataaaaaggaagattgcaccagtcaagaggggagaagacttgagcaagtccaggaggagcagaagtcctcctacatcggagctgatgatgaaattctttccttctttgaaaccaaaaccaaagtcagattcacacttgggaaatgaactcaagttaaacataagtcaagaccaaccacctggtgacaatgctcgatcccaggttttgagagagaaaattattgaattggaaacagaaatagaaaagtttaaagctgagaacgcatctttagctaaacttcgcattgaacgagaaagtgccttggaaaaactcaggaaagaaattgcagacttcgaacaacagaaagcaaaagaattagctcgaatagaagagtttaaaaaggaggagatgaggaagctacaaaaggaacgtaaagtttttgaaaagtatactacagctgcaagaacttttccagataaaaaggaacgtgaagaaatacagactttaaaacagcaaatagcagatttacgggaagatttgaaaagaaaggaaaccaaatggtcaagtacacacagccgtctcagaagccagatacaaatgttagtcagagagaacacagacctccgggaagaaataaaagtgatggaaagattccgactggatgcctggaagagagcagaagccatagagagcagcctcgaggtggagaagaaggacaagcttgcgaacacatctgttcgatttcaaaacagtcagatttcttcaggaacccaggtagaaaaatacaagaaaaattatcttccaatgcaaggcacagcacagccgcctcacacgcccagcagcttgttggctgaccacctgcctccgctctcctccttcaggccattctcccgtaacatccagctctgttacactttttaacatggaggtcagattctggcacttgctcgagacccttccaaggcaatccacctcgaagatccaagtctgcacctcctcgtgatttaggcaatttggataagggacaagctgcctctcccagggagccacttgaaccactgaacttcccagatcctgaatataaagaggaggaggaagaccaagacatacagggagaaatcagtcatcctgatggaaaggtggaaaaggtttataagaatgggtgccgtgttatactgtttcccaatggaactcgaaaggaagtgagtgcagatgggaagaccatcactgtcactttctttaatggtgacgtgaagcaggtcatgccagaccaaagagtgatctactactatgcagctgcccagaccactcacacgacatacccggagggactggaagtcttacatttctcaagtggacaaatagaaaaacattacccagatggaagaaaagaaatcacgtttcctgaccagactgttaaaaacttatttcctgatggacaagaagaaagcattttcccagatggtacaattgtcagagtacaacgtgatggcaacaaactcatagagtttaataatggccaaagagaactacatactgcccagttcaagagacgggaatacccagatggcactgttaaaaccgtatatgcaaacggtcatcaagaaacgaagtacagatccggtcggataagagttaaggacaaggagggtaatgtgctaatggacacggagctgtgacgatcctcatgtga

SEQ ID NO: 116353 - DNA, 5020 bp, Homo sapiens
  Payload ID: 2703
  Gene Symbol: CENPJ
  Gene Name: centromere protein J
  Uniprot ID: Q9HC77
  ENST ID: ENST00000616936
  CDS Start-End: 196-3456
acttcccacaggacctcgggacgggggcggggctccgacagaggcggcgattgtggcggcccatttgtaaatgctgcggagattgaggtgtcggttcgtgctgctgagctgcccaggcttcacggagcggtgttggaaatcaatagctcttctagcctttgcattgtttaaatataatagtgtcattggactaagatgttcctgatgccaacctcttcagagttaaacagtgggcagaacttcctaacccagtggatgaccaatccttctcgggctggggtcatattaaatcgtggatttcctattttggaagcagacaaagagaagcgagcagctgtggacatttctaccagctttcctattaaaggcacacatttttctgatagcttcagctttataaatgaagaagattcacttcttgaagaacagaagttggagtcaaacaacccttacaaaccacagtcagataaatctgaaacccatacagcctttccttgcattaaaaagggaccacaggtagcggcatgtcacagtgctcctggacaccaggaagaaaacaaaaatgacttcatcccagatcttgcgagtgaattcaaagaaggggcttataaagacccactttttaaaaaacttgaacagctgaaagaagtacaacagaagaagcaggaacaattgaagaggcaacagttggagcaactacagagactcatggaagaacaagagaagctgctcaccatggtgtctgggcagtgcacacttccaggtttgagtttactgcctgatgatcagagccagaagcacaggtctccaggaaataccaccactggagagagagccacatgctgcttcccatcatatgtctacccggacccaacccaggaagaaacatacccgtccaacattttatcccatgagcaaagcaacttctgtagaactgctcatggagattttgtcttaacttcaaaacgtgcgtctcctaatttattttctgaggcacagtatcaagaagcacctgtggaaaaaaataatttaaaagaagaaaaccgtaaccatcctacaggagaaagtatcttatgttgggagaaagtgacagaacagattcaggaagcaaatgataagaacttacaaaaacatgatgattcctcagaagtggctaatattgaagaaaggcccattaaagctgctattggagaaaggaaacagacctttgaagattacttagaagaacaaattcagttggaagagcaagaactgaagcaaaaacagctgaaggaagcagaaggaccattgccaatcaaagcaaaaccaaaacaaccatttttaaaacgaggagaaggtttagctagatttactaatgccaaatctaagtttcaaaaaggcaaagaaagtaaactagtgactaaccagagcacttccgaggaccagccgctgtttaaaatggatagacagcaactccagcggaaaaccgctcttaaaaataaagagctgtgtgcagacaaccctatccttaaaaaggacagtaaagctagaaccaagagtggttctgtcaccctcagtcagaagccgaaaatgctgaagtgtagtaacaggaaaagtctttctccgtcaggattgaaaatacagacggggaagaaatgtgatgggcagtttagagaccagatcaaatttgaaaacaaagtcacatctaataataaagaaaatgtaactgagtgtccaaaaccttgcgatactggctgcacagggtggaataagacacaaggtaaagacagacttcctctttcaacagggccggccagccggctggctgctaagagccccataagggagaccatgaaagagtctgaatcttctcttgacgtttctcttcagaaaaagttagagacttgggaacgagaaaaggaaaaggaaaatttggaattagatgaatttttgtttttagaacaagctgctgatgaaatatcattttctagtaattcctcatttgtactgaaaatcttagaaagggatcaacagatctgcaaaggtcaccggatgtcttccacccctgtcaaagctgtgccacagaagacaaatccggcagatcccattagtcattgtaaccgcagtgaggatttggaccacactgcacgtgagaaggagagtgagtgtgaagtcgcacccaaacaacttcattcattgtcctcagctgatgaattgagggaacagccttgtaaaatcaggaaagccgtccaaaagagcacttctgaaaatcagactgaatggaatgcacgtgacgatgaaggtgttccaaatagtgacagtagcactgactctgaggaacagcttgatgttaccataaaaccatcgactgaggatagagagaggggcatcagcagcagagaggatagcccacaagtctgtgatgataaggggccttttaaggacaccaggacccaagaagataaaaggagagatgttgatctggatttgtctgataaagattacagtagcgatgagtctatcatggaaagcataaaacataaagtgtctgagccctcgagatcctcatccctaagtctgagtaaaatggactttgatgatgaaagaacttggactgaccttgaagagaatttgtgtaaccatgatgttgttcttgggaatgaatccacttatgggacgccgcagacatgctaccctaataatgaaataggtatcctggacaaaacaataaaaaggaagattgcaccagtcaagaggggagaagacttgagcaagtccaggaggagcagaagtcctcctacatcggagctgatgatgaaattctttccttctttgaaaccaaaaccaaagtcagattcacacttgggaaatgaactcaagttaaacataagtcaagaccaaccacctggtgacaatgctcgatcccaggttttgagagagaaaattattgaattggaaacagaaatagaaaagtttaaagctgagaacgcatctttagctaaacttcgcattgaacgagaaagtgccttggaaaaactcaggaaagaaattgcagacttcgaacaacagaaagcaaaagaattagctcgaatagaagagtttaaaaaggaggagatgaggaagctacaaaaggaacgtaaagtttttgaaaagtatactacagctgcaagaacttttccagataaaaaggaacgtgaagaaatacagactttaaaacagcaaatagcagatttacgggaagatttgaaaagaaaggaaaccaaatggtcaagtacacacagccgtctcagaagccagatacaaatgttagtcagagagaacacagacctccgggaagaaataaaagtgatggaaagattccgactggatgcctggaagagagcagaagccatagagagcagcctcgaggtggagaagaaggacaagcttgcggcaatccacctcgaagatccaagtctgcacctcctcgtgatttaggcaatttggataagggacaagctgcctctcccagggagccacttgaaccactgaacttcccagatcctgaatataaagaggaggaggaagaccaagacatacagggagaaatcagtcatcctgatggaaaggtggaaaaggtttataagaatgggtgccgtgttatactgtttcccaatggaactcgaaaggaagtgagtgcagatgggaagaccatcactgtcactttctttaatggtgacgtgaagcaggtcatgccagaccaaagagtgatctactactatgcagctgcccagaccactcacacgacatacccggagggactggaagtcttacatttctcaagtggacaaatagaaaaacattacccagatggaagaaaagaaatcacgtttcctgaccagactgttaaaaacttatttcctgatggacaagaagaaagcattttcccagatggtacaattgtcagagtacaacgtgatggcaacaaactcatagagtttaataatggccaaagagaactacatactgcccagttcaagagacgggaatacccagatggcactgttaaaaccgtatatgcaaacggtcatcaagaaacgaagtacagatccggtcggataagagttaaggacaaggagggtaatgtgctaatggacacggagctgtgacgatcctcatgtgatcatgaagtaacagtaactgactttttatgttaaaaaatgtacatttactgtggattctgtttaatttattgtgtatgtgtggggaaaagattagattctaaaataaaagtttaccctgtggcatcttcatttttatattctttgaaatgcaatgatagctctcatttataattcactaccctgtctttcaatagactaaggaaagcattttgactgtttagaaattgtgtacaggtttttacagtaagtgggtgtgtttattggttagaaatggctataaaaaaaaaccaagaagtacaggaagtacatcacctagatgtcccacagacacatcagccgtagagcactggacttgtacagaaggtgtactcaaggagtaaacacgtgtctctgtagccaaaatattactatgttcagttagtaccaaaattagaccatttgatcttctacagaggatcattaattattataacagaatgggaagttacaacagtggatgaatataaataggtcacacacaacaggtagtaatcatggtgaagagaaagcagttataacaaggctgactttgtaatgtaatgtctcaaaatgggatacttgagagtggaggggggcatgaacgatgactagccagtgttaacccatggaccacagctaccctgatgttaccacagtgagattactgtagcctcatggaagcaagatgtccctgaaggatgggcaagtcacttacttacttacttgtaaatttatataataaataattacagattggtctagatagaccttacctgtcacatatactatgaatcaggttttgttaatgaaatctatcaattccaggtgacttaactgaatatgaaaaataaaactttttg

SEQ ID NO: 116354 - DNA, 1576 bp, Homo sapiens
  Payload ID: 2704
  Gene Symbol: CENPK
  Gene Name: centromere protein K
  Uniprot ID: Q9BS16
  ENST ID: ENST00000242872
  CDS Start-End: 59-868
taaatattttttgctttagtttttcttataaggctaaaaattcacaaagcatatatcaatgaatcaggaggatctagatccggatagtactacagatgtgggagatgttacaaatactgaagaagaacttattagagaatgtgaagaaatgtggaaagatatggaagaatgtcagaataaattatcacttattggaactgaaacactcaccgattcaaatgctcagctatcattgttaattatgcaagtaaaatgtttaaccgctgaactcagtcaatggcagaaaaaaacacctgaaacaattcccttgactgaagacgttctcataacattaggaaaagaagagttccaaaagctgagacaagatcttgaaatggtactgtccactaaggagtcaaagaatgaaaagttaaaggaagacttagaaagggaacaacggtggttggatgaacagcaacagataatggaatctcttaatgtactacacagtgaattgaaaaataaggttgaaacattttctgaatcaagaatctttaatgaactgaaaactaaaatgcttaatataaaagaatataaggagaaactcttgagtaccttgggcgagtttctagaagaccattttcctctgcctgatagaagtgttaaaaagaaaaagaaaaacattcaagaatcatctgtaaacctgataacactgcatgaaatgttagagattcttataaatagattatttgatgttccacatgatccatatgtcaaaattagtgattccttttggccaccttatgttgagctgctgctgcgtaatggaattgccttgagacatccagaagatccaacccgaataagattagaagctttccatcagtaaaaggatgttttcttttttcacacagtaaaaattcttatcattcaaggatattggaaccacaggactatttggataaaaaacattatttgcaaattaatgcgcataggccatcttacttttattgcaaaatggcatgtgctgccatctattattcatttttaaatggtcatttcttattcagtgagtgctttagtgttttaaactatatggataagaatgcaggtagataatattctaggcataaaacatttaatgtaccttacctcatgcaatattctttggattctttgttgatttatgatattgctaatataatattttcttaaaatatataacaatatcttttatgcattttgagttccagctggtgcttctttatatttagaaattataatgggaaggtcatttaatttacagatggttttaaaattgaggtaatatctgaggtggcataatttaaaaatatttagcaaatttgtttcatatatactgtcttatttctagatttgtttaaaattggaatatgaaaaactaatggataaagctagcataaaattgatattttagtttgtattattaatatatcatgttaccttatatattaatctactcttgattctgctaattattaccaacaaaattgtattcatgacattttattaatcctctgtgaattttctgtaaataaaattatttctgaaaatctct

SEQ ID NO: 116355 - DNA, 1734 bp, Homo sapiens
  Payload ID: 2704
  Gene Symbol: CENPK
  Gene Name: centromere protein K
  Uniprot ID: Q9BS16
  ENST ID: ENST00000396679
  CDS Start-End: 216-1025
cgcgcagaagtccggggctggcaagcgcttcctgcgcagcgcctaggcgacctggagtttgtgacgctgtgatggtctagaggctggagattcaagatctgggtgccatcattttctggttctgttgatgaccctcttccaggttacatacagcttacatcttgcatcctcaagcgtttttcttataaggctaaaaattcacaaagcatatatcaatgaatcaggaggatctagatccggatagtactacagatgtgggagatgttacaaatactgaagaagaacttattagagaatgtgaagaaatgtggaaagatatggaagaatgtcagaataaattatcacttattggaactgaaacactcaccgattcaaatgctcagctatcattgttaattatgcaagtaaaatgtttaaccgctgaactcagtcaatggcagaaaaaaacacctgaaacaattcccttgactgaagacgttctcataacattaggaaaagaagagttccaaaagctgagacaagatcttgaaatggtactgtccactaaggagtcaaagaatgaaaagttaaaggaagacttagaaagggaacaacggtggttggatgaacagcaacagataatggaatctcttaatgtactacacagtgaattgaaaaataaggttgaaacattttctgaatcaagaatctttaatgaactgaaaactaaaatgcttaatataaaagaatataaggagaaactcttgagtaccttgggcgagtttctagaagaccattttcctctgcctgatagaagtgttaaaaagaaaaagaaaaacattcaagaatcatctgtaaacctgataacactgcatgaaatgttagagattcttataaatagattatttgatgttccacatgatccatatgtcaaaattagtgattccttttggccaccttatgttgagctgctgctgcgtaatggaattgccttgagacatccagaagatccaacccgaataagattagaagctttccatcagtaaaaggatgttttcttttttcacacagtaaaaattcttatcattcaaggatattggaaccacaggactatttggataaaaaacattatttgcaaattaatgcgcataggccatcttacttttattgcaaaatggcatgtgctgccatctattattcatttttaaatggtcatttcttattcagtgagtgctttagtgttttaaactatatggataagaatgcaggtagataatattctaggcataaaacatttaatgtaccttacctcatgcaatattctttggattctttgttgatttatgatattgctaatataatattttcttaaaatatataacaatatcttttatgcattttgagttccagctggtgcttctttatatttagaaattataatgggaaggtcatttaatttacagatggttttaaaattgaggtaatatctgaggtggcataatttaaaaatatttagcaaatttgtttcatatatactgtcttatttctagatttgtttaaaattggaatatgaaaaactaatggataaagctagcataaaattgatattttagtttgtattattaatatatcatgttaccttatatattaatctactcttgattctgctaattattaccaacaaaattgtattcatgacattttattaatcctctgtgaattttctgtaaataaaattatttctgaaaatctcta

SEQ ID NO: 116356 - DNA, 1586 bp, Homo sapiens
  Payload ID: 2704
  Gene Symbol: CENPK
  Gene Name: centromere protein K
  ENST ID: ENST00000508421
  CDS Start-End: 212-931
gcgacctggagtttgtgacgctgtgatggtctagaggctggagattcaagatctgggtgccatcattttctggttctgttgatgaccctcttccaggttacatacagcttacatcttgcatcctcaagcggaggatctagatccggatagtactacagatgtgggagatgttacaaatactgaagaagaacttattagagaatgtgaagaaatgtggaaagatatggaagaatgtcagaataaattatcacttattggaactgaaacactcaccgattcaaatgctcagctatcattgttaattatgcaagtaaaatgtttaaccgctgaactcagtcaatggcagaaaaaaacacctgaaacaattcccttgactgaagacgttctcataacattaggaaaagaagagttccaaaagctgagacaagatcttgaaatggtactgtccactaaggagtcaaagaatgaaaagttaaaggaagacttagaaagggaacaacggtggttggatgaacagcaacagataatggaatctcttaatgtactacacagtgaattgaaaaataaggttgaaacattttctgaatcaagaatctttaatgaactgaaaactaaaatgcttaatataaaagaatataaggagaaactcttgagtaccttgggcgagtttctagaagaccattttcctctgcctgatagaagtgttaaaaagaaaaagaaaaacattcaagaatcatctgtaaacctgataacactgcatgaaatgttagagattcttataaatagattatttgatgttccacatgatccatatgtcaaaattagtgattccttttggccaccttatgttgagctgctgctgcgtaatggaattgccttgagacatccagaagatccaacccgaataagattagaagctttccatcagtaaaaggatgttttcttttttcacacagtaaaaattcttatcattcaaggatattggaaccacaggactatttggataaaaaacattatttgcaaattaatgcgcataggccatcttacttttattgcaaaatggcatgtgctgccatctattattcatttttaaatggtcatttcttattcagtgagtgctttagtgttttaaactatatggataagaatgcaggtagataatattctaggcataaaacatttaatgtaccttacctcatgcaatattctttggattctttgttgatttatgatattgctaatataatattttcttaaaatatataacaatatcttttatgcattttgagttccagctggtgcttctttatatttagaaattataatgggaaggtcatttaatttacagatggttttaaaattgaggtaatatctgaggtggcataatttaaaaatatttagcaaatttgtttcatatatactgtcttatttctagatttgtttaaaattggaatatgaaaaactaatggataaagctagcataaaattgatattttagtttgtattattaatatatcatgttaccttatatattaatctactcttgattctgctaattattaccaacaaaattgtattcatgacat

SEQ ID NO: 116357 - DNA, 653 bp, Homo sapiens
  Payload ID: 2704
  Gene Symbol: CENPK
  Gene Name: centromere protein K
  ENST ID: ENST00000515497
  CDS Start-End: 125-653
gcagaagtccggggctggcaagcgcttcctgcgcagcgcctaggcgacctggagtttgtgacgctgtgatggtctagaggctggagattcaagatctgggtgccatcattttctggttctgttgatgaccctcttccaggaggatctagatccggatagtactacagatgtgggagatgttacaaatactgaagaagaacttattagagaatgtgaagaaatgtggaaagatatggaagaatgtcagaataaattatcacttattggaactgaaacactcaccgattcaaatgctcagctatcattgttaattatgcaagtaaaatgtttaaccgctgaactcagtcaatggcagaaaaaaacacctgaaacaattcccttgactgaagacgttctcataacattaggaaaagaagagttccaaaagctgagacaagatcttgaaatggtactgtccactaaggagtcaaagaatgaaaagttaaaggaagacttagaaagggaacaacggtggttggatgaacagcaacagataatggaatctcttaatgtactacacagtgaattgaaaaataaggttgaaacattttctgaatcaagaatctttaatgaactgaaaactaaaatgcttaatataaaagaatataaggaga

SEQ ID NO: 116358 - DNA, 1697 bp, Homo sapiens
  Payload ID: 2704
  Gene Symbol: CENPK
  Gene Name: centromere protein K
  Uniprot ID: Q9BS16
  ENST ID: ENST00000514814
  CDS Start-End: 179-988
gcagaagtccggggctggcaagcgcttcctgcgcagcgcctaggcgacctggagtttgtgacgctgtgatggtctagaggctggagattcaagatctgggtgccatcattttctggttctgttgatgaccctcttccagtttttcttataaggctaaaaattcacaaagcatatatcaatgaatcaggaggatctagatccggatagtactacagatgtgggagatgttacaaatactgaagaagaacttattagagaatgtgaagaaatgtggaaagatatggaagaatgtcagaataaattatcacttattggaactgaaacactcaccgattcaaatgctcagctatcattgttaattatgcaagtaaaatgtttaaccgctgaactcagtcaatggcagaaaaaaacacctgaaacaattcccttgactgaagacgttctcataacattaggaaaagaagagttccaaaagctgagacaagatcttgaaatggtactgtccactaaggagtcaaagaatgaaaagttaaaggaagacttagaaagggaacaacggtggttggatgaacagcaacagataatggaatctcttaatgtactacacagtgaattgaaaaataaggttgaaacattttctgaatcaagaatctttaatgaactgaaaactaaaatgcttaatataaaagaatataaggagaaactcttgagtaccttgggcgagtttctagaagaccattttcctctgcctgatagaagtgttaaaaagaaaaagaaaaacattcaagaatcatctgtaaacctgataacactgcatgaaatgttagagattcttataaatagattatttgatgttccacatgatccatatgtcaaaattagtgattccttttggccaccttatgttgagctgctgctgcgtaatggaattgccttgagacatccagaagatccaacccgaataagattagaagctttccatcagtaaaaggatgttttcttttttcacacagtaaaaattcttatcattcaaggatattggaaccacaggactatttggataaaaaacattatttgcaaattaatgcgcataggccatcttacttttattgcaaaatggcatgtgctgccatctattattcatttttaaatggtcatttcttattcagtgagtgctttagtgttttaaactatatggataagaatgcaggtagataatattctaggcataaaacatttaatgtaccttacctcatgcaatattctttggattctttgttgatttatgatattgctaatataatattttcttaaaatatataacaatatcttttatgcattttgagttccagctggtgcttctttatatttagaaattataatgggaaggtcatttaatttacagatggttttaaaattgaggtaatatctgaggtggcataatttaaaaatatttagcaaatttgtttcatatatactgtcttatttctagatttgtttaaaattggaatatgaaaaactaatggataaagctagcataaaattgatattttagtttgtattattaatatatcatgttaccttatatattaatctactcttgattctgctaattattaccaacaaaattgtattcatgacattttattaatcctctgtgaattttctgtaaataaaattatttctgaaaatctcta

SEQ ID NO: 116359 - DNA, 834 bp, Homo sapiens
  Payload ID: 2704
  Gene Symbol: CENPK
  Gene Name: centromere protein K
  ENST ID: ENST00000505960
  CDS Start-End: 113-433
tgccatcattttctggttctgttgatgaccctcttccaggttacatacagcttacatcttgcatcctcaagcgtttttcttataaggctaaaaattcacaaagcatatatcaatgaatcaggaggatctagatccggatagtactacagatgtgggagatgttacaaatactgaagaagaacttattagagaatgtgaagaaatgtggaaagatatggaagaatgtcagaataaattatcacttattggaactgaaacactcaccgattcaaatgctcagctatcattgttaattatgcaagtaaaatgtttaaccgctgaactcagtcaatggcagaaaaaaacacctgaaaggtctcatcgtgttgtccaggctggagtacagtggcacaatcatggctcattgcagccccgatctcccgggttcaagtgatcctcctacctcagcctcctgagtagctaggactacaagtgtgtgccaccatgcttgcaattcccttgactgaagacgttctcataacattaggaaaagaagagttccaaaagctgagacaagatcttgaaatggtactgtccactaaggagtcaaagaatgaaaagttaaaggaagacttagaaagggaacaacggtggttggatgaacagcaacagataatggaatctcttaatgtactacacagtgaattgaaaaataaggttgaaacattttctgaatcaagaatctttaatgaactgaaaactaaaatgcttaatataaaagaatataaggagaaactcttgagtaccttgggcgagtttctagaagaccattttcctctgcctgatagaagtgtt

SEQ ID NO: 116360 - DNA, 725 bp, Homo sapiens
  Payload ID: 2704
  Gene Symbol: CENPK
  Gene Name: centromere protein K
  ENST ID: ENST00000510768
  CDS Start-End: 138-491
aggcgacctggagtttgtgacgctgtgatggtctagaggctggagattcaagatctgggtgccatcattttctggttctgttgatgaccctcttccagtttttcttataaggctaaaaattcacaaagcatatatcaatgaatcaggaggatctagatccggatagtactacagatgtgggagatgttacaaatactgaagaagaacttattagagaatgtgaagaaatgtggaaagatatggaagaatgtcagaataaattatcacttattggaactgaaacactcaccgattcaaatgctcagctatcattgttaattatgcaagtaaaatgtttaaccgctgaactcagtcaatggcagaaaaaaacacctgaaacaattcccttgactgaagacgttctcataacattaggaaaagaagagattctgcagatgatgattctctcctacaaaccagttgggtgtcctcttaattcacttcagttctgacataatctacttggagttccaaaagctgagacaagatcttgaaatggtactgtccactaaggagtcaaagaatgaaaagttaaaggaagacttagaaagggaacaacggtggttggatgaacagcaacagataatggaatctcttaatgtactacacagtgaattgaaaaataaggttgaaacattttctgaatcaagaatctttaatgaactgaaaactaaaatgcttaatat

SEQ ID NO: 116361 - DNA, 474 bp, Homo sapiens
  Payload ID: 2704
  Gene Symbol: CENPK
  Gene Name: centromere protein K
  ENST ID: ENST00000509397
  CDS Start-End: 1-73
tcgtgttgtccaggctggagtacagtggcacaatcatggctcattgcagccccgatctcccgggttcaagtgatcctcctacctcagcctcctgagtagctaggactacaagtgtgtgccaccatgcttgcaattcccttgactgaagacgttctcataacattaggaaaagaagagttccaaaagctgagacaagatcttgaaatggtactgtccactaaggagtcaaagaatgaaaagttaaaggaagacttagaaagggaacaacggtggttggatgaacagcaacagataatggaatctcttaatgtactacacagtgaattgaaaaataaggttgaaacattttctgaatcaagaatctttaatgaactgaaaactaaaatgcttaatataaaagaatataaggagaaactcttgagtaccttgggcgagtttctagaagaccattttcctctgcctgatagaagtgtt

SEQ ID NO: 116362 - DNA, 760 bp, Homo sapiens
  Payload ID: 2704
  Gene Symbol: CENPK
  Gene Name: centromere protein K
  ENST ID: ENST00000502997
  CDS Start-End: 365-760
ttcatgtcttcttactcagttgtcaatttctcagtaaccttatatgaccaccttatttaaaattatattgtccttgccctagcatttcctatgtttcttccttgtcttttctccatggcacttataaatcatttgatatactacagtatatatatgttttattttttattttattgtctgttttccttacttagaataaggttcacggtaggagggatttttgtctattttgttcattgctatattcttaccccctagatgagtatctggcaggtaataagtgttcaaccaatactgctgaatgaataaatattttttgctttagtttttcttataaggctaaaaattcacaaagcatatatcaatgaatcaggaggatctagatccggatagtactacagatgtgggagatgttacaaatactgaagaagaacttattagagaatgtgaagaaatgtggaaagatatggaagaatgtcagaataaattatcacttattggaactgaaacactcaccgattcaaatgctcagctatcattgttaattatgcaagtaaaatgtttaaccgctgaactcagtcaatggcagaaaaaaacacctgaaacaattcccttgactgaagacgttctcataacattaggaaaagaagagttccaaaagctgagacaagatcttgaaatggtactgtccactaaggagtcaaagaatgaaaagttaaaggaagacttagaaagggaacaacggtggttggatgaacag

SEQ ID NO: 116363 - DNA, 1040 bp, Homo sapiens
  Payload ID: 2704
  Gene Symbol: CENPK
  Gene Name: centromere protein K
  ENST ID: ENST00000510693
  CDS Start-End: 280-900
gcttcctgcgcagcgcctaggcgacctggagtttgtgacgctgtgatggtctagaggctggagattcaagatctgggtgccatcattttctggttctgttgatgaccctcttccaggttacatacagcttacatcttgcatcctcaagcgtttttcttataaggctaaaaattcacaaagcatatatcaatgaatcaggaggatctagatccggatagtactacagatgtgggagatgttacaaatactgaagaagaacttattagagaatgtgaagaaatgtggaaagatatggaagaatgtcagaataaattatcacttattggaactgaaacactcaccgattcaaatgctcagctatcattgttaattatgcaagtaaaatgtttaaccgctgaactcagtcaatggcagaaaaaaacacctgaaacaattcccttgactgaagacgttctcataacattaggaaaagaagagttccaaaagctgagacaagatcttgaaatggtactgtccactaaggagtcaaagaatgaaaagttaaaggaagacttagaaagaatctttaatgaactgaaaactaaaatgcttaatataaaagaatataaggagaaactcttgagtaccttgggcgagtttctagaagaccattttcctctgcctgatagaagtgttaaaaagaaaaagaaaaacattcaagaatcatctgtaaacctgataacactgcatgaaatgttagagattcttataaatagattatttgatgttccacatgatccatatgtcaaaattagtgattccttttggccaccttatgttgagctgctgctgcgtaatggaattgccttgagacatccagaagatccaacccgaataagattagaagctttccatcagtaaaaggatgttttcttttttcacacagtaaaaattcttatcattcaaggatattggaaccacaggactatttggataaaaaacattatttgcaaattaatgcgcataggccatcttacttttattgcaaaatggcatgtgct

SEQ ID NO: 116364 - DNA, 1124 bp, Homo sapiens
  Payload ID: 2704
  Gene Symbol: CENPK
  Gene Name: centromere protein K
  ENST ID: ENST00000510354
  CDS Start-End: 108-428
gtctagaggctggagattcaagatctgggtgccatcattttctggttctgttgatgaccctcttccagtttttcttataaggctaaaaattcacaaagcatatatcaatgaatcaggaggatctagatccggatagtactacagatgtgggagatgttacaaatactgaagaagaacttattagagaatgtgaagaaatgtggaaagatatggaagaatgtcagaataaattatcacttattggaactgaaacactcaccgattcaaatgctcagctatcattgttaattatgcaagtaaaatgtttaaccgctgaactcagtcaatggcagaaaaaaacacctgaaaggtctcatcgtgttgtccaggctggagtacagtggcacaatcatggctcattgcagccccgatctcccgggttcaagtgatcctcctacctcagcctcctgagtagctaggactacaagtgtgtgccaccatgcttggttagtggttggtttttgtatttttttgtagagacggggtttcaccatgttacccaggctggtcttgaactcctgggctcaagggatcctcctgccttggcctctcaaagtgcctggattactggcgtgccagtgatttgtttcttaatgaatgcaatttacctagtggaagagaaaagttataatttattttagatacttacacaaaagggacacatagtttgtatgtcttctgtcttgtccagctggtgccaactatgtttttgtcttcagttaggaagtagaagacagcataaaaatttataattgtgatactccactagtacatcttttttttttaaatgtgagagcttaagtttctctatgcaatatacatctatacaggcacatctcattttattgtgcttcactttattgcactttgcagacactctatgtttaacaaattcagtttgtggcgagcctgtgtcacattttggtaatctcacagtattttagacttttaagtcattattacatctggttgggggatctgtgatcagtggtctttgatcttactattttaattgttttgaggaaccacaagctgcacctgtgtaagacagtaaatttaaccaataaatgttgtgtgtattctga

SEQ ID NO: 116365 - DNA, 1847 bp, Homo sapiens
  Payload ID: 2705
  Gene Symbol: CENPL
  Gene Name: centromere protein L
  Uniprot ID: Q8N0S6
  ENST ID: ENST00000345664
  CDS Start-End: 215-1249
tttgtgtctcttgtgaacccacttgtggagcgagagggaatttgggagggccaggggttagtctggcctctgtcttagctgtcattttggcggttttttttttttttcttcaggggatttcagtctccacatagttttggagccggacttttgaagaatgattcgtgaatccggaatgggtgacagcgtcatcacggcattttattgacagaccatggattcttacagtgcaccagagtcaactcctagtgcatcctcaagacctgaagattactttataggtgccactcctctgcagaaacgattagaatcggtcaggaagcagagttcatttatcctgactccacctcgaaggaaaattccccagtgttcgcagttgcaggaagatgttgaccctcaaaaggttgcattccttctgcataaacagtggactttatatagtttaactcccttatataaattctcctatagtaatctcaaagagtattctagacttctcaatgcttttattgttgctgaaaagcaaaaaggacttgctgtggaagtgggagaagacttcaacatcaaagtgattttttctactctcctaggaatgaaaggaacacaaagggacccggaagcatttcttgtccagattgtgtcaaaatctcaattgccatctgagaatagagaaggtaaagtgctgtggactggctggttctgctgtgtatttggagacagtcttctggagactgtttcagaagatttcacctgtctgcccttattccttgcaaatggagcagagtctaacacagcaataattggaacttggtttcagaaaacctttgactgttatttcagtcctttagcaatcaatgcatttaatctttcctggatggctgccatgtggactgcatgcaaaatggaccattatgtggctactactgaatttctttggtctgtaccctgtagccctcaaagtctggacatttctttcgcaatacatccagaggatgcaaaagctctatgggacagtgtccacaaaacacctggggaggttacccaggaagaagttgacctattcatggattgcctttattcacatttccatagacatttcaaaattcatttatcagccacaagattagttcgtgtttcaacatctgtagcttcagcacatactgatggaaaaataaagattctgtgtcataaataccttattggagtgttagcatatttgacagaactggcaatttttcaaattgagtgaagccttatgtggactataagttatagattatatactcttattgataacttgcctaattgctatgctgaaagagactgcaggagaaataggcatctatctctgcatctgttttccccaccatgcctttggagttgccaagatggaagccaagaaggatctagaagaacaaagaatatggtagtagatgagccacagccaggtgcccatgtactaatcatgataacctgacatgccattctcaaaatgctgagttgttaatttcttgtcatctttaaatatatatatataggctgggcttggtggctcacacctgtaattccagcactttgggaggctgaggtgggtggatcatttgaggccaggaattcaagaccagcctggccaacatggtgaaaccccttctctactgaaaatacaataattagctgggcgtggtggcacatgcctatgatcccagctactggggaggctgaggcaggagaatcgttttaacccagaagacaggctgcagtgagccaagactgcaccactgcactccagcctgggcaacaaagtgagactctgcctcaaaaaataaaaaagaaataaaataaataaa

SEQ ID NO: 116366 - DNA, 2357 bp, Homo sapiens
  Payload ID: 2705
  Gene Symbol: CENPL
  Gene Name: centromere protein L
  Uniprot ID: Q8N0S6
  ENST ID: ENST00000356198
  CDS Start-End: 287-1459
ggtctctgacaggctcagctggagagggacgggttgggacgcactgtccttttgcccttccccctccgcgagcagaagctgactccgcaggagcgagggtcgcagagctgggtgagcggaaatgtccctcccagagtgaagtcgcagggcccgccccgcgtctgagggagcggaggtcttcctgggggatttcagtctccacatagttttggagccggacttttgaagaatgattcgtgaatccggaatgggtgacagcgtcatcacggcattttattgacagaccatggattcttacagtgcaccagagtcaactcctagtgcatcctcaagacctgaagattactttataggtgccactcctctgcagaaacgattagaatcggtcaggaagcagagttcatttatcctgactccacctcgaaggaaaattccccagtgttcgcagttgcaggaagatgttgaccctcaaaaggttgcattccttctgcataaacagtggactttatatagtttaactcccttatataaattctcctatagtaatctcaaagagtattctagacttctcaatgcttttattgttgctgaaaagcaaaaaggacttgctgtggaagtgggagaagacttcaacatcaaagtgattttttctactctcctaggaatgaaaggaacacaaagggacccggaagcatttcttgtccagggtctcattttgtcacccaggctggagtacagtggcacgatcttggttgactgcaacctctgtctcctgggctcaagtgatccttccaccttagccttccaagtagctgggactgcaggtgcatgccaccacactcggattgtgtcaaaatctcaattgccatctgagaatagagaaggtaaagtgctgtggactggctggttctgctgtgtatttggagacagtcttctggagactgtttcagaagatttcacctgtctgcccttattccttgcaaatggagcagagtctaacacagcaataattggaacttggtttcagaaaacctttgactgttatttcagtcctttagcaatcaatgcatttaatctttcctggatggctgccatgtggactgcatgcaaaatggaccattatgtggctactactgaatttctttggtctgtaccctgtagccctcaaagtctggacatttctttcgcaatacatccagaggatgcaaaagctctatgggacagtgtccacaaaacacctggggaggttacccaggaagaagttgacctattcatggattgcctttattcacatttccatagacatttcaaaattcatttatcagccacaagattagttcgtgtttcaacatctgtagcttcagcacatactgatggaaaaataaagattctgtgtcataaataccttattggagtgttagcatatttgacagaactggcaatttttcaaattgagtgaagccttatgtggactataagttatagattatatactcttattgataacttgcctaattgctatgctgaaagagactgcaggagaaataggcatctatctctgcatctgttttccccaccatgcctttggagttgccaagatggaagccaagaaggatctagaagaacaaagaatatggtagtagatgagccacagccaggtgcccatgtactaatcatgataacctgacatgccattctcaaaatgctgagttgttaatttcttgtcatctttaaatatatatatataggctgggcttggtggctcacacctgtaattccagcactttgggaggctgaggtgggtggatcatttgaggccaggaattcaagaccagcctggccaacatggtgaaaccccttctctactgaaaatacaataattagctgggcgtggtggcacatgcctatgatcccagctactggggaggctgaggcaggagaatcgttttaacccagaagacaggctgcagtgagccaagactgcaccactgcactccagcctgggcaacaaagtgagactctgcctcaaaaaataaaaaagaaataaaataaataaatacagcgtttattatgtttaaactcttaggattcaaatgagatgtatctaatggatatttctgatttgggtctttaaaacctttaatctcttttaagcattttagacttgcattcagaaagaattctgtcttctaaagacattttcctagcatttcactgcggagaactggcaatcaaaatcccctcaaaagggaactaaagattaatatacacatttttttagtcattaatatgcttctgttttaaatacagttcaactcctgttgcaatgttgaattaaatgtttattttaaaatgaa

SEQ ID NO: 116367 - DNA, 1771 bp, Homo sapiens
  Payload ID: 2705
  Gene Symbol: CENPL
  Gene Name: centromere protein L
  Uniprot ID: Q8N0S6
  ENST ID: ENST00000367710
  CDS Start-End: 139-1173
gcccgccccgcgtctgagggagcggaggtcttcctgggggatttcagtctccacatagttttggagccggacttttgaagaatgattcgtgaatccggaatgggtgacagcgtcatcacggcattttattgacagaccatggattcttacagtgcaccagagtcaactcctagtgcatcctcaagacctgaagattactttataggtgccactcctctgcagaaacgattagaatcggtcaggaagcagagttcatttatcctgactccacctcgaaggaaaattccccagtgttcgcagttgcaggaagatgttgaccctcaaaaggttgcattccttctgcataaacagtggactttatatagtttaactcccttatataaattctcctatagtaatctcaaagagtattctagacttctcaatgcttttattgttgctgaaaagcaaaaaggacttgctgtggaagtgggagaagacttcaacatcaaagtgattttttctactctcctaggaatgaaaggaacacaaagggacccggaagcatttcttgtccagattgtgtcaaaatctcaattgccatctgagaatagagaaggtaaagtgctgtggactggctggttctgctgtgtatttggagacagtcttctggagactgtttcagaagatttcacctgtctgcccttattccttgcaaatggagcagagtctaacacagcaataattggaacttggtttcagaaaacctttgactgttatttcagtcctttagcaatcaatgcatttaatctttcctggatggctgccatgtggactgcatgcaaaatggaccattatgtggctactactgaatttctttggtctgtaccctgtagccctcaaagtctggacatttctttcgcaatacatccagaggatgcaaaagctctatgggacagtgtccacaaaacacctggggaggttacccaggaagaagttgacctattcatggattgcctttattcacatttccatagacatttcaaaattcatttatcagccacaagattagttcgtgtttcaacatctgtagcttcagcacatactgatggaaaaataaagattctgtgtcataaataccttattggagtgttagcatatttgacagaactggcaatttttcaaattgagtgaagccttatgtggactataagttatagattatatactcttattgataacttgcctaattgctatgctgaaagagactgcaggagaaataggcatctatctctgcatctgttttccccaccatgcctttggagttgccaagatggaagccaagaaggatctagaagaacaaagaatatggtagtagatgagccacagccaggtgcccatgtactaatcatgataacctgacatgccattctcaaaatgctgagttgttaatttcttgtcatctttaaatatatatatataggctgggcttggtggctcacacctgtaattccagcactttgggaggctgaggtgggtggatcatttgaggccaggaattcaagaccagcctggccaacatggtgaaaccccttctctactgaaaatacaataattagctgggcgtggtggcacatgcctatgatcccagctactggggaggctgaggcaggagaatcgttttaacccagaagacaggctgcagtgagccaagactgcaccactgcactccagcctgggcaacaaagtgagactctgcctcaaaaaataaaaaagaaataaaataaataaa

SEQ ID NO: 116368 - DNA, 966 bp, Homo sapiens
  Payload ID: 2706
  Gene Symbol: CENPM
  Gene Name: centromere protein M
  Uniprot ID: Q9NSP4
  ENST ID: ENST00000215980
  CDS Start-End: 89-631
cccccaggccgcgctctaggggctggactcagggcggtttgaaagatcggcgcgcaccgcaggagcaacggttggtcctgcggctgtgatgtcggtgttgaggcccctggacaagctgcccggcctgaacacggccaccatcttgctggtgggcacggaggatgctcttctgcagcagctggcggactcgatgctcaaagaggactgcgcctccgagctgaaggtccacttggcaaagtccctccctttgccctccagtgtgaatcggccccgaattgacctgatcgtgtttgtggttaatcttcacagcaaatacagtctccagaacacagaggagtccctgcgccatgtggatgccagcttcttcttggggaaggtgtgtttcctcgccacaggtgctgggcgggagagccactgcagcattcaccggcacaccgtggtgaagctggcccacacctatcaaagccccctgctctactgtgacctggaggtggaaggctttagggccaccatggcgcagcgcctggtgcgcgtgctgcagatctgtgctggccacgtgcccggtgtctcagctctgaacctgctgtccctgctgagaagctctgagggcccctccctggaggacctgtgagggtggctggcccctgggctgccccttctcatggcttcgtgctgactccataaacattctctgttgaggatgtccagtcagggcttgacaggcccaggctcagcccgccgtggctgggaaggttccctgcagtgccagtgctgcagcagggagagctgggcagaagcagcgagggggcccagctggcgagactgtagccccctcccactcccacactcactcttgcagagcctgtgtctttaagcagctggcgtgttacatctccatttaaggtttcctttgaacaaaaggtctgtggctaaaaaaagtttaaaaatcactggtctcattcacca

SEQ ID NO: 116369 - DNA, 688 bp, Homo sapiens
  Payload ID: 2706
  Gene Symbol: CENPM
  Gene Name: centromere protein M
  ENST ID: ENST00000402420
  CDS Start-End: 279-656
ggcggtgggagcgagggtcgggtagtagagagtgcggtgcccacaggcctgcagcgggtccaaacctcaggcccccagcccgtgccgcttcgcggggtccacttctcgggaaatgtcctccgagccgcctgctggcggtgtcccgatccccccgggagtgggtcgaagggccaggccctccccagggggtgctgtgcctagggctcgactgtccgctctctctccctgcgcagctggtgggcacggaggatgctcttctgcagcagctggcggactcgatgctcaaagaggactgcgcctccgagctgaaggtccacttggcaaagtccctccctttgccctccagtgtgaatcggccccgaattgacctgatcgtgtttgtggttaatcttcacagcaaatacaggatcagagaagcaaggacttctgctttctccgttgtaaagttttgttctctggtttgttttctcaccctggcctggccaccccagtctccagaacacagaggagtccctgcgccatgtggatgccagcttcttcttggggaaggtgtgtttcctcgccacaggtgctgggcgggagagccactgcagcattcaccggcacaccgtggtgaagctggcccacacctatcaaagccccctgctctactgtgacctggaggtggaaggctttagggccaccatgg

SEQ ID NO: 116370 - DNA, 1002 bp, Homo sapiens
  Payload ID: 2706
  Gene Symbol: CENPM
  Gene Name: centromere protein M
  ENST ID: ENST00000402338
  CDS Start-End: 243-683
gtgcccacaggcctgcagcgggtccaaacctcaggcccccagcccgtgccgcttcgcggggtccacttctcgggaaatgtcctccgagccgcctgctggcggtgtcccgatccccccgggagtgggtcgaagggccaggccctccccagggggtgctgtgcctagggctcgactgtccgctctctctccctgcgcagctggtgggcacggaggatgctcttctgcagcagctggcggactcgatgctcaaagaggactgcgcctccgagctgaaggtccacttggcaaagtccctccctttgccctccagtgtgaatcggccccgaattgacctgatcgtgtttgtggttaatcttcacagcaaatacagtctccagaacacagaggagtccctgcgccatgtggatgccagcttcttcttggggaaggtgtgtttcctcgccacaggtgctgggcgggagagccactgcagcattcaccggcacaccgtggtgaagctggcccacacctatcaaagccccctgctctactgtgacctggaggtggaaggctttagggccaccatggcgcagcgcctggtgcgcgtgctgcagatctgtgctggccacgtgcccggtgtctcagctctgaacctgctgtccctgctgagaagctctgagggcccctccctggaggacctgtgagggtggctggcccctgggctgccccttctcatggcttcgtgctgactccataaacattctctgttgaggatgtccagtcagggcttgacaggcccaggctcagcccgccgtggctgggaaggttccctgcagtgccagtgctgcagcagggagagctgggcagaagcagcgagggggcccagctggcgagactgtagccccctcccactcccacactcactcttgcagagcctgtgtctttaagcagctggcgtgttacatctccatttaaggtttcctttgaacaaaaggtctgtggctaaaaaaagtttaaaaatca

SEQ ID NO: 116371 - DNA, 818 bp, Homo sapiens
  Payload ID: 2706
  Gene Symbol: CENPM
  Gene Name: centromere protein M
  Uniprot ID: Q9NSP4
  ENST ID: ENST00000407253
  CDS Start-End: 61-384
tcagggcggtttgaaagatcggcgcgcaccgcaggagcaacggttggtcctgcggctgtgatgtcggtgttgaggcccctggacaagctgcccggcctgaacacggccaccatcttgctggtgggcacggaggatgctcttctgcagcagctggcggactcgatgctcaaagaggactgcgcctccgagctgaaggtccacttggcaaagtccctccctttgccctccagtgtgaatcggccccgaattgacctgatcgtgtttgtggttaatcttcacagcaaatacagtctccagaacacagaggagtccctgcgccatgtggatgccagcttcttcttggggaaggtgtgtttcctcgccacaggtggtggaaggctttagggccaccatggcgcagcgcctggtgcgcgtgctgcagatctgtgctggccacgtgcccggtgtctcagctctgaacctgctgtccctgctgagaagctctgagggcccctccctggaggacctgtgagggtggctggcccctgggctgccccttctcatggcttcgtgctgactccataaacattctctgttgaggatgtccagtcagggcttgacaggcccaggctcagcccgccgtggctgggaaggttccctgcagtgccagtgctgcagcagggagagctgggcagaagcagcgagggggcccagctggcgagactgtagccccctcccactcccacactcactcttgcagagcctgtgtctttaagcagctggcgtgttacatctccatttaaggtttcctttgaacaaaaggtctgtggctaaaaaaa

SEQ ID NO: 116372 - DNA, 905 bp, Homo sapiens
  Payload ID: 2706
  Gene Symbol: CENPM
  Gene Name: centromere protein M
  ENST ID: ENST00000404067
  CDS Start-End: 238-459
cacaggcctgcagcgggtccaaacctcaggcccccagcccgtgccgcttcgcggggtccacttctcgggaaatgtcctccgagccgcctgctggcggtgtcccgatccccccgggagtgggtcgaagggccaggccctccccagggggtgctgtgcctagggctcgactgtccgctctctctccctgcgcagctggtgggcacggaggatgctcttctgcagcagctggcggactcgatgctcaaagaggactgcgcctccgagctgaaggtccacttggcaaagtccctccctttgccctccagtgtgaatcggccccgaattgacctgatcgtgtttgtggttaatcttcacagcaaatacagtctccagaacacagaggagtccctgcgccatgtggatgccagcttcttcttggggaaggtgtgtttcctcgccacaggtggtggaaggctttagggccaccatggcgcagcgcctggtgcgcgtgctgcagatctgtgctggccacgtgcccggtgtctcagctctgaacctgctgtccctgctgagaagctctgagggcccctccctggaggacctgtgagggtggctggcccctgggctgccccttctcatggcttcgtgctgactccataaacattctctgttgaggatgtccagtcagggcttgacaggcccaggctcagcccgccgtggctgggaaggttccctgcagtgccagtgctgcagcagggagagctgggcagaagcagcgagggggcccagctggcgagactgtagccccctcccactcccacactcactcttgcagagcctgtgtctttaagcagctggcgtgttacatctccatttaaggtttcctttgaacaaaaggtctgtggctaaaaaaagtttaaaaatca

SEQ ID NO: 116373 - DNA, 541 bp, Homo sapiens
  Payload ID: 2706
  Gene Symbol: CENPM
  Gene Name: centromere protein M
  Uniprot ID: Q9NSP4
  ENST ID: ENST00000472374
  CDS Start-End: 46-222
aggcaggccacggagatacctcgtggaaggaggaacagcaagtgcatgggccgagtgtgggacttgcctggtgtgctcaaggtggaaggctttagggccaccatggcgcagcgcctggtgcgcgtgctgcagatctgtgctggccacgtgcccggtgtctcagctctgaacctgctgtccctgctgagaagctctgagggcccctccctggaggacctgtgagggtggctggcccctgggctgccccttctcatggcttcgtgctgactccataaacattctctgttgaggatgtccagtcagggcttgacaggcccaggctcagcccgccgtggctgggaaggttccctgcagtgccagtgctgcagcagggagagctgggcagaagcagcgagggggcccagctggcgagactgtagccccctcccactcccacactcactcttgcagagcctgtgtctttaagcagctggcgtgttacatctccatttaaggtttcctttgaacaaaaggtctgtggctaaaaaaagtttaaaaatca

SEQ ID NO: 116374 - DNA, 1398 bp, Homo sapiens
  Payload ID: 2707
  Gene Symbol: CENPN
  Gene Name: centromere protein N
  Uniprot ID: Q96H22
  ENST ID: ENST00000299572
  CDS Start-End: 737-1351
cacctcgctcgcagcctccccagcgcagcagcccggctgtgggcctgcggcagccgggtcttcctggtccccacctcctggggccgacgggcggcaggaaggggctcggcgggacgcgccatcagggacctgaggaggaacaacggaacgcgttcggaacggcctggactcccgagactcacccgactcgtggccacaccgggagaactgaagcggcagtagccggcggagacgcccgacccgaaggccggctgctagggagcagacagctgaaccgcttgccagacgccgaaacccagtgacgccctccaccgctccaccgtgctcccggctcctcgcccccgccgcccgcgggccccaaggcgcatgcgccgcctgtcctggaggggcccatttccgtccgtcgtggggggaggcacagtgagtccactggggcacggcagcgtctaagccacaagccgagcacataagccaggtcctaacggagcctatgtgtaagtccactactggtgcaaggttgcacacttctaagaagagcggcgtggggggctcggcgaccttcgcttcagtcgctcccccgtgcagtcccctgtgcccaagacacagcctgatgcttgtgctccggtgggcggagcttggaggcggcgggaactgcaattggtggctttgaaggcgcggcgagcgggaacagctcttgaggagtgagactgcaggagatgtgggccgtgccaaagagatggatgagactgttgctgagttcatcaagaggaccatcttgaaaatccccatgaatgaactgacaacaatcctgaaggcctgggattttttgtctgaaaatcaactgcagactgtaaatttccgacagagaaaggaatctgtagttcagcacttgatccatctgtgtgaggaaaagcgtgcaagtatcagtgatgctgccctgttagacatcatttatatgcaatttcatcagcaccagaaagtttgggaagtttttcagatgagtaaaggaccaggtgaagatgttgacctttttgatatgaaacaatttaaaaattcgttcaagaaaattcttcagagagcattaaaaaatgtgacagtcagcttcagagaaactgaggagaatgcagtctggattcgaattgcctggggaacacagtacacaaagccaaaccagtacaaacctacctacgtggtgtactactcccagactccgtacgccttcacgtcctcctccatgctgaggcgcaatacaccgcttctgggtcaggagttagaagctactgggaaaatctacctccgacaagaggagatcattttagatattaccgaaatgaagaaagcttgcaattagtgaacatgaaaggaaaataaaaattcctcacagtcatctttttataa

SEQ ID NO: 116375 - DNA, 2481 bp, Homo sapiens
  Payload ID: 2707
  Gene Symbol: CENPN
  Gene Name: centromere protein N
  Uniprot ID: Q96H22
  ENST ID: ENST00000305850
  CDS Start-End: 791-1810
gagcgacgcccacggcctgtctcggccaccagcgtgttccagcgagcgcccagccacctcgctcgcagcctccccagcgcagcagcccggctgtgggcctgcggcagccgggtcttcctggtccccacctcctggggccgacgggcggcaggaaggggctcggcgggacgcgccatcagggacctgaggaggaacaacggaacgcgttcggaacggcctggactcccgagactcacccgactcgtggccacaccgggagaactgaagcggcagtagccggcggagacgcccgacccgaaggccggctgctagggagcagacagctgaaccgcttgccagacgccgaaacccagtgacgccctccaccgctccaccgtgctcccggctcctcgcccccgccgcccgcgggccccaaggcgcatgcgccgcctgtcctggaggggcccatttccgtccgtcgtggggggaggcacagtgagtccactggggcacggcagcgtctaagccacaagccgagcacataagccaggtcctaacggagcctatgtgtaagtccactactggtgcaaggttgcacacttctaagaagagcggcgtggggggctcggcgaccttcgcttcagtcgctcccccgtgcagtcccctgtgcccaagacacagcctgatgcttgtgctccggtgggcggagcttggaggcggcgggaactgcaattggtggctttgaaggcgcggcgagcgggaacagctcttgaggagtgagactgcaggagatgtgggccgtgccaaagagatggatgagactgttgctgagttcatcaagaggaccatcttgaaaatccccatgaatgaactgacaacaatcctgaaggcctgggattttttgtctgaaaatcaactgcagactgtaaatttccgacagagaaaggaatctgtagttcagcacttgatccatctgtgtgaggaaaagcgtgcaagtatcagtgatgctgccctgttagacatcatttatatgcaatttcatcagcaccagaaagtttgggaagtttttcagatgagtaaaggaccaggtgaagatgttgacctttttgatatgaaacaatttaaaaattcgttcaagaaaattcttcagagagcattaaaaaatgtgacagtcagcttcagagaaactgaggagaatgcagtctggattcgaattgcctggggaacacagtacacaaagccaaaccagtacaaacctacctacgtggtgtactactcccagactccgtacgccttcacgtcctcctccatgctgaggcgcaatacaccgcttctgggtcaggcgctgacaattgctagcaaacaccatcagattgtgaaaatggacctgagaagtcggtatctggactctcttaaggctattgtttttaaacagtataatcagacctttgaaactcacaactctacgacacctctacaggaaagaagccttggactagatataaatatggattcaaggatcattcatgaaaacatagtagaaaaagagagagtccaacgaataactcaagaaacatttggagattatcctcaaccacaactagaatttgcacaatataagcttgaaacgaaattcaaaagtggtttaaatgggagcatcttggctgagagggaagaacccctccgatgcctaataaagttctctagcccacatcttctggaagcattgaaatccttagcaccagcgggtattgcagatgctccactttctccactgctcacttgcatacccaacaagagaatgaattattttaaaattagagataaataagacgtgcgtggtttcttaagcacagctcctccttcttgatattgcacatgcacttcagttcatggctagctgtatagcttccgtctgtaaacttgtattttcaagaatccttggtattgaatttttagaaatgctcacataattgttgggactgattcattcctccacgatatgcctcctctctctgatatcctgctaactgtagccgttgtggcatttgagatgacaggacatatatatatatggccccacacttgaccttgagtgcctgaatgctctgaaatcaagcatatggcacagcgctcaagacttttgggtttgtgtccttttttctatggctgtctcttctcaattctggagaggtctggttccagtggctggtttccagggattgattcttaagctctggatcacagagagaagcaacaaggaactatactcaactcaaaactttttaggagaatcatgaaattggtctattcaaaggatggagttgagtccattctgttattgttgcaagaggttgcatatttggtgagtcagttatataaaatagtgttcttattgtaaatatgatacttctcataatctattttatcatgtgtataacattcaaactgacaaatatattgacttatgaataaaggtgtcaaaaaactggcacatcagtt

SEQ ID NO: 116376 - DNA, 1556 bp, Homo sapiens
  Payload ID: 2707
  Gene Symbol: CENPN
  Gene Name: centromere protein N
  Uniprot ID: Q96H22
  ENST ID: ENST00000393335
  CDS Start-End: 75-1136
ggctttgaaggcgcggcgagcgggaacagctcttgaggagtgagactgcaggagatgtgggccgtgccaaagagatggatgagactgttgctgagttcatcaagaggaccatcttgaaaatccccatgaatgaactgacaacaatcctgaaggcctgggattttttgtctgaaaatcaactgcagactgtaaatttccgacagagaaaggaatctgtagttcagcacttgatccatctgtgtgaggaaaagcgtgcaagtatcagtgatgctgccctgttagacatcatttatatgcaatttcatcagcaccagaaagtttgggaagtttttcagatgagtaaaggaccaggtgaagatgttgacctttttgatatgaaacaatttaaaaattcgttcaagaaaattcttcagagagcattaaaaaatgtgacagtcagcttcagagaaactgaggagaatgcagtctggattcgaattgcctggggaacacagtacacaaagccaaaccagtacaaacctacctacgtggtgtactactcccagactccgtacgccttcacgtcctcctccatgctgaggcgcaatacaccgcttctgggtcaggcgctgacaattgctagcaaacaccatcagattgtgaaaatggacctgagaagtcggtatctggactctcttaaggctattgtttttaaacagtataatcagacctttgaaactcacaactctacgacacctctacaggaaagaagccttggactagatataaatatggattcaaggatcattcatgaaaacatagtagaaaaagagagagtccaacgaataactcaagaaacatttggagattatcctcaaccacaactagaatttgcacaatataagcttgaaacgaaattcaaaagtggtttaaatgggagcatcttggctgagagggaagaacccctccgatgcctaataaagttctctagcccacatcttctggaagcattgaaatccttagcaccagcggcacttgtttgcaggatccaaaagctgctctgctattctggaagccacagtcaagggacccaggacccgagcagctggcagaaggacttgtaccttctgtttgtcccattgtatccaagatgttaaaatcatgatgtcacaacatttagacatttaaatggttaatcaaatgtatgtctctcctgatatacagctaactgctatagactaatgcaggcctccttgttaaaatggaccctttgttactcaaatttgaccaatcttggaagcttggatgtgcactgacttgacaaccactttttgtgggacataacactctagacacaggtgcttctagctctaaggggaacagataactaatctgtggccaaccaaccaatgattaatcagctatgctgcctcggatcttgatcaaaaaaggaaaatgtgaaaagtgatacacaaaatggcatcactttggttcagagctctaaaatggagttgggaagccattctaagaaggactgcctgcacaatctgcaacttgcaaaacacaaaaacaaaaaa

SEQ ID NO: 116377 - DNA, 971 bp, Homo sapiens
  Payload ID: 2707
  Gene Symbol: CENPN
  Gene Name: centromere protein N
  Uniprot ID: Q96H22
  ENST ID: ENST00000428963
  CDS Start-End: 45-962
tcttgaggagtgagactgcaggagatgtgggccgtgccaaagagatggatgagactgttgctgagttcatcaagaggaccatcttgaaaatccccatgaatgaactgacaacaatcctgaaggcctgggattttttgtctgaaaatcaactgcagactgtaaatttccgacagagaaaggaatctgtagttcagcacttgatccatctgtgtgaggaaaagcgtgcaagtatcagtgatgctgccctgttagacatcatttatatgcaatttcatcagcaccagaaagtttgggaagtttttcagatgagtaaaggaccaggtgaagatgttgacctttttgatatgaaacaatttaaaaattcgttcaagaaaattcttcagagagcattaaaaaatgtgacagtcagcttcagagaaactgaggagaatgcagtctggattcgaattgcctggggaacacagtacacaaagccaaaccagtacaaacctacctacgtggtgtactactcccagactccgtacgccttcacgtcctcctccatgctgaggcgcaatacaccgcttctgggtcagacctttgaaactcacaactctacgacacctctacaggaaagaagccttggactagatataaatatggattcaaggatcattcatgaaaacatagtagaaaaagagagagtccaacgaataactcaagaaacatttggagattatcctcaaccacaactagaatttgcacaatataagcttgaaacgaaattcaaaagtggtttaaatgggagcatcttggctgagagggaagaacccctccgatgcctaataaagttctctagcccacatcttctggaagcattgaaatccttagcaccagcgggtattgcagatgctccactttctccactgctcacttgcatacccaacaagagaatgaattattttaaaattagagataaataagacgtgcgt

SEQ ID NO: 116378 - DNA, 1699 bp, Homo sapiens
  Payload ID: 2707
  Gene Symbol: CENPN
  Gene Name: centromere protein N
  Uniprot ID: Q96H22
  ENST ID: ENST00000439957
  CDS Start-End: 82-1041
aattggtggctttgaaggcgcggcgagcgggaacagctcttgaggagtgagactgcaggagatgtgggccgtgccaaagagatggatgagactgttgctgagttcatcaagaggaccatcttgaaaatccccatgaatgaactgacaacaatcctgaaggcctgggattttttgtctgaaaatcaactgcagactgtaaatttccgacagagaaaggaatctgtagttcagcacttgatccatctgtgtgaggaaaagcgtgcaagtatcagtgatgctgccctgttagacatcatttgtgaagatgttgacctttttgatatgaaacaatttaaaaattcgttcaagaaaattcttcagagagcattaaaaaatgtgacagtcagcttcagagaaactgaggagaatgcagtctggattcgaattgcctggggaacacagtacacaaagccaaaccagtacaaacctacctacgtggtgtactactcccagactccgtacgccttcacgtcctcctccatgctgaggcgcaatacaccgcttctgggtcaggcgctgacaattgctagcaaacaccatcagattgtgaaaatggacctgagaagtcggtatctggactctcttaaggctattgtttttaaacagtataatcagacctttgaaactcacaactctacgacacctctacaggaaagaagccttggactagatataaatatggattcaaggatcattcatgaaaacatagtagaaaaagagagagtccaacgaataactcaagaaacatttggagattatcctcaaccacaactagaatttgcacaatataagcttgaaacgaaattcaaaagtggtttaaatgggagcatcttggctgagagggaagaacccctccgatgcctaataaagttctctagcccacatcttctggaagcattgaaatccttagcaccagcgggtattgcagatgctccactttctccactgctcacttgcatacccaacaagagaatgaattattttaaaattagagataaataagacgtgcgtggtttcttaagcacagctcctccttcttgatattgcacatgcacttcagttcatggctagctgtatagcttccgtctgtaaacttgtattttcaagaatccttggtattgaatttttagaaatgctcacataattgttgggactgattcattcctccacgatatgcctcctctctctgatatcctgctaactgtagccgttgtggcatttgagatgacaggacatatatatatatggccccacacttgaccttgagtgcctgaatgctctgaaatcaagcatatggcacagcgctcaagacttttgggtttgtgtccttttttctatggctgtctcttctcaattctggagaggtctggttccagtggctggtttccagggattgattcttaagctctggatcacagagagaagcaacaaggaactatactcaactcaaaactttttaggagaatcatgaaattggtctattcaaaggatggagttgagtccattctgttattgttgcaagaggttgcatatttggtgagtcagttatataaaatagtgttcttattgtaaatatgatacttctcataatctattttatcatgtgtataacattcaaactgacaaatatattgacttatgaataaaggtgtcaaaaaac

SEQ ID NO: 116379 - DNA, 730 bp, Homo sapiens
  Payload ID: 2707
  Gene Symbol: CENPN
  Gene Name: centromere protein N
  ENST ID: ENST00000564669
  CDS Start-End: 200-730
gactgcaggagatgtgggccggtaagagagccccgggcggcactggatcgggccccggagggtgtggggccttgaggaagccagatcccaggcctcgggggtggctttttcgcaattgtcgcacgttgtgaggcgcaggattggcgctgggtctcgggctcggggcgaggaactacggttcgggccgagtgccaaagagatggatgagactgttgctgagttcatcaagaggaccatcttgaaaatccccatgaatgaactgacaacaatcctgaaggcctgggattttttgtctgaaaatcaactgcagactgtaaatttccgacagagaaaggaatctgtagttcagcacttgatccatctgtgtgaggaaaagcgtgcaagtatcagtgatgctgccctgttagacatcatttatatgcaatttcatcagcaccagaaagtttgggaagtttttcagatgagtaaaggaccaggtgaagatgttgacctttttgatatgaaacaatttaaaaattcgttcaagaaaattcttcagagagcattaaaaaatgtgacagtcagcttcagagaaactgaggagaatgcagtctggattcgaattgcctggggaacacagtacacaaagccaaaccagtacaaacctacctacgtggtgtactactcccagactccgtacgccttcacgtcctcctccatgctgaggcgcaatacaccgcttctgggtcag

SEQ ID NO: 116380 - DNA, 591 bp, Homo sapiens
  Payload ID: 2707
  Gene Symbol: CENPN
  Gene Name: centromere protein N
  ENST ID: ENST00000568445
  CDS Start-End: 26-256
aggagatgtgggccgtgccaaagagatggatgagactgttgctgagttcatcaagaggaccatcttgaaaatccccatgaatgaactgacaacaatcctgaaggcctgggattttttgtctgaaaatcaactgcagactgtaaatttccgacagagaaaggaatctgtagttcagcacttgatccatctgtgtgaggaaaagcgtgcaagtatcagtgatgctgccctgttagacatcatttgtaagtgtcagtgatttgtatttatacttaaccaatcagtttattagaggcaattttgtttctttctttgtgagacagggtctccctctgtcgcccaggctggagtgcagtaacgccatctcagctcaccgcgacctctgcctcctggattcaagtgattctccaacctcagcctcccgagtagctgggactatagcagtgcaccaccatatatgcaatttcatcagcaccagaaagtttgggaagtttttcagatgagtaaaggaccaggtgaagatgttgacctttttgatatgaaacaatttaaaaattcgttcaagaaaattcttcagagagcattaaaaaatgt

SEQ ID NO: 116381 - DNA, 461 bp, Homo sapiens
  Payload ID: 2707
  Gene Symbol: CENPN
  Gene Name: centromere protein N
  ENST ID: ENST00000562943
  CDS Start-End: 1-317
caggtgaagatgttgacctttttgatatgaaacaatttaaaaattcgttcaagaaaattcttcagagagcattaaaaaatgtgacagtcagcttcagagaaactgaggagaatgcagtctggattcgaattgcctggggaacacagtacacaaagccaaaccagtacaaacctacctacgtggtgtactactcccagactccgtacgccttcacgtcctcctccatgctgaggcgcaatacaccgcttctgggtcaggcgctgacaattgctagcaaacaccatcagattgtgaaaatggacctgagaagtcggtaaatctttattttctctttgacacaggagttagaagctactgggaaaatctacctccgacaagaggagatcattttagatattaccgaaatgaagaaagcttgcaattagtgaacatgaaaggaaaataaaaattcctcacagtca

SEQ ID NO: 116382 - DNA, 4085 bp, Homo sapiens
  Payload ID: 2708
  Gene Symbol: CENPO
  Gene Name: centromere protein O
  Uniprot ID: Q9BU64
  ENST ID: ENST00000260662
  CDS Start-End: 128-1030
ttgaagacgtggatggcgggaattctcgcttctggcctgggtgagctagaagggagaagcaaggacattggagtccctatcaccggttgcctagacaacttcatgggaaggcccttgggaatctgagatggagcaggcgaaccctttacgtccagatggcgagtccaaaggaggtgttttagctcacttggaaaggctagagacccaagtgagcagatcccgtaaacagtctgaagagctgcagagcgtgcaggcccaggaaggtgctcttggaaccaagattcataaactaaggcgtctgcgagatgagctgagggctgtggtgcggcaccggcgagccagcgtgaaagcatgtattgccaatgtagaacccaaccaaacagtggagatcaatgagcaagaagcattggaagagaaattggaaaatgtgaaagccattctgcaggcatatcattttacaggcctcagtggtaaactgaccagccgaggagtttgtgtctgcatcagtactgcttttgaggggaacctattggattcctattttgtggaccttgtcatacagaaaccactccggatacatcaccattcagtcccagtcttcattcccctggaagagatagctgcaaaatatttacagaccaacatccagcacttcctgttcagtctctgcgagtacctgaatgcttactctgggaggaagtaccaggcagaccggcttcagagtgactttgcagccctcctgactgggcccttgcagagaaacccactgtgtaacttgctgtcatttacttacaaactggatccagggggtcagtccttcccgttctgtgctagattgctgtataaggacctcacagcaactcttcccactgacgtcaccgtgacatgtcaaggagtggaagtattatccacttcatgggaggagcaacgagcatctcatgaaactctgttctgtacgaagcccttgcatcaagtgtttgcctcatttacaagaaaaggagaaaagttggatatgagtctggtctcctaatagattgttttcactgcactgggagcacatcagagaaataaatcccccctcccctgccaggtgaaaggaaatattgcactttctgttctcatgactaaggggacaggagttccagaagaacctttcaagatgatcaggaacaccaggacgagggccgtctcacctcactcggaccacatggagacctcccttcaaaatgggagccatgtcctgccccaccaagccctgtctgaagtggagcttccccgcctgtgctccctccacagtcccggaaagcccagcggcaaaggcagctttgtcccagctctgccaccctcctgctcacagtggtcagggcccctcaggggcaaggacggcagggattggaacgagggctctggaaggactgttcagccctatgcctaagacccctatgctggggacactacaggcacacacaggaatagcagggccaccctcagagctcacacatccacgaacaaatgaaggctgaggaggtttctaaacctaaagtccatgagtgtgcacttcaatccaggaaggtcgggacttccttcagtttcaaaaaataaattctcccttccggtttggactgttgcaggctcgaggccattcaggagttgtccaccacctggtggggcagtgtgacagaggggccattggggaaggtggctagcttatcccgccccttcaagaagaaggtcagcagctcccccttccccttcacaaagatggggcctcgcctcacaaagcggaagccgtactctcggaggatgacttgggtttcttctaccacctggagagggagggggagcaagaacgtggcgttacggggggagcctagactgagggcgggtgggggctttgggtggttggagccgagcactgatccatgggtcccaagcagtacgggacactccccaaacctcccagggccaagcccttccacccgtggcgagcagcgggtgggaaggagaaccctggagtgactggctgggggcctcctctcatccagagacttctctcctaggatggccatggtcacctgggtggcagcactgttacctggaaactgccactgcctgctcttctgtccctttgcccctttcgtggagcttttctgccagacgccactgagacagatcacaaggtattagaaggttcatacccaaaggtaggccatatgcatctagaacttcagcccagattttgtggatgggtggaagtgtttcttcctgtgctgaggctagctattgcagagattcttttccacttgccccacgtctctgcctctggacttactgttcagggccagggtgggaggcaggggcacgtgggaaagcactgttccggttttgttctcatgccgagtctgagcacgtgccagctgtgccactggacatacctgaatgttgcccatgacccccgtggactccatcctgctggctacattgactgtattgccccagatgtcgtagtgtggtttccgggctccgatgaccccagccagaaccccgcctttgttcatgcctagggtagaggcataaagttcagcacagccacaggccacaccttgttatgggcctcagaagccatctcctctccagacctgtaccacaaagctcctaatgtaacacatcattgtcctcattcaacttggctgtatgctattggagggtggaaatcacatctcctgtttatccgtgtgcttgttaggtgtcagccgccaccccccccccatatgcagatttactcggcatggtagtggccagcttctaacacagctggtatttcaagtctcctgggacctcactcaggaatgataccccctcagtagaagcagcaggtgatcttaactcctttcaaagagcaggcctgtctgggaagccatgtcctcagcaggcacagcaacccctctggaaatggatcacaaactcacttctcagccaggcaggccaagcttctattgtaacagtaggcacagtatagtcggatcatcacatcagctgggtttttggtttagtcatctagagtcgtctggactaaaggtctttcaggtctccttgccctgtgagtgcgtgaacctccccacccgaattgcctcagttgtcctgagcctcatgtctctcctggtggtgggccaggcccctgcatgggaagggagcctgctgcggggcaggccagctgggggtgctcacctatgcgcagcatgaagttattgaaggactggttgttgatgttggtgagcgtatccttcatggccagcgcgaagtcggccaggtcagccaggtgctgccagcgctctctctcggacttgtcttcctgtgccaggggaccgtggagaaagtgtcaggggccgctcactgcagcagcctgctctgctgccttccctggcagtgttctgggggtggattccctacacctagatgttcaaggccttacttttcctcccacaaaggagtcgcagccacgctagctctgacttgccactgtgacaaagttcacgtagcaggtctaggcaaagactgggcaattgagcagaggagacggacctgtgagtctgaccacgaggcggaccccttcaccttggctgggcctggtcctggtccttaggttttgtcaggttgtccttgtttggatccctcaactaggtgataagcactggagggggatgacccgccttggacgtgtttctttaacctcatccatataatagggccgtgggatggttgtagaggtaaagcaggatgatggtgttttaagaccagagcttgggaccagggctcctacacctaattttctctcctggtagctgaacaaaggtctaaattagcttaacaaaagaacaggctgccgtcagccagagttctgaaggccatgctttcagtttcccttgttgacaattgctctccagttcctatgaaagcacagagccttagggggcctggccacagaacacaaccatcttaggcctgagctgtgaacagcagggggttgtgtgtctgttctgtttctctgcttgccgaactttctcaataaaccctatttcttattt

SEQ ID NO: 116383 - DNA, 4386 bp, Homo sapiens
  Payload ID: 2708
  Gene Symbol: CENPO
  Gene Name: centromere protein O
  Uniprot ID: Q9BU64
  ENST ID: ENST00000380834
  CDS Start-End: 426-1328
atgcgccccagctcttggaggtaagcggctgtgtgcgggtggtcgcggtgagtgtgcaaggccgcggtggccgcgtgacaagcctgcgctaccagtgcgcccgccggccaggagaacggagcttgtgatagatcctttcgtaacaccaagtattgtaccaggacctgcggctccgccccagaggccgccatcttcctgaccacccgaaaggccggacctactccccggtgcatcttgggatcagggcggggccctgagcgccgccatgcttttgtacggcaggatcgcaaagcacgccgggaccggttggtttggttttgaagacgtggatggcgggaattctcgcttctggcctggcaaggacattggagtccctatcaccggttgcctagacaacttcatgggaaggcccttgggaatctgagatggagcaggcgaaccctttacgtccagatggcgagtccaaaggaggtgttttagctcacttggaaaggctagagacccaagtgagcagatcccgtaaacagtctgaagagctgcagagcgtgcaggcccaggaaggtgctcttggaaccaagattcataaactaaggcgtctgcgagatgagctgagggctgtggtgcggcaccggcgagccagcgtgaaagcatgtattgccaatgtagaacccaaccaaacagtggagatcaatgagcaagaagcattggaagagaaattggaaaatgtgaaagccattctgcaggcatatcattttacaggcctcagtggtaaactgaccagccgaggagtttgtgtctgcatcagtactgcttttgaggggaacctattggattcctattttgtggaccttgtcatacagaaaccactccggatacatcaccattcagtcccagtcttcattcccctggaagagatagctgcaaaatatttacagaccaacatccagcacttcctgttcagtctctgcgagtacctgaatgcttactctgggaggaagtaccaggcagaccggcttcagagtgactttgcagccctcctgactgggcccttgcagagaaacccactgtgtaacttgctgtcatttacttacaaactggatccagggggtcagtccttcccgttctgtgctagattgctgtataaggacctcacagcaactcttcccactgacgtcaccgtgacatgtcaaggagtggaagtattatccacttcatgggaggagcaacgagcatctcatgaaactctgttctgtacgaagcccttgcatcaagtgtttgcctcatttacaagaaaaggagaaaagttggatatgagtctggtctcctaatagattgttttcactgcactgggagcacatcagagaaataaatcccccctcccctgccaggtgaaaggaaatattgcactttctgttctcatgactaaggggacaggagttccagaagaacctttcaagatgatcaggaacaccaggacgagggccgtctcacctcactcggaccacatggagacctcccttcaaaatgggagccatgtcctgccccaccaagccctgtctgaagtggagcttccccgcctgtgctccctccacagtcccggaaagcccagcggcaaaggcagctttgtcccagctctgccaccctcctgctcacagtggtcagggcccctcaggggcaaggacggcagggattggaacgagggctctggaaggactgttcagccctatgcctaagacccctatgctggggacactacaggcacacacaggaatagcagggccaccctcagagctcacacatccacgaacaaatgaaggctgaggaggtttctaaacctaaagtccatgagtgtgcacttcaatccaggaaggtcgggacttccttcagtttcaaaaaataaattctcccttccggtttggactgttgcaggctcgaggccattcaggagttgtccaccacctggtggggcagtgtgacagaggggccattggggaaggtggctagcttatcccgccccttcaagaagaaggtcagcagctcccccttccccttcacaaagatggggcctcgcctcacaaagcggaagccgtactctcggaggatgacttgggtttcttctaccacctggagagggagggggagcaagaacgtggcgttacggggggagcctagactgagggcgggtgggggctttgggtggttggagccgagcactgatccatgggtcccaagcagtacgggacactccccaaacctcccagggccaagcccttccacccgtggcgagcagcgggtgggaaggagaaccctggagtgactggctgggggcctcctctcatccagagacttctctcctaggatggccatggtcacctgggtggcagcactgttacctggaaactgccactgcctgctcttctgtccctttgcccctttcgtggagcttttctgccagacgccactgagacagatcacaaggtattagaaggttcatacccaaaggtaggccatatgcatctagaacttcagcccagattttgtggatgggtggaagtgtttcttcctgtgctgaggctagctattgcagagattcttttccacttgccccacgtctctgcctctggacttactgttcagggccagggtgggaggcaggggcacgtgggaaagcactgttccggttttgttctcatgccgagtctgagcacgtgccagctgtgccactggacatacctgaatgttgcccatgacccccgtggactccatcctgctggctacattgactgtattgccccagatgtcgtagtgtggtttccgggctccgatgaccccagccagaaccccgcctttgttcatgcctagggtagaggcataaagttcagcacagccacaggccacaccttgttatgggcctcagaagccatctcctctccagacctgtaccacaaagctcctaatgtaacacatcattgtcctcattcaacttggctgtatgctattggagggtggaaatcacatctcctgtttatccgtgtgcttgttaggtgtcagccgccaccccccccccatatgcagatttactcggcatggtagtggccagcttctaacacagctggtatttcaagtctcctgggacctcactcaggaatgataccccctcagtagaagcagcaggtgatcttaactcctttcaaagagcaggcctgtctgggaagccatgtcctcagcaggcacagcaacccctctggaaatggatcacaaactcacttctcagccaggcaggccaagcttctattgtaacagtaggcacagtatagtcggatcatcacatcagctgggtttttggtttagtcatctagagtcgtctggactaaaggtctttcaggtctccttgccctgtgagtgcgtgaacctccccacccgaattgcctcagttgtcctgagcctcatgtctctcctggtggtgggccaggcccctgcatgggaagggagcctgctgcggggcaggccagctgggggtgctcacctatgcgcagcatgaagttattgaaggactggttgttgatgttggtgagcgtatccttcatggccagcgcgaagtcggccaggtcagccaggtgctgccagcgctctctctcggacttgtcttcctgtgccaggggaccgtggagaaagtgtcaggggccgctcactgcagcagcctgctctgctgccttccctggcagtgttctgggggtggattccctacacctagatgttcaaggccttacttttcctcccacaaaggagtcgcagccacgctagctctgacttgccactgtgacaaagttcacgtagcaggtctaggcaaagactgggcaattgagcagaggagacggacctgtgagtctgaccacgaggcggaccccttcaccttggctgggcctggtcctggtccttaggttttgtcaggttgtccttgtttggatccctcaactaggtgataagcactggagggggatgacccgccttggacgtgtttctttaacctcatccatataatagggccgtgggatggttgtagaggtaaagcaggatgatggtgttttaagaccagagcttgggaccagggctcctacacctaattttctctcctggtagctgaacaaaggtctaaattagcttaacaaaagaacaggctgccgtcagccagagttctgaaggccatgctttcagtttcccttgttgacaattgctctccagttcctatgaaagcacagagccttagggggcctggccacagaacacaaccatcttaggcctgagctgtgaacagcagggggttgtgtgtctgttctgtttctctgcttgccgaactttctcaataaaccctatttcttatttata

SEQ ID NO: 116384 - DNA, 4272 bp, Homo sapiens
  Payload ID: 2708
  Gene Symbol: CENPO
  Gene Name: centromere protein O
  Uniprot ID: Q9BU64
  ENST ID: ENST00000473706
  CDS Start-End: 330-1214
atgcgccccagctcttggaggtaagcggctgtgtgcgggtggtcgcggtgagtgtgcaaggccgcggtggccgcgtgacaagcctgcgctaccagtgcgcccgccggccaggagaacggagcttgtgatagatcctttcgtaacaccaagtattgtaccaggacctgcggctccgccccagaggccgccatcttcctgaccacccgaaaggccggacctactccccggtgcatcttgggatcagggcggggccctgagcgccgccatgcttttgtacggcaggatcgcaaagcacgccgggaccggttggtttggttttgaagacgtggatggcgggaattctcgcttctggcctgggtgttttagctcacttggaaaggctagagacccaagtgagcagatcccgtaaacagtctgaagagctgcagagcgtgcaggcccaggaaggtgctcttggaaccaagattcataaactaaggcgtctgcgagatgagctgagggctgtggtgcggcaccggcgagccagcgtgaaagcatgtattgccaatgtagaacccaaccaaacagtggagatcaatgagcaagaagcattggaagagaaattggaaaatgtgaaagccattctgcaggcatatcattttacaggcctcagtggtaaactgaccagccgaggagtttgtgtctgcatcagtactgcttttgaggggaacctattggattcctattttgtggaccttgtcatacagaaaccactccggatacatcaccattcagtcccagtcttcattcccctggaagagatagctgcaaaatatttacagaccaacatccagcacttcctgttcagtctctgcgagtacctgaatgcttactctgggaggaagtaccaggcagaccggcttcagagtgactttgcagccctcctgactgggcccttgcagagaaacccactgtgtaacttgctgtcatttacttacaaactggatccagggggtcagtccttcccgttctgtgctagattgctgtataaggacctcacagcaactcttcccactgacgtcaccgtgacatgtcaaggagtggaagtattatccacttcatgggaggagcaacgagcatctcatgaaactctgttctgtacgaagcccttgcatcaagtgtttgcctcatttacaagaaaaggagaaaagttggatatgagtctggtctcctaatagattgttttcactgcactgggagcacatcagagaaataaatcccccctcccctgccaggtgaaaggaaatattgcactttctgttctcatgactaaggggacaggagttccagaagaacctttcaagatgatcaggaacaccaggacgagggccgtctcacctcactcggaccacatggagacctcccttcaaaatgggagccatgtcctgccccaccaagccctgtctgaagtggagcttccccgcctgtgctccctccacagtcccggaaagcccagcggcaaaggcagctttgtcccagctctgccaccctcctgctcacagtggtcagggcccctcaggggcaaggacggcagggattggaacgagggctctggaaggactgttcagccctatgcctaagacccctatgctggggacactacaggcacacacaggaatagcagggccaccctcagagctcacacatccacgaacaaatgaaggctgaggaggtttctaaacctaaagtccatgagtgtgcacttcaatccaggaaggtcgggacttccttcagtttcaaaaaataaattctcccttccggtttggactgttgcaggctcgaggccattcaggagttgtccaccacctggtggggcagtgtgacagaggggccattggggaaggtggctagcttatcccgccccttcaagaagaaggtcagcagctcccccttccccttcacaaagatggggcctcgcctcacaaagcggaagccgtactctcggaggatgacttgggtttcttctaccacctggagagggagggggagcaagaacgtggcgttacggggggagcctagactgagggcgggtgggggctttgggtggttggagccgagcactgatccatgggtcccaagcagtacgggacactccccaaacctcccagggccaagcccttccacccgtggcgagcagcgggtgggaaggagaaccctggagtgactggctgggggcctcctctcatccagagacttctctcctaggatggccatggtcacctgggtggcagcactgttacctggaaactgccactgcctgctcttctgtccctttgcccctttcgtggagcttttctgccagacgccactgagacagatcacaaggtattagaaggttcatacccaaaggtaggccatatgcatctagaacttcagcccagattttgtggatgggtggaagtgtttcttcctgtgctgaggctagctattgcagagattcttttccacttgccccacgtctctgcctctggacttactgttcagggccagggtgggaggcaggggcacgtgggaaagcactgttccggttttgttctcatgccgagtctgagcacgtgccagctgtgccactggacatacctgaatgttgcccatgacccccgtggactccatcctgctggctacattgactgtattgccccagatgtcgtagtgtggtttccgggctccgatgaccccagccagaaccccgcctttgttcatgcctagggtagaggcataaagttcagcacagccacaggccacaccttgttatgggcctcagaagccatctcctctccagacctgtaccacaaagctcctaatgtaacacatcattgtcctcattcaacttggctgtatgctattggagggtggaaatcacatctcctgtttatccgtgtgcttgttaggtgtcagccgccaccccccccccatatgcagatttactcggcatggtagtggccagcttctaacacagctggtatttcaagtctcctgggacctcactcaggaatgataccccctcagtagaagcagcaggtgatcttaactcctttcaaagagcaggcctgtctgggaagccatgtcctcagcaggcacagcaacccctctggaaatggatcacaaactcacttctcagccaggcaggccaagcttctattgtaacagtaggcacagtatagtcggatcatcacatcagctgggtttttggtttagtcatctagagtcgtctggactaaaggtctttcaggtctccttgccctgtgagtgcgtgaacctccccacccgaattgcctcagttgtcctgagcctcatgtctctcctggtggtgggccaggcccctgcatgggaagggagcctgctgcggggcaggccagctgggggtgctcacctatgcgcagcatgaagttattgaaggactggttgttgatgttggtgagcgtatccttcatggccagcgcgaagtcggccaggtcagccaggtgctgccagcgctctctctcggacttgtcttcctgtgccaggggaccgtggagaaagtgtcaggggccgctcactgcagcagcctgctctgctgccttccctggcagtgttctgggggtggattccctacacctagatgttcaaggccttacttttcctcccacaaaggagtcgcagccacgctagctctgacttgccactgtgacaaagttcacgtagcaggtctaggcaaagactgggcaattgagcagaggagacggacctgtgagtctgaccacgaggcggaccccttcaccttggctgggcctggtcctggtccttaggttttgtcaggttgtccttgtttggatccctcaactaggtgataagcactggagggggatgacccgccttggacgtgtttctttaacctcatccatataatagggccgtgggatggttgtagaggtaaagcaggatgatggtgttttaagaccagagcttgggaccagggctcctacacctaattttctctcctggtagctgaacaaaggtctaaattagcttaacaaaagaacaggctgccgtcagccagagttctgaaggccatgctttcagtttcccttgttgacaattgctctccagttcctatgaaagcacagagccttagggggcctggccacagaacacaaccatcttaggcctgagctgtgaacagcagggggttgtgtgtctgttctgtttctctgcttgccgaactttctcaataaaccctatttcttatttata

SEQ ID NO: 116385 - DNA, 3088 bp, Homo sapiens
  Payload ID: 2709
  Gene Symbol: CENPP
  Gene Name: centromere protein P
  ENST ID: ENST00000375576
  CDS Start-End: 765-1073
gaattttcatagcgcatgggggaaaccagactctcccagaaccgcaagcctagaaatctgtgagattccacttgatttccctgcttttgggaggaggcttttgaccataaaatgccgtctcatcatgaagctgactttcaccaaggtaggccctttcccttactgcagtgggagccgcaccaccactgggcacagtgaggataccagggtgggctcctgcccatgcccaggacggtgtgtgggctggacaccactggggtgagtcctgaggacggacaggcgaggggcgtccaggctcggccacagccctcacggagcctcagctcaaagggcttttcaggtcagatgctaaaaccgtgagaaaacagctgctttccagcaaagagcctgacgcatccgcttggggaatcctctgaccagtcctctccagaccgtctgggttgtgacagacaagggcagaccaaggagccatcccagatggaaagggtgtggggaaacctgtgaaatgagaatacagctgtagggaggttatgtacaatgttcatgatggggaagcagcagtcatgggagcctggaggctgtggagagacctacagtggggcggacgtgtgtgacagcaagggcaagaggggcggttggcacccatggatgctgcgcaaacactcggaccctgattttcgccagacacctggaacggtgccccgtgcccctcccatggcccctttctccccaccagtggatctgtctacccgtttcttctccccatgcaggaaaagtacccagatgccgtgtacctctcggaggggccctcctcctgctccatggggatccgcagcgccagccggccagggtttgaattagtcattgtttggaggatacaaatagatgaagatgggaaggtttttccaaagctggatcttctcaccaaagtcccacagcgagccctggagctggacaagaacagagccatagaaactgctcctctcagcttccgaaccctggtaggactgcttggaatcgaagctgctctggaaagcctgataaaatcgctttgtgcagaggagaacaactagttccaaaacagtgaacgtggaggatgaagatgctgcgtggaggaacatgcaattttattcaatataaacatttgctattttctgcttagaaaccacaccctgaagacgtgctgtctatgcagttatggcacattatatggaaactctcatgacatgaaaaataaatacaactagttaagtataaaatgccaaataaaagtgacacgtacaatgtggtttataaaaataagcttaacatctgagaaaatgtaccaagtggttgtgtgtcctcagatgtgtggggaggatccatcccccacccactgcagcctcacaccgagtccaccttggacatggtggccacattactcagctgggagaagccacccttatcctggttcctgcctcctgggggctctggagacggatgcctatggcgcctcatctttaaactgtccttagtagcccaggggagccacaccctcactccctgcctccccccggtccgcatggtggcaccgtgaggcagtctcagcaagtcctcatgctgttcttggtcttccacaagaaagtgaagctgtcagcttaataacaagaatggcctaagacagcaaagacagcactgttcctgggctgggacgcaaggaatgaggtcctttatgaaagaaagacccccctgcatagcctaagtgctatatcgatcgtcccggatgtgccttaagaaccgtgacctcatcagtcgcccatttagcattgttaagatctgtgaacgcgtgttgtctcaaaccagtcagggccgtcatgactacgcagcagcagcagtttccaagacgggccagaaacgcatccacagcagtggcacccgcggctcaggggctcctcacagcccgggctggtgggagccaagaccagacagagtgggggtctccatctgttttctcttctccctcaaatacaggctgttttcatcgtgtctagtccagccctgtctgggccctgtgctaggcaataactcttgcagccctgaaggacctagggagcccagcccaccttcccacggactggggttccctcacatgtgcacttgaacccaggacccagcatcctccacacaccgtgacaatgggcaaaatcatcccaaaccaggctgccccagccccagcccagcaacagtgaactcccttgggtcaagacagtactcaacggccactacctccacgcttcccagagcctgcggcttgtccgtgagctccgtgcacttcaccaaagcccccatcccagcacacaggacccgtgtgtatgagacggtgtcattggaagtgagaagaaaacagtaaaagtgtccagttagataagtatctttttgcacctctgagagtagaattagaagtaaatatgacagaattgaacaataaattctagaagagttgccttgattcaaacaagtataattctcaagttatcacaaaatttcccacaaaaatttacaatcagcaaaatagtttccttatttctcatgtatcattttcatataattccatggtttcactaatattatatgttacaataagcctccattagtccctcaaaacgatgatataaataagtctgtacaacctagcatagaataaaaaactgaaaccaagattcccaacgtttttcatagcagccgggcacactttggtgaccccaacgagaaccctctcggcagcagccaggagctgttcaccttccagaagcagggcctgtggcagcctaacagggagaggccacggggcccaaaaacgcaacacgtctcaaggcaaacccgagggaggaacttggtctgggaggaagagagaactcgctcctcaaccaccccagacactggagtgtcaggaaagcactgagctgttggggcacactgcccagcccggccacagcagctcagccagtcacagctccacctccaacttctacagcagcaatttttagtgggaaagaacagctcatctccccctcatgtgaaagattaaattgtaaagcaaaaaaaaaaa

SEQ ID NO: 116386 - DNA, 2570 bp, Homo sapiens
  Payload ID: 2709
  Gene Symbol: CENPP
  Gene Name: centromere protein P
  Uniprot ID: Q6IPU0
  ENST ID: ENST00000375579
  CDS Start-End: 208-555
tttgctgtctcctgccctggctctcttcctgtccatacaggcccattattcatgcttgcatttgctgtttgtttattaaaattccccagctcttcgttttaaaaatgccattgggatatatttccagtagagtgggtctctttcaactctgggtttccctggttcttcccaagtctgtacaaacaagaaaagttgggtcaagggaggatggaggctcccagctggtctgttctgcaaaggtctggagatgaggaaaagtacccagatgccgtgtacctctcggaggggccctcctcctgctccatggggatccgcagcgccagccggccagggtttgaattagtcattgtttggaggatacaaatagatgaagatgggaaggtttttccaaagctggatcttctcaccaaagtcccacagcgagccctggagctggacaagaacagagccatagaaactgctcctctcagcttccgaaccctggtaggactgcttggaatcgaagctgctctggaaagcctgataaaatcgctttgtgcagaggagaacaactagttccaaaacagtgaacgtggaggatgaagatgctgcgtggaggaacatgcaattttattcaatataaacatttgctattttctgcttagaaaccacaccctgaagacgtgctgtctatgcagttatggcacattatatggaaactctcatgacatgaaaaataaatacaactagttaagtataaaatgccaaataaaagtgacacgtacaatgtggtttataaaaataagcttaacatctgagaaaatgtaccaagtggttgtgtgtcctcagatgtgtggggaggatccatcccccacccactgcagcctcacaccgagtccaccttggacatggtggccacattactcagctgggagaagccacccttatcctggttcctgcctcctgggggctctggagacggatgcctatggcgcctcatctttaaactgtccttagtagcccaggggagccacaccctcactccctgcctccccccggtccgcatggtggcaccgtgaggcagtctcagcaagtcctcatgctgttcttggtcttccacaagaaagtgaagctgtcagcttaataacaagaatggcctaagacagcaaagacagcactgttcctgggctgggacgcaaggaatgaggtcctttatgaaagaaagacccccctgcatagcctaagtgctatatcgatcgtcccggatgtgccttaagaaccgtgacctcatcagtcgcccatttagcattgttaagatctgtgaacgcgtgttgtctcaaaccagtcagggccgtcatgactacgcagcagcagcagtttccaagacgggccagaaacgcatccacagcagtggcacccgcggctcaggggctcctcacagcccgggctggtgggagccaagaccagacagagtgggggtctccatctgttttctcttctccctcaaatacaggctgttttcatcgtgtctagtccagccctgtctgggccctgtgctaggcaataactcttgcagccctgaaggacctagggagcccagcccaccttcccacggactggggttccctcacatgtgcacttgaacccaggacccagcatcctccacacaccgtgacaatgggcaaaatcatcccaaaccaggctgccccagccccagcccagcaacagtgaactcccttgggtcaagacagtactcaacggccactacctccacgcttcccagagcctgcggcttgtccgtgagctccgtgcacttcaccaaagcccccatcccagcacacaggacccgtgtgtatgagacggtgtcattggaagtgagaagaaaacagtaaaagtgtccagttagataagtatctttttgcacctctgagagtagaattagaagtaaatatgacagaattgaacaataaattctagaagagttgccttgattcaaacaagtataattctcaagttatcacaaaatttcccacaaaaatttacaatcagcaaaatagtttccttatttctcatgtatcattttcatataattccatggtttcactaatattatatgttacaataagcctccattagtccctcaaaacgatgatataaataagtctgtacaacctagcatagaataaaaaactgaaaccaagattcccaacgtttttcatagcagccgggcacactttggtgaccccaacgagaaccctctcggcagcagccaggagctgttcaccttccagaagcagggcctgtggcagcctaacagggagaggccacggggcccaaaaacgcaacacgtctcaaggcaaacccgagggaggaacttggtctgggaggaagagagaactcgctcctcaaccaccccagacactggagtgtcaggaaagcactgagctgttggggcacactgcccagcccggccacagcagctcagccagtcacagctccacctccaacttctacagcagcaatttttagtgggaaagaacagctcatctccccctcatgtgaaagattaaattgtaaagcaaaaaaaaaaa

SEQ ID NO: 116387 - DNA, 8766 bp, Homo sapiens
  Payload ID: 2709
  Gene Symbol: CENPP
  Gene Name: centromere protein P
  Uniprot ID: Q6IPU0
  ENST ID: ENST00000375587
  CDS Start-End: 516-1382
gcctccgtcacctccccctcaacgactgcaaaagagcctaaaccaaaatcccctagtttctattgaacactatcgctgtgtgtaccaattcctggactaggtcggcgtaagagaggaagtaggtgaaaaaaataaagaggcgctcccctccacgtgatcccagccctgcctctttagtgaggcacgcggccgggcggctccaaggctgccggctagggtgagcagcggagcgcttgggcttggagtagcaaagaacgcgctctccagagaaagtatagccactgcttagacagccagggaaacgtgtgcggggaagtggaggactcaggctctcgtgcgagagcggagttggacgtgcagggccgctggggtcacgcggagctctcccgcctcccctccgcgtgagctctgggatggtccgcgccgggagcgcgcgcgaggcttgaagcgcgggtgaagcgcgcaggtcggagtgacagctgcgctgccggcccggctgcggtcagcaacgcgccatggacgcagagctggcagaggtgcgcgccttgcaagctgagatcgcggccctgcggcgagcgtgtgaggacccaccggcgccctgggaagagaagtcccgagtccaaaaatcttttcaagccatacaccaattcaatttggaaggatggaagtcttcaaaagatctgaaaaatcagcttggacatttagaatcagaactttcatttctaagtacgcttactggcatcaatataagaaatcactccaagcagacagaagacctaacaagcactgagatgacagaaaagagtattagaaaagttctacagagacacagattatcaggaaattgccacatggttacatttcaacttgaatttcagattctggaaattcagaataaggagagattatcttctgctgttactgacctcaacataataatggagcccacagaatgctcagaattaagtgaatttgtgtctagagcagaagagagaaaagatctgttcatgtttttccgaagcctgcatttttttgtggagtggtttgaatatcgtaagcgcacgtttaaacatctcaaggaaaagtacccagatgccgtgtacctctcggaggggccctcctcctgctccatggggatccgcagcgccagccggccagggtttgaattagtcattgtttggaggatacaaatagatgaagatgggaaggtttttccaaagctggatcttctcaccaaagtcccacagcgagccctggagctggacaagaacagagccatagaaactgctcctctcagcttccgaaccctggtaggactgcttggaatcgaagctgctctggaaagcctgataaaatcgctttgtgcagaggagaacaactagttccaaaacagtgaacgtggaggatgaagatgctgcgtggaggaacatgcaattttattcaatataaacatttgctattttctgcttagaaaccacaccctgaagacgtgctgtctatgcagttatggcacattatatggaaactctcatgacatgaaaaataaatacaactagttaagtataaaatgccaaataaaagtgacacgtacaatgtggtttataaaaataagcttaacatctgagaaaatgtaccaagtggttgtgtgtcctcagatgtgtggggaggatccatcccccacccactgcagcctcacaccgagtccaccttggacatggtggccacattactcagctgggagaagccacccttatcctggttcctgcctcctgggggctctggagacggatgcctatggcgcctcatctttaaactgtccttagtagcccaggggagccacaccctcactccctgcctccccccggtccgcatggtggcaccgtgaggcagtctcagcaagtcctcatgctgttcttggtcttccacaagaaagtgaagctgtcagcttaataacaagaatggcctaagacagcaaagacagcactgttcctgggctgggacgcaaggaatgaggtcctttatgaaagaaagacccccctgcatagcctaagtgctatatcgatcgtcccggatgtgccttaagaaccgtgacctcatcagtcgcccatttagcattgttaagatctgtgaacgcgtgttgtctcaaaccagtcagggccgtcatgactacgcagcagcagcagtttccaagacgggccagaaacgcatccacagcagtggcacccgcggctcaggggctcctcacagcccgggctggtgggagccaagaccagacagagtgggggtctccatctgttttctcttctccctcaaatacaggctgttttcatcgtgtctagtccagccctgtctgggccctgtgctaggcaataactcttgcagccctgaaggacctagggagcccagcccaccttcccacggactggggttccctcacatgtgcacttgaacccaggacccagcatcctccacacaccgtgacaatgggcaaaatcatcccaaaccaggctgccccagccccagcccagcaacagtgaactcccttgggtcaagacagtactcaacggccactacctccacgcttcccagagcctgcggcttgtccgtgagctccgtgcacttcaccaaagcccccatcccagcacacaggacccgtgtgtatgagacggtgtcattggaagtgagaagaaaacagtaaaagtgtccagttagataagtatctttttgcacctctgagagtagaattagaagtaaatatgacagaattgaacaataaattctagaagagttgccttgattcaaacaagtataattctcaagttatcacaaaatttcccacaaaaatttacaatcagcaaaatagtttccttatttctcatgtatcattttcatataattccatggtttcactaatattatatgttacaataagcctccattagtccctcaaaacgatgatataaataagtctgtacaacctagcatagaataaaaaactgaaaccaagattcccaacgtttttcatagcagccgggcacactttggtgaccccaacgagaaccctctcggcagcagccaggagctgttcaccttccagaagcagggcctgtggcagcctaacagggagaggccacggggcccaaaaacgcaacacgtctcaaggcaaacccgagggaggaacttggtctgggaggaagagagaactcgctcctcaaccaccccagacactggagtgtcaggaaagcactgagctgttggggcacactgcccagcccggccacagcagctcagccagtcacagctccacctccaacttctacagcagcaatttttagtgggaaagaacagctcatctccccctcatgtgaaagattaaattgtaaagcaaaaaaaaaaaggtcaatgctcgcatgagtggtgtccatcctgacctgagccttgcgctccctgctgccctgtgtggaactgtgggcttcagcacctccacagggaccctgagtctacactgctcagaatcggcatctgcgcgaccacgaggtcacgctgtgcagcagggaaccacctaaaaacctgtgttgatatgtggcttgcactgaaaaagtgaccatgtaactcagctgggggaagttccagtagtatccatgttttcttaaaagtccaaactgtaaaatgtatgtgacaattcaagttttctatgttaggagtctggtggtagcagatccaaaccttgggtcttagaataaggcttttcgcattagagaatcagacatgagccctggttgggaaagaagaactatccagaacgtcttcccagggcttaacggacacttccattttaagagtgtgagcagcttcctgggacacagcactcacttcctacattccttgtccaggaagttgtttctagtgctcttcaattccatgtctccaagaggcaatcccacctcaaaaggggttaaaagcaaaaacattcacaaccaaaggtcacccaacacaacagaaaatatctctatcattcagccttcacattatgttcaagtttcaaagacactgcagggaaagagttagaccttgtggagaactaatgtgcaatcttcgctttccttgaaccgagtcgacatcacggcgttgtctttggcacgtacagtctttgaataatagttgacgatcttgccgtccagtttatactgatggggaatgctctcgtagggcttgaggtcaaggtccagcacagacacggaaaaggcaaacctggacctcgatgaagggacgacaggcctttgatcagagctgcaagtaaaaagtaccatttcaggatacacaagccccccattcatttccctccctcccgttctctctccctttcttctttcaactagtatgtttttatgttttttctttgacttctgcaaagttagataaatcaatctcttttaaaagagaagtgaatggcctcacaccccagctcacaaagagcactcgttctgtgcacctgtgatctgtgcgtgtgacagctgtctgtgccggctgtgtgcaccagcgtgcaaagcttcctcaggccagtgcaccccaccataccaggcgagagagggttaaaggactgaaagatggaaaagtaattatgtggaacatgtgagcgatgttcccccagcccagtggtataaacgaacgctgaaaaatcactttatcatgagccaagtattacaaaacccaacaaaaagtaaaaagtagatctggccattccagcgccaaatggatggaatgtcgacaagccttcttctttgcctctcctgtctgctgagaaacgcaagctcctttggttcacatttgaagagatctggtttctcattttattctcaaattttatcttcagtcctttgtattttgcttctcagggcttagttttgtggttttaacctcagaagtcgtgtgcttataacaagatgtgattaattatttgccctgaaaaacacatttaggattactccgagtcctgagctctgactgctgtgtgtcccgcttttcgtctccgggcactcagcgcacagcactcaagacactggctaaacaagtgacctaagctcagttcagtccaagagaagtatcctgggttctggtgtcccaatgtttactacgctttgagatttagaaatcaacaagccaaaccccaacttcaaaagctcctgccgaggagaggaaatactgatcagcacgtccctgctctgacgctgctcaccatggccttggcgctcactgctgccctgccccagaatcctgtttgtagaaaaaacaaatccctgactaagctgctggggtaagtaactattctcatctgaagagtaaacagcaaataactcatttacaaattaaggtcatgagtctcgctccagaagctggagtgtgcctgcagctcatcccaaggggccacattttattgggagaacctcagaagcccaaggtactgctcagttctgaggcctgagacccaagctgggtgcacctgggctggaacagtcacatccccagcccatgactagggttacgtattttaaaggacaccccaatttctcagaagcagcacctgacaagaccatgggtgtaaagacaggaaggatgttccaggcagctcccggggagggtctgactacctgggtcaaccacaagctagctccatgggaaccaatggcagtgaccagcgggcaccagctcctgacacagaaatgctcttcttccccctcagtaccccggaggccaagactgggcaagaggccccagggacacacctgtcccttgtgccacaagtgtgccctctagcagccttggagaatgaggctcaggtggccttctggctgcaggggggcagcccttgcctggaaggccgttctccaggacactgacccgctgggggttaccgggggaccagcagcctccaagggtgctggggatcggggtggagaagccaaggccgcacactgtgtttcaaatgggaggtcgagaggagcatcagggtttaggccgggaagctgtggcagctctctccacagttccaaattcccaaagggacaaagctctgcagcgacaggaaggcagatccaacttgagacattttcctttatgacagggcagaaacagtagtgcagagctggagaagcctttattttagggggtgtaagaagtttaaatgtggtcaatctatctgtgagctgcaaattagtctagggatctaaatttagtctcaggtctaccaggtatctcaagacgccaagatgactcatgataaatcccagccttagtttgtccctaggcctctagagcaccacagttactggaacttcacaggtgcggccactgcgcacaccttcctggaagcaggcccagccccacacgccatgttctcggaggagaagccttctctgagatcctctccttttgttgagaaaggcctggctagagtgctttgtgcaggatggttccagtgcctacaccctaggtctgagaagccacatggctcagtgccttcaggacatgccctcccctcccctcctagtgtcgtttctgctgagcagctggtcgtaaggacccgggccttcagctttccccgcatgctggctttccaatttgacatcactgaccaggcactaagagattcccaggtgctagacgaggtgagtaacatgtctgtccttcagcggcctttcacagcccacctaagggcaccctgcatccaagcacatttccattgcccagctgcatccttggtcggggggctgctgaacagtggtatcttcgtgggttttctctcatcgaacaccaccagcttaatccagttaaggaattcctcataacttagccctgtaggtatttccttaggggataacaggagttttcaactaaatagaacaaccttttttctacttcagttagccctataatgttcctcagtatttcatattggaaagtaaacaattctgtgcctgccagggaacaggaatcctgggaactgtttagttcaaaagcaccgggaaagtgagtggctggcagccagcaaccaaggtcatcttgacccaggaacacatgttagaagaatgtggaacattccgcaaatactgggtgcagggtttagcacccctgaagatcggtgatggagatgctgtctaacgactatgagattatcagtttcatcccgaattcccagaaacagaggggactggacaaaactagtgacattagggagaggggcggcacataggctggttattcagaagaggaagcagaatgaatgcgcgcctcacaggctttcaaatgactgtggtggtaaaaaggcaggtgcgccatgctgccactgtgggagaccgaggaacaagggccacaggtacccacacatctcaggggctggctttctttgagggaatgcaatgggcagctcactgtccacattgtttctgagctcttgggagtattttcttagaaaacagtaactttcaatgtactaacaatccttttaagttattctccataaatctgtcttttgactgaattacaagcttctagagggcgagagttagtaagccccatgatgtcacataggccaaggaagttatgtcactccgccatggagtctctaaatatggggaaaccaactatcctattaacaattcaccaactgtccataaaaccccgttagacccaggctgcatgccttgcagtgggggcctcacctggcatcctgcagacagggagacagtgcaatcatgatggagcagtccttggcagtcatggcgacgcggtactgctgcacctgcaggggcgggaaagatcagctccaggtcacacaggaagcctctgcccccccacacaaccttccttcccagtagccaagtgtgggaactgcttcctgcctcagaacctgagggtgggattaggagcgagggccacggtgagcacgggcgtcaggaggtcgccctgtgagagcacctgggccagccctcagtgccacggggctgctcagaggccagcaccgccccctgacctctcacggcaagcagtgtgggaccccgactccagaccctgagacggatgatctgtcttcagcaaggtcaccacagtcggcctttggaaggaaaagcagtaagccacctgagccccgcatgttggccacactcagagtatcaagtgagtatcactcgacacctgcaaggagagcgcagggggtgttcagcaaggcatcgcttagaacgacattccctccggaacatcatacagccaccagagacaacggcagacggccacccttctacaggctgtgcatgtgttaacttgctccaccctcacagcagcccaacagggcagcacggccggcgtcccactttacagacaagcaacagacacagacatcacttgtctgtcatgccctgcttgtcaatggcaaggcagggactcaaacccggtacgctggctctgacatttacactcttcaacacatgctccaagctatgtgggtctgtccatactgaccagggacagctcaacacacaccacactgtcagagtcgacatacgtaaagctgtacatgtgcacatgtgtgtgacgcgggcagggagaaaggtgaaggacaggcaccacaatgctcacaactgtctcctctacagagcagaatgtgaggcactctctcctcttccttctttggactttcatatatggtttgcattgttttagatggcatagctctcgctttcacaaaaataaacagttgtaaaagaaaaggaa

SEQ ID NO: 116388 - DNA, 570 bp, Homo sapiens
  Payload ID: 2709
  Gene Symbol: CENPP
  Gene Name: centromere protein P
  ENST ID: ENST00000618653
  CDS Start-End: 1-570
atggacgcagagctggcagaggtgcgcgccttgcaagctgagatcgcggccctgcggcgagcgtgtgaggacccaccggcgccctgggaagagaagtcccgagtccaaaaatcttttcaagccatacaccaattcaatttggaaggatggaagtcttcaaaagatctgaaaaatcagcttggacatttagaatcagaactttcatttctaagtacgcttactggcatcaatataagaaatcactccaagcagacagaagacctaacaagcactgagatgacagaaaagagtattagaaaagttctacagagacacagattatcaggaaattgccacatggttacatttcaacttgaatttcagattctggaaattcagaataaggagagattatcttctgctgttactgacctcaacataataatggagcccacagaatgctcagaattaagtgaatttgtgtctagagcagaagagagaaaagatctgttcatgtttttccgaagcctgcatttttttgtggagtggtttgaatatcgtaagcgcacgtttaaacatctcaaggtaaag

SEQ ID NO: 116389 - DNA, 1733 bp, Homo sapiens
  Payload ID: 2710
  Gene Symbol: CENPQ
  Gene Name: centromere protein Q
  Uniprot ID: Q7L2Z9
  ENST ID: ENST00000335783
  CDS Start-End: 95-901
gtctcctctgtttacgaatgtttgggcgcgaattactctaagcgcggctctcagaagggtgcaagaagaatcagtgcactgtgtttagatcaagatgtctggtaaagcaaatgcttccaagaaaaacgctcaacagttaaaaagaaatccaaagagaaaaaaggataatgaggaagttgtgttgtcagagaataaggttagaaacacagtgaaaaaaaataaaaatcatctgaaagatctgtcttctgaaggacaaacaaagcacactaacctaaaacacggaaagacagcagccagcaagagaaaaacctggcaacctctgtcaaagagtaccagagaccatttgcaaactatgatggaatcagtaataatgacaattttgagtaacagtattaaagaaaaagaagaaatacaataccatctcaacttcctgaagaaaagattgctacaacagtgtgaaactctgaaagtccctcccaaaaagatggaagatttaactaatgtatcaagtctactgaatatggaaagggcacgagacaaagctaatgaagaaggtctggcattactacaggaagaaatagataaaatggtagagaccacagagttaatgactgggaatattcagagcctaaagaacaaaattcagattctggcaagtgaggtggaagaagaagaggagagagtaaaacagatgcatcaaataaatagtagtggagtactctctcttccggaactttctcagaaaactctcaaagcacccacacttcagaaagaaattttggcgctaattccaaaccagaatgctcttctaaaggacttggatattcttcataattcatcacagatgaagagcatgtcaaccttcattgaagaagcctataagaaactggatgcatcttaaagagtgttttttttttagattgttccatattaatttaatgttcgtgaatttgtaaaactgttaacctatgattatatgtacagaggctaaggcttctgcaggatttattatctcctgatatgcactttaaaattagtctttgtagttctatcattagcatctaatgtagttctgaagactgtttttagcagttgccaaatctaggaaactaacatttatattgctgtatctataagtatttgcctaaaaccataaaataggaattgccttaaggatctagtagtttataatgcctgaatggaactcatttattggttaacagctcatatcaggagctgtgataagtaagtgtttacatacactgtctagtgcataaaaaccttagtgtttgctatcattcattctgtagccaatggcttacagtttctgtctggtcatctggaacttgaaaaatcctcaaatgccttcactcttttacctaactccctagtctttttgggaagtagttaagatatgcctgctatctttaactttggaggtagtatcaaaattttacttctttggttgtttagtgaattaatgttgaatattttctactgtcatcaaaacatattcccaaaaagtattaaaaaggaaccttagcacatttattttattaaaacaagaaaacccaaaatatataaaccttttcttattatgataataagcttatatatgtgaataagttataacctagtgtataaaaaattatttctaacaaactacagtatactgtcttgggtttttttttttttttttagtctgtaaaataaaatgactgcaattacttttt

SEQ ID NO: 116390 - DNA, 2200 bp, Homo sapiens
  Payload ID: 2711
  Gene Symbol: CENPT
  Gene Name: centromere protein T
  Uniprot ID: Q96BT3
  ENST ID: ENST00000440851
  CDS Start-End: 409-2094
cttgtctcaggtatctgataatttacacttgatctcagtgcagattctgggaaagtgaactccacggaagactcagaaaccaagttctaattcagttgccatgaaaacttaaggtgagaggattgtcaaccagtgaaaaatacggaggaaaacactaacagaatatgatgaagaagccaagacttgggctgcttgcattacattaaccgaggtttacccgcagcgaggctgcctccaaagcatccggagtttgcaaccatcactgtccaccccgcgagctgcgatagtgcgagaactacaattcccgtggggctgtgcgggagcatcgcgagagttacattaactgtggcggcgggaaggcggagcctgcagctggctgggcggttaggagggcccggggccgagacgatggctgaccacaaccctgacagcgactccacgccgcgcacgctgctgcgacgcgtgctggatacagcggacccgcgcaccccgcggcgaccccggagtgctcgggctggagcccggagagccctgcttgaaacggcttcccccaggaagttgagtggccaaacaaggacgatagccagagggcgttcccatggagccaggtctgttggcagatcggcccatattcaggccagtgggcacttggaggaacagacacctcggacgctgctgaagaacatcctactaactgccccagaatcttccatcctgatgcctgagtcggtagtgaagccagtgccagcaccgcaggcggtccaaccctccagacaagagagcagttgcggcagcctggagctgcaacttcctgagctcgagccccccacaaccctggctccaggtctgctggcccctggcaggaggaaacagaggctgagactgtcagtgtttcagcagggagtggaccaggggctgtctctctcccaagagcctcaagggaatgctgatgcctcttccctcaccagatccctcaacctgacctttgccacacctcttcagccacagtcagtgcagaggcctggcttggcccgcagacctccagcccgccgagctgtagacgtgggtgcctttttgcgggatctgcgagatacttccctggctcctccaaacattgtgttggaggacacccagccgttctctcagcccatggttggctcccccaacgtgtatcactccctgccctgcacgcctcacactggggctgaagacgctgagcaggctgccggtcgcaagacacagagcagtgggcctgggctgcagaagaatagccctgggaaaccagcccagtttctggcaggagaggcagaggaggtcaatgcctttgctctgggcttcctgagcaccagcagtggtgtctctggagaagatgaagtagagcccttacacgatggagttgaagaggcagagaaaaagatggaagaagaaggtgtgagtgtgagtgaaatggaggcaacaggagcacaaggacccagcagggtagaagaggctgagggacacacagaggtgacagaagcagagggatcccaggggactgctgaggctgacgggccaggagcatcttcaggggatgaggatgcctctggcagggcagcaagtccagagtcggcctccagcacccctgagtctctccaggccaggcgacatcatcagtttcttgagccagccccagcgcctggtgctgcagtcttatcttcagagcctgcagagcctctgttggtcaggcatccccctaggccccggaccaccggccccaggccccggcaagatccccacaaggctggactgagccactatgtgaaactctttagcttctatgccaagatgcccatggagaggaaggctcttgagatggtggagaagtgcctagataaatatttccagcatctttgtgatgatctggaggtatttgctgctcatgctggccgcaagactgtgaagccagaggacctggagctgctgatgcggcggcagggcctggtcactgaccaagtctcactgcacgtgctagtggagcggcacctgcccctggagtaccggcagctgctcatcccctgtgcatacagtggcaactctgtcttccctgcccagtagtggccaggcttcaacactttccctgtccccacctggggactcttgcccccacatatttctccaggtctcctccccacccccccagcatcaataaagtgtcataaac

SEQ ID NO: 116391 - DNA, 673 bp, Homo sapiens
  Payload ID: 2711
  Gene Symbol: CENPT
  Gene Name: centromere protein T
  ENST ID: ENST00000561593
  CDS Start-End: 480-673
agatcctctaagacaagacagggataaagtctcccgtggaatcccctcccgcctcatattccctgaccctgccctccctgcgagaactccagtccgggctccacaaagggcgcgattctgggaaagtgaactccacggaagactcagaaaccaagttctaattcagttgccatgaaaacttaaggtgagaggattgtcaaccagtgaaaaatacggaggaaaacactaacagaatatgatgaagaagccaagacttgggctgcttgcattacattaaccgaggtttacccgcagcgaggctgcctccaaagcatccggagtttgcaaccatcactgtccaccccgcgagctgcgatagtgcgagaactacaattcccgtggggctgtgcgggagcatcgcgagagttacattaactgtggcggcgggaaggcggagcctgcagctggctgggcggttaggagggcccggggccgagacgatggctgaccacaaccctgacagcgactccacgccgcgcacgctgctgcgacgcgtgctggatacagcggacccgcgcaccccgcggcgaccccggagtgctcgggctggagcccggagagccctgcttgaaacggcttcccccaggaagttgagtggccaaacaaggacgatagccagagggcgttcccatgg

SEQ ID NO: 116392 - DNA, 631 bp, Homo sapiens
  Payload ID: 2711
  Gene Symbol: CENPT
  Gene Name: centromere protein T
  ENST ID: ENST00000566067
  CDS Start-End: 85-324
atcgcgagagttacattaactgtggcggcgggaaggcggagcctgcagctggctgggcggttaggagggcccggggccgagacgatggctgaccacaaccctgacagcgactccacgccgcgcacgctgctgcgacgcgtgctggatacagcggacccgcgcaccccgcggcgaccccggagtgctcgggctggagcccggagagccctgcttgaaacggcttcccccaggaagttgagtggccaaacaaggacgatagccagagggcgttcccatggagccagggcagacggacagactggttgcttggtgctttgccgatagtctgttggcagatcggcccatattcaggccagtgggcacttggaggaacagacacctcggacgctgctgaagaacatcctactaactgccccagaatcttccatcctgatgcctgagtcggtagtgaagccagtgccagcaccgcaggcggtccaaccctccagacaagagagcagttgcggcagcctggagctgcaacttcctgagctcgagccccccacaaccctggctccaggtctgctggcccctggcaggaggaaacagaggctgagactgtcagtgtttcagcagggagtggaccaggggc

SEQ ID NO: 116393 - DNA, 633 bp, Homo sapiens
  Payload ID: 2711
  Gene Symbol: CENPT
  Gene Name: centromere protein T
  ENST ID: ENST00000565114
  CDS Start-End: 488-633
cccagatcctctaagacaagacagggataaagtctcccgtggaatcccctcccgcctcatattccctgaccctgccctccctgcgagaactccagtccgggctccacaaagggcgcgtgcagattctgggaaagtgaactccacggaagactcagaaaccaagttctaattcagttgccatgaaaacttaaggtgagaggattgtcaaccagtgaaaaatacggaggaaaacactaacagaatatgatgaagaagccaagacttgggctgcttgcattacattaaccgaggtttacccgcagcgaggctgcctccaaagcatccggagtttgcaaccatcactgtccaccccgcgagctgcgatagtgcgagaactacaattcccgtggggctgtgcgggagcatcgcgagagttacattaactgtggcggcgggaaggcggagcctgcagctggctgggcggttaggagggcccggggccgagacgatggctgaccacaaccctgacagcgactccacgccgcgcacgctgctgcgacgcgtgctggatacagcggacccgcgcaccccgcggcgaccccggagtgctcgggctggagcccggagagccctgcttgaaacggcttcccccag

SEQ ID NO: 116394 - DNA, 583 bp, Homo sapiens
  Payload ID: 2711
  Gene Symbol: CENPT
  Gene Name: centromere protein T
  ENST ID: ENST00000562338
  CDS Start-End: 73-417
acattaactgtggcggcgggaaggcggagcctgcagctggctgggcggttaggagggcccggggccgagacgatggctgaccacaaccctgacagcgactccacgccgcgcacgctgctgcgacgcgtgctggatacagcggacccgcgcaccccgcggcgaccccggagtgctcgggctggagcccggagagccctgcttgaaacggcttcccccaggaagttgagtggccaaacaaggacgatagccagagggcgttcccatggagccaggtctgttggcagatcggcccatattcaggccagtgggcacttggaggaacagacacctcggacgctgctgaagaacatcctactaactgccccaccctctccttggtgtttctgcagccccagaatcttccatcctgatgcctgagtcggtagtgaagccagtgccagcaccgcaggcggtccaaccctccagacaagagagcagttgcggcagcctggagctgcaacttcctgagctcgagccccccacaaccctggctccaggtctgctggcccctggcaggaggaaacagaggctgagactgtcagtg

SEQ ID NO: 116395 - DNA, 1005 bp, Homo sapiens
  Payload ID: 2711
  Gene Symbol: CENPT
  Gene Name: centromere protein T
  ENST ID: ENST00000562462
  CDS Start-End: 80-301
gagagttacattaactgtggcggcgggaaggcggagcctgcagctggctgggcggttaggagggcccggggccgagacgatggctgaccacaaccctgacagcgactccacgccgcgcacgctgctgcgacgcgtgctggatacagcggacccgcgcaccccgcggcgaccccggagtgctcgggctggagcccggagagccctgcttgaaacggcttcccccaggaagttgagtggccaaacaaggacgatagccagagggcgttcccatggagccaggccccagaatcttccatcctgatgcctgagtcggtagtgaagccagtgccagcaccgcaggcggtccaaccctccagacaagagagcagttgcggcagcctggagctgcaacttcctgagctcgagccccccacaaccctggctccaggtctgctggcccctggcaggaggaaacagaggctgagactgtcagtgtttcagcagggagtggaccaggggctgtctctctcccaagagcctcaagggaatgctgatgcctcttccctcaccagatccctcaacctgacctttgccacacctcttcagccacagtcagtgcagaggcctggcttggcccgcagacctccagcccgccgagctgtagacgtgggtgcctttttgcgggatctgcgagatacttccctggctcctccaagtaaggttgggttttcccctgctggcctttggggaaagctctccccgctatgacagataggaggtgatgctgagtcagggttgcacccctctcggtggggtcaaggacagcgagcaactctggtcagtgggtctacaaggaatttctgcttgctttctacagggggcctctttccttggtccctcggtgtctcccagggccccatatccttagactatagggctggaggttgtaaaggggtgtggtgtggtggccaaaacttgttgagaggggccaggtttcaggatcagctggccaattcaaactgacct

SEQ ID NO: 116396 - DNA, 507 bp, Homo sapiens
  Payload ID: 2711
  Gene Symbol: CENPT
  Gene Name: centromere protein T
  ENST ID: ENST00000568069
  CDS Start-End: 71-292
attaactgtggcggcgggaaggcggagcctgcagctggctgggcggttaggagggcccggggccgagacgatggctgaccacaaccctgacagcgactccacgccgcgcacgctgctgcgacgcgtgctggatacagcggacccgcgcaccccgcggcgaccccggagtgctcgggctggagcccggagagccctgcttgaaacggcttcccccaggaagttgagtggccaaacaaggacgatagccagagggcgttcccatggagccaggccccagaatcttccatcctgatgcctgagtcggtagtgaagccagtgccagcaccgcaggcggtccaaccctccagacaagagagcagttgcggcagatccctcaacctgacctttgccacacctcttcagccacagtcagtgcagaggcctggcttggcccgcagacctccagcccgccgagctgtagacgtgggtgcctttttgcgggatctgcgagatacttccctggctcct

SEQ ID NO: 116397 - DNA, 1638 bp, Homo sapiens
  Payload ID: 2711
  Gene Symbol: CENPT
  Gene Name: centromere protein T
  ENST ID: ENST00000564817
  CDS Start-End: 60-1580
cggcgggaaggcggagcctgcagctggctgggcggttaggagggcccggggccgagacgatggctgaccacaaccctgacagcgactccacgccgcgcacgctgctgcgacgcgtgctggatacagcggacccgcgcaccccgcggcgaccccggagtgctcgggctggagcccggagagccctgcttgaaacggcttcccccaggaagttgagtggccaaacaaggacgatagccagagggcgttcccatggagccaggtctgttggcagatcggcccatattcaggccagtgggcacttggaggaacagacacctcggacgctgctgaagaacatcctactaactgccccagaatcttccatcctgatgcctgagtcggtagtgaagccagtgccagcaccgcaggcggtccaaccctccagacaagagagcagttgcggcagcctggagctgcaacttcctgagctcgagccccccacaaccctggctccaggtctgctggcccctggcaggaggaaacagaggctgagactgtcagtgtttcagcagggagtggaccaggggctgtctctctcccaagagcctcaagggaatgctgatgcctcttccctcaccagatccctcaacctgacctttgccacacctcttcagccacagtcagtgcagaggcctggcttggcccgcagacctccagcccgccgagctgtagacgtgggtgcctttttgcgggatctgcgagatacttccctggctcctccaaacattgtgttggaggacacccagccgttctctcagcccatggttggctcccccaacgtgtatcactccctgccctgcacgcctcacactggggctgaagacgctgagcaggctgccggtcgcaagacacagagcagtgggcctgggctgcagaagaatagccctgggaaaccagcccagtttctggcaggagaggcagaggaggtcaatgcctttgctctgggcttcctgagcaccagcagtggtgtctctggagaagatgaagtagagcccttacacgatggagttgaagaggcagagaaaaagatggaagaagaagcaagtccagagtcggcctccagcacccctgagtctctccaggccaggcgacatcatcagtttcttgagccagccccagcgcctggtgctgcagtcttatcttcagagcctgcagagcctctgttggtcaggcatccccctaggccccggaccaccggccccaggccccggcaagatccccacaaggctggactgagccactatgtgaaactctttagcttctatgccaagatgcccatggagaggaaggctcttgagatggtggagaagtgcctagataaatatttccagcatctttgtgatgatctggaggtatttgctgctcatgctggccgcaagactgtgaagccagaggacctggagctgctgatgcggcggcagggcctggtcactgaccaagtctcactgcacgtgctagtggagcggcacctgcccctggagtaccggcagctgctcatcccctgtgcatacagtggcaactctgtcttccctgcccagtagtggccaggcttcaacactttccctgtccccacctggggactcttgcccccacatattt

SEQ ID NO: 116398 - DNA, 822 bp, Homo sapiens
  Payload ID: 2711
  Gene Symbol: CENPT
  Gene Name: centromere protein T
  ENST ID: ENST00000565713
  CDS Start-End: 85-390
atcgcgagagttacattaactgtggcggcgggaaggcggagcctgcagctggctgggcggttaggagggcccggggccgagacgatggctgaccacaaccctgacagcgactccacgccgcgcacgctgctgcgacgcgtgctggatacagcggacccgcgcaccccgcggcgaccccggagtgctcgggctggagcccggagagccctgcttgaaacggcttcccccaggaagttgagtggccaaacaaggacgatagccagagggcgttcccatggagccaggacggacagactggttgcttggtgctttgccgatagtctgttggcagatcggcccatattcaggccagtgggcacttggaggaacagacacctcggacgctgctgaagaacatcctactaactgccccagaatcttccatcctgatgcctgagtcggtagtgaagccagtgccagcaccgcaggcggtccaaccctccagacaagagagcagttgcggcagcctggagctgcaacttcctgagctcgagccccccacaaccctggctccaggtctgctggcccctggcaggaggaaacagaggctgagactgtcagtgtttcagcagggagtggaccaggggctgtctctctcccaagagcctcaagggaatgctgatgcctcttccctcaccagatccctcaacctgacctttgccacacctcttcagccacagtcagtgcagaggcctggcttggcccgcagacctccagcccgccgagctgtagacgtgggtgcctttttgcgggatctgcgagatacttccctggctcctccaa

SEQ ID NO: 116399 - DNA, 2345 bp, Homo sapiens
  Payload ID: 2711
  Gene Symbol: CENPT
  Gene Name: centromere protein T
  Uniprot ID: Q96BT3
  ENST ID: ENST00000562787
  CDS Start-End: 550-2235
acccatgctgactctggagcgggccgggtggcgctgcccatccccggatccttcgtagatggagtcttgcttagtcgcccaagctggagtagtgtggctcgatctcagctctgcaacctctgcctcccagggttcaagcaattctcctgcctcagtttccagagtagctggaattatagtgcagattctgggaaagtgaactccacggaagactcagaaaccaagttctaattcagttgccatgaaaacttaaggtgagaggattgtcaaccagtgaaaaatacggaggaaaacactaacagaatatgatgaagaagccaagacttgggctgcttgcattacattaaccgaggtttacccgcagcgaggctgcctccaaagcatccggagtttgcaaccatcactgtccaccccgcgagctgcgatagtgcgagaactacaattcccgtggggctgtgcgggagcatcgcgagagttacattaactgtggcggcgggaaggcggagcctgcagctggctgggcggttaggagggcccggggccgagacgatggctgaccacaaccctgacagcgactccacgccgcgcacgctgctgcgacgcgtgctggatacagcggacccgcgcaccccgcggcgaccccggagtgctcgggctggagcccggagagccctgcttgaaacggcttcccccaggaagttgagtggccaaacaaggacgatagccagagggcgttcccatggagccaggtctgttggcagatcggcccatattcaggccagtgggcacttggaggaacagacacctcggacgctgctgaagaacatcctactaactgccccagaatcttccatcctgatgcctgagtcggtagtgaagccagtgccagcaccgcaggcggtccaaccctccagacaagagagcagttgcggcagcctggagctgcaacttcctgagctcgagccccccacaaccctggctccaggtctgctggcccctggcaggaggaaacagaggctgagactgtcagtgtttcagcagggagtggaccaggggctgtctctctcccaagagcctcaagggaatgctgatgcctcttccctcaccagatccctcaacctgacctttgccacacctcttcagccacagtcagtgcagaggcctggcttggcccgcagacctccagcccgccgagctgtagacgtgggtgcctttttgcgggatctgcgagatacttccctggctcctccaaacattgtgttggaggacacccagccgttctctcagcccatggttggctcccccaacgtgtatcactccctgccctgcacgcctcacactggggctgaagacgctgagcaggctgccggtcgcaagacacagagcagtgggcctgggctgcagaagaatagccctgggaaaccagcccagtttctggcaggagaggcagaggaggtcaatgcctttgctctgggcttcctgagcaccagcagtggtgtctctggagaagatgaagtagagcccttacacgatggagttgaagaggcagagaaaaagatggaagaagaaggtgtgagtgtgagtgaaatggaggcaacaggagcacaaggacccagcagggtagaagaggctgagggacacacagaggtgacagaagcagagggatcccaggggactgctgaggctgacgggccaggagcatcttcaggggatgaggatgcctctggcagggcagcaagtccagagtcggcctccagcacccctgagtctctccaggccaggcgacatcatcagtttcttgagccagccccagcgcctggtgctgcagtcttatcttcagagcctgcagagcctctgttggtcaggcatccccctaggccccggaccaccggccccaggccccggcaagatccccacaaggctggactgagccactatgtgaaactctttagcttctatgccaagatgcccatggagaggaaggctcttgagatggtggagaagtgcctagataaatatttccagcatctttgtgatgatctggaggtatttgctgctcatgctggccgcaagactgtgaagccagaggacctggagctgctgatgcggcggcagggcctggtcactgaccaagtctcactgcacgtgctagtggagcggcacctgcccctggagtaccggcagctgctcatcccctgtgcatacagtggcaactctgtcttccctgcccagtagtggccaggcttcaacactttccctgtccccacctggggactcttgcccccacatatttctccaggtctcctccccacccccccagcatcaataaagtgtcataaacagaa

SEQ ID NO: 116400 - DNA, 858 bp, Homo sapiens
  Payload ID: 2711
  Gene Symbol: CENPT
  Gene Name: centromere protein T
  ENST ID: ENST00000566758
  CDS Start-End: 27-858
ggttaggagggcccggggccgagacgatggctgaccacaaccctgacagcgactccacgccgcgcacgctgctgcgacgcgtgctggatacagcggacccgcgcaccccgcggcgaccccggagtgctcgggctggagcccggagagccctgcttgaaacggcttcccccaggaagttgagtggccaaacaaggacgatagccagagggcgttcccatggagccaggtctgttggcagatcggcccatattcaggccagtgggcacttggaggaacagacacctcggacgctgctgaagaacatcctactaactgccccagaatcttccatcctgatgcctgagtcggtagtgaagccagtgccagcaccgcaggcggtccaaccctccagacaagagagcagttgcggcagatccctcaacctgacctttgccacacctcttcagccacagtcagtgcagaggcctggcttggcccgcagacctccagcccgccgagctgtagacgtgggtgcctttttgcgggatctgcgagatacttccctggctcctccaaacattgtgttggaggacacccagccgttctctcagcccatggttggctcccccaacgtgtatcactccctgccctgcacgcctcacactggggctgaagacgctgagcaggctgccggtcgcaagacacagagcagtgggcctgggctgcagaagaatagccctgggaaaccagcccagtttctggcaggagaggcagaggaggtcaatgcctttgctctgggcttcctgagcaccagcagtggtgtctctggagaagatgaagtagagcccttacacgatggagttgaagaggcagagaaaa

SEQ ID NO: 116401 - DNA, 575 bp, Homo sapiens
  Payload ID: 2711
  Gene Symbol: CENPT
  Gene Name: centromere protein T
  ENST ID: ENST00000567985
  CDS Start-End: 556-575
aaactccacttgcactgtgagatcgatgggcttcacgtcttctccagtgggagtgatgggcgccggctgtacggatcccggagcctgactgctgtctacagtggcctgaagggtgagaagcacggccgcggaagcagataccaggttcggctgcagctgggcagtctgggcagtggaggcagaggtgcagattctgggaaagtgaactccacggaagactcagaaaccaagttctaattcagttgccatgaaaacttaaggtgagaggattgtcaaccagtgaaaaatacggaggaaaacactaacagaatatgatgaagaagccaagacttgggctgcttgcattacattaaccgaggtttacccgcagcgaggctgcctccaaagcatccggagtttgcaaccatcactgtccaccccgcgagctgcgatagtgcgagaactacaattcccgtggggctgtgcgggagcatcgcgagagttacattaactgtggcggcgggaaggcggagcctgcagctggctgggcggttaggagggcccggggccgagacgatggctgaccacaaccctga

SEQ ID NO: 116402 - DNA, 1669 bp, Homo sapiens
  Payload ID: 2711
  Gene Symbol: CENPT
  Gene Name: centromere protein T
  ENST ID: ENST00000562513
  CDS Start-End: 2-493
gatggctgaccacaaccctgacagcgactccacgccgcgcacgctgctgcgacgcgtgctggatacagcggacccgcgcaccccgcggcgaccccggagtgctcgggctggagcccggagagccctgcttgaaacggcttcccccaggaagttgagtggccaaacaaggacgatagccagagggcgttcccatggagccaggtctgttggcagatcggcccatattcaggccagtgggcacttggaggaacagacacctcggacgctgctgaagaacatcctactaactgccccagaatcttccatcctgatgcctgagtcggtagtgaagccagtgccagcaccgcaggcggtccaaccctccagacaagagagcagttgcggcaggtctgctggcccctggcaggaggaaacagaggctgagactgtcagtgtttcagcagggagtggaccaggggctgtctctctcccaagagcctcaagggaatgctgatgcctcttccctcaccagatccctcaacctgacctttgccacacctcttcagccacagtcagtgcagaggcctggcttggcccgcagacctccagcccgccgagctgtagacgtgggtgcctttttgcgggatctgcgagatacttccctggctcctccaaacattgtgttggaggacacccagccgttctctcagcccatggttggctcccccaacgtgtatcactccctgccctgcacgcctcacactggggctgaagacgctgagcaggctgccggtcgcaagacacagagcagtgggcctgggctgcagaagaatagccctgggaaaccagcccagtttctggcaggagaggcagaggaggtcaatgcctttgctctgggcttcctgagcaccagcagtggtgtctctggagaagatgaagtagagcccttacacgatggagttgaagaggcagagaaaaagatggaagaagaaggtgtgagtgtgagtgaaatggaggcaacaggagcacaaggacccagcagggtagaagaggctgagggacacacagaggtgacagaagcagagggatcccaggggactgctgaggctgacgggccaggagcatcttcaggggatgaggatgcctctggcagggcagcaagtccagagtcggcctccagcacccctgagtctctccaggccaggcgacatcatcagtttcttgagccagccccagcgcctggtgctgcagtcttatcttcagagcctgcagagcctctgttggtcaggcatccccctaggccccggaccaccggccccaggccccggcaagatccccacaaggctggactgagccactatgtgaaactctttagcttctatgccaagatgcccatggagaggaaggctcttgagatggtggagaagtgcctagataaatatttccagcatctttgtgatgatctggaggtatttgctgctcatgctggccgcaagacttggagcggcacctgcccctggagtaccggcagctgctcatcccctgtgcatacagtggcaactctgtcttccctgcccagtagtggccaggcttcaacactttccctgtccccacctggggactcttgcccccacatatttctccaggtctcctccccacccccccagcatcaataaagtgtcataaacag

SEQ ID NO: 116403 - DNA, 1737 bp, Homo sapiens
  Payload ID: 2711
  Gene Symbol: CENPT
  Gene Name: centromere protein T
  ENST ID: ENST00000626059
  CDS Start-End: 38-259
gctggctgggcggttaggagggcccggggccgagacgatggctgaccacaaccctgacagcgactccacgccgcgcacgctgctgcgacgcgtgctggatacagcggacccgcgcaccccgcggcgaccccggagtgctcgggctggagcccggagagccctgcttgaaacggcttcccccaggaagttgagtggccaaacaaggacgatagccagagggcgttcccatggagccaggccccagaatcttccatcctgatgcctgagtcggtagtgaagccagtgccagcaccgcaggcggtccaaccctccagacaagagagcagttgcggcagcctggagctgcaacttcctgagctcgagccccccacaaccctggctccaggtctgctggcccctggcaggaggaaacagaggctgagactgtcagtgtttcagcagggagtggaccaggggctgtctctctcccaagagcctcaagggaatgctgatgcctcttccctcaccagatccctcaacctgacctttgccacacctcttcagccacagtcagtgcagaggcctggcttggcccgcagacctccagcccgccgagctgtagacgtgggtgcctttttgcgggatctgcgagatacttccctggctcctccaaacattgtgttggaggacacccagccgttctctcagcccatggttggctcccccaacgtgtatcactccctgccctgcacgcctcacactggggctgaagacgctgagcaggctgccggtcgcaagacacagagcagtgggcctgggctgcagaagaatagccctgggaaaccagcccagtttctggcaggagaggcagaggaggtcaatgcctttgctctgggcttcctgagcaccagcagtggtgtctctggagaagatgaagtagagcccttacacgatggagttgaagaggcagagaaaaagatggaagaagaaggtgtgagtgtgagtgaaatggaggcaacaggagcacaaggacccagcagggtagaagaggctgagggacacacagaggtgacagaagcagagggatcccaggggactgctgaggctgacgggccaggagcatcttcaggggatgaggatgcctctggcagggcagcaagtccagagtcggcctccagcacccctgagtctctccaggccaggcgacatcatcagtttcttgagccagccccagcgcctggtgctgcagtcttatcttcagagcctgcagagcctctgttggtcaggcatccccctaggccccggaccaccggccccaggccccggcaagatccccacaaggctggactgagccactatgtgaaactctttagcttctatgccaagatgcccatggagaggaaggctcttgagatggtggagaagtgcctagataaatatttccagcatctttgtgatgatctggaggtatttgctgctcatgctggccgcaagactgtgaagccagaggacctggagctgctgatgcggcggcagggcctggtcactgaccaagtctcactgcacgtgctagtggagcggcacctgcccctggagtaccggcagctgctcatcccctgtgcatacagtggcaactctgtcttccctgcccagtagtggccaggcttcaacactttccctgtccccacctggggactcttgcccccacatatttctccaggtctcctccccacccccccagcatcaataaagtgtcat

SEQ ID NO: 116404 - DNA, 1998 bp, Homo sapiens
  Payload ID: 2712
  Gene Symbol: CENPU
  Gene Name: centromere protein U
  Uniprot ID: Q71F23
  ENST ID: ENST00000281453
  CDS Start-End: 72-1328
cggattggctgttcggagcggcgaggggcttggcgggagcttccagtcgctcgagagcggagagcggcaccatggccccgcgggggcggcggcggccgcggcctcacaggtctgagggcgcaagacgttcaaagaacactttagaaagaacacattccatgaaagataaagctggtcaaaagtgcaagcctattgacgtgttcgactttcctgataattctgatgtctcaagcattggcaggctgggtgaaaatgagaaagatgaagaaacttatgagacctttgatcctcctttacatagcacagctatatatgctgatgaagaagaattctccaaacattgtggactgtctctctcttcaactcctccaggaaaagaagcaaaaagaagttcagacacttctggaaatgaagcaagtgaaatcgaatctgtaaaaattagtgcaaaaaagccaggaagaaagctcaggcccattagtgatgactctgaaagcattgaagaaagtgatacaaggagaaaagttaaatcagcagagaaaataagtacacaacgtcatgaggttattcgaaccacagcgtcttcagaactttcagagaaaccagctgagtctgtcacttctaaaaagacaggaccccttagtgcccagccctctgttgaaaaagagaacttggcaatagaaagtcaatcgaaaactcagaaaaaagggaagatatctcatgacaaaaggaagaaatcaagaagtaaagccataggctcagatacttctgacattgtgcacatttggtgtccagaaggaatgaaaaccagtgacatcaaggagttgaatattgttttgcctgaatttgagaaaacccacctagagcatcaacaaagaatagaatctaaagtttgtaaggcagccatcgccacattttatgttaatgttaaagaacaattcatcaaaatgcttaaagaaagccagatgttgacaaatctgaaaaggaagaatgctaagatgatttcagatatcgaaaagaaaaggcagcgtatgattgaagtccaggatgaactgcttcggttagagccacagctgaaacaactacaaacaaaatatgatgaacttaaagagagaaagtcttcccttaggaatgcagcatatttcttatctaatttaaaacagctttatcaagattattcagatgttcaagctcaagaaccaaacgtaaaggaaacgtatgattcatccagccttccagctctgttatttaaagcaagaacacttctgggagccgaaagccatctgcgaaatatcaaccatcagttagagaagctccttgaccagggatgagaagagcagtctactaaaatgtgcctataggaagactagtctcatgctgttaccttctgaaactgtacctttataaatcaattgttttgcaaagaagttatggcctacttagaatctaaaatttgttattcaaattaaatggctgtgaacaatgttaaatagcatcagtttgtccaatagttttaaaggccataatcatcttttctggttaatatcttgagtaattttaaaatgttgacaccttaatcggtcccaggtatgagctataataaacttgtaaaattaagttgatgtgaacataattttgattaattaataaggcgatttctcctgaatttacaccaaagctaatttttaatgaaattggtttacagaagtaaaaaacaaaaattggaaagcaaagtaataaaacttagtttatataaacaggttgaatgatatatttatcaaatctcacagacatcaggcaaattatagcctggtgacaaaagtgttcatagtgaattagttactcttgtaatacttctataattagttcatcaggaatttcatccacttcactgttataactgagaagactgttctctgcagcttcagctaattcagcatcttcagtagcttctaaaaaataagcatcatcaatgccattatcccagacagcatcagcaga

SEQ ID NO: 116405 - DNA, 688 bp, Homo sapiens
  Payload ID: 2712
  Gene Symbol: CENPU
  Gene Name: centromere protein U
  ENST ID: ENST00000514781
  CDS Start-End: 158-688
ctggatctggcgggaagggtctcggcttgctgcagacggtgcacaaagccatacgccaagacgatctgaagagaacaggagttcccccgggcctgggaaggctgcctggaggaggagcgcaagacgttcaaagaacactttagaaagaacacattccatgaaagataaagctggtcaaaagtgcaagcctattgacgtgttcgactttcctgataattctgatgtctcaagcattggcaggctgggtgaaaatgagaaagatgaagaaacttatgagacctttgatcctcctttacatagcacagctatatatgctgatgaagaagaattctccaaacattgtggactgtctctctcttcaactcctccaggaaaagaagcaaaaagaagttcagacacttctggaaatgaagcaagtgaaatcgaatctgtaaaaattagtgcaaaaaagccaggaagaaagctcaggcccattagtgatgactctgaaagcattgaagaaagtgatacaaggagaaaagttaaatcagcagagaaaataagtacacaacgtcatgaggttattcgaaccacagcgtcttcagaactttcagagaaaccagctgagtctgtcacttctaaaaagacaggaccccttagtgcccagccctctgttgaaaaagagaacttggcaatagaaagtcaatcg

SEQ ID NO: 116406 - DNA, 1549 bp, Homo sapiens
  Payload ID: 2712
  Gene Symbol: CENPU
  Gene Name: centromere protein U
  ENST ID: ENST00000510146
  CDS Start-End: 69-1031
attggctgttcggagcggcgaggggcttggcgggagcttccagtcgctcgagagcggagagcggcaccatggccccgcgggggcggcggcggccgcggcctcacaggtctgagggcgcaagacgttcaaagaacactttagaaagaacacattccatgaaagataaagctggtcaaaagtgcaagcctattgacgtgttcgactttcctgataattctgatgtctcaagcattggcaggctgggtgaaaatgagaaagatgaagaaacttatgagacctttgatcctcctttacatagcacagctatatatgctgatgaagaagaattctccaaacattgtggactgtctctctcttcaactcctccaggaaaagaagcaaaaagaagttcagacacttctggaaatgaagcaagtgaaatcgaatctgtaaaaattagtgcaaaaaagccaggaagaaagctcaggcccattagtgatgactctgaaagcattgaagaaagtgatacaaggagaaaagttaaatcagcagagaaaataagtacacaacgtcatgaggttattcgaaccacagcgtcttcagaactttcagagaaaccagctgagtctgtcacttctaaaaagacaggaccccttagtgcccagccctctgttgaaaaagagaacttggcaatagaaagtcaatcgaaaactcagaaaaaagggaagatatctcatgacaaaaggaagaaatcaagaagtaaagccataggctcagatacttctgacattgtgcacatttggtgtccagaaggaatgaaaaccagtgacatcaaggagttgaatattgttttgcctgaatttgagaaaacccacctagagcatcaacaaagaatagaatctaaagtttgtaaggcagccatcgccacattttatgttaatgttaaagaacaattcatcaaaatgcttaaagaaagccagatgttgacaaatctgaaaaggaagaatgctaaggttagagccacagctgaaacaactacaaacaaaatatgatgaacttaaagagagaaagtcttcccttaggaatgcagcatatttcttatctaatttaaaacagctttatcaagattattcagatgttcaagctcaagaaccaaacgtaaaggaaacgtatgattcatccagccttccagctctgttatttaaagcaagaacacttctgggagccgaaagccatctgcgaaatatcaaccatcagttagagaagctccttgaccagggatgagaagagcagtctactaaaatgtgcctataggaagactagtctcatgctgttaccttctgaaactgtacctttataaatcaattgttttgcaaagaagttatggcctacttagaatctaaaatttgttattcaaattaaatggctgtgaacaatgttaaatagcatcagtttgtccaatagttttaaaggccataatcatcttttctggttaatatcttgagtaattttaaaatgttgacaccttaatcggtcccaggtatgagctataataaacttgtaaaattaa

SEQ ID NO: 116407 - DNA, 1165 bp, Homo sapiens
  Payload ID: 2713
  Gene Symbol: CENPV
  Gene Name: centromere protein V
  Uniprot ID: Q7Z7K6
  ENST ID: ENST00000299736
  CDS Start-End: 64-882
ggcgcgcgcaggccggcgggggcgcgccgcgctgcgaggcctgcgcgccaggctgcgggagccatgcggcgatcgaggagctctgcggccgccaagctgcgcgggcagaagcggtccggggcctccgcggcccccgcggcctccgcggccgctgccttggcacccagcgccacccgcacacggcgctccgctagccaggccgggagcaagagccaggcggtggagaagccgccgtcggagaagccgcggctgaggcgctcgtcgccgcgggcccaggaggagggcccgggggagccgccgccgcctgagctggcgttgctcccgccaccgccgccgccgccgccgactcccgcgaccccgacgtcctcggcgtccaacctggacctgggcgagcagcgggagcgctgggagacgttccagaagcggcagaagcttacctccgagggtgccgccaagctcctgctagacacctttgaataccagggcctggtgaagcacacaggaggctgccactgtggagcagttcgttttgaagtttgggcctcagcagacttgcatatatttgactgcaattgcagcatttgcaagaagaagcagaatagacacttcattgttccagcttctcgcttcaagctcctgaagggagctgagcacataacgacttacacgttcaatactcacaaagcccagcataccttctgtaagagatgtggcgttcagagcttctatactccacgatcaaaccccggaggcttcggaattgccccccactgcctggatgagggcactgtgcggagtatggtcactgaggaattcaatggcagcgattgggagaaggccatgaaagagcacaagaccatcaagaacatgtctaaagagtgagcttctgcctctcctgccctgaaaaggaggaatgattggggccagcaactttgctctccctgccgtgcctcggtggtgctcctgaatgtggctgacctgggctgctggttccgttgactagggtcatcttgatctctgcagtttgctccagctaccagtttctttaggcagctctttgtcctccctctgcccagattttgatgtagtctaattgacatccttctcttcccaacttttgtgtgatcttttaggaaaaaaaataaatatttttaacattaaagca

SEQ ID NO: 116408 - DNA, 1770 bp, Homo sapiens
  Payload ID: 2713
  Gene Symbol: CENPV
  Gene Name: centromere protein V
  ENST ID: ENST00000476243
  CDS Start-End: 21-548
cgcgccaggctgcgggagccatgcggcgatcgaggagctctgcggccgccaagctgcgcgggcagaagcggtccggggcctccgcggcccccgcggcctccgcggccgctgccttggcacccagcgccacccgcacacggcgctccgctagccaggccgggagcaagagccaggcggtggagaagccgccgtcggagaagccgcggctgaggcgctcgtcgccgcgggcccaggaggagggcccgggggagccgccgccgcctgagctggcgttgctcccgccaccgccgccgccgccgccgactcccgcgaccccgacgtcctcggcgtccaacctggacctgggcgagcagcgggagcgctgggagacgttccagaagcggcagaagcttacctccgagggtgccgccaagctcctgctagacacctttgaataccagggcctggtgaagcacacaggaggctgccactgtggagcagttcgttttgaagtttgggcctcagcagacttgcatatatttgactgcaagtaccggaattatatatgaataataagcacatacgatggaattactcaaatggagaactgaccaggctactaacaatagagtccagattggaaaagaagcactgtggaataacttgtgagaggattctgtgctaaattagaactttttcaaaggtggcctgaaaagaggggacttcagtttaattccagagatggtaattctggggacgtgttttacttggagctggacttcttgtgacgtggtgatgaagaaagagggaaacctaaacttccttgtccatttttggtgtggatgtctcagagacatcaggttgtagcagtgtctgaaatttgtttcctaagtgtctctgaagtccagcgcttctcttcactgtaaagaactgaggggtgggcagtacagacctgtctgttggtcctgtgttctgagcattgcagaacctcgactgctgacttgggacccccctgggctctgctgtacctgcaaaccagaggcactgctatccaggcctttgccccagctcctcggccctggatggtgctgaaaggggcatcatctgtggggtcggctggctctcatggctgggccgctcaggcatagaggatgcaggtggctgctcacaatctggaatttgctctgtctttctgtagttgcagcatttgcaagaagaagcagaatagacacttcattgttccagcttctcgcttcaagctcctgaagggagctgagcacataacgacttacacgttcaatactcacaaagcccagcataccttctgtaagagatgtggcgttcagagcttctatactccacgatcaaaccccggaggcttcggaattgccccccactgcctggatgagggcactgtgcggagtatggtcactgaggaattcaatggcagcgattgggagaaggccatgaaagagcacaagaccatcaagaacatgtctaaagagtgagcttctgcctctcctgccctgaaaaggaggaatgattggggccagcaactttgctctccctgccgtgcctcggtggtgctcctgaatgtggctgacctgggctgctggttccgttgactagggtcatcttgatctctgcagtttgctccagctaccagtttctttaggcagctctttgtcctccctctgcccagattttgatgtagtctaattgacatccttctcttcccaacttttgtgtgatcttttaggaaaaaaaataaatatttttaacattaaagca

SEQ ID NO: 116409 - DNA, 473 bp, Homo sapiens
  Payload ID: 2713
  Gene Symbol: CENPV
  Gene Name: centromere protein V
  ENST ID: ENST00000482983
  CDS Start-End: 1-45
gcagacttgcatatatttgactgcaagtaccggaattatatatgaataataagcacatacgatggaattactcaaatggagaactgaccaggctactaacaatagagtccagattggaaaagaagcactgtggaataacttgtgagaggattctgtgctaaattagaactttttcaaaggtggcctgaaaagaggggacttcagtttaattccagagatgttgcagcatttgcaagaagaagcagaatagacacttcattgttccagcttctcgcttcaagctcctgaagggagctgagcacataacgacttacacgttcaatactcacaaagcccagcataccttctgtaagagatgtggcgttcagagcttctatactccacgatcaaaccccggaggcttcggaattgccccccactgcctggatgagggcactgtgcggagtatggtcactgaggaattcaatggcagc

SEQ ID NO: 116410 - DNA, 1620 bp, Homo sapiens
  Payload ID: 2714
  Gene Symbol: CENPVP1
  Gene Name: centromere protein V pseudogene 1
  ENST ID: ENST00000602548
  CDS Start-End: 1-819
atgggcagagtgaggaaccgcgccactgctcagcggcggaggcgaaagcggcccggggatcctcccgccgcctgcgcggccatcgcggtcacgggcgccagccgcgcgcagtgcccccgggtccaagtcggggtcgggagccacgcggcggccaagaggtggctgggtaggtggcgacggaagcgccgctggcggcgggtccggaaggcgggccccagagacctgctgccctccgcgccaaccccggacccgccggggcccgccccgtcccccaaggatctggacctgggcgcacagcgggagcgctgggagacgttcaggaagctgcggggcctcagctgcgagggcgccgccaaggtcctgctggacaccttcgagtacccgggcctcgtgcatcacaccgggggctgccactgcggcgcggtccgctttgcggtctgggcccctgcagatctgcgcgtcgtggattgcagctgcaggctgtgcaggaagaagcagcaccgccacttcctcgtcccggcctcgcgcttcacgctgctccagggcgcagaaagcatcgtcacctatcggtccaacacgcacccggcgctgcacagcttctgcagcaggtgcggggtgcagagtttccacgcagctgtctctgacccccgcgtgtacggcgtcgccccgcactgcctggacgagggcaccgtgcgcagcgtggtcatcgaggaggtcggcggtggcgacccgggggaggaggccgccgaggagcacaaggccatccacaagacgtcctcccagtcagcccctgcctgtccccgcgaacaggagcagtgattggggccgcaagcccgcctgaaaccggcccgggcggccctgcggggagcgtccgagtacctgcacagatcccatgctgtgaaagaggtgtttctggcctggtcacaccggggattcccttccagtatttgcccttcccctccgctagttttcagtgaactcgcttacgatccaaatcttgaacacacctttgtctgcgtagtacaacgttaatcttgcaattcggtaaggaagaagagtgtctctgatttttcaaaccatccattgtatctctcgcttttactgttctgcctacagttgtcacaaatcacctgcagatgattcctgtgtactgtacgttcctggtgctattgtgaacaggcttgttgttttcagcgctttgcctctggtgtgtaggacggcaacacacaaccagtttgtaaacatgtgctaggacgtcttccattgattatggtgtgcgtgggctcccgcacctgtgagtttcaggtagacgttcatattttcactgcttagattcgagttatgctatttactggtttttaaatgatatatttcaagatttggtcgtgttacatacctcattactctttatttcctgtaacagcgaaagctgttactatttcgcttgttgtttgggaagtgtctctgggtaaggagatggggatacaggaatgagaaagacatctgtgcacacaggaatgagaaagacatctgcgcactgtctgccctctttaatcttttgaaatacctgtcttgtacatgtgttaagtatatagaaatcagtaaataccttctaggaaa

SEQ ID NO: 116411 - DNA, 864 bp, Homo sapiens
  Payload ID: 2715
  Gene Symbol: CENPVP3
  Gene Name: centromere protein V pseudogene 3
  ENST ID: ENST00000417339
  CDS Start-End: 1-864
atgggggtagcgggctgggcacgcgctccggaggctgcaggcgccatgggcagagtgaggaaccgcgccactgctcagcggcggaggcgaaagcggcccggggatcctcccgccgcctgcgcggccatcgcggtcatgggcgccagccgcgcgcagtgcccccgggtccaagtcggggtcgggagccacgcggcggccaagaggtggctgggaaagttgcggcggaagcgccggtggcggcgggcccgggaggcgggctccagagatccgctgccctccgcgccactcccggacccgccggcgcccgccgagtcccctaaggagctggacctgggcgcacagcgggagcgctgggagacgttcaggaaactgtggggcctcagctgcgagggcgccgccaaggtcctgctggacaccttcgagtacccgggcctcgtgcatcacaccgggggctgccactgcggcgcggtccgctttgcggtctgggcccctgcagatctgcgcgtcgtggattgcagctgcaggctgtgcaggaagaagcagcaccgccacttcctcgtcccggcctcgcgcttcacgctgctccagggcgcagaaagcatcgtcacctatcggtccaacacgcacccggcgctgcacagcttctgcagcaggtgcggggtgcagagtttccacgcagctgtctctgacccccgcgtgtacggcgtcgccccgcactgcctggacgagggcaccgtgcgcagcgtggtcatcgaggaggtcggcggtggcgacccgggggaggaggccgccgaggagcacaaggccatccacaagacgtcctcccagtcagcccctgcctgtccccgcgaacaggagcagtga

SEQ ID NO: 116412 - DNA, 528 bp, Homo sapiens
  Payload ID: 2716
  Gene Symbol: CENPW
  Gene Name: centromere protein W
  Uniprot ID: Q5EE01
  ENST ID: ENST00000368325
  CDS Start-End: 101-412
atacggaccggattgttttcgctggcccagtgtccccggagcttgtgtgcgatacagagagcacctcggaagctgaggcagctggtacttgacagagaggatggcgctgtcgaccatagtctcccagaggaagcagataaagcggaaggctccccgtggctttctaaagcgagtcttcaagcgaaagaagcctcaacttcgtctggagaaaagtggtgacttattggtgagattccatcccttctcgggctgggaatggggcacgggagaggtccatctgaactgtttactgtttgttcatcgattagcagaagagtccaggacaaacgcttgtgcgagtaaatgtagagtcattaacaaggagcatgtactggccgcagcaaaggtaattctaaagaagagcagaggttagaagtcaaagaacatattcttgaaagttatgatgcattcttttgggtggtaacagatcataaagacattttttacacatcagttaatatgggattattaaatattggctataagtga

SEQ ID NO: 116413 - DNA, 443 bp, Homo sapiens
  Payload ID: 2716
  Gene Symbol: CENPW
  Gene Name: centromere protein W
  ENST ID: ENST00000368326
  CDS Start-End: 101-304
atacggaccggattgttttcgctggcccagtgtccccggagcttgtgtgcgatacagagagcacctcggaagctgaggcagctggtacttgacagagaggatggcgctgtcgaccatagtctcccagaggaagcagataaagcggaaggctccccgtggctttctaaagcgagtcttcaagcgaaagaagcctcaacttcgtctggagaaaagtggtgacttattgaagagtccaggacaaacgcttgtgcgagtaaatgtagagtcattaacaaggagcatgtactggccgcagcaaaggtaattctaaagaagagcagaggttagaagtcaaagaacatattcttgaaagttatgatgcattcttttgggtggtaacagatcataaagacattttttacacatcagttaatatgggattattaaatattggctataagtga

SEQ ID NO: 116414 - DNA, 750 bp, Homo sapiens
  Payload ID: 2716
  Gene Symbol: CENPW
  Gene Name: centromere protein W
  Uniprot ID: Q5EE01
  ENST ID: ENST00000368328
  CDS Start-End: 101-367
atacggaccggattgttttcgctggcccagtgtccccggagcttgtgtgcgatacagagagcacctcggaagctgaggcagctggtacttgacagagaggatggcgctgtcgaccatagtctcccagaggaagcagataaagcggaaggctccccgtggctttctaaagcgagtcttcaagcgaaagaagcctcaacttcgtctggagaaaagtggtgacttattggtccatctgaactgtttactgtttgttcatcgattagcagaagagtccaggacaaacgcttgtgcgagtaaatgtagagtcattaacaaggagcatgtactggccgcagcaaaggtaattctaaagaagagcagaggttagaagtcaaagaacatattcttgaaagttatgatgcattcttttgggtggtaacagatcataaagacattttttacacatcagttaatatgggattattaaatattggctataagtgatgtgtgtgtttgtattttttttctggcatgaaatatctcaagtaaatgcataggactatttaacccttttatgggaattactattatttttattttaaatgtcctctagttcagtttgcttttgttttgttgctgctgcaaatattttatgtatcaaaaatgaaatcttactatattaaatactttgaaaatgtacttcttagaattaagtttatatatatttagatttagccacagttaactatggaatttaatctctgaagaaag

SEQ ID NO: 116415 - DNA, 1121 bp, Homo sapiens
  Payload ID: 2717
  Gene Symbol: CEP104
  Gene Name: centrosomal protein 104kDa
  Uniprot ID: O60308
  ENST ID: ENST00000378223
  CDS Start-End: 341-1075
cccagggctgggcttggttgtcatgagagtggaggctgcggccggggctatgggcagaggtggccgggtctgcttcttccctgtcactgccgcagcagcttggggtgcaaggcggcctggggcggcggaaggggcgccccccgagttccgtctgaggaagcggcggctgccgaggaagtccacgagagccgggtcccgcacgcccctggggtccgggtgctgaggcgccgcctggccgcctccccgggccgcggcaccgctccgacccagccgccctctccaccggggccgcggcagcgccagtcggggcccttccctctaagcagcccaaacgtgcagaatgccccacaagattggatttgtagtcgtcagctcatctggacacgaagacggcttcagtgcccgggagctcatgatccacgcgccaactgtcagtgggtggcggtcacctagattttgccagtttccacaagaaattgtccttcaaatggtggagagatgtcgaataaggaaactgcagttacttgctcaccagtatatgatttcaagtaaaattgagttctacattagtgaaagcttgcctgaatattttgcaccctatcaagcagagcggtttcgaagacttggctacgtgtctctctgtgataatgaaaagacaggttgcaaagcccgggaactaaaatcagtttatgtggatgcagtaggacaatttcttaaactgatttttcaccaaaaccatgtcaacaaatacaacatatataatcaggttgctttggttgccataaatatcattggagaccctgcagatttcagtgatgaaagcaatactgcctctcgagagaagttgattgaccactaccttgggcacaacagcgaggaccctgctctagaaggaacgtacgccagcagtgtaagaaccgggggtgaatccacttttggggagctaaagggccccgctgtgccatcctcggtcaccctctctgtcctgggcacctctttgggacagtggttcccttgccacctgcctgctgtggatgacaatgaggggactccattccagaggtgcctggtctaaaggaaagaagggaagggctgccatagttgccgcagtgagaaaaaaa

SEQ ID NO: 116416 - DNA, 6424 bp, Homo sapiens
  Payload ID: 2717
  Gene Symbol: CEP104
  Gene Name: centrosomal protein 104kDa
  Uniprot ID: O60308
  ENST ID: ENST00000378230
  CDS Start-End: 326-3103
ggttgtcatgagagtggaggctgcggccggggctatgggcagaggtggccgggtctgcttcttccctgtcactgccgcagcagcttggggtgcaaggcggcctggggcggcggaaggggcgccccccgagttccgtctgaggaagcggcggctgccgaggaagtccacgagagccgggtcccgcacgcccctggggtccgggtgctgaggcgccgcctggccgcctccccgggccgcggcaccgctccgacccagccgccctctccaccggggccgcggcagcgccagtcggggcccttccctctaagcagcccaaacgtgcagaatgccccacaagattggatttgtagtcgtcagctcatctggacacgaagacggcttcagtgcccgggagctcatgatccacgcgccaactgtcagtgggtggcggtcacctagattttgccagtttccacaagaaattgtccttcaaatggtggagagatgtcgaataaggaaactgcagttacttgctcaccagtatatgatttcaagtaaaattgagttctacattagtgaaagcttgcctgaatattttgcaccctatcaagcagagcggtttcgaagacttggctacgtgtctctctgtgataatgaaaagacaggttgcaaagcccgggaactaaaatcagtttatgtggatgcagtaggacaatttcttaaactgatttttcaccaaaaccatgtcaacaaatacaacatatataatcaggttgctttggttgccataaatatcattggagaccctgcagatttcagtgatgaaagcaatactgcctctcgagagaagttgattgaccactaccttgggcacaacagcgaggaccctgctctagaaggaacgtacgccaggaaatctgactatatctctccgctagatgacttagcttttgatatgtaccaagatccagaagttgcacagatcatacgaaaattagatgaaagaaaacgggaagctgtccaaaaggaacgctatgattatgccaagaaactaaaacaagccattgctgatttgcaaaaggttggtgaacgccttgggaggtatgaggtagagaaacgctgtgccgtggagaaggaagactacgatctcgccaaggagaagaagcagcagatggagcagtatcgtgccgaggtgtacgagcagctggagctgcacagcctcctggatgccgagctgatgcgaagaccttttgatttgcccctccagcccctcgctcgttctggcagtccttgccaccaaaagccaatgccctcactaccacaactggaagaaagaggaacagaaaaccagtttgcagaacctttccttcaggaaaagccttcatcatattctctaactatttctcctcagcattctgcagtagacccgttactccctgccacagatcctcatccaaagatcaatgcagagtccctgccctacgatgagcggcctcttccagctattcgtaagcattatggggaggcagtggtggagccggaaatgagtaatgcagacatcagcgatgctcggaggggaggcatgttaggggagccagagcccttaaccgagaaggccttgagagaagccagctctgccatcgatgtgttgggagaaaccttggttgctgaggcctattgtaagacgtggtcctaccgagaggatgcactgcttgccttgtctaagaagttaatggaaatgcctgttggaaccccaaaagaagatttaaagaacacactgagagcatccgtctttctcgttagaagagccataaaggacattgtgacctccgtttttcaggcttctttgaaattgttgaaaatgatcattacacaatatattcctaaacataaactgagtaaacttgaaacagctcactgtgtggagaggaccattcccgttttgctcaccagaactggagattcttctgcccgcctccgcgtcacagctgcaaattttattcaggaaatggccttgtttaaagaagttaagtctctccaaattattccatcctacctggtgcagccattgaaagcaaactcttcagttcacctggcaatgagtcagatgggcctcctggcccggctgctgaaagacctgggcactggcagctcgggcttcaccattgacaacgtgatgaagttttcagtgagtgccctggagcatagagtgtatgaggtccgcgagacggcggttcgaattattttggacatgtacagacagcaccaggcttccatcctggagtaccttcctccagacgacagcaacacacgcaggaacattctctacaaaacaatttttgagggatttgctaaaatagatggcagagctacagatgctgagatgagggcacggagaaaagcggctacagaagaagcagaaaaacaaaagaaagaagaaataaaagctttacaagggcagctggcagcactgaaagaaattcaggctgaagttcaggaaaaagaaagtgatgctgtgaagccaaagaatcaggacattcaaggagggaaagcagcccctgctgaagctctgggaatcccggatgagcactatctagataatttgtgtattttttgtggggaaaggagtgaatccttcacagaggaaggtctggatctccactactggaagcactgtctcatgctgacaagatgtgaccactgcaaacaggtggtcgagatatccagtctgacggagcacttgctgacggaatgtgacaaaaaagacgggtttggaaagtgttaccgttgcagtgaggctgttttcaaggaagagctgcccagacacataaaacacaaggattgcaaccctgccaaaccggagaagctggcaaaccggtgtcccctgtgtcatgagaacttcagccctggagaagaggcatggaaagctcacctgatgggcccagccggctgcacgatgaacctgcgcaagacacacattctgcagaaggccccggcactgcagccagggaaaagctcagctgtggccgcatcaggccccttggggtcaaaggccggaagcaagatccccaccccgaagggcggactgagcaagagctccagcaggacgtacgccaagcgctgacgcggcgctcgggctccttggtctctgtgagggatggagcgggtctcctgattctacaccatctctccagaactctctggccttggtggccccatgctctggctgctgtccccagctccccgccgtgcacgcctcttacgcgtctgtgccgtcagctctcgtgcaaacgatatggatgcagctaaccaaagatcctgcgtgcagtgccaggacctggccgcactgtacattaagccttcagggctgtctcaggccttccttagaatcagagaaggaagcgtcctgtttggagagagccagagagcaccgccgggaggcgctcgcgcaaggccacggtcagcacaggcacggtcccgctttccttagtgcttggagcaatttccataaaacattcaccagaaaccttttgcacatcggtctctgccacacgcagtagaatttccgcagggctgtggctcggccagcagcggttccaggagagtggcggtgcgcacgggcctccagccgtgccttccccctgcaggccccgtctgctgggcctgctgcccagtgcactcagccccaggtagcagaactcacgttcccactatagcaagaaataaaggcaaaagagaacatcttttttttaatcgtagtttttttgagaattggtcccacctcagccgcaccttgctggatgcttctccagtagtgctgcccctgtgacaggcatcagctccctgctggaactgaggtagacacaggtgtgggcccttcccgtgcctttgctcagaggcgcttcactttctccacactttcgaattcctaaagacatgtggaggaagtcactgttaaatgaatttccacctgatcaccctgtgttcacagcaggcagaagcccactggtatgggcctcccgccccttccacatccatgttgtgattggatccataagtttactttcttcaaagagttgataggatgtttaaaacatcaacacattgcttaaaatgatgaaaccaaccctcaaaaaacagtctcctaaccagccatcccctcctgtgggagtgagctgggggttttgtccatagctttggttgggcctgtgtcacatccaggcagccatgtggagggagtcagggtctgtctggaagcatccaccctctcgctgccccagcctgtgctcccaggggcctaggctaccatggactgaagggcagtcccctcccacctggtgcccagggcttctgcttgcctcgctgatgttgcatgggcagacttcaaaaaggatagttagaaaggtttgggttgatggagtttgcattaatgcaattagtgtataaatatgttttaattgccaaccgtgtgaaacaacaaaatatctaaaaactaatcccgatttgaacaatgtactccctggcctggatacattaataaccataaatttgcatgaattaatctccacgtttggtaaactaatacctctggttgactgagaatactgagtaagatataagacctaccaggaacctttaagaatatgctctgctcagtgttgtttgtctgcttgtttgcgacggagtctcactgtgtcgcccgggctgcagtgcaatggcgtgatcttggctcacagtaacctccacctcctgggttcaagcaattctcctgcctcagcctccctagtagctgggattacaggtgcacaccaccatgctcggctaattttttctatttttagtagagatggggtttcaccatgttggccaggctggtctcgaactcgtgacctcataatctgcccaccttggcctcccaaagtgctgggattacaggcgtgagccaccacgcccaggttaaatgtgtttataaggagagaggaggccaggcgcggtggctcacgctgtaatcccagcactttgggaggccgaggcgggcggaccacctgaggtcaggagttcgagaccagcctggccaacatggtgaaaccccatctctactaaaaatacaaaaatgagccaggcgtggtggcctgtagtcccagctacttgagaggctgaggcaggaaaattgcttgaacccgggaggtggaggttgcattgagcccacatcatgccattgcactccagcccaggcgacagagcgagactccgtctcgaaaaaaaaaaaaagtataaggagagaaataactttaaagtttattagacaaaacagagtatagatgccaagatgtctgtaaaatgattttttctggttttaaagagatgttggccattattttctaatccatttttaaaatacagacaaaacacttctttaaacagaacaagaatgagaaaagttaaccaaggaattattcttttctcaccaatcaacacttttaagaaatatatatatatatatacacacatatacacatgccttctatatattgtaacttaaagaaaatacttataaaaagacttcatttttagtgattgacaagcaaacgggttcatttaaaacaggttcctcttttgttagttacagggggtttttttgttgtttttttgtttttgtttttgttttgcgggggtggtggggtttgagacggagtcttgctctgttgcctaggctggagtgcagtggcgcgatcttggccccctgcaacctccgcctcccgggttcgagcaattctcctgcctcagcctcccgagtagctgggattacaggcgtgtgtcaccacgcctggctaatttttttgtatttttagtagagacggggtttcaccatattggccaggctggtctcaaactcctgaccttgtgatccacccacctcggcctcccaaagtgctggaattacaggcatgagccaccgcgcccggcccaatcatgtgtttttgttgaaatgatcctaccagtgattagtggctattgagagttttacagggttatacattgttaagggaccaagaatcaagtacaaaaaattaaaaaggaactgtaaaatcccttggtcattcataaataaatatctaaattaggaatactaattaattgaattttcactcatgagtatgttctgaatatttaatatttatttctattattttcatatgttaagatattccattaaatctaacttaaaagaattgtatgtataaattggcattaggatacaaatgtaaatgtttttaatgaaattttgcaactttttaatattttaacatagttttctatttgtctttatttcaagtaccagaattacaaaatatctaagtaatatatttttgttgtcgttttagggcttaagggttaattcacccagagtatattaatataataaaaagatcactaaatgttt

SEQ ID NO: 116417 - DNA, 918 bp, Homo sapiens
  Payload ID: 2717
  Gene Symbol: CEP104
  Gene Name: centrosomal protein 104kDa
  ENST ID: ENST00000428079
  CDS Start-End: 321-918
tcatgagagtggaggctgcggccggggctatgggcagaggtggccgggtctgcttcttccctgtcactgccgcagcagcttggggtgcaaggcggcctggggcggcggaaggggcgccccccgagttccgtctgaggaagcggcggctgccgaggaagtccacgagagccgggtcccgcacgcccctggggtccgggtgctgaggcgccgcctggccgcctccccgggccgcggcaccgctccgacccagccgccctctccaccggggccgcggcagcgccagtcggggcccttccctctaagcagcccaaacgtgcagaatgccccacaagattggatttgtagtcgtcagctcatctggacacgaagacggcttcagtgcccgggagctcatgatccacgcgccaactgtcagtgggtggcggtcacctagctacgtgtctctctgtgataatgaaaagacaggttgcaaagcccgggaactaaaatcagtttatgtggatgcagtaggacaatttcttaaactgatttttcaccaaaaccatgtcaacaaatacaacatatataatcaggttgctttggttgccataaatatcattggagaccctgcagatttcagtgatgaaagcaatactgcctctcgagagaagttgattgaccactaccttgggcacaacagcgaggaccctgctctagaaggaacgtacgccaggaaatctgactatatctctccgctagatgacttagcttttgatatgtaccaagatccagaagttgcacagatcatacgaaaattagatgaaagaaaacgggaagctgtccaaaaggaacgctatgattatgccaagaaactaaaacaagccattgctgatttgcaaaaggttggtgaacgccttgggaggtatgaggtagagaaac

SEQ ID NO: 116418 - DNA, 683 bp, Homo sapiens
  Payload ID: 2717
  Gene Symbol: CEP104
  Gene Name: centrosomal protein 104kDa
  ENST ID: ENST00000438539
  CDS Start-End: 1-572
ggcagctggcagcactgaaagaaattcaggctgaagttcaggaaaaagaaagtgatgctgtgaagccaaagaatcaggacattcaaggagggaaagcagcccctgctgaagctctgggaatcccggatgagcactatctagataatttgtgtattttttgtggggaaaggagtgaatccttcacagaggaaggtctggatctccactactggaagcactgtctcatgctgacaagatgtgaccactgcaaacaggtggtcgagatatccagtctgacggagcacttgctgacggaatgtgacaaaaaagacgggtttggaaagtgttaccgttgcagtgaggctgttttcaaggaagagctgcccagacacataaaacacaaggattgcaaccctgccaaaccggagaagctggcaaaccggtgtcccctgtgtcatgagaacttcagccctggagaagaggcatggaaagctcacctgatgggcccagccggctgcacgatgaacctgcgcaagacacacattctgcagaaggccccggcactgcagccaggtgagggacagcgccgctgagcaggtgtagtctgcatccctccattttgacttattcaaaaaagcatccccgtccagggcaacatggcaagaccccatccctttaaaagcaaaataaagcatccaagcctg

SEQ ID NO: 116419 - DNA, 430 bp, Homo sapiens
  Payload ID: 2717
  Gene Symbol: CEP104
  Gene Name: centrosomal protein 104kDa
  ENST ID: ENST00000443466
  CDS Start-End: 1-430
cgccttgggaggtatgaggtagagaaacgctgtgccgtggagaaggaagactacgatctcgccaaggagaagaagcagcagatggagcagtatcgtgccgaggtgtacgagcagctggagctgcacagcctcctggatgccgagctgcattctgcagtagacccgttactccctgccacagatcctcatccaaagatcaatgcagagtccctgccctacgatgagcggcctcttccagctattcgtaagcattatggggaggcagtggtggagccggaaatgagtaatgcagacatcagcgatgctcggaggggaggcatgttaggggagccagagcccttaaccgagaaggccttgagagaagccagctctgccatcgatgtgttgggagaaaccttggttgctgaggcctattgtaagacgtggtcct

SEQ ID NO: 116420 - DNA, 926 bp, Homo sapiens
  Payload ID: 2717
  Gene Symbol: CEP104
  Gene Name: centrosomal protein 104kDa
  ENST ID: ENST00000461667
  CDS Start-End: 1-558
gcacggagaaaagcggctacagaagaagcagaaaaacaaaagaaagaagaaataaaagctttacaagggcagctggcagcactgaaagaaattcaggctgaagttcaggaaaaagaaagtgatgctgtgaagccaaagaatcaggacattcaaggagggaaagcagcccctgctgaagctctgggaatcccggatgagcactatctagataatttgtgtattttttgtggggaaaggagtgaatccttcacagaggaaggtctggatctccactactggaagcactgtctcatgctgacaagatgtgaccactgcaaacaggtggtcgagatatccagtctgacggagcacttgctgacggaatgtgacaaaaaagacgggtttggaaagtgttaccgttgcagtgaggctgttttcaaggaagagctgcccagacacataaaacacaaggattgcaaccctgccaaaccggagaagctggcaaaccggtgtcccctgtgtcatgagaacttcagccctggagaagaggtgaggggcctggggagaagggaccagtgaagtaggtgacacacctgtggatggcagtggtggtgacagtggtggtgtcagtgcgggaccatagccacagagtacagtacatgagtgttcagggaggggacagcgtctagtgagccctgtctgagcagtcgttccgtttacctacgtgttcacatgatttccttccgtacatttatgaatggtttatcgaggagcctcaactcactgaggcccagcctgtgtcactgggatacagcatgaaatggttttattttgttctggtcattgcctttatccagataatgagaccctcagtgacatcttgcccagattctgtaacactgcggtcccttttgcctaataaaacccagccctatttggttaaacga

SEQ ID NO: 116421 - DNA, 1035 bp, Homo sapiens
  Payload ID: 2718
  Gene Symbol: CEP112
  Gene Name: centrosomal protein 112kDa
  Uniprot ID: Q8N8E3
  ENST ID: ENST00000317442
  CDS Start-End: 245-880
attagctgacatcaggaactgagccaggcagtgtggttgtgatgtcactatctcacctcacccccacctaagagattgtggtggggaatctcagacactctaaccctctgggcccaagtcacctttctatcaggggagggaggctgtgctctcactggcttcttgttagaagttctgcctgccctacagcctgcactgagggctctcatcactgcttctgagatcttaatgggggtcaacgaagatgtgggcttctctgagtttagaccatccatctgccaaggaaaaccaagccctgagactgatagagatgagagaagagaatggtaatgtccccaagacagagcaggcaggaagtttgaagcctctgagggatacaggaaaatctaacctcaaagagaagaaggccaacagcaagctgaagcagattgagaaggaatacactcagaagcttgccaaatcttcacagatcatagcagaacttcagacaaccatttcctctctgaaagaagagaacagccagcagcagcttgctgcagaaaggcggctccaggatgttagacaaaagtttgaagatgagaagaagcagctgattagagataatgaccaagcaatcaaggttttacaagatgaattagaaaaccgttctaatcaggtgcgatgtgcagagaaaaaattacaacacaaagaattggagtcacaggaacagataacttacatacgacaagaatatgaaacaaaattgaaaggattgatgccagcatccctaagacaagaacttgaagacaccatttcctccctaaaatcacaggttaattttctgcaaaagagagcttccatccttcaggaagaactgactacatatcaaggcagaaggtaactgcacgagagaatgcaacggatgcaatttccaggctgtgctgtggacttcttccagcaggtttgaagatttggatattgtaaactgtgagatcagtggcattttttaaatccttaaatgtaattaagatcataaaaacatgcatcattcataca

SEQ ID NO: 116422 - DNA, 3517 bp, Homo sapiens
  Payload ID: 2718
  Gene Symbol: CEP112
  Gene Name: centrosomal protein 112kDa
  Uniprot ID: Q8N8E3
  ENST ID: ENST00000392769
  CDS Start-End: 220-3087
gggcccgttctccgggcctggggggcgcgcgcccctggggtcccggcgctgcccgctgtggtgtccccggcaggcagagcgcgatccaggccgggacgacttgggaaagttctaagtaaagtttgatcagccggtttgatcggtctgacgtggtccaagagtctgacccaagggtttgcgactgggagaggaaatctgtgtcctggacaagattggattatggaagtgggaagtgaagaagaaaaatgggagaagctggatgcagaatttgatcactttgtggttgatatgaagccctttgttctaaaattacctcataggacagaacggcagaggtgtgctctttggattagaaagctgtgcgaaccttcaggaacaggtgcaggaataatggggaggaagaatcggaacctgtatgcaaaattgttattgcatatgcttaaacgaggtgcgcttgaaggcccttttacacaccgacctgaacccgggacactaaaaattctaccttcatacatgtccatctattttgatgaaccaaatccagcacgagcaaaaggttcaagcccagagggattaccagcctgggtactgggtgagctggagacaagtgaacacaaattaaatgaatcatggaaactctcttctggagaagataacactttagtacagtcgccaactgatgtctacagcagggaacagtacactgggaagctccgagtgagatcacactccttgagtccaactcacagagaagatggacaaaatattaccccaaagatttgtgaagtttattcgaaaaaatctcctgtttctttggatgatagtgacattgaagctcgccttaatagttggaatcttgggatagaaaatcctcgatacctgagacagaagcctatcccagtttctctgatgacaccgaaattcagcctgagaaaatccagcagtttccatgatgatcattttctctctcgaatacgtgagaaagagctggacatgaaaacaaaaatgatggaagctaaatttcatgaagaaaagcttaaactgcaacagaaacatgatgctgatgttcagaagattttagaaagaaagaataatgaaatagaagaactgaaaactttatacaggagtaaacaacatgaaactgaagagactattagaaagcttgaaaagaaagttcagacactgatacgtgactgtcaagttatcagagagactaaagaagaccagattgcagagctgaaaaagatatgtgaacaaagtacggaatctctaaataatgactgggaaaaaaagcttcacaatgctgtagcagaaatggaacaggaaaagtttgatcttcaaaagcaacacactgaaaacattcaagaattgcttgaggatacaaatgtgcgtctgaataaaatggagagtgaatacatggcgcaaacacagtccacaaaccacatgatcaaagaactggaggcccgtgtccagcagctgactggagaagcagagaacagtaatttacagaggcagaaattaattcaagaaaaagcagaacttgaaagatgttaccagataacgtgtagtgaattacaagaagtaaaggcaaggcgtaacacactgcataaagagaaggaccatcttgtaaatgattatgagcaaaacatgaaactgttacaaaccaaatatgatgctgatataaaccttctaaaacaagaacatgctctttcagcttctaaggcatctagtatgattgaagaattagagcagaatgtctgtcaattaaaacagcagttacaggaatcagaacttcaaagaaagcaacaactaagggatcaagaaaataagtttcagatggagaaaagtcatttaaaacacatctatgaaaaaaaggctcatgacttgcagagtgaacttgataaaggaaaagaagatactcaaaagaaaattcataaatttgaggaagctttgaaggaaaaagaggagcagctaactcgtgtgactgaagttcagaggttgcaggcccagcaggcagatgccgctctggaagagtttaagcggcaggtggaactgaactcagagaaagtctatgctgaaatgaaagagcagatggaaaaagtggaggcagatctaactagatccaaatctcttcgtgagaaacaatcaaaggagtttttatggcaactggaggacatcagacagcggtatgaacaacagatagtagagctgaagctggagcatgaacaggagaagacgcacctattacagcagcataacgcagagaaggatagcctagtccgagaccatgaacgggaaattgaaaacctggaaaaacagcttcgcgctgccaatatggagcacgaaaatcaaattcaggagttcaagaaacgagatgcacaggttattgccgacatggaggcccaggttcacaagttgagagaagaattgatcaatgtgaactcacagcggaaacagcagctggtagagcttggtcttcttcgtgaagaggaaaagcaaagggctacaagggaacatgagattgtcgtcaataaactgaaggctgaatcagaaaagatgaaaatagagctgaaaaagactcatgctgctgagacagagatgacactggaaaaggccaacagcaagctgaagcagattgagaaggaatacactcagaagcttgccaaatcttcacagatcatagcagaacttcagacaaccatttcctctctgaaagaagagaacagccagcagcagcttgctgcagaaaggcggctccaggatgttagacaaaagtttgaagatgagaagaagcagctgattagagataatgaccaagcaatcaaggttttacaagatgaattagaaaaccgttctaatcaggtgcgatgtgcagagaaaaaattacaacacaaagaattggagtcacaggaacagataacttacatacgacaagaatatgaaacaaaattgaaaggattgatgccagcatccctaagacaagaacttgaagacaccatttcctccctaaaatcacaggttaattttctgcaaaagagagcttccatccttcaggaagaactgactacatatcaaggcagaaggtaactgcacgagagaatgcaacggatgcaatttccaggctgtgctgtggacttcttccagcaggtttgaagatttggatattgtaaactgtgagatcagtggcattttttaaatccttaaatgtaattaagatcataaaaacatgcatcattcatacactagtggggtggttttatttgtgtctgcctaagttatttttttaacattcctttatttccgattttcatgtttgtgtgcatttgagtatgtgctgagaactgcttatattgggcaaagtgatttcctatgatatgccttgttaatccttttgcatagaattttaccagttgcgtacgatcaaaatcacgtttgtagtatcatatcaaaaattctaacctgtttacattgttttcatgttcatgttcctatgttattaaaatattattttgtactt

SEQ ID NO: 116423 - DNA, 2847 bp, Homo sapiens
  Payload ID: 2718
  Gene Symbol: CEP112
  Gene Name: centrosomal protein 112kDa
  ENST ID: ENST00000537949
  CDS Start-End: 48-2789
ggtttgcgactgggagaggaaatctgtgtcctggacaagattggattatggaagtgggaagtgaagaagaaaaatgggagaagctggatgcagaatttgatcactttgtggttgatatgaagccctttgttctaaaattacctcataggacagaacggcagaggtgtgctctttggattagaaagctgtgcgaaccttcaggaacaggtgcaggaataatggggaggaagaatcggaacctgtatgcaaaattgttattgcatatgcttaaacgaggtgcgcttgaaggcccttttacacaccgacctgaacccgggacactaaaaattctaccttcatacatgtccatctattttgatgaaccaaatccagcacgagcaaaaggttcaagcccagagggattaccagcctgggtactgggtgagctggagacaagtgaacacaaattaaatgaatcatggaaactctcttctggagaagataacactttagtacagtcgccaactgatgtctacagcagggaacagtacactgggaagctccgagtgagatcacactccttgagtccaactcacagagaagatggacaaaatattaccccaaagatttgtgaagtttattcgaaaaaatctcctgtttctttggatgatagtgacattgaagctcgccttaatagttggaatcttgggctggacatgaaaacaaaaatgatggaagctaaatttcatgaagaaaagcttaaactgcaacagaaacatgatgctgatgttcagaagattttagaaagaaagaataatgaaatagaagaactgaaaactttatacaggagtaaacaacatgaaactgaagagactattagaaagcttgaaaagaaagttcagacactgatacgtgactgtcaagttatcagagagactaaagaagaccagattgcagagctgaaaaagatatgtgaacaaagtacggaatctctaaataatgactgggaaaaaaagcttcacaatgctgtagcagaaatggaacaggaaaagtttgatcttcaaaagcaacacactgaaaacattcaagaattgcttgaggatacaaatgtgcgtctgaataaaatggagagtgaatacatggcgcaaacacagtccacaaaccacatgatcaaagaactggaggcccgtgtccagcagctgactggagaagcagagaacagtaatttacagaggcagaaattaattcaagaaaaagcagaacttgaaagatgttaccagataacgtgtagtgaattacaagaagtaaaggcaaggcgtaacacactgcataaagagaaggaccatcttgtaaatgattatgagcaaaacatgaaactgttacaaaccaaatatgatgctgatataaaccttctaaaacaagaacatgctctttcagcttctaaggcatctagtatgattgaagaattagagcagaatgtctgtcaattaaaacagcagttacaggaatcagaacttcaaagaaagcaacaactaagggatcaagaaaataagtttcagatggagaaaagtcatttaaaacacatctatgaaaaaaaggctcatgacttgcagagtgaacttgataaaggaaaagaagatactcaaaagaaaattcataaatttgaggaagctttgaaggaaaaagaggagcagctaactcgtgtgactgaagttcagaggttgcaggcccagcaggcagatgccgctctggaagagtttaagcggcaggtggaactgaactcagagaaagtctatgctgaaatgaaagagcagatggaaaaagtggaggcagatctaactagatccaaatctcttcgtgagaaacaatcaaaggagtttttatggcaactggaggacatcagacagcggtatgaacaacagatagtagagctgaagctggagcatgaacaggagaagacgcacctattacagcagcataacgcagagaaggatagcctagtccgagaccatgaacgggaaattgaaaacctggaaaaacagcttcgcgctgccaatatggagcacgaaaatcaaattcaggagttcaagaaacgagatgcacaggttattgccgacatggaggcccaggttcacaagttgagagaagaattgatcaatgtgaactcacagcggaaacagcagctggtagagcttggtcttcttcgtgaagaggaaaagcaaagggctacaagggaacatgagattgtcgtcaataaactgaaggctgaatcagaaaagatgaaaatagagctgaaaaagactcatgctgctgagacagagatgacactggaaaaggccaacagcaagctgaagcagattgagaaggaatacactcagaagcttgccaaatcttcacagatcatagcagaacttcagacaaccatttcctctctgaaagaagagaacagccagcagcagcttgctgcagaaaggcggctccaggatgttagacaaaagtttgaagatgagaagaagcagctgattagagataatgaccaagcaatcaaggttttacaagatgaattagaaaaccgttctaatcaggtgcgatgtgcagagaaaaaattacaacacaaagaattggagtcacaggaacagataacttacatacgacaagaatatgaaacaaaattgaaaggattgatgccagcatccctaagacaagaacttgaagacaccatttcctccctaaaatcacaggttaattttctgcaaaagagagcttccatccttcaggaagaactgactacatatcaaggcagaaggtaactgcacgagagaatgcaacggatgcaatttccaggctgtgctgtggacttcttccagc

SEQ ID NO: 116424 - DNA, 3392 bp, Homo sapiens
  Payload ID: 2718
  Gene Symbol: CEP112
  Gene Name: centrosomal protein 112kDa
  Uniprot ID: Q8N8E3
  ENST ID: ENST00000535342
  CDS Start-End: 92-2959
tttgaaaccgtttggcaggggcggcggtggcggcggcgttggcggcagcggccgagcggaaagcttgcgtgtggtggtgccagattggattatggaagtgggaagtgaagaagaaaaatgggagaagctggatgcagaatttgatcactttgtggttgatatgaagccctttgttctaaaattacctcataggacagaacggcagaggtgtgctctttggattagaaagctgtgcgaaccttcaggaacaggtgcaggaataatggggaggaagaatcggaacctgtatgcaaaattgttattgcatatgcttaaacgaggtgcgcttgaaggcccttttacacaccgacctgaacccgggacactaaaaattctaccttcatacatgtccatctattttgatgaaccaaatccagcacgagcaaaaggttcaagcccagagggattaccagcctgggtactgggtgagctggagacaagtgaacacaaattaaatgaatcatggaaactctcttctggagaagataacactttagtacagtcgccaactgatgtctacagcagggaacagtacactgggaagctccgagtgagatcacactccttgagtccaactcacagagaagatggacaaaatattaccccaaagatttgtgaagtttattcgaaaaaatctcctgtttctttggatgatagtgacattgaagctcgccttaatagttggaatcttgggatagaaaatcctcgatacctgagacagaagcctatcccagtttctctgatgacaccgaaattcagcctgagaaaatccagcagtttccatgatgatcattttctctctcgaatacgtgagaaagagctggacatgaaaacaaaaatgatggaagctaaatttcatgaagaaaagcttaaactgcaacagaaacatgatgctgatgttcagaagattttagaaagaaagaataatgaaatagaagaactgaaaactttatacaggagtaaacaacatgaaactgaagagactattagaaagcttgaaaagaaagttcagacactgatacgtgactgtcaagttatcagagagactaaagaagaccagattgcagagctgaaaaagatatgtgaacaaagtacggaatctctaaataatgactgggaaaaaaagcttcacaatgctgtagcagaaatggaacaggaaaagtttgatcttcaaaagcaacacactgaaaacattcaagaattgcttgaggatacaaatgtgcgtctgaataaaatggagagtgaatacatggcgcaaacacagtccacaaaccacatgatcaaagaactggaggcccgtgtccagcagctgactggagaagcagagaacagtaatttacagaggcagaaattaattcaagaaaaagcagaacttgaaagatgttaccagataacgtgtagtgaattacaagaagtaaaggcaaggcgtaacacactgcataaagagaaggaccatcttgtaaatgattatgagcaaaacatgaaactgttacaaaccaaatatgatgctgatataaaccttctaaaacaagaacatgctctttcagcttctaaggcatctagtatgattgaagaattagagcagaatgtctgtcaattaaaacagcagttacaggaatcagaacttcaaagaaagcaacaactaagggatcaagaaaataagtttcagatggagaaaagtcatttaaaacacatctatgaaaaaaaggctcatgacttgcagagtgaacttgataaaggaaaagaagatactcaaaagaaaattcataaatttgaggaagctttgaaggaaaaagaggagcagctaactcgtgtgactgaagttcagaggttgcaggcccagcaggcagatgccgctctggaagagtttaagcggcaggtggaactgaactcagagaaagtctatgctgaaatgaaagagcagatggaaaaagtggaggcagatctaactagatccaaatctcttcgtgagaaacaatcaaaggagtttttatggcaactggaggacatcagacagcggtatgaacaacagatagtagagctgaagctggagcatgaacaggagaagacgcacctattacagcagcataacgcagagaaggatagcctagtccgagaccatgaacgggaaattgaaaacctggaaaaacagcttcgcgctgccaatatggagcacgaaaatcaaattcaggagttcaagaaacgagatgcacaggttattgccgacatggaggcccaggttcacaagttgagagaagaattgatcaatgtgaactcacagcggaaacagcagctggtagagcttggtcttcttcgtgaagaggaaaagcaaagggctacaagggaacatgagattgtcgtcaataaactgaaggctgaatcagaaaagatgaaaatagagctgaaaaagactcatgctgctgagacagagatgacactggaaaaggccaacagcaagctgaagcagattgagaaggaatacactcagaagcttgccaaatcttcacagatcatagcagaacttcagacaaccatttcctctctgaaagaagagaacagccagcagcagcttgctgcagaaaggcggctccaggatgttagacaaaagtttgaagatgagaagaagcagctgattagagataatgaccaagcaatcaaggttttacaagatgaattagaaaaccgttctaatcaggtgcgatgtgcagagaaaaaattacaacacaaagaattggagtcacaggaacagataacttacatacgacaagaatatgaaacaaaattgaaaggattgatgccagcatccctaagacaagaacttgaagacaccatttcctccctaaaatcacaggttaattttctgcaaaagagagcttccatccttcaggaagaactgactacatatcaaggcagaaggtaactgcacgagagaatgcaacggatgcaatttccaggctgtgctgtggacttcttccagcaggtttgaagatttggatattgtaaactgtgagatcagtggcattttttaaatccttaaatgtaattaagatcataaaaacatgcatcattcatacactagtggggtggttttatttgtgtctgcctaagttatttttttaacattcctttatttccgattttcatgtttgtgtgcatttgagtatgtgctgagaactgcttatattgggcaaagtgatttcctatgatatgccttgttaatccttttgcatagaattttaccagttgcgtacgatcaaaatcacgtttgtagtatcatatcaaaaattctaacctgtttacattgttttcatgttcatgttcctatgttattaaaatattattttgtacttacc

SEQ ID NO: 116425 - DNA, 547 bp, Homo sapiens
  Payload ID: 2718
  Gene Symbol: CEP112
  Gene Name: centrosomal protein 112kDa
  ENST ID: ENST00000581734
  CDS Start-End: 1-162
caaaagtttgaagatgagaagaagcagctgattagagataatgaccaagcaatcaaggttttacaagatgaattagaaaaccgttctaatcaggtgcgatgtgcagagaaaaaattacaacacaaagaattggagtcacaggaacagatgaaatgccgatgaagtgagcccaggtctacgtggttgtatatgatctgcttcatgcaaactccagcctacataatagataacttacatacgacaagaatatgaaacaaaattgaaaggattgatgccagcatccctaagacaagaacttgaagacaccatttcctccctaaaatcacaggttaattttctgcaaaagagagcttccatccttcaggaagaactgactacatatcaaggcagaaggtaactgcacgagagaatgcaacggatgcaatttccaggctgtgctgtggacttcttccagcaggtttgaagatttggatattgtaaactgtgagatcagtggcattttttaaatccttaaatgtaattaagatcataaaaacatgcatcattc

SEQ ID NO: 116426 - DNA, 637 bp, Homo sapiens
  Payload ID: 2718
  Gene Symbol: CEP112
  Gene Name: centrosomal protein 112kDa
  ENST ID: ENST00000585168
  CDS Start-End: 1-140
gattgatgccagcatccctaagacaagaacttgaagacaccatttcctccctaaaatcacaggttaattttctgcaaaagagagcttccatccttcaggaagaactgactacatatcaaggcagaaggtacagcccataagcaggtgtcttgtctcctgattagtttgtgttgtgtcacctgtgagcctccttgtctggcctttgtctttattaaaatgcttggatataatacaagttttgaaaaagacttgtttttagtaagtagcatgtctttaagaagtcaccccccttctcatcccagtgcttagtctgtactatcaaaacaagatgagagaatctgccgggcacagtggctcactcctgtaatcccagcactttgggaggccaaggcaggaggatcacctgaggtcaggagttcaagaccagcctggccaacttggtaaaacgttgtctctactaaaaatacaaaaattagctaggtatggtggcacacgcctataatcccagctactcaggaggctgaggcaggagaattgcttgaacctgggaggtggaggttgcagtgagctgagatcacaccactgcattccagcctgggcagcagagtaagactctgtctccaaaaaaaaaaacaaa

SEQ ID NO: 116427 - DNA, 1902 bp, Homo sapiens
  Payload ID: 2718
  Gene Symbol: CEP112
  Gene Name: centrosomal protein 112kDa
  ENST ID: ENST00000583358
  CDS Start-End: 206-1902
ggcctggggggcgcgcgcccctggggtcccggcgctgcccgctgtggtgtccccggcaggcagagcgcgatccaggccgggacgacttgggaaagttctaagtaaagtttgatcagccggtttgatcggtctgacgtggtccaagagtctgacccaagggtttgcgactgggagaggaaatctgtgtcctggacaagattggattatggaagtgggaagtgaagaagaaaaatgggagaagctggatgcagaatttgatcactttgtggttgatatgaagccctttgttctaaaattacctcataggacagaacggcagaggtgtgctctttggattagaaagctgtgcgaaccttcaggaacaggtgcaggaataatggggaggaagaatcggaacctgtatgcaaaattgttattgcatatgcttaaacgaggtgcgcttgaaggcccttttacacaccgacctgaacccgggacactaaaaattctaccttcatacatgtccatctattttgatgaaccaaatccagcacgagcaaaaggttcaagcccagagggattaccagcctgggtactgggtgagctggagacaagtgaacacaaattaaatgaatcatggaaactctcttctggagaagataacactttagtacagtcgccaactgatgtctacagcagggaacagtacactgggaagctccgagtgagatcacactccttgagtccaactcacagagaagatggacaaaatattaccccaaagatttgtgaagtttattcgaaaaaatctcctgtttctttggatgatagtgacattgaagctcgccttaatagttggaatcttgggatagaaaatcctcgatacctgagacagaagcctatcccagtttctctgatgacaccgaaattcagcctgagaaaatccagcagtttccatgatgatcattttctctctcgaatacgtgagaaagagctggacatgaaaacaaaaatgatggaagctaaatttcatgaagaaaagcttaaactgcaacagaaacatgatgctgatgttcagaagattttagaaagaaagaataatgaaatagaagaactgaaaactttatacaggagtaaacaacatgaaactgaagagactattagaaagcttgaaaagaaagttcagacactgatacgtgactgtcaagttatcagagagactaaagaagaccagattgcagagctgaaaaagatatgtgaacaaagtacggaatctctaaataatgactgggaaaaaaagcttcacaatgctgtagcagaaatggaacaggaaaagtttgatcttcaaaagcaacacactgaaaacattcaagaattgcttgaggatacaaatgtgcgtctgaataaaatggagagtgaatacatggcgcaaacacagtccacaaaccacatgatcaaagaactggaggcccgtgtccagcagctgactggagaagcagagaacagtaatttacagaggcagaaattaattcaagaaaaagcagaacttgaaagatgttaccagataacgtgtagtgaattacaagaagtaaaggcaaggcgtaacacactgcataaagagaaggaccatcttgtaaatgattatgagcaaaacatgaaactgttacaaaccaaatatgatgctgatataaaccttctaaaacaagaacatgctctttcagcttctaaggcatctagtatgattgaagaattagagcagaatgtctgtcaattaaaacagcagttacaggaatcagaacttcaaagaaagcaacaactaagggatcaagaaaataagtttcagatggagaaaagtcatttaaaacacatctatgaaaaaaaggctcatgacttgcagagtgaacttgataaaggaaaagaaga

SEQ ID NO: 116428 - DNA, 556 bp, Homo sapiens
  Payload ID: 2718
  Gene Symbol: CEP112
  Gene Name: centrosomal protein 112kDa
  ENST ID: ENST00000577322
  CDS Start-End: 515-556
atatagcaatcccccttaatcttgaggaatacattccaagacccccagaggctgcctgaaacagctgatagtactaaaacctatatatgctctgtcttttcctatacatacacactgatgattaaatttagtttatcagttaggtacagtatgagattaacagcaatagctaataataaaatagaacaattataacaatataatgtaacaaaaattgtgtgaaagtaatttccctctttctttcaaaatatcttattgtattgtgctcacctatttttggactgcattcgagtgtaggtaactgaaacagaggaaagcgaaaccatggataagtggagactgttgcatttattccagggagctgtgttaggagaagggagtatgatatataaattatgcattccgtgttcacttattgttctagggccttcaacctttcctagtcctggaacggcagaggtgtgctctttggattagaaagctgtgcgaaccttcaggaacaggtgcaggaataatggggaggaagaatcggaacctgtatgcaaaattgttattg

SEQ ID NO: 116429 - DNA, 473 bp, Homo sapiens
  Payload ID: 2718
  Gene Symbol: CEP112
  Gene Name: centrosomal protein 112kDa
  ENST ID: ENST00000581739
  CDS Start-End: 1-318
gccaacagcaagctgaagcagattgagaaggaatacactcagaagcttgccaaatcttcacagatcatagcagaacttcagacaaccatttcctctctgaaagaagagaacagccagcagcagcttgctgcagaaaggcggctccaggatgttagacaaaagtttgaagatgagaagaagcagctgattagagataatgaccaagcaatcaaggttttacaagatgaattagaaaaccgttctaatcaggttaattttctgcaaaagagagcttccatccttcaggaagaactgactacatatcaaggcagaaggtaactgcacgagagaatgcaacggatgcaatttccaggctgtgctgtggacttcttccagcaggtttgaagatttggatattgtaaactgtgagatcagtggcattttttaaatccttaaatgtaattaagatcataaaaacatgcatcattcataca

SEQ ID NO: 116430 - DNA, 4900 bp, Homo sapiens
  Payload ID: 2719
  Gene Symbol: CEP120
  Gene Name: centrosomal protein 120kDa
  Uniprot ID: Q8N960
  ENST ID: ENST00000306467
  CDS Start-End: 306-3266
agcggctacgcaggcggcaaaaggtcctcgggtggcgggcttgtctctgcttgcagactggcagggctgcagcgtggctttttccttgagtcggggcacagttaggatctgggctggcggcccgaggcagaggagccgggcgcgctgcagcagacggcggtgggacctggctgcggagcggggtccgggcatcagggaccgggggcgggcagtgggggtcccgccgggggtcccggattacccgcgactcaactggacctcacttccccccagccgccttcgcccccggaccgctcaccgcaaccatggtctccaaatccgaccaattgctcatcgtcgtgtccatcctagaaggtcggcatttccccaaacgtccaaagcatatgcttgtagtggaagcaaagtttgatggagaacagttggctactgatcctgtggaccacactgaccagccagaatttgctactgagttagcttgggaaattgacaggaaagcgcttcatcagcacaggctacagcgtactcctatcaaactccaatgttttgccttggatcctgtaacttcagccaaggaaaccataggttacatcgttctggatttaagaaccgctcaagaaacaaagcaggcaccaaaatggtaccagttgctgagtaataaatacaccaaattcaagtctgagatacagataagtattgctttggaaaccgatacaaagccaccagtggatagctttaaagcaaagggggctccccctcgagatggaaaagtacctgccatcctggctggacttgaccccagggacattgtggctgtgctgaatgaagagggaggctaccatcagattggaccagcagaatactgtactgactcctttattatgtcagtgaccatagcatttgctacccagttggaacagttaattccatgtaccatgaaacttccagaaagacagcctgagtttttcttttactactctttactgggaaatgatgttacaaatgaacccttcaatgatttaatcaacccaaactttgagccagagagagcatcagttcgcatccgtagcagtgtagaaattcttcgtgtttacctggctcttcagtctaaactgcagattcacctctgctgtggagaccagtcacttggaagtacagaaatacctttaactggattacttaaaaagggcagtacagaaatcaaccagcacccagtcacagtcgaaggtgcttttacccttgaccctccaaacagagccaaacagaagcttgcacctattcctgtggagctagccccaactgtgggagtgtctgtggctctgcagagagaaggcatagactcccagtctttaattgaattaaagacccagaatgaacatgagccagagcattcaaagaagaaagttttaacccccataaaggagaagacacttactgggccaaaatcaccaacagtgtcccctgttccatctcacaaccagtcacctccaacaaaagatgatgcaacagaaagtgaagtggaaagtttacagtatgataaggacaccaaaccaaatccaaaagccagttcttctgtacctgcttcactggcccagctagtgactacatccaatgcttcagaagtagcttcaggacagaagattgctgtaccagcaacatcacatcatttttgcttttcaatagacttaaggagtatacatgccttggagattggttttccaatcaactgtatattaaggtactcatatccattctttggaagtgcagctcctattatgactaatcctcctgtagaagttcggaaaaacatggaagtttttcttccccagtcttactgtgcatttgattttgcaactatgcctcatcagctgcaagacaccttcttaaggattccattactggttgaactatggcacaaggataaaatgagtaaagatttacttctgggaattgcgagaatccagctttctaacatcttgtcttcagaaaaaactcgttttttaggttctaatggtgaacagtgttggcgtcaaacttacagtgaaagtgtgcctgttatagcagcacaaggatcaaataacaggatagcagatctttcttacacagtgactctagaagattatggactagtaaaaatgcgtgagatttttatctctgattcatctcagggtgtatctgccgtacagcaaaagccgtcttctcttcctccagcaccttgtccttcagagatccagacagagcctcgtgaaacgttagaatacaaagcagcacttgagctagaaatgtggaaggagatgcaagaagatatatttgaaaatcagctgaagcagaaagaactggctcatatgcaggctcttgcagaggaatggaagaaaagggaccgagaaagagaatcactagtaaagaaaaaggtggctgaatatactattctagaaggaaaacttcaaaaaactctaattgacttggagaagcgagagcagcagcttgctagtgtggaatcagagcttcaaagagaaaaaaaggaactgcaatcagaacgtcagcggaacctgcaagaactgcaggactctatccgtagggccaaagaggactgtattcaccaagtagaactagaaaggttaaaaatcaaacagctcgaagaggataaacaccgccttcagcaacagcttaatgatgctgaaaataagtataagattttggaaaaagagttccaacagttcaaggaccagcaaaacaacaaaccagaaatccgtctacagtctgaaataaatcttctcaccttggaaaaggttgaacttgaaagaaagttggaatctgcaactaagtctaaactgcattacaagcagcagtggggacgagctttgaaagaacttgccagacttaaacagagggagcaagaaagtcaaatggctcgtcttaaaaaacagcaggaagaattggaacagatgagactacgttaccttgccgctgaggaaaaagatacagtaaaaaccgagcgacaagaattgttggatataagaaatgaattgaacaggttaaggcaacaagagcaaaaacaataccaggattccacagagattgcaagtggaaaaaaggatggcccccatggcagtgtattggaagaaggtttggatgattatttgactcgcctgatagaagaaagggatactttgatgagaacgggtgtgtataatcacgaggatcgaataataagtgaactcgaccgacagatcagagagattttggcaaaaagcaatgccagtaattaataacatttggaaaagctttatagagactctaagtctaaattttaatttctttgtaaaaacctcaaaagtgaggaaaatggatgttttaaaatggtattttcaattttttataagcaaaattttgtatgttattgtatagtatttatttgatcttatttactttatgctacctctcccacactggttttatttgtaatttgcatttatatactcattttaaatgacttttcagtgtttttcatagtttataatctgatggctaactaactttcaaaacagcttttaactaagtttgttgtaggagaaatgactgcggtaatttccagttctataatgtttcatgttgagccaaaagagtatatcttgcactttaaaaacgctgcgtcctattccatttgaatgtaaattcttaaaagttgagaccaattgtaaccagtttaactcattttagatgacctttttttcttataatatttgcaagtgacaagtttgaaaacaaagcaagatcagtgcagagaagccacatgacatgttgggtgacagattggtcatttatttaaataaagttaatacagattaaatttgtttcaagagctattgaattttcaaattttcagtgtatttataacttttaagaacatgaagtattagcttaatatagttttctctgttggtttcttcctcaagtttgcattgttttcttttgttaaaattagagatttctttttattttccagttatagtaatactagctgtcagcttaaaccctctgtaatagaacatggaaacagacacataaagacattagctgaaaaaatagagtgaaaatcaactattttttactcccgctaatttcaatcaatcgttttcaaaagcgcacgagattcactcattggatttatgcagtgccctgtctgtataaaaactcttaagagttcctttatatcatattcttcagagccaacatttgtcctcaaagcaacgtttcccacctccttttactgagtactgaaaaagttttagcaaagtcacagattaggttgaatttcaaaatatatgtactttaaaaagttctgatttccaaatataataaagttaaaattaagtatatactttaggaagttaccaataacttccatcaaagcagagtaggatatatggtaacattaattttcggtcatttcaaatgaggtatatttcttattagggaaattaaagtccctatatttattatatattttttccttattaacagagtattaatctagtaaaaaataacccagcagtaaataataaagaaattactgaatgagaggataatgaatctgaatcatagcaggaatttgcaatattaattatggttagctatttttctctcattgatttttgtgccacttgaatggaacagaagcaagccttatgttttggaaggtctgcggtaaaatgctgtgactgtttactttcaattgcattgtgtgttgcctgtgactgctttcaaacgctagagggggcctctgatttaaagaaataaaaaggacttttctaaaatggatgtgtagtttattttgccttttgtaaagctcttttggctattgtaacttaacaaataaaatcataattgtgtgcatctctga

SEQ ID NO: 116431 - DNA, 4629 bp, Homo sapiens
  Payload ID: 2719
  Gene Symbol: CEP120
  Gene Name: centrosomal protein 120kDa
  Uniprot ID: Q8N960
  ENST ID: ENST00000306481
  CDS Start-End: 114-2996
tttacagcagtagtgcgcttgcgcagctggtcccacaccaagtcgcccgcctctcctcgtccggctagcagagggcgctgtgaggtcggcatttccccaaacgtccaaagcatatgcttgtagtggaagcaaagtttgatggagaacagttggctactgatcctgtggaccacactgaccagccagaatttgctactgagttagcttgggaaattgacaggaaagcgcttcatcagcacaggctacagcgtactcctatcaaactccaatgttttgccttggatcctgtaacttcagccaaggaaaccataggttacatcgttctggatttaagaaccgctcaagaaacaaagcaggcaccaaaatggtaccagttgctgagtaataaatacaccaaattcaagtctgagatacagataagtattgctttggaaaccgatacaaagccaccagtggatagctttaaagcaaagggggctccccctcgagatggaaaagtacctgccatcctggctggacttgaccccagggacattgtggctgtgctgaatgaagagggaggctaccatcagattggaccagcagaatactgtactgactcctttattatgtcagtgaccatagcatttgctacccagttggaacagttaattccatgtaccatgaaacttccagaaagacagcctgagtttttcttttactactctttactgggaaatgatgttacaaatgaacccttcaatgatttaatcaacccaaactttgagccagagagagcatcagttcgcatccgtagcagtgtagaaattcttcgtgtttacctggctcttcagtctaaactgcagattcacctctgctgtggagaccagtcacttggaagtacagaaatacctttaactggattacttaaaaagggcagtacagaaatcaaccagcacccagtcacagtcgaaggtgcttttacccttgaccctccaaacagagccaaacagaagcttgcacctattcctgtggagctagccccaactgtgggagtgtctgtggctctgcagagagaaggcatagactcccagtctttaattgaattaaagacccagaatgaacatgagccagagcattcaaagaagaaagttttaacccccataaaggagaagacacttactgggccaaaatcaccaacagtgtcccctgttccatctcacaaccagtcacctccaacaaaagatgatgcaacagaaagtgaagtggaaagtttacagtatgataaggacaccaaaccaaatccaaaagccagttcttctgtacctgcttcactggcccagctagtgactacatccaatgcttcagaagtagcttcaggacagaagattgctgtaccagcaacatcacatcatttttgcttttcaatagacttaaggagtatacatgccttggagattggttttccaatcaactgtatattaaggtactcatatccattctttggaagtgcagctcctattatgactaatcctcctgtagaagttcggaaaaacatggaagtttttcttccccagtcttactgtgcatttgattttgcaactatgcctcatcagctgcaagacaccttcttaaggattccattactggttgaactatggcacaaggataaaatgagtaaagatttacttctgggaattgcgagaatccagctttctaacatcttgtcttcagaaaaaactcgttttttaggttctaatggtgaacagtgttggcgtcaaacttacagtgaaagtgtgcctgttatagcagcacaaggatcaaataacaggatagcagatctttcttacacagtgactctagaagattatggactagtaaaaatgcgtgagatttttatctctgattcatctcagggtgtatctgccgtacagcaaaagccgtcttctcttcctccagcaccttgtccttcagagatccagacagagcctcgtgaaacgttagaatacaaagcagcacttgagctagaaatgtggaaggagatgcaagaagatatatttgaaaatcagctgaagcagaaagaactggctcatatgcaggctcttgcagaggaatggaagaaaagggaccgagaaagagaatcactagtaaagaaaaaggtggctgaatatactattctagaaggaaaacttcaaaaaactctaattgacttggagaagcgagagcagcagcttgctagtgtggaatcagagcttcaaagagaaaaaaaggaactgcaatcagaacgtcagcggaacctgcaagaactgcaggactctatccgtagggccaaagaggactgtattcaccaagtagaactagaaaggttaaaaatcaaacagctcgaagaggataaacaccgccttcagcaacagcttaatgatgctgaaaataagtataagattttggaaaaagagttccaacagttcaaggaccagcaaaacaacaaaccagaaatccgtctacagtctgaaataaatcttctcaccttggaaaaggttgaacttgaaagaaagttggaatctgcaactaagtctaaactgcattacaagcagcagtggggacgagctttgaaagaacttgccagacttaaacagagggagcaagaaagtcaaatggctcgtcttaaaaaacagcaggaagaattggaacagatgagactacgttaccttgccgctgaggaaaaagatacagtaaaaaccgagcgacaagaattgttggatataagaaatgaattgaacaggttaaggcaacaagagcaaaaacaataccaggattccacagagattgcaagtggaaaaaaggatggcccccatggcagtgtattggaagaaggtttggatgattatttgactcgcctgatagaagaaagggatactttgatgagaacgggtgtgtataatcacgaggatcgaataataagtgaactcgaccgacagatcagagagattttggcaaaaagcaatgccagtaattaataacatttggaaaagctttatagagactctaagtctaaattttaatttctttgtaaaaacctcaaaagtgaggaaaatggatgttttaaaatggtattttcaattttttataagcaaaattttgtatgttattgtatagtatttatttgatcttatttactttatgctacctctcccacactggttttatttgtaatttgcatttatatactcattttaaatgacttttcagtgtttttcatagtttataatctgatggctaactaactttcaaaacagcttttaactaagtttgttgtaggagaaatgactgcggtaatttccagttctataatgtttcatgttgagccaaaagagtatatcttgcactttaaaaacgctgcgtcctattccatttgaatgtaaattcttaaaagttgagaccaattgtaaccagtttaactcattttagatgacctttttttcttataatatttgcaagtgacaagtttgaaaacaaagcaagatcagtgcagagaagccacatgacatgttgggtgacagattggtcatttatttaaataaagttaatacagattaaatttgtttcaagagctattgaattttcaaattttcagtgtatttataacttttaagaacatgaagtattagcttaatatagttttctctgttggtttcttcctcaagtttgcattgttttcttttgttaaaattagagatttctttttattttccagttatagtaatactagctgtcagcttaaaccctctgtaatagaacatggaaacagacacataaagacattagctgaaaaaatagagtgaaaatcaactattttttactcccgctaatttcaatcaatcgttttcaaaagcgcacgagattcactcattggatttatgcagtgccctgtctgtataaaaactcttaagagttcctttatatcatattcttcagagccaacatttgtcctcaaagcaacgtttcccacctccttttactgagtactgaaaaagttttagcaaagtcacagattaggttgaatttcaaaatatatgtactttaaaaagttctgatttccaaatataataaagttaaaattaagtatatactttaggaagttaccaataacttccatcaaagcagagtaggatatatggtaacattaattttcggtcatttcaaatgaggtatatttcttattagggaaattaaagtccctatatttattatatattttttccttattaacagagtattaatctagtaaaaaataacccagcagtaaataataaagaaattactgaatgagaggataatgaatctgaatcatagcaggaatttgcaatattaattatggttagctatttttctctcattgatttttgtgccacttgaatggaacagaagcaagccttatgttttggaaggtctgcggtaaaatgctgtgactgtttactttcaattgcattgtgtgttgcctgtgactgctttcaaacgctagagggggcctctgatttaaagaaataaaaaggacttttctaaaatggatgtgtagtttattttgccttttgtaaagctcttttggctattgtaacttaacaaataaaatcataattgtgtgcatctctg

SEQ ID NO: 116432 - DNA, 4710 bp, Homo sapiens
  Payload ID: 2719
  Gene Symbol: CEP120
  Gene Name: centrosomal protein 120kDa
  Uniprot ID: Q8N960
  ENST ID: ENST00000328236
  CDS Start-End: 117-3077
tttacagcagtagtgcgcttgcgcagctggtcccacaccaagtcgcccgcctctcctcgtccggctagcagagggcgctgtgagccgccttcgcccccggaccgctcaccgcaaccatggtctccaaatccgaccaattgctcatcgtcgtgtccatcctagaaggtcggcatttccccaaacgtccaaagcatatgcttgtagtggaagcaaagtttgatggagaacagttggctactgatcctgtggaccacactgaccagccagaatttgctactgagttagcttgggaaattgacaggaaagcgcttcatcagcacaggctacagcgtactcctatcaaactccaatgttttgccttggatcctgtaacttcagccaaggaaaccataggttacatcgttctggatttaagaaccgctcaagaaacaaagcaggcaccaaaatggtaccagttgctgagtaataaatacaccaaattcaagtctgagatacagataagtattgctttggaaaccgatacaaagccaccagtggatagctttaaagcaaagggggctccccctcgagatggaaaagtacctgccatcctggctggacttgaccccagggacattgtggctgtgctgaatgaagagggaggctaccatcagattggaccagcagaatactgtactgactcctttattatgtcagtgaccatagcatttgctacccagttggaacagttaattccatgtaccatgaaacttccagaaagacagcctgagtttttcttttactactctttactgggaaatgatgttacaaatgaacccttcaatgatttaatcaacccaaactttgagccagagagagcatcagttcgcatccgtagcagtgtagaaattcttcgtgtttacctggctcttcagtctaaactgcagattcacctctgctgtggagaccagtcacttggaagtacagaaatacctttaactggattacttaaaaagggcagtacagaaatcaaccagcacccagtcacagtcgaaggtgcttttacccttgaccctccaaacagagccaaacagaagcttgcacctattcctgtggagctagccccaactgtgggagtgtctgtggctctgcagagagaaggcatagactcccagtctttaattgaattaaagacccagaatgaacatgagccagagcattcaaagaagaaagttttaacccccataaaggagaagacacttactgggccaaaatcaccaacagtgtcccctgttccatctcacaaccagtcacctccaacaaaagatgatgcaacagaaagtgaagtggaaagtttacagtatgataaggacaccaaaccaaatccaaaagccagttcttctgtacctgcttcactggcccagctagtgactacatccaatgcttcagaagtagcttcaggacagaagattgctgtaccagcaacatcacatcatttttgcttttcaatagacttaaggagtatacatgccttggagattggttttccaatcaactgtatattaaggtactcatatccattctttggaagtgcagctcctattatgactaatcctcctgtagaagttcggaaaaacatggaagtttttcttccccagtcttactgtgcatttgattttgcaactatgcctcatcagctgcaagacaccttcttaaggattccattactggttgaactatggcacaaggataaaatgagtaaagatttacttctgggaattgcgagaatccagctttctaacatcttgtcttcagaaaaaactcgttttttaggttctaatggtgaacagtgttggcgtcaaacttacagtgaaagtgtgcctgttatagcagcacaaggatcaaataacaggatagcagatctttcttacacagtgactctagaagattatggactagtaaaaatgcgtgagatttttatctctgattcatctcagggtgtatctgccgtacagcaaaagccgtcttctcttcctccagcaccttgtccttcagagatccagacagagcctcgtgaaacgttagaatacaaagcagcacttgagctagaaatgtggaaggagatgcaagaagatatatttgaaaatcagctgaagcagaaagaactggctcatatgcaggctcttgcagaggaatggaagaaaagggaccgagaaagagaatcactagtaaagaaaaaggtggctgaatatactattctagaaggaaaacttcaaaaaactctaattgacttggagaagcgagagcagcagcttgctagtgtggaatcagagcttcaaagagaaaaaaaggaactgcaatcagaacgtcagcggaacctgcaagaactgcaggactctatccgtagggccaaagaggactgtattcaccaagtagaactagaaaggttaaaaatcaaacagctcgaagaggataaacaccgccttcagcaacagcttaatgatgctgaaaataagtataagattttggaaaaagagttccaacagttcaaggaccagcaaaacaacaaaccagaaatccgtctacagtctgaaataaatcttctcaccttggaaaaggttgaacttgaaagaaagttggaatctgcaactaagtctaaactgcattacaagcagcagtggggacgagctttgaaagaacttgccagacttaaacagagggagcaagaaagtcaaatggctcgtcttaaaaaacagcaggaagaattggaacagatgagactacgttaccttgccgctgaggaaaaagatacagtaaaaaccgagcgacaagaattgttggatataagaaatgaattgaacaggttaaggcaacaagagcaaaaacaataccaggattccacagagattgcaagtggaaaaaaggatggcccccatggcagtgtattggaagaaggtttggatgattatttgactcgcctgatagaagaaagggatactttgatgagaacgggtgtgtataatcacgaggatcgaataataagtgaactcgaccgacagatcagagagattttggcaaaaagcaatgccagtaattaataacatttggaaaagctttatagagactctaagtctaaattttaatttctttgtaaaaacctcaaaagtgaggaaaatggatgttttaaaatggtattttcaattttttataagcaaaattttgtatgttattgtatagtatttatttgatcttatttactttatgctacctctcccacactggttttatttgtaatttgcatttatatactcattttaaatgacttttcagtgtttttcatagtttataatctgatggctaactaactttcaaaacagcttttaactaagtttgttgtaggagaaatgactgcggtaatttccagttctataatgtttcatgttgagccaaaagagtatatcttgcactttaaaaacgctgcgtcctattccatttgaatgtaaattcttaaaagttgagaccaattgtaaccagtttaactcattttagatgacctttttttcttataatatttgcaagtgacaagtttgaaaacaaagcaagatcagtgcagagaagccacatgacatgttgggtgacagattggtcatttatttaaataaagttaatacagattaaatttgtttcaagagctattgaattttcaaattttcagtgtatttataacttttaagaacatgaagtattagcttaatatagttttctctgttggtttcttcctcaagtttgcattgttttcttttgttaaaattagagatttctttttattttccagttatagtaatactagctgtcagcttaaaccctctgtaatagaacatggaaacagacacataaagacattagctgaaaaaatagagtgaaaatcaactattttttactcccgctaatttcaatcaatcgttttcaaaagcgcacgagattcactcattggatttatgcagtgccctgtctgtataaaaactcttaagagttcctttatatcatattcttcagagccaacatttgtcctcaaagcaacgtttcccacctccttttactgagtactgaaaaagttttagcaaagtcacagattaggttgaatttcaaaatatatgtactttaaaaagttctgatttccaaatataataaagttaaaattaagtatatactttaggaagttaccaataacttccatcaaagcagagtaggatatatggtaacattaattttcggtcatttcaaatgaggtatatttcttattagggaaattaaagtccctatatttattatatattttttccttattaacagagtattaatctagtaaaaaataacccagcagtaaataataaagaaattactgaatgagaggataatgaatctgaatcatagcaggaatttgcaatattaattatggttagctatttttctctcattgatttttgtgccacttgaatggaacagaagcaagccttatgttttggaaggtctgcggtaaaatgctgtgactgtttactttcaattgcattgtgtgttgcctgtgactgctttcaaacgctagagggggcctctgatttaaagaaataaaaaggacttttctaaaatggatgtgtagtttattttgccttttgtaaagctcttttggctattgtaacttaacaaataaaatcataattgtgtgcatctctg

SEQ ID NO: 116433 - DNA, 2645 bp, Homo sapiens
  Payload ID: 2719
  Gene Symbol: CEP120
  Gene Name: centrosomal protein 120kDa
  ENST ID: ENST00000508442
  CDS Start-End: 114-2645
tttacagcagtagtgcgcttgcgcagctggtcccacaccaagtcgcccgcctctcctcgtccggctagcagagggcgctgtgaggtcggcatttccccaaacgtccaaagcatatgcttgtagtggaagcaaagtttgatggagaacagttggctactgatcctgtggaccacactgaccagccagaatttgctactgagttagcttgggaaattgacaggaaagcgcttcatcagcacaggctacagcgtactcctatcaaactccaatgttttgccttggatcctgtaacttcagccaaggaaaccataggttacatcgttctggatttaagaaccgctcaagaaacaaagcaggcaccaaaatggtaccagttgctgagtaataaatacaccaaattcaagtctgagatacagataagtattgctttggaaaccgatacaaagccaccagtggatagctttaaagcaaagggggctccccctcgagatggaaaagtacctgccatcctggctggacttgaccccagggacattgtggctgtgctgaatgaagagggaggctaccatcagattggaccagcagaatactgtactgactcctttattatgtcagtgaccatagcatttgctacccagttggaacagttaattccatgtaccatgaaacttccagaaagacagcctgagtttttcttttactactctttactgggaaatgatgttacaaatgaacccttcaatgatttaatcaacccaaactttgagccagagagagcatcagttcgcatccgtagcagtgtagaaattcttcgtgtttacctggctcttcagtctaaactgcagattcacctctgctgtggagaccagtcacttggaagtacagaaatacctttaactggattacttaaaaagggcagtacagaaatcaaccagcacccagtcacagtcgaaggtgcttttacccttgaccctccaaacagagccaaacagaagcttgcacctattcctgtggagctagccccaactgtgggagtgtctgtggctctgcagagagaaggcatagactcccagtctttaattgaattaaagacccagaatgaacatgagccagagcattcaaagaagaaagttttaacccccataaaggagaagacacttactgggccaaaatcaccaacagtgtcccctgttccatctcacaaccagtcacctccaacaaaagatgatgcaacagaaagtgaagtggaaagtttacagtatgataaggacaccaaaccaaatccaaaagccagttcttctgtacctgcttcactggcccagctagtgactacatccaatgcttcagaagtagcttcaggacagaagattgctgtaccagcaacatcacatcatttttgcttttcaatagacttaaggagtatacatgccttggagattggttttccaatcaactgtatattaaggtactcatatccattctttggaagtgcagctcctattatgactaatcctcctgtagaagttcggaaaaacatggaagtttttcttccccagtcttactgtgcatttgattttgcaactatgcctcatcagctgcaagacaccttcttaaggattccattactggttgaactatggcacaaggataaaatgagtaaagatttacttctgggaattgcgagaatccagctttctaacatcttgtcttcagaaaaaactcgttttttaggttctaatggtgaacagtgttggcgtcaaacttacagtgaaagtgtgcctgttatagcagcacaaggatcaaataacaggatagcagatctttcttacacagtgactctagaagattatggactagtaaaaatgcgtgagatttttatctctgattcatctcagggtgtatctgccgtacagcaaaagccgtcttctcttcctccagcaccttgtccttcagagatccagacagagcctcgtgaaacgttagaatacaaagcagcacttgagctagaaatgtggaaggagatgcaagaagatatatttgaaaatcagctgaagcagaaagaactggctcatatgcaggctcttgcagaggaatggaagaaaagggaccgagaaagagaatcactagtaaagaaaaaggtggctgaatatactattctagaaggaaaacttcaaaaaactctaattgacttggagaagcgagagcagcagcttgctagtgtggaatcagagcttcaaagagaaaaaaaggaactgcaatcagaacgtcagcggaacctgcaagaactgcaggactctatccgtagggccaaagaggactgtattcaccaagtagaactagaaaggttaaaaatcaaacagctcgaagaggataaacaccgccttcagcaacagcttaatgatgctgaaaataagtataagattttggaaaaagagttccaacagttcaaggaccagcaaaacaacaaaccagaaatccgtctacagtctgaaataaatcttctcaccttggaaaaggttgaacttgaaagaaagttggaatctgcaactaagtctaaactgcattacaagcagcagtggggacgagctttgaaagaacttgccagacttaaacagagggagcaagaaagtcaaatggctcgtctt

SEQ ID NO: 116434 - DNA, 3973 bp, Homo sapiens
  Payload ID: 2719
  Gene Symbol: CEP120
  Gene Name: centrosomal protein 120kDa
  Uniprot ID: Q8N960
  ENST ID: ENST00000513565
  CDS Start-End: 347-1489
gggcgcggcggcggccgctgcggccgcccgggcgtttgaaaagcggctacgcaggcggcaaaaggtcctcgggtggcgggcttgtctctgcttgcagactggcagggctgcagcgtggctttttccttgagtcggggcacagttaggatctgggctggcggcccgaggcagaggagccgggcgcgctgcagcagacggcggtgggacctggctgcggagcggggtccgggcatcagggaccgggggcgggcagtgggggtcccgccgggggtcccggattacccgcgactcaactggacctcacttccccccagccgccttcgcccccggaccgctcaccgcaaccatggtctccaaatccgaccaattgctcatcgtcgtgtccatcctagaaggtcggcatttccccaaacgtccaaagcatatgcttgtagtggaagcaaagtttgatggagaacagttggctactgatcctgtggaccacactgaccagccagaatttgctactgagttagcttgggaaattgacaggaaagcgcttcatcagcacaggctacagcgtactcctatcaaactccaatgttttgccttggatcctgtaacttcagccaaggaaaccataggttacatcgttctggatttaagaaccgctcaagaaacaaagcaggcaccaaaatggtaccagttgctgagtaataaatacaccaaattcaagtctgagatacagataagtattgctttggaaaccgatacaaagccaccagtggatagctttaaagcaaagggggctccccctcgagatggaaaagtacctgccatcctggctggacttgaccccagggacattgtggctgtgctgaatgaagagggaggctaccatcagattggaccagcagaatactgtactgactcctttattatgtcagtgaccatagcatttgctacccagttggaacagttaattccatgtaccatgaaacttccagaaagacagcctgagtttttcttttactactctttactgggaaatgatgttacaaatgaacccttcaatgatttaatcaacccaaactttgagccagagagagcatcagttcgcatccgtagcagtgtagaaattcttcgtgtttacctggctcttcagtctaaactgcagattcacctctgctgtggagaccagtcacttggaagtacagaaatacctttaactggattacttaaaaagggcagtacagaaatcaaccagcacccagtcacagtcgaaggtgcttttacccttgaccctccaaacagagccaaacagaagcttgcacctattcctgtggagctagccccaactgtgggagtgtctgtggctctgcagagagaaggcatagactcccaggatgcattttggtattcagctctggatatcatatttcctctgttcatcttcctttttctggtcctagatgctataaggaaatttgcaaattacgaagaaaaatagactaggaatatccaaactgggaaaggaagcttatatttttaaaaaacaatgccaagttttttgcttaattatgaaggaaagttctttgcaaattatactttatttaaaaattgtttttagtctttaattgaattaaagacccagaatgaacatgagccagagcattcaaagaagaaagttttaacccccataaaggagaagacacttactgggccaaaatcaccaacagtgtcccctgttccatctcacaaccagtcacctccaacaaaagatgatgcaacagaaagtgaagtggaaagtttacagtatgataaggacaccaaaccaaatccaaaagccagttcttctgtacctgcttcactggcccagctagtgactacatccaatgcttcagaagtagcttcaggacagaagattgctgtaccagcaacatcacatcatttttgcttttcaatagacttaaggagtatacatgccttggagattggttttccaatcaactgtatattaaggtgtgatttgattttgtttcaaagtattattttctgaagagaaaggactttcctgtgtttggggaattgcagagagaaatgtcaccaaagaagttataacatttgttaaatcagtggactaaaagggggtactcatatccattctttggaagtgcagctcctattatgactaatcctcctgtagaagttcggaaaaacatggaagtttttcttccccagtcttactgtgcatttgattttgcaactatgcctcatcagctgcaagacaccttcttaaggattccattactggttgaactatggcacaaggataaaatgagtaaagatttacttctgggaattgcgagaatccagctttctaacatcttgtcttcagaaaaaactcgttttttaggttctaatggtgaacagtgttggcgtcaaacttacagtgaaagtgtgcctgttatagcagcacaaggatcaaataacaggatagcagatctttcttacacagtgactctagaagattatggactagtaaaaatgcgtgagatttttatctctgattcatctcagggtgtatctgccgtacagcaaaagccgtcttctcttcctccagcaccttgtccttcagagatccagacagagcctcgtgaaacgttagaatacaaagcagcacttgagctagaaatgtggaaggagatgcaagaagatatatttgaaaatcagctgaagcagaaagaactggctcatatgcaggctcttgcagaggaatggaagaaaagggaccgagaaagagaatcactagtaaagaaaaaggtggctgaatatactattctagaaggaaaacttcaaaaaactctaattgacttggagaagcgagagcagcagcttgctagtgtggaatcagagcttcaaagagaaaaaaaggaactgcaatcagaacgtcagcggaacctgcaagaactgcaggactctatccgtagggccaaagaggactgtattcaccaagtagaactagaaaggttaaaaatcaaacagctcgaagaggataaacaccgccttcagcaacagcttaatgatgctgaaaataagtataagattttggaaaaagagttccaacagttcaaggaccagcaaaacaacaaaccagaaatccgtctacagtctgaaataaatcttctcaccttggaaaaggttgaacttgaaagaaagttggaatctgcaactaagtctaaactgcattacaagcagcagtggggacgagctttgaaagaacttgccagacttaaacagccaaagaagacagtttggtgtatttttgtccagatatgtttttctttttaaataactttaaaatgaaatatacatttcaaagaaggttcttctactctttccacctgcctcctggtttaagaaacagagcattatgatgaatgctttggaagccctctgtgtccctttctcaactgtgtcttctctttccagagagggagcaagaaagtcaaatggctcgtcttaaaaaacagcaggaagaattggaacagatgagactacgttaccttgccgctgaggaaaaagatacagtaaaaaccgagcgacaagaattgttggatataagaaatgaattgaacaggttaaggcaacaagagcaaaaacaataccaggattccacagagattgcaagtggaaaaaaggatggcccccatggcagtgtattggaagaaggtttggatgattatttgactcgcctgatagaagaaagggatactttgatgagaacgggtgtgtataatcacgaggatcgaataataagtgaactcgaccgacagatcagagagattttggcaaaaagcaatgccagtaattaataacatttggaaaagctttatagagactctaagtctaaattttaatttctttgtaaaaacctcaaaagtgaggaaaatggatgttttaaaatggtattttcaattttttataagcaaaa

SEQ ID NO: 116435 - DNA, 4720 bp, Homo sapiens
  Payload ID: 2719
  Gene Symbol: CEP120
  Gene Name: centrosomal protein 120kDa
  ENST ID: ENST00000508138
  CDS Start-End: 69-671
gcctctcctcgtccggctagcagagggcgctgtgagccgccttcgcccccggaccgctcaccgcaaccatggtctccaaatccgaccaattgctcatcgtcgtgtccatcctagaaggtcggcatttccccaaacgtccaaagcatatgcttgtagtggaagcaaagtttgatggagaacagttggctactgatcctgtggaccacactgaccagccagaatttgctactgagttagcttgggaaattgacaggaaagcgcttcatcagcacaggctacagcgtactcctatcaaactccaatgttttgccttggatcctgtaacttcagccaaggaaaccataggttacatcgttctggatttaagaaccgctcaagaaacaaagcaggcaccaaaatggtaccagttgctgagtaataaatacaccaaattcaagtctgagatacagataagtattgctttggaaaccgatacaaagccaccagtggatagctttaaagcaaagggggctccccctcgagatggaaaagaaatatcatcgaacagatgccacgttcttcccattgcatcttatcaggcacagcaagatgttccaagctcatcttgtgcttactctgtctcagctctggattcagccatttctctaaggagccctgcttcctttcggtaaagaatgatttttagaagccaagatctaggtgctagtacctgccatcctggctggacttgaccccagggacattgtggctgtgctgaatgaagagggaggctaccatcagattggaccagcagaatactgtactgactcctttattatgtcagtgaccatagcatttgctacccagttggaacagttaattccatgtaccatgaaacttccagaaagacagcctgagtttttcttttactactctttactgggaaatgatgttacaaatgaacccttcaatgatttaatcaacccaaactttgagccagagagagcatcagttcgcatccgtagcagtgtagaaattcttcgtgtttacctggctcttcagtctaaactgcagattcacctctgctgtggagaccagtcacttggaagtacagaaatacctttaactggattacttaaaaagggcagtacagaaatcaaccagcacccagtcacagtcgaaggtgcttttacccttgaccctccaaacagagccaaacagaagcttgcacctattcctgtggagctagccccaactgtgggagtgtctgtggctctgcagagagaaggcatagactcccagtctttaattgaattaaagacccagaatgaacatgagccagagcattcaaagaagaaagttttaacccccataaaggagaagacacttactgggccaaaatcaccaacagtgtcccctgttccatctcacaaccagtcacctccaacaaaagatgatgcaacagaaagtgaagtggaaagtttacagtatgataaggacaccaaaccaaatccaaaagccagttcttctgtacctgcttcactggcccagctagtgactacatccaatgcttcagaagtagcttcaggacagaagattgctgtaccagcaacatcacatcatttttgcttttcaatagacttaaggagtatacatgccttggagattggttttccaatcaactgtatattaaggtactcatatccattctttggaagtgcagctcctattatgactaatcctcctgtagaagttcggaaaaacatggaagtttttcttccccagtcttactgtgcatttgattttgcaactatgcctcatcagctgcaagacaccttcttaaggattccattactggttgaactatggcacaaggataaaatgagtaaagatttacttctgggaattgcgagaatccagctttctaacatcttgtcttcagaaaaaactcgttttttaggttctaatggtgaacagtgttggcgtcaaacttacagtgaaagtgtgcctgttatagcagcacaaggatcaaataacaggatagcagatctttcttacacagtgactctagaagattatggactagtaaaaatgcgtgagatttttatctctgattcatctcagggtgtatctgccgtacagcaaaagccgtcttctcttcctccagcaccttgtccttcagagatccagacagagcctcgtgaaacgttagaatacaaagcagcacttgagctagaaatgtggaaggagatgcaagaagatatatttgaaaatcagctgaagcagaaagaactggctcatatgcaggctcttgcagaggaatggaagaaaagggaccgagaaagagaatcactagtaaagaaaaaggtggctgaatatactattctagaaggaaaacttcaaaaaactctaattgacttggagaagcgagagcagcagcttgctagtgtggaatcagagcttcaaagagaaaaaaaggaactgcaatcagaacgtcagcggaacctgcaagaactgcaggactctatccgtagggccaaagaggactgtattcaccaagtagaactagaaaggttaaaaatcaaacagctcgaagaggataaacaccgccttcagcaacagcttaatgatgctgaaaataagtataagattttggaaaaagagttccaacagttcaaggaccagcaaaacaacaaaccagaaatccgtctacagtctgaaataaatcttctcaccttggaaaaggttgaacttgaaagaaagttggaatctgcaactaagtctaaactgcattacaagcagcagtggggacgagctttgaaagaacttgccagacttaaacagagggagcaagaaagtcaaatggctcgtcttaaaaaacagcaggaagaattggaacagatgagactacgttaccttgccgctgaggaaaaagatacagtaaaaaccgagcgacaagaattgttggatataagaaatgaattgaacaggttaaggcaacaagagcaaaaacaataccaggattccacagagattgcaagtggaaaaaaggatggcccccatggcagtgtattggaagaaggtttggatgattatttgactcgcctgatagaagaaagggatactttgatgagaacgggtgtgtataatcacgaggatcgaataataagtgaactcgaccgacagatcagagagattttggcaaaaagcaatgccagtaattaataacatttggaaaagctttatagagactctaagtctaaattttaatttctttgtaaaaacctcaaaagtgaggaaaatggatgttttaaaatggtattttcaattttttataagcaaaattttgtatgttattgtatagtatttatttgatcttatttactttatgctacctctcccacactggttttatttgtaatttgcatttatatactcattttaaatgacttttcagtgtttttcatagtttataatctgatggctaactaactttcaaaacagcttttaactaagtttgttgtaggagaaatgactgcggtaatttccagttctataatgtttcatgttgagccaaaagagtatatcttgcactttaaaaacgctgcgtcctattccatttgaatgtaaattcttaaaagttgagaccaattgtaaccagtttaactcattttagatgacctttttttcttataatatttgcaagtgacaagtttgaaaacaaagcaagatcagtgcagagaagccacatgacatgttgggtgacagattggtcatttatttaaataaagttaatacagattaaatttgtttcaagagctattgaattttcaaattttcagtgtatttataacttttaagaacatgaagtattagcttaatatagttttctctgttggtttcttcctcaagtttgcattgttttcttttgttaaaattagagatttctttttattttccagttatagtaatactagctgtcagcttaaaccctctgtaatagaacatggaaacagacacataaagacattagctgaaaaaatagagtgaaaatcaactattttttactcccgctaatttcaatcaatcgttttcaaaagcgcacgagattcactcattggatttatgcagtgccctgtctgtataaaaactcttaagagttcctttatatcatattcttcagagccaacatttgtcctcaaagcaacgtttcccacctccttttactgagtactgaaaaagttttagcaaagtcacagattaggttgaatttcaaaatatatgtactttaaaaagttctgatttccaaatataataaagttaaaattaagtatatactttaggaagttaccaataacttccatcaaagcagagtaggatatatggtaacattaattttcggtcatttcaaatgaggtatatttcttattagggaaattaaagtccctatatttattatatattttttccttattaacagagtattaatctagtaaaaaataacccagcagtaaataataaagaaattactgaatgagaggataatgaatctgaatcatagcaggaatttgcaatattaattatggttagctatttttctctcattgatttttgtgccacttgaatggaacagaagcaagccttatgttttggaaggtctgcggtaaaatgctgtgactgtttactttcaattgcattgtgtgttgcctgtgactgctttcaaacgctagagggggcctct

SEQ ID NO: 116436 - DNA, 578 bp, Homo sapiens
  Payload ID: 2719
  Gene Symbol: CEP120
  Gene Name: centrosomal protein 120kDa
  ENST ID: ENST00000510582
  CDS Start-End: 83-578
acaccaagtcgcccgcctctcctcgtccggctagcagagggcgctgtgagccgccttcgcccccggaccgctcaccgcaaccatggtctccaaatccgaccaattgctcatcgtcgtgtccatcctagaaggtcggcatttccccaaacgtccaaagcatatgcttgtagtggaagcaaagtttgatggagaacagttggctactgatcctgtggaccacactgaccagccagaatttgctactgagttagcttgggaaattgacaggaaagcgcttcatcagcacaggctacagcgtactcctatcaaactccaatgttttgccttggatcctgtaacttcagccaaggaaaccataggttacatcgttctggatttaagaaccgctcaagaaacaaagcaggcaccaaaatggtaccagttgctgagtaataaatacaccaaattcaagtctgagatacagataagtattgctttggaaaccgatacaaagccaccagtggatagctttaaagcaaagggggctccccctcgagatggaaaagtacctgccatcctggctggacttgaccccaggg

SEQ ID NO: 116437 - DNA, 606 bp, Homo sapiens
  Payload ID: 2719
  Gene Symbol: CEP120
  Gene Name: centrosomal protein 120kDa
  ENST ID: ENST00000515110
  CDS Start-End: 327-539
cggccgcccgggcgtttgaaaagcggctacgcaggcggcaaaaggtcctcgggtggcgggcttgtctctgcttgcagactggcagggctgcagcgtggctttttccttgagtcggggcacagttaggatctgggctggcggcccgaggcagaggagccgggcgcgctgcagcagacggcggtgggacctggctgcggagcggggtccgggcatcagggaccgggggcgggcagtgggggtcccgccgggggtcccggattacccgcgactcaactggacctcacttccccccagccgccttcgcccccggaccgctcaccgcaaccatggtctccaaatccgaccaattgctcatcgtcgtgtccatcctagaaggcttcctgcgattccagaagtgttccggaggcaattccctttacacgtcttgctggaggactcaggggactacagttcttaagagggtgtattatacattccttaaaaggtcggcatttccccaaacgtccaaagcatatgcttgtagtggaagcaaagtttgatggagaacagttggctactgatcctgtggaccacactgaccagccagaatttgctactgagttagct

SEQ ID NO: 116438 - DNA, 7039 bp, Homo sapiens
  Payload ID: 2720
  Gene Symbol: CEP126
  Gene Name: centrosomal protein 126kDa
  Uniprot ID: Q9P2H0
  ENST ID: ENST00000263468
  CDS Start-End: 271-3624
gtcggttgttgtcaagatggcggctgcagggttgctgccgccccatctgctattgcccggcgaggtcgccgctgcctcagctgccatcgccgctacaggcaccagtgccgctgcgcgggagctagggctgtcgaggccaacccttccgcgcccgtgacgcggggcctgagagacggagtgtagggaggggccgagcaggaggaggaggaagccggagctgccatgagggaggttctgggggcgagcagacaggcggcgctgaagtgaaggatgctggcggggaggcccggaacccggagcgcggtcggggaactgggcactgaatcatcggacaacctcgacagagcccccctcggccctcgggagagcggcgggcatcaccgacctggctcttacctagatatgaaaatccatctggagaaaaatttagaagaagagcgccagatattactgcagcaacaaaaaatatgtcgaaatcgagcacgtaaatattttgtggagtcaaatcggagaaaaaaagcttttgaggagaaacgaaaagaacaggaagaaaaagaacaccaaattagagaacaaatacttcaacaaagaaaacagaagtttgaagaagttactgaaaaattccagcgtgcccatgttcctctttcacagcggaggaaagcagtttcccgaaaaccagttcctccattagaagaggccctcaaacaaattcaggaatccaacttaaaatcagaagtaaaccttcccttttcccgtagaccaacaataaactggagagctatagattctgccttgccttccgcattatcaaaaaatgatcacaagcatcagaaacaactcttatccaaaatcaattgtgagaaagaaatgaatgaaaacatgagggcaaccttggctactagcaaaaatgtgttccagcttaaactggaggaaactcagaaactcctcgaagatcaacatctaagcaatttgcaaaaattttgtgatgaagttaatcagataaccaattctgaaaccctctcaagtatagacagtcttgaggctacagagcatgaagaaatatatttaacacttaataaggagcattccacatccatccagcggaataccatttccctcaaaccagcaaatatgcaatcaactaatctcagctgctttgatgaagataaactggcattctctaaaactcaacatataaataattggcttacaaatttagatgcttcaaatactcagaatgtcacagctttctcagatattttaagtaaatctaatgttctgccttcatgggaatattttaatagtaaagaacaaaatccatctcctttgaatggaacagtggaaagagccacaaatactgctaataattcagtaccctttgtatctagcccacccatgtttgtactagataaaaaatgtgaaaagacctctgaaactagcactatgaggacaactgactccacttctggagcattcaaaagagagagaccattagttactgagagcccaacatttaaatttagcaaatcccaaagcacttcagattctctaacccaggaagtggctacatttccagaccaagagaaatattctgaattaaatcaagaaaatggaactacttcaattcctacttcatgtgtaccagtggcaacgcctttagttttgccatctaatatacagtcagctagaccttcagcaaagaacagtatacacataaaagaaattgatgcagtgcagtgttctgataagttagatgaattgaaagatggtaaagaagaagagataaaatattttaattgcaataaggaagagttgcctttattttcagacagttttcaagatgcctatatacctcacaatcctgattcaaaagatgaaaaacaaaaattagctgaaacatcatccttgtctaatgtaacttctaattatgactttgttggccagcataagaaaatgaaatacaacatccatgagagaaatggtgtgagatttcttaaaagtattttaaagaaagaatctaaatatgaacatggttatcttaaggcattaattataaatcagagctttaagtttggaaatcaaaaagcagcagctatcagagatagtattgaattaacaaaggaaaaaggtgcagaaattccaaagaccattaaaaaactgaggtggtttgatgaaactagcaatatagaaaacaatgctgaaaacagtcattcactgaagaataaaacaggaacaactcaacagcattctcaacaattccacattcaaagtggtgctggaagcaacataattagtgtttctacttgtgctgtaaattctgctgatacaaagaagtccagggaggattctatctctgaaaatgttacgactttaggaggatctggagcagaccatatgcctttgaactgttttataccttcaggttataactttgctaaacatgcctggccagcctcaaaaaaagaagaaagtaaaatccctgtacatgatgattctaaaactaagcaaggtaagccacaaagaggtagagcaaaaataattagaaaaccaggatctgcaaaagtccaatcaggctttatatgtacaaacagaaaaggcgctgtcattcaaccacagtctgcaagcaaagtcaacatatttacacaagctcagggaaaattaattataccttgtcctcctcctcaatctacatcaaatattagaagtggtaaaaatatacaagtgtctcagtgtcaaccagtaactcctgaaaatcctcaaaacattattacacataactcttttaattcaaaacatgtgcttccaacagaacacagtttgaatcagtggaatcaggaaagtagttctccactctcaaatgcttgttctgacctagtcactgtgataccatcactgccatcatattgttcttcagagtgccaaactttcgcaaaaataaatcattcaaatggcactcaagcagttgcccggcaagatgcgacattatattgcacccaaagaagtcctgtttgtgaagaaagttatccgtctgtgactctaagaactgctgaagaagaatcagttcccttatggaaaagaggtcctaatgtcctgcatcaaaataagagggctacagggtctactgttatgagaagaaaacgaattgctgaaactaagcggagaaatattttagagcagaaaagacaaaaccctggatctgtaggacagaagtacagtgagcaaattaataattttggacaaagtgtcctgctaagttcaagtgagccaaaacaaactacaaggggtacttcttatattgaagaagtttcagatagtacttctgagtttttgatggctgaaaacttagtgaaagcatcagtgccggaggatgagattctgactgtcttgaatagcaaacagatacagaaatcaaatctacctttaaataaaactcaacaattcaacatctgcacactgtcagctgaagaacagaagatcctagagtcccttaatgatctcagtgaaagactacattatatacaagaatccatttgcaaaaacccatccatcaaaaatactttacaaataataccacttctggagaagagagaagatagaaccagcagctgcagagacaagagataattccagcagaatccgtctaagaagacctttcatgtacttccctaggactagatgcataccgttttgtgaaaaccagccataggaaaacatgtgagcaacaacccccatgaacatttgtcctaactcagattttgtgagcagtgaagtttaacagagcagtgacatttaacaaagcagtgaagtttaacagagttctgagaataccatgaaagacattatgcctgcctaaacaaaaagcaggacataacctagctctgaatacatgccacaaggatgaagcttgtgagtagagcaaacaaacgtttttccaaagaattcacagtgctcctttgcaatttatagatttcatgttgaaatatatgttaaataaaatttctgtttattgaacctctttattaaacctctaacttactgataagatgtttatgaagtatggcatattttgatttttttaattgtaataaatattcttaaagttaccacatcccacaaaatggcccttggtggcagcaatagagcaaaggttacctttttgtatggtgaagggaggccttcctatggctgtacaattacatcgattcttccaaatttcatatttcatacatggcactttggcataccgaaaaaacatgaaatttttcattaaaatgccatgaatcaagccagggccgttggcttatgcctgtaatcccagcactttgcaggccgaggtagacagatggcttgagctcaggagttcgtgaccagcctgggcaaccctgtctctacaaaaaatacaaaaattaaccaggcatggtggcatgcacctgtagtcccagctacttggggtgctgaggcgggaggattacttgagcccaggaggattacttcaacctgggaggttgaggctgcagtgagctgtgtttcgccactgcacaccagcctgggtgacagtgtgagacccagcctcaaaaaaaaaaaaaaaaaagtgatgaatcaaaattagaaattaagagttttaagaaaacatgtggccttttattaataacactactaaattttggttcctccatagaattagttttgaaacacttgatgtagtgagaaatgcattaacatgttgaatgcctaccatgtaccaaattttgtgcatatattttttatttaatctgaccagccacccaaaccatgggtatttttgtctccactttagagatgagaaactgagccaaggccacatagctacctacagtgacagaatcaaaattcaaactcaggtttatctagttccaaaacccatgttctttctgccacaccatgttagtagaaatggaaactattggatgaaatgaggaaaaacaggaaaagaattcactttttaaatgaagaaattagtgaaaaaattgacctaatgaaggaaacatttgtgctttcctatatttttaattttaagaataggatttcggaaggcgacagaaaatttagttcttagacatttaaatagaaagttgtgtgcccctatagaaaatatttgagaatttcttatactatcaagaaaaaattctgtgaattaagatgtaatttataaaataacatttcaatgggggtaaacaggccagaagagtgtgccaagttgtttgtgaatcattccaagcacctcagatgaaaactcacttttattaaaaaaaaaaaagacaagggtttatattcatatacactagtatatatgtacacagcagcatcctgcatgccaaagtagcttcaccgttagtaatccctcactttaatacctcttaggaaccaaagaatgcctctacaagcaaaaagatagttgaaaatagttaagatccaaagtcagaataggccaaaaaaaaaaaaaaaaaaagcctaaatagtaagctggtgaaacaagataagatttgcattttactagaacttgcacattatgatattgtccttttatgaaactgtcatatgaccagaattcttctgtaattctgcccatgactcctccagaattttagtagatacagggtgggttcattaagagtgataaaagtgggaagacataaagagcctttgtgaattaaagtggaagagaataacactttgcatgctataaacgtgaaaactaacatttttggccagacacagtggctcatgcatgtaattctagcactttggaggccaaggcaggaggactgcttgagcccaggagtttgagaccagcctgggcaatgtagcaagaccccatctctatataaaatataaaaatgttggctgtgcacggtagcttatgcctgtaatctcagcactttgggaggccaaggcaggcagatcatgaggtcaagagatcaagaccatcctggccaacatggtgaaaccctgtctctactaaaaatacaaaaatagctgggcatggtggcacgcacctctactcccagctactaggaggctgaggcaggagaatcgtttgaacccaggaggtagaggttgcagtgagctgagattgcaccactgcaccagcctggcaacagagcaagactccgtctcacaaaaatgaataaataaaataaaaataaaaatgttactttttaaaaagtaacttttttaataatataagaaagaaaaatgccctttcacactgaatcttcaagttctaaggaagaaaagagtctcctttcgaatgtgaagaagtaaatttagaggaaatcaaacaagcatcactttcctcagtggaaaaacttatgaaacttcttataagagagagtaatctcaggccggacatgctggctcatacctgtaatcccagaactttgggaggccgaggcaggtggatcatttgagctcaggaattcaagaccagcctgggtaatatggcaagagcccaactctactaaaaatacaaaaagaaaagaaaacagccaagcttggtggtatgtgcctgtggtcccagctactggggaggctgaggtgggaggatcgtttgagcctgggaggcagaggttgcagtgatcaggaattgtgccactgcactccaacctgagtgacagagcaacactctgtcttaaaagaaaaaaaaaaaagagagagatagtaatctcttgggcaaaaggtatcaaataattgaaagaaaagtttaaacacatttccgagaggcagggcaactaataactggtcagaaaaatttagacggtcttcattttaaaattggcatcaggaaggattaccatgaacttattttaaatccatattgtaccagaatgactatgtctgtgtttcttaggaatgttgaagctttttgtgaaaactgtactgtatacatatataaatatacacacacttacatgtatgtattttgatagatattacatggactaaattttgtcaatttcatgtaatttaccctttgcaataaaaatgattcattaaatat

SEQ ID NO: 116439 - DNA, 4533 bp, Homo sapiens
  Payload ID: 2720
  Gene Symbol: CEP126
  Gene Name: centrosomal protein 126kDa
  ENST ID: ENST00000532529
  CDS Start-End: 1-1298
gtgcccatgttcctctttcacagcggaggaaagcagtttcccgaaaaccagttcctccattagaagaggccctcaaacaaattcaggaatccaacttaaaatcagaagtaaaccttcccttttcccgtagaccaacaataaactggagatccattcctgcctgtccagctgtctccacacctgacccctacttacctgatcaactgtctcctccacgggtcccattgcggtcccaccacttccaaattcttcctagctacccaactgtttctcctgcccgccagccccatatactgcctatccatccatctgtaccctctactcttccaaagacctttgcaccagtcccattactgccttacccaattaaatatcatccttgtcctccaaccccggctacttccagcatttctagcagtttccctcgtctaccagcaccaattccttcttgcccacctggccatccaccccacgcaccccagagttctccaatcattcctgaccctgagtcacagcacaagttattttacaaaactttcagacccaaacatttccttccagcacagcattctactgcagccactctaatgcctacccttgttcgtcgttcccttccagctccactggttgtttccccaacccctttggaacctctccctgttttgaagccttcctgtttatccagtcaccccccttatccaccagtccccactctttcttatgtcactccgttgcctgcacatcctgctagcttggatccttttcagtcagtccagcaatctgttccacaagccacagcattgtcaaatcagcccgaggcctttgcagatcatccaccagcctcagttctctcccttgcatctccctgtcattctccatcttcttctttgccttcatctccttctacttccacatccttttcttcagcctgtatactgttttcttcctcctcatctattctttcctcttcttcgacttcctgttctacttctccatccttacctccttcatctatccctcttttttcctctcctttgcattcatcttcctctccaggtttgcctccaacttatttagcttttccctctccagtttctcctgtttcttcttcctttatgatttcctcttcctttccccctattcttcactctccttctgtttctacctccccatctccttttattcctatccaccccttcaatcctcctcattgggggaagaaagtagagaagagaagagaagaaagtggagtagagaagaaaggaatagagaagaaagttgagacacgacaactttaaagagctatagattctgccttgccttccgcattatcaaaaaatgatcacaagcatcagaaacaactcttatccaaaatcaattgtgagaaagaaatgaatgaaaacatgagggcaaccttggctactagcaaaaatgtgttccagcttaaactggaggaaactcagaaactcctcgaagatcaacatctaagcaatttgcaaaaattttgtgatgaagttaatcagataaccaattctgaaaccctctcaagtatagacagtcttgaggctacagagcatgaagaaatatatttaacacttaataaggagcattccacatccatccagcggaataccatttccctcaaaccagcaaatatgcaatcaactaatctcagctgctttgatgaagataaactggcattctctaaaactcaacatataaataattggcttacaaatttagatgcttcaaatactcagaatgtcacagctttctcagatattttaagtaaatctaatgttctgccttcatgggaatattttaatagtaaagaacaaaatccatctcctttgaatggaacagtggaaagagccacaaatactgctaataattcagtaccctttgtatctagcccacccatgtttgtactagataaaaaatgtgaaaagacctctgaaactagcactatgaggacaactgactccacttctggagcattcaaaagagagagaccattagttactgagagcccaacatttaaatttagcaaatcccaaagcacttcagattctctaacccaggaagtggctacatttccagaccaagagaaatattctgaattaaatcaagaaaatggaactacttcaattcctacttcatgtgtaccagtggcaacgcctttagttttgccatctaatatacagtcagctagaccttcagcaaagaacagtatacacataaaagaaattgatgcagtgcagtgttctgataagttagatgaattgaaagatggtaaagaagaagagataaaatattttaattgcaataaggaagagttgcctttattttcagacagttttcaagatgcctatatacctcacaatcctgattcaaaagatgaaaaacaaaaattagctgaaacatcatccttgtctaatgtaacttctaattatgactttgttggccagcataagaaaatgaaatacaacatccatgagagaaatggtgtgagatttcttaaaagtattttaaagaaagaatctaaatatgaacatggttatcttaaggcattaattataaatcagagctttaagtttggaaatcaaaaagcagcagctatcagagatagtattgaattaacaaaggaaaaaggtgcagaaattccaaagaccattaaaaaactgaggtggtttgatgaaactagcaatatagaaaacaatgctgaaaacagtcattcactgaagaataaaacaggaacaactcaacagcattctcaacaattccacattcaaagtggtgctggaagcaacataattagtgtttctacttgtgctgtaaattctgctgatacaaagaagtccagggaggattctatctctgaaaatgttacgactttaggaggatctggagcagaccatatgcctttgaactgttttataccttcaggttataactttgctaaacatgcctggccagcctcaaaaaaagaagaaagtaaaatccctgtacatgatgattctaaaactaagcaaggtaagccacaaagaggtagagcaaaaataattagaaaaccaggatctgcaaaagtccaatcaggctttatatgtacaaacagaaaaggcgctgtcattcaaccacagtctgcaagcaaagtcaacatatttacacaagctcagggaaaattaattataccttgtcctcctcctcaatctacatcaaatattagaagtggtaaaaatatacaagtgtctcagtgtcaaccagtaactcctgaaaatcctcaaaacattattacacataactcttttaattcaaaacatgtgcttccaacagaacacagtttgaatcagtggaatcaggaaagtagttctccactctcaaatgcttgttctgacctagtcactgtgataccatcactgccatcatattgttcttcagagtgccaaactttcgcaaaaataaatcattcaaatggcactcaagcagttgcccggcaagatgcgacattatattgcacccaaagaagtcctgtttgtgaagaaagttatccgtctgtgactctaagaactgctgaagaagaatcagttcccttatggaaaagaggtcctaatgtcctgcatcaaaataagagggctacagggtctactgttatgagaagaaaacgaattgctgaaactaagcggagaaatattttagagcagaaaagacaaaaccctggatctgtaggacagaagtacagtgagcaaattaataattttggacaaagtgtcctgctaagttcaagtgagccaaaacaaactacaaggggtacttcttatattgaagaagtttcagatagtacttctgagtttttgatggctgaaaacttagtgaaagcatcagtgccggaggatgagattctgactgtcttgaatagcaaacagatacagaaatcaaatctacctttaaataaaactcaacaattcaacatctgcacactgtcagctgaagaacagaagatcctagagtcccttaatgatctcagtgaaagactacattatatacaagaatccatttgcaaaaacccatccatcaaaaatactttacaaataataccacttctggagaagagagaagatagaaccagcagctgcagagacaagagataattccagcagaatccgtctaagaagacctttcatgtacttccctaggactagatgcataccgttttgtgaaaaccagccataggaaaacatgtgagcaacaacccccatgaacatttgtcctaactcagattttgtgagcagtgaagtttaacagagcagtgacatttaacaaagcagtgaagtttaacagagttctgagaataccatgaaagacattatgcctgcctaaacaaaaagcaggacataacctagctctgaatacatgccacaaggatgaagcttgtgagtagagcaaacaaacgtttttccaaagaattcacagtgctcctttgcaatttatagatttcatgttgaaatatatgttaaataaaatttctgtttattg

SEQ ID NO: 116440 - DNA, 631 bp, Homo sapiens
  Payload ID: 2720
  Gene Symbol: CEP126
  Gene Name: centrosomal protein 126kDa
  ENST ID: ENST00000532077
  CDS Start-End: 1-244
agagcagaaaagacaaaaccctggatctgtaggacagaagtacagtgagcaaattaataattttggacaaagtgtcctgctaagttcaagtgagccaaaacaaactacaaggggtacttcttatattgaagaagatatacaagaatccatttgcaaaaacccatccatcaaaaatactttacaaataataccacttctggagaagagagaagatagaaccagcagctgcagagacaagagataattccagcagaatccgtctaagaagacctttcatgtacttccctaggactagatgcataccgttttgtgaaaaccagccataggaaaacatgtgagcaacaacccccatgaacatttgtcctaactcagattttgtgagcagtgaagtttaacagagcagtgacatttaacaaagcagtgaagtttaacagagttctgagaataccatgaaagacattatgcctgcctaaacaaaaagcaggacataacctagctctgaatacatgccacaaggatgaagcttgtgagtagagcaaacaaacgtttttccaaagaattcacagtgctcctttgcaatttatagatttcatgttgaaatatatgttaaataaaatttctgtttattgaa

SEQ ID NO: 116441 - DNA, 1606 bp, Homo sapiens
  Payload ID: 2721
  Gene Symbol: CEP128
  Gene Name: centrosomal protein 128kDa
  Uniprot ID: Q6ZU80
  ENST ID: ENST00000216517
  CDS Start-End: 279-1586
gctgcgtttggtcagttgcaccttctgggtcactggtagccgcgggagccgggtggggcctaggcgatgatccggcattaaggagctgggatcatcctccgtctcaggtggtttggggaaagtgtaggggcaaccaaagatcatcggcttgactaggccctttgccctgaacctcatgaagaaatgataggaggcagacatatgtgcctaaaaagagcgttgagctcagagaagagcaactcggagttttgggggtgtgctttgatttgtgtacatcaatggcagaatcatccagcgaatcagatcacttccgctgtcgtgaccgattgagtccatgggctgccagatcaacgcacaggggaactcgaagtcttcctacagtagaagttaccgagaaggtcaacactataacaagtactttacaggataccagtcggaacctgcgacaagtggaccagatgcttggacgataccgagaatacagtaatggacaggcgggtgcgatagaacatttaaaagaaagcttggaacaatcaatcgaccaactccggagtcaacgtttattgagaaactcaggagggagaagtatttctgttacaagtttgagtgcaagtgaccttgatggtggcactgggtcagagctccatcattttccacctacctcacctctcaaggactatggggatccacagggtattaaacgaatgagatcaagaactggtgtccggtttgttcaagagactgatgatatgactcagcttcatggttttcatcagtctcttcgagacctcagcagtgaacaaattcgccttggagatgatttcaacagggagctttccagaaggagccggtcagatgccgaaacaaaaagggctttggaagaattgactgaaaaacttaatgaagcccagaaacaagaagtggtttcagatcgggtggagcggcggcttcaggaactggagagagagatgcgcacagaaagggagctggtggaaagacgccaggatcaactgggactcatgtccctgcagctacaggaggcactaaagaaacaagaagctaaagcagatgagcatgagggggcaataaaaaataagctaagacaaactgaaactgagaagaatcaacttgaacaggaattggagctatctcgaaggttattgaatcaatcagaaggcagccgagaaacacttttgcatcaggtagaagaactgcgtacacaacttacgaaagcagaaggtgatcgaaagggtttacagcatcaagtatctcagatttccaagcaacagtcaaactatcaggatgaacaaggggaggactggagatttaggagaggggttgagcgggaaaaacaggacctggagaagcaaatgtcagatttgagagtgcagctgaacttcagcgcaatggcatctgagttagaggaagtgaaacggtgcatggagagaaaagacaaggagaaagcacatttggcatcacaagtagagcacatcaatagaaaatgtcttttaaatttggttcaagatttggattgtaaagataatgaaatattgacatactctttacaaagccctctacatgtttaataaagacttacttgaaattg

SEQ ID NO: 116442 - DNA, 4461 bp, Homo sapiens
  Payload ID: 2721
  Gene Symbol: CEP128
  Gene Name: centrosomal protein 128kDa
  Uniprot ID: Q6ZU80
  ENST ID: ENST00000281129
  CDS Start-End: 172-3456
gtggtttggggaaagtgtaggggcaaccaaagatcatcggcttgactaggccctttgccctgaacctcatgaagaaatgataggaggcagacatatgtgcctaaaaagagcgttgagctcagagaagagcaactcggagttttgggggtgtgctttgatttgtgtacatcaatggcagaatcatccagcgaatcagatcacttccgctgtcgtgaccgattgagtccatgggctgccagatcaacgcacaggggaactcgaagtcttcctacagtagaagttaccgagaaggtcaacactataacaagtactttacaggataccagtcggaacctgcgacaagtggaccagatgcttggacgataccgagaatacagtaatggacaggcgggtgcgatagaacatttaaaagaaagcttggaacaatcaatcgaccaactccggagtcaacgtttattgagaaactcaggagggagaagtatttctgttacaagtttgagtgcaagtgaccttgatggtggcactgggtcagagctccatcattttccacctacctcacctctcaaggactatggggatccacagggtattaaacgaatgagatcaagaactggtgtccggtttgttcaagagactgatgatatgactcagcttcatggttttcatcagtctcttcgagacctcagcagtgaacaaattcgccttggagatgatttcaacagggagctttccagaaggagccggtcagatgccgaaacaaaaagggctttggaagaattgactgaaaaacttaatgaagcccagaaacaagaagtggtttcagatcgggtggagcggcggcttcaggaactggagagagagatgcgcacagaaagggagctggtggaaagacgccaggatcaactgggactcatgtccctgcagctacaggaggcactaaagaaacaagaagctaaagcagatgagcatgagggggcaataaaaaataagctaagacaaactgaaactgagaagaatcaacttgaacaggaattggagctatctcgaaggttattgaatcaatcagaaggcagccgagaaacacttttgcatcaggtagaagaactgcgtacacaacttacgaaagcagaaggtgatcgaaagggtttacagcatcaagtatctcagatttccaagcaacagtcaaactatcaggatgaacaaggggaggactggagatttaggagaggggttgagcgggaaaaacaggacctggagaagcaaatgtcagatttgagagtgcagctgaacttcagcgcaatggcatctgagttagaggaagtgaaacggtgcatggagagaaaagacaaggagaaagcacatttggcatcacaagtagagaatttaacacgtgaactggagaatggggaaaaacagcaactgcagatgttggatcgacttaaggagatccagaatcactttgacacatgtgaggccgagcgtaagcatgctgaccttcagatctcagagctgactcgccatgcggaggatgcaaccaagcaggctgagcggtacctcagtgagctccagcagtcagaggctctgaaagaggaggcggagaagaggagggaagacctgaaactgaaagctcaagaatccattaggcagtggaagcttaagcataagaagttagaacgagcgttggagaaacaatctgaaactgttgatgaactgacaggcaagaataatcagattttaaaagaaaaggatgaattgaaaacccagctgtatgcagcattacaacaaatagagaatcttcgaaaggaattgaatgatgtcctaacaaagcgtgcccttcaggaggaggagcttcactccaaggaggagaaattacgtgatattaagtctcatcaagctgaccttgaattggaagttaagaattccctggataccatccatagactggagagcgaattgaaaaagcagagtaagatccaaagccagatgaaagttgagaaagctcacttggaggaagaaattgcagagctcaagaagagccaggcccaggacaaagctaaacttcttgagatgcaagagtccatcaaggacctgagtgccatccgagcagatcttgctaataaattggctgaggaagagagagccaagaaagcagtgcttaaggacctttctgacctcactgcacaggcaaaatccagggatgaagaaacagctacaatcatcacacagttaaagctggaacgagatgtgcaccagagggagctgaaagatctcacatcatcattgcagagtgtgaaaacaaaacacgaacagaatatccaggagcttatgaagcactttaagaaagaaaagagtgaggctgagaatcatatcaggactctgaaggctgaaagtttagaagagaagaatatggctaaaattcatcgtggtcagctggagaagttgaaatcacagtgtgacagactgacagaggaattaacccagaatgaaaatgagaacaaaaaactgaagctaaaatatcaatgtttgaaggatcaactagaagaaagggaaaaacatataagcattgaagaggagcacttaaggaggatggaagaggccagattgcagctcaaggatcaacttctttgcttggagactgaacaggaatccattcttggtgtgataggaaaggaaattgatgcagcttgtaaaacattctccaaggactcagtggagaaattaaaagttttttcatctggtcctgatatacattatgacccacatcgctggttagcagaaagcaagactaaacttcagtggctctgtgaggaactgaaagagagagaaaacagagagaaaaatctgcgacaccagctgatgctctgcagacaacaactcaggaatttgactgaaaacaaggaatctgagttgcagtgtctctttcaacagatagaaaggcaggagcagcttctggatgaaatacatcgtgagaagagagatctactggaagagacccaaagaaaagatgaagaaatgggatctctgcaggaccgtgtaattgcattagaaacgagtacccaagtggccttggaccatctggagtctgtgcctgagaaactgagcctactagaagatttcaaagacttcagagattcctgcagttcatctgagagaactgatggaagatattccaaatacagggttcgcagaaattctcttcagcatcaccaagatgacaccaagtacagaaccaaaagtttcaaaggtgacagaacctttctggaaggttcccacactcgtgggttagatcactcatcctcttggcaggatcacagtcgcttcctgtctagtccaagattttcatacgtgaactcatttaccaaaagaactgttgctccagattcagcttcaaacaaggaagatgccacaatgaatggaacaagttcacaacccaaaaaagaggaatatgggagctaaaaaagcaaatgtaatttgttattttacatgagtatgttacaaataataacatctctattcttacagcaatttggcccagattatctaacagacatacctgcagctttggctctttggtattgccaaacattgacaaaagtgacaatactgttggtccttgtgaatggtaaaccaatccaaataatatcagatcatgaatgatgtgcagctaatttatttgcaacttatactagcacagaaagaatgatattttttcactttgtattttcctttttcaagtgtggtcagtcacattttcccaaccaaaatttggatttctaattgaggccttttaaaaattactggctaaaaagaaggaaaatgagtttcccttgaggcaaaagttgccagcactttagattcagggagcatttatatacaactgattttttgaaaaattttctccctaataaattatcatgtgttataacatgtggagatgtgcatatataacattagacagtccactttataaatgctcaggacttttatatctatcatcttaacagtccacaactgcataccgtagctgaaaattatttccaatcatccatttttaatagcaataaagaattcataaatgatatctgaactgtagagcactgtaaagaattcatagcacaatttatttatttgtctttttgtggccaaatatcctactgtgatcacttcagtcatatcctggaccgtctttggtttactgtgactaaaatcatagcaccaaactcctttgtccatgagatttatatataatcttgtataatttggtcctatctgcttctaccatcccaacttttttcatcaaagtgtctaagaacgtattccctttacacgctgatctcctagtggagaaggatttatattaaatgctaagtaatagtaaactttcaggaactgaatcctattgggtcatggattctgcatagacaagggcaataaagcaatacctttgtaatatgcattaca

SEQ ID NO: 116443 - DNA, 1823 bp, Homo sapiens
  Payload ID: 2721
  Gene Symbol: CEP128
  Gene Name: centrosomal protein 128kDa
  ENST ID: ENST00000554827
  CDS Start-End: 1-908
tccatcattttccacctacctcacctctcaaggactatggggatccacagggtattaaacgaatgagatcaagaactggtgtccggtttgttcaagagactgatgatatgactcagcttcatggttttcatcagtctcttcgagacctcagcagtgaacaaattcgccttggagatgatttcaacagggagctttccagaaggagccggtcagatgccgaaacaaaaagggctttggaagaattgactgaaaaacttaatgaagcccagaaacaagaagtggtttcagatcgggtggagcggcggcttcaggaactggagagagagatgcgcacagaaagggagctggtggaaagacgccaggatcaactgggactcatgtccctgcagctacaggaggcactaaagaaacaagaagctaaagcagatgagcatgagggggcaataaaaaataagctaagacaaactgaaactgagaagaatcaacttgaacaggaattggagctatctcgaaggttattgaatcaatcagaaggcagccgagaaacacttttgcatcaggtagaagaactgcgtacacaacttacgaaagcagaaggtgatcgaaagggtttacagcatcaagtatctcagatttccaagcaacagtcaaactatcaggatgaacaaggggaggactggagatttaggagaggggttgagcgggaaaaacaggacctggagaagcaaatgtcagatttgagagtgcagctgaacttcagcgcaatggcatctgagttagaggaagtgaaacggtgcatggagagaaaagacaaggagaaagcacatttggcatcacaagtagaggtgactttgctctttttaagtcatattcgaaatattttaattttatctcatggaattgcttaatgaaattttaatataaagatgtgttattttatgaactccagtgtgagcattgataatataaagttatattaatgactgatttacttatatgtagaaattcctatgggttcatttctctttcattcaggaccccaaagccaggaacctggatgattttcctttattattttacagagaaatcctttactatttttaaatttgaaaatatttttgttctaatagcaattgaaccctttctacagacagaagggaccttttttgtttgagagaacagtgaattattatttattttgcgggtgaaactggcagaatgcatagtgaaaaggtgttaccaataattcttctttggaaccataaaggttttcagacctctagttgttctgcatgaggtggaattgcaatgcctccattaatttagagttgtgtagcaatcatggatgatatggtaaccgtgaatggagtataactaggcagctaccatttcctgcttttatctagcatagatgaggtaattatcagtatatattaaaaatcaaaggaaaagacctcataaaaggaaatggtttaattgaaattacaattatgcaaattagattaaacatggatgacacatttggaaatagatatgtatcaatcctccctgtatctgtttttgtaagtgaagttgtgttctaatttcaagtatttccaaaattaaaatgaaaggtagaaaattagtgttaaaagcacctaattttatataacccaaaggaaatatttaatgttactcatctgtgtttctctttcatcttgtcagcacatcaatagaaaatgtcttttaaatttggttcaagatttggattgtaaagataatgaaatattgacatactctttacaaagccctctacatgtttaataaagacttacttgaaattg

SEQ ID NO: 116444 - DNA, 869 bp, Homo sapiens
  Payload ID: 2721
  Gene Symbol: CEP128
  Gene Name: centrosomal protein 128kDa
  ENST ID: ENST00000555529
  CDS Start-End: 333-869
cagagaaggaaggatcttctcatgcacagaggcaacaaatggcaactttctgagtcctcatctataaaatgagcataataacatcacctacttaattggatttggtgaggattcactgggtgagttcatgcaaagcgctgagaacaggaccccccgcccccgtggtttggggaaagtgtaggggcaaccaaagatcatcggcttgactaggccctttgccctgaacctcatgaagaaatgataggaggcagacatatgtgcctaaaaagagcgttgagctcagagaagagcaactcggagttttgggggtgtgctttgatttgtgtacatcaatggcagaatcatccagcgaatcagatcacttccgctgtcgtgaccgattgagtccatgggctgccagatcaacgcacaggggaactcgaagtcttcctacagtagaagttaccgagaaggtcaacactataacaagtactttacaggataccagtcggaacctgcgacaagtggaccagatgcttggacgataccgagaatacagtaatggacaggcgggtgcgatagaacatttaaaagaaagcttggaacaatcaatcgaccaactccggagtcaacgtttattgagaaactcaggagggagaagtatttctgttacaagtttgagtgcaagtgaccttgatggtggcactgggtcagagctccatcattttccacctacctcacctctcaaggactatggggatccacagggtattaaacgaatgagatcaagaactggtgtccggtttgttcaagagactgatgatatgactcagcttcatggttttcatcagtctcttcgagacctcagcagtgaacaaattcgccttgga

SEQ ID NO: 116445 - DNA, 4662 bp, Homo sapiens
  Payload ID: 2721
  Gene Symbol: CEP128
  Gene Name: centrosomal protein 128kDa
  Uniprot ID: Q6ZU80
  ENST ID: ENST00000555265
  CDS Start-End: 377-3661
caagcggcggcagcggggtcctgtactcttgctgtggctgggcggctagttcaagttgccatagctgcgagtctggggagagcacagtcggttgagtcgctgcgtttggtcagttgcaccttctgggtcactggtagccgcgggagccgggtggggcctaggcgatgatccggcattaaggagctgggatcatcctccgtctcaggtggtttggggaaagtgtaggggcaaccaaagatcatcggcttgactaggccctttgccctgaacctcatgaagaaatgataggaggcagacatatgtgcctaaaaagagcgttgagctcagagaagagcaactcggagttttgggggtgtgctttgatttgtgtacatcaatggcagaatcatccagcgaatcagatcacttccgctgtcgtgaccgattgagtccatgggctgccagatcaacgcacaggggaactcgaagtcttcctacagtagaagttaccgagaaggtcaacactataacaagtactttacaggataccagtcggaacctgcgacaagtggaccagatgcttggacgataccgagaatacagtaatggacaggcgggtgcgatagaacatttaaaagaaagcttggaacaatcaatcgaccaactccggagtcaacgtttattgagaaactcaggagggagaagtatttctgttacaagtttgagtgcaagtgaccttgatggtggcactgggtcagagctccatcattttccacctacctcacctctcaaggactatggggatccacagggtattaaacgaatgagatcaagaactggtgtccggtttgttcaagagactgatgatatgactcagcttcatggttttcatcagtctcttcgagacctcagcagtgaacaaattcgccttggagatgatttcaacagggagctttccagaaggagccggtcagatgccgaaacaaaaagggctttggaagaattgactgaaaaacttaatgaagcccagaaacaagaagtggtttcagatcgggtggagcggcggcttcaggaactggagagagagatgcgcacagaaagggagctggtggaaagacgccaggatcaactgggactcatgtccctgcagctacaggaggcactaaagaaacaagaagctaaagcagatgagcatgagggggcaataaaaaataagctaagacaaactgaaactgagaagaatcaacttgaacaggaattggagctatctcgaaggttattgaatcaatcagaaggcagccgagaaacacttttgcatcaggtagaagaactgcgtacacaacttacgaaagcagaaggtgatcgaaagggtttacagcatcaagtatctcagatttccaagcaacagtcaaactatcaggatgaacaaggggaggactggagatttaggagaggggttgagcgggaaaaacaggacctggagaagcaaatgtcagatttgagagtgcagctgaacttcagcgcaatggcatctgagttagaggaagtgaaacggtgcatggagagaaaagacaaggagaaagcacatttggcatcacaagtagagaatttaacacgtgaactggagaatggggaaaaacagcaactgcagatgttggatcgacttaaggagatccagaatcactttgacacatgtgaggccgagcgtaagcatgctgaccttcagatctcagagctgactcgccatgcggaggatgcaaccaagcaggctgagcggtacctcagtgagctccagcagtcagaggctctgaaagaggaggcggagaagaggagggaagacctgaaactgaaagctcaagaatccattaggcagtggaagcttaagcataagaagttagaacgagcgttggagaaacaatctgaaactgttgatgaactgacaggcaagaataatcagattttaaaagaaaaggatgaattgaaaacccagctgtatgcagcattacaacaaatagagaatcttcgaaaggaattgaatgatgtcctaacaaagcgtgcccttcaggaggaggagcttcactccaaggaggagaaattacgtgatattaagtctcatcaagctgaccttgaattggaagttaagaattccctggataccatccatagactggagagcgaattgaaaaagcagagtaagatccaaagccagatgaaagttgagaaagctcacttggaggaagaaattgcagagctcaagaagagccaggcccaggacaaagctaaacttcttgagatgcaagagtccatcaaggacctgagtgccatccgagcagatcttgctaataaattggctgaggaagagagagccaagaaagcagtgcttaaggacctttctgacctcactgcacaggcaaaatccagggatgaagaaacagctacaatcatcacacagttaaagctggaacgagatgtgcaccagagggagctgaaagatctcacatcatcattgcagagtgtgaaaacaaaacacgaacagaatatccaggagcttatgaagcactttaagaaagaaaagagtgaggctgagaatcatatcaggactctgaaggctgaaagtttagaagagaagaatatggctaaaattcatcgtggtcagctggagaagttgaaatcacagtgtgacagactgacagaggaattaacccagaatgaaaatgagaacaaaaaactgaagctaaaatatcaatgtttgaaggatcaactagaagaaagggaaaaacatataagcattgaagaggagcacttaaggaggatggaagaggccagattgcagctcaaggatcaacttctttgcttggagactgaacaggaatccattcttggtgtgataggaaaggaaattgatgcagcttgtaaaacattctccaaggactcagtggagaaattaaaagttttttcatctggtcctgatatacattatgacccacatcgctggttagcagaaagcaagactaaacttcagtggctctgtgaggaactgaaagagagagaaaacagagagaaaaatctgcgacaccagctgatgctctgcagacaacaactcaggaatttgactgaaaacaaggaatctgagttgcagtgtctctttcaacagatagaaaggcaggagcagcttctggatgaaatacatcgtgagaagagagatctactggaagagacccaaagaaaagatgaagaaatgggatctctgcaggaccgtgtaattgcattagaaacgagtacccaagtggccttggaccatctggagtctgtgcctgagaaactgagcctactagaagatttcaaagacttcagagattcctgcagttcatctgagagaactgatggaagatattccaaatacagggttcgcagaaattctcttcagcatcaccaagatgacaccaagtacagaaccaaaagtttcaaaggtgacagaacctttctggaaggttcccacactcgtgggttagatcactcatcctcttggcaggatcacagtcgcttcctgtctagtccaagattttcatacgtgaactcatttaccaaaagaactgttgctccagattcagcttcaaacaaggaagatgccacaatgaatggaacaagttcacaacccaaaaaagaggaatatgggagctaaaaaagcaaatgtaatttgttattttacatgagtatgttacaaataataacatctctattcttacagcaatttggcccagattatctaacagacatacctgcagctttggctctttggtattgccaaacattgacaaaagtgacaatactgttggtccttgtgaatggtaaaccaatccaaataatatcagatcatgaatgatgtgcagctaatttatttgcaacttatactagcacagaaagaatgatattttttcactttgtattttcctttttcaagtgtggtcagtcacattttcccaaccaaaatttggatttctaattgaggccttttaaaaattactggctaaaaagaaggaaaatgagtttcccttgaggcaaaagttgccagcactttagattcagggagcatttatatacaactgattttttgaaaaattttctccctaataaattatcatgtgttataacatgtggagatgtgcatatataacattagacagtccactttataaatgctcaggacttttatatctatcatcttaacagtccacaactgcataccgtagctgaaaattatttccaatcatccatttttaatagcaataaagaattcataaatgatatctgaactgtagagcactgtaaagaattcatagcacaatttatttatttgtctttttgtggccaaatatcctactgtgatcacttcagtcatatcctggaccgtctttggtttactgtgactaaaatcatagcaccaaactcctttgtccatgagatttatatataatcttgtataatttggtcctatctgcttctaccatcccaacttttttcatcaaagtgtctaagaacgtattccctttacacgctgatctcctagtggagaaggatttatattaaatgctaagtaatagtaaactttcaggaactgaatcctattgggtcatggattctgcatagacaagggcaataaagcaatacctttgtaatatgcat

SEQ ID NO: 116446 - DNA, 576 bp, Homo sapiens
  Payload ID: 2721
  Gene Symbol: CEP128
  Gene Name: centrosomal protein 128kDa
  ENST ID: ENST00000556042
  CDS Start-End: 194-576
ctttctacctccttattcagagaaggaaggatcttctcatgcacagaggcaacaaatggcaactttctgagtcctcatctataaaatgagcataataacatcacctacttaattggatttggtgaggattcactgggtgagttcatgcaaagcgctgagaacaggaccccccgcccccgatttgtgtacatcaatggcagaatcatccagcgaatcagatcacttccgctgtcgtgaccgattgagtccatgggctgccagatcaacgcacaggggaactcgaagtcttcctacagtagaagttaccgagaaggtcaacactataacaagtactttacaggataccagtcggaacctgcgacaagtggaccagatgcttggacgataccgagaatacagtaatggacaggcgggtgcgatagaacatttaaaagaaagcttggaacaatcaatcgaccaactccggagtcaacgtttattgagaaactcaggagggagaagtatttctgttacaagtttgagtgcaagtgaccttgatggtggcactgggtcagagctccatcattttccacctac

SEQ ID NO: 116447 - DNA, 729 bp, Homo sapiens
  Payload ID: 2721
  Gene Symbol: CEP128
  Gene Name: centrosomal protein 128kDa
  ENST ID: ENST00000554728
  CDS Start-End: 1-420
gaggagcacttaaggaggatggaagaggccagattgcagctcaaggatcaacttctttgcttggagactgaacaggaatccattcttggtgtgataggaaaggaaattgatgcagcttgtaaaacattctccaaggactcagtggagaaattaaaagttttttcatctggtcctgatatacattatgacccacatcgctggttagcagaaagcaagactaaacttcagtggctctgtgaggaactgaaagagagagaaaacagagagaaaaatctgcgacaccagctgatgctctgcagacaacaactcaggaatttgactgaaaacaaggaatctgagttgcagtgtctctttcaacagatagaaaggcaggagcagcttctggatgaaatacatcgtgagaagagaggtgtgtgttagttgttctttcatttttctttgtttatatttatggaatcctaatcctaggattggaaaaaaacctacttctgttgcatcccctttggactatttccaagcccatctccttttcttgtctttgtcttcttatctttcttcatttctgggacgagaagagaaaattcttcagccacagcattcctcctgtgtatatgataactgcatttactggctgtgtgcaggaattaattgataagacatactgcttctgtcttagtaaaatgctgatgtttacatttacttcagtaaaatacgtcttagttcattcaa

SEQ ID NO: 116448 - DNA, 3774 bp, Homo sapiens
  Payload ID: 2721
  Gene Symbol: CEP128
  Gene Name: centrosomal protein 128kDa
  ENST ID: ENST00000554502
  CDS Start-End: 1-2039
tagaagaactgcgtacacaacttacgaaagcagaaggtgatcgaaagggtttacagcatcaagtatctcagatttccaagcaacagtcaaactatcaggatgaacaaggggaggactggagatttaggagaggggttgagcgggaaaaacaggacctggagaagcaaatgtcagatttgagagtgcagctgaacttcagcgcaatggcatctgagttagaggaagtgaaacggtgcatggagagaaaagacaaggagaaagcacatttggcatcacaagtagagaatttaacacgtgaactggagaatggggaaaaacagcaactgcagatgttggatcgacttaaggagatccagaatcactttgacacatgtgaggccgagcgtaagcatgctgaccttcagatctcagagctgactcgccatgcggaggatgcaaccaagcaggctgagcggtacctcagtgagctccagcagtcagaggctctgaaagaggaggcggagaagaggagggaagacctgaaactgaaagctcaagaatccattaggcagtggaagcttaagcataagaagttagaacgagcgttggagaaacaatctgaaactgttgatgaactgacaggcaagaataatcagattttaaaagaaaaggatgaattgaaaacccagctgtatgcagcattacaacaaatagagaatcttcgaaaggaattgaatgatgtcctaacaaagcgtgcccttcaggaggaggagcttcactccaaggaggagaaattacgtgatattaagtctcatcaagctgaccttgaattggaagttaagaattccctggataccatccatagactggagagcgaattgaaaaagcagagtaagatccaaagccagatgaaagttgagaaagctcacttggaggaagaaattgcagagctcaagaagagccaggcccaggacaaagctaaacttcttgagatgcaagagtccatcaaggacctgagtgccatccgagcagatcttgctaataaattggctgaggaagagagagccaagaaagcagtgcttaaggacctttctgacctcactgcacaggcaaaatccagggatgaagaaacagctacaatcatcacacagttaaagctggaacgagatgtgcaccagagggagctgaaagatctcacatcatcattgcagagtgtgaaaacaaaacacgaacagaatatccaggagcttatgaagcactttaagaaagaaaagagtgaggctgagaatcatatcaggactctgaaggctgaaagtttagaagagaagaatatggctaaaattcatcgtggtcagctggagaagttgaaatcacagtgtgacagactgacagaggaattaacccagaatgaaaatgagaacaaaaaactgaagctaaaatatcaatgtttgaaggatcaactagaagaaagggaaaaacatataagcattgaagaggagcacttaaggaggatggaagaggccagattgcagctcaaggatcaacttctttgcttggagactgaacaggaatccattcttggtgtgataggaaaggaaattgatgcagcttgtaaaacattctccaaggactcagtggagaaattaaaagttttttcatctggtcctgatatacattatgacccacatcgctggttagcagaaagcaagactaaacttcagtggctctgtgaggaactgaaagagagagaaaacagagagaaaaatctgcgacaccagctgatgctctgcagacaacaactcaggaatttgactgaaaacaaggaatctgagttgcagtgtctctttcaacagatagaaaggcaggagcagcttctggatgaaatacatcgtgagaagagagatctactggaagagacccaaagaaaagatgaagaaatgggatctctgcaggaccgtgtaattgcattagaaacgagtacccaagtggccttggaccatctggagtctgtgcctgagaaactgagcctactagaagatttcaaagacttcagaaggtgaggtttcaccatgttgcccaggctggtctcgaactcctggactagagctatcctcccaccttggcctcctaaagtgctgggattacaggattcctgcagttcatctgagagaactgatggaagatattccaaatacagggttcgcagaaattctcttcagcatcaccaagatgacaccaagtacagaaccaaaagtttcaaaggtgacagaacctttctggaaggttcccacactcgtgggttagatcactcatcctcttggcaggatcacagtcgcttcctgtctagtccaagattttcatacgtgaactagggtgttttaaatagcatttccaggaaaggaaggctggaaggctgctgtcaaccacactacactgcttaaatctcgtggagccatgatggtgcatcaggttttgctatgcctatcttctctgcaacccaagagagggaacaaagagcagccaggtgggattagatgctgggggcttaagcaataactgactccattttctgtttctacactccagccagtgccaagtgattttttaaaaatttaaatacttttctgccctatcaaatacagggtatacactactgaaagaacgctctgctagtaaaaagtgtttattgattcaagcagaaaaaaggggggaaaaaactgtgggtgtcagatgaagctgaagggaagtatccaggaagagagggaggaatggggagcttttcttttgagtgtcctattaaaatgtgtgagtggaagttgggggtggatttcatgagtaaatatggaattttgccaccaaattctttcctccagagctaatattctcatgggatgttaatattaatacaaggaaaaaggccctgggtgaagaaaaattattttccccttcaggggcagagttctctcaggacgacagtgaggttaaagagttccagaaaatgctagtagaactttaagcacgctatcattaacagacagaaaaacagactacaacctactggattcattttggaaagtagaaaaaaggaatctggtaaaatcagccaaagcaaggacctttccccctccttagaactcgctaagctttccatggtgtgtgggccttttagttccactcattattcaggcctaattcaggtcatcaaaatagaaatgcatgggacaggtgactgacatgactgcatcgtggtttagatgtatagataacacggggaggtgctttacattttaagactttgttcataattcttttatttatggtttctctgaatcattcttttggaacattctaaaagagccagaggaaaaaaatggaactttttctcaagggacttgacttagtggatagctaaatgtccagtttcaaaagcttatccttttgaaatgcttttatacttataaaagcccaaagaaaccttaatatgggccacataactataatgtaatttttccaaggtaggaaaggcagtaatactgtactattagaatatatggattttcataagagcagctgttgtttcactaaggtttacattattttaggtcctagttttctgtttggaggtgtattaatgagttccttggttaatttattcccattctctatatttctgattcttaattgtatgatgtggtttatattcattgttttgacgtgataggaatgccaacaatgtgcctttggttttcttatgcttaaaaaataaaaaaataaataaacattaaatgtaaaatc

SEQ ID NO: 116449 - DNA, 545 bp, Homo sapiens
  Payload ID: 2721
  Gene Symbol: CEP128
  Gene Name: centrosomal protein 128kDa
  ENST ID: ENST00000556981
  CDS Start-End: 450-545
atcctttctacctccttattcagagaaggaaggatcttctcatgcacagaggcaacaaatggcaactttctgagtcctcatctataaaatgagcataataacatcacctacttaattggatttggtgaggattcactgggtgagttcatgcaaagcgctgagaacaggaccccccgcccccagtgaggagatgacacctagactgaagtagcagcagtaatgagctgacagcctcacatctacttttggtgtgccgtgaataagccatatgatcttaggtggtttggggaaagtgtaggggcaaccaaagatcatcggcttgactaggccctttgccctgaacctcatgaagaaatgataggaggcagacatatgtgcctaaaaagagcgttgagctcagagaagagcaactcggagttttgggggtgtgctttgatttgtgtacatcaatggcagaatcatccagcgaatcagatcacttccgctgtcgtgaccgattgagtccatgggctgccagatcaacgcacaggggaactcgaagtctt

SEQ ID NO: 116450 - DNA, 735 bp, Homo sapiens
  Payload ID: 2721
  Gene Symbol: CEP128
  Gene Name: centrosomal protein 128kDa
  ENST ID: ENST00000556061
  CDS Start-End: 1-481
agatctactggaagagacccaaagaaaagatgaagaaatgggatctctgcaggaccgtgtaattgcattagaaacgagtacccaagtggccttggaccatctggagtctgtgcctgagaaactgagcctactagaagatttcaaagacttcagagattcctgcagttcatctgagagaactgatggaagatattccaaatacagggttcgcagaaattctcttcagcatcaccaagatgacaccaagtacagaaccaaaagtttcaaaggtgacagaacctttctggaaggttcccacactcgtgggttagatcactcatcctcttggcaggatcacagtcgcttcctgtctagtccaagattttcatacgtgaactcatttaccaaaagaactgttgctccagattcagcttcaaacaaggaagatgccacaatgaatggaacaagttcacaacccaaaaaagaggaatatgggagctaaaaaagcaaatgtatccgagctgtgattcagtcctgaggctcacccaagtggaggtcttaaagccatttccaaagatgcttgattaactactaaaggttacttcccacctcctccttctaacagactatgccaggactctgcccattcatcaggatcatcatcaagacatccaattaaatcagggcctatagtatagttcttctgtttggcttgaaggacagaagtagtatttgattataaaagttgcaaatgtc

SEQ ID NO: 116451 - DNA, 528 bp, Homo sapiens
  Payload ID: 2721
  Gene Symbol: CEP128
  Gene Name: centrosomal protein 128kDa
  ENST ID: ENST00000557411
  CDS Start-End: 469-528
gcgagtctggggagagcacagtcggttgagtcgctgcgtttggtcagttgcaccttctgggtcactggtagccgcgggagccgggtggggcctaggcgatgatccggcattaaggagctgggatcatcctccgtctcaggtggtttggggaaagtgtaggggcaaccaaagatcatcggcttgactaggccctttgccctgaacctcatgaagaaatgataggaggcagacatatgtgcctaaaaagagcgttgagctcagagaagagcaactcggagttttgggggtgtgctttaatcatccagcgaatcagatcacttccgctgtcgtgaccgattgagtccatgggctgccagatcaacgcacaggggaactcgaagtcttcctacagtagaagttaccgagaaggtcaacactataacaagtactttacaggataccagtcggaacctgcgacaagtggaccagatgcttggacgataccgagaatacagtaatggacaggcgggtgcgatagaacatgtgaga

SEQ ID NO: 116452 - DNA, 3673 bp, Homo sapiens
  Payload ID: 2722
  Gene Symbol: CEP131
  Gene Name: centrosomal protein 131kDa
  Uniprot ID: Q9UPN4
  ENST ID: ENST00000269392
  CDS Start-End: 249-3500
gacgggctggggaggtggtgccaggctggttgctagctgccgccgctgctcaccccggccgtccggccgcttcattgtcaccgggcctcggggcagtgttgggggtggcggggcgccaggtcgccgacccgaggtttgggcgcgactggttccgcatcccctccccgccggccgaatctgcaggccccgcgcgccaggcaggcttcgcggctgcgcccccggcccgcgcaggacctgccttgtccaccatgaaaggcacccgggccatcggcagcgtcccggagcgcagcccagcaggtgtggacctgagtctgacaggtctccctccgcctgtgtcccggcgtcctggcagtgccgccaccaccaagcccatcgtccgctctgtctccgtggtcacaggcagcgagcagaagaggaaggtgctggaggccacagggcctgggggctcccaggccatcaacaaccttagaagatccaacagcaccacgcaggtcagccagcctcggagcggctcccccaggccaacggagcccacagacttcctgatgctcttcgagggcagccccagtgggaaaaagaggcctgccagcctgagcacagcccccagcgagaagggagccacctggaacgtcctggatgaccagccccggggcttcaccttgccatccaatgcccggagttccagtgcccttgactcaccagcgggcccgcggaggaaagaatgcaccgtggccctggcccccaacttcactgctaacaacaggagcaacaagggagcagtgggcaactgcgtcaccaccatggtgcacaaccgctacaccccctcggagagggcgcctccgctcaagagctccaaccagactgccccctccctcaacaacatcatcaaggcagccacctgtgagggcagtgagagcagcggctttgggaagctgccgaagaatgtctccagtgccacccactcagcccggaacaatactgggggcagcacgggcttgcccaggcggaaggaggtgacggaggaggaggctgagaggtttatccaccaggtgaaccaggccactgtcaccatccagcgctggtaccggcaccaggtgcagcggcgcggagcaggagctgcccgcctggagcacttgcttcaggccaagcgggaggagcagcggcagcggtcaggcgaggggaccctcttggacctgcaccagcagaaagaggcagccaggaggaaggcccgggaggagaaggcacgccaagccaggcgagcagccattcaggagctgcaacagaaacgagccctgagagcccagaaggcgagcactgccgagcgtgggccacctgagaatcccagggagaccagagtgccaggaatgcggcagcctgctcaggagctgtcccccacaccaggcggcactgcccaccaggccctcaaggccaacaatactggtggtggcctccctgctgcaggccccggagaccgctgcctgcccacctccgactcatccccagaaccacagcagcctccagaggacaggacgcaggacgttcttgcccaggatgcagctggggacaacctggagatgatggccccgagcagggggagcgccaagtccagggggccactggaggagctgctgcacacactgcagctgctggagaaggagccggacgtgctgccccgccccaggacccatcacaggggcagatacgcctgggccagcgaggtgaccacggaggatgacgccagctctctgacagctgacaacttggagaaatttggaaaactcagtgcgttccccgaacctcctgaggatgggacgctgctatcggaggccaagctacaaagcatcatgagcttcttggacgagatggagaagtctgggcaggaccagctggactcccagcaggaggggtgggtgccggaggcggggccggggcccctggagctggggtccgaggtgagcacgtctgtgatgcggctgaagctggaggtggaggagaagaagcaggccatgctgctgctgcagagagcgctggcgcagcagcgagacctcacggcccggcgggtcaaggagacagagaaggcgctgagccggcagctgcagcggcagagggagcactacgaggccaccatccagcggcacttggccttcattgaccagctgattgaggacaagaaggtcctgagtgaaaagtgcgaggctgtggtggccgagctgaagcaggaggaccagagatgcaccgagcgtgtggcccaggcacaggcgcagcacgagctggagattaaaaaactcaaagaattaatgagcgccaccgagaaagcccgccgggagaagtggatcagtgagaaaaccaagaagatcaaggaggtcactgtccgaggtctggagcccgagatccagaagctgattgcaaggcacaagcaggaagtgcggaggctcaagagcctgcacgaggcggagctgctgcagtcggatgagcgggcctcgcagcgctgcctgcgccaggccgaggagctgcgggagcagctggagcgggagaaggaggcgctgggccagcaggagcgcgaacgtgctcggcagcggttccagcagcacctggagcaggagcagtgggcgctgcagcagcaacggcagcggctgtacagtgaggtggctgaggagagggagcggctgggccagcaggcagccaggcagcgggcggagctggaagagctgaggcagcagctggaggagagcagctctgcactgacccgagccctgagggctgagtttgagaagggcagggaggagcaggagcgccggcaccagatggagctgaataccctgaagcagcagctggagctggagaggcaggcgtgggaggccggccgcaccaggaaggaggaggcgtggctgctgaaccgggaacaggagctgagggaagaaatccggaaaggccgggacaaggagattgagctggtcattcaccggctggaggccgacatggcgctggccaaggaggagagtgagaaggctgccgagagccgcatcaagcgcttacgggacaagtacgaggccgagctctccgagctggagcagtcggagcggaagcttcaggagcggtgctcggagctgaagggccagcttggggaggccgagggcgagaatctgcgtctgcagggccttgtgcggcagaaggagcgggcgctggaggatgcgcaggcggtgaacgagcagctttctagcgagcgcagcaacctggcccaggtgatccgccaggagttcgaggaccggctggcagcctctgaggaggagacgcggcaggccaaggccgagctggccacgctgcaggcccgccagcagctggagctggaggaggtgcaccggagggtgaagacagccctcgcgaggaaggaggaggccgtgagcagcctccggacacaacatgaggctgcggtgaagcgggccgaccacctggaggagctgctggagcagcacaggaggcccacgccaagtaccaagtgaccagggatgccgggaacactgtcgaagaacggaaggcagaggacagaggctggacgtgggcccagaggcccacagggacgcccacctgccccccacagaggctggtggttgagatgcccacggctaagcacctgtggctgcattttaacagtaaaggaggccgttgttttcag

SEQ ID NO: 116453 - DNA, 3505 bp, Homo sapiens
  Payload ID: 2722
  Gene Symbol: CEP131
  Gene Name: centrosomal protein 131kDa
  Uniprot ID: Q9UPN4
  ENST ID: ENST00000374782
  CDS Start-End: 195-3329
ccggccgtccggccgcttcattgtcaccgggcctcggggcagtgttgggggtggcggggcgccaggtcgccgacccgaggtttgggcgcgactggttccgcatcccctccccgccggccgaatctgcaggccccgcgcgccaggcaggcttcgcggctgcgcccccggcccgcgcaggacctgccttgtccaccatgaaaggcacccgggccatcggcagcgtcccggagcgcagcccagcaggtgtggacctgagtctgacaggtctccctccgcctgtgtcccggcgtcctggcagtgccgccaccaccaagcccatcgtccgctctgtctccgtggtcacaggcagcgagcagaagaggaaggtgctggaggccacagggcctgggggctcccaggccatcaacaaccttagaagatccaacagcaccacgcaggtcagccagcctcggagcggctcccccaggccaacggagcccacagacttcctgatgctcttcgagggcagccccagtgggaaaaagaggcctgccagcctgagcacagcccccagcgagaagggagccacctggaacgtcctggatgaccagccccggggcttcaccttgccatccaatgcccggagttccagtgcccttgactcaccagcgggcccgcggaggaaagaatgcaccgtggccctggcccccaacttcactgctaacaacaggagcaacaagggagcagtgggcaactgcgtcaccaccatggtgcacaaccgctacaccccctcggagagggcgcctccgctcaagagctccaaccagactgccccctccctcaacaacatcatcaaggcagccacctgtgagggcagtgagagcagcggctttgggaagctgccgaagaatgtctccagtgccacccactcagcccggaacaatactgggggcagcacgggcttgcccaggcggaaggaggtgacggaggaggaggctgagaggtttatccaccaggtgaaccaggccactgtcaccatccagcgctggtaccggcaccaggtgcagcggcgcggagcaggagctgcccgcctggagcacttgcttcaggccaagcgggaggagcagcggcagcggtcaggcgaggggaccctcttggacctgcaccagcagaaagaggcagccaggaggaaggcccgggaggagaaggcacgccaagccaggcgagcagccattcaggagctgcaacagaaacgagccctgagagcccagaaggcgagcactgccgagcgtgggccacctgagaatcccagggagaccagagtgccaggaatgcggcagcctgctcaggagctgtcccccacaccaggcggcactgcccaccaggccctcaaggccaacaatactggtggtggcctccctgctgcaggccccggagaccgctgcctgcccacctccgactcatccccagaaccacagcagcctccagaggacaggacgcaggacgttcttgcccaggatgcagctggggacaacctggagatgatggccccgagcagggggagcgccaagtccagggggccactggaggagctgctgcacacactgcagctgctggagaaggagccggacgtgctgccccgccccaggacccatcacaggggcagatacgcctgggccagcgaggaggatgacgccagctctctgacagctgacaacttggagaaatttggaaaactcagtgcgttccccgaacctcctgaggatgggacgctgctatcggaggccaagctacaaagcatcatgagcttcttggacgagatggagaagtctgggcaggaccagctggactcccagcaggaggggtgggtgccggaggcggggccggggcccctggagctggggtccgaggtgagcacgtctgtgatgcggctgaagctggaggtggaggagaagaagcaggccatgctgctgctgcagagagcgctggcgcagcagcgagacctcacggcccggcgggtcaaggagacagagaaggcgctgagccggcagctgcagcggcagagggagcactacgaggccaccatccagcggcacttggccttcattgaccagctgattgaggacaagaaggtcctgagtgaaaagtgcgaggctgtggtggccgagctgaagcaggaggaccagagatgcaccgagcgtgtggcccaggcacaggcgcagcacgagctggagattaaaaaactcaaagaattaatgagcgccaccgagaaagcccgccgggagaagtggatcagtgagaaaaccaagaagatcaaggaggtcactgtccgaggtctggagcccgagatccagaagctgattgcaaggcacaagcaggaagtgcggaggctcaagagcctgcacgaggcggagctgctgcagtcggatgagcgggcctcgcagcgctgcctgcgccaggccgaggagctgcgggagcagctggagcgggagaaggaggcgctgggccagcaggagcgcgaacgtgctcggcagcggcagcgggcggagctggaagagctgaggcagcagctggaggagagcagctctgcactgacccgagccctgagggctgagtttgagaagggcagggaggagcaggagcgccggcaccagatggagctgaataccctgaagcagcagctggagctggagaggcaggcgtgggaggccggccgcaccaggaaggaggaggcgtggctgctgaaccgggaacaggagctgagggaagaaatccggaaaggccgggacaaggagattgagctggtcattcaccggctggaggccgacatggcgctggccaaggaggagagtgagaaggctgccgagagccgcatcaagcgcttacgggacaagtacgaggccgagctctccgagctggagcagtcggagcggaagcttcaggagcggtgctcggagctgaagggccagcttggggaggccgagggcgagaatctgcgtctgcagggccttgtgcggcagaaggagcgggcgctggaggatgcgcaggcggtgaacgagcagctttctagcgagcgcagcaacctggcccaggtgatccgccaggagttcgaggaccggctggcagcctctgaggaggagacgcggcaggccaaggccgagctggccacgctgcaggcccgccagcagctggagctggaggaggtgcaccggagggtgaagacagccctcgcgaggaaggaggaggccgtgagcagcctccggacacaacatgaggctgcggtgaagcgggccgaccacctggaggagctgctggagcagcacaggaggcccacgccaagtaccaagtgaccagggatgccgggaacactgtcgaagaacggaaggcagaggacagaggctggacgtgggcccagaggcccacagggacgcccacctgccccccacagaggctggtggttgagatgcccacggctaagcacctgtggctgcattttaacagtaaaggaggccgttgttttcagcgc

SEQ ID NO: 116454 - DNA, 3543 bp, Homo sapiens
  Payload ID: 2722
  Gene Symbol: CEP131
  Gene Name: centrosomal protein 131kDa
  Uniprot ID: Q9UPN4
  ENST ID: ENST00000450824
  CDS Start-End: 180-3422
cttcattgtcaccgggcctcggggcagtgttgggggtggcggggcgccaggtcgccgacccgaggtttgggcgcgactggttccgcatcccctccccgccggccgaatctgcaggccccgcgcgccaggcaggcttcgcggctgcgcccccggcccgcgcaggacctgccttgtccaccatgaaaggcacccgggccatcggcagcgtcccggagcgcagcccagcaggtgtggacctgagtctgacaggtctccctccgcctgtgtcccggcgtcctggcagtgccgccaccaccaagcccatcgtccgctctgtctccgtggtcacaggcagcgagcagaagaggaaggtgctggaggccacagggcctgggggctcccaggccatcaacaaccttagaagatccaacagcaccacgcaggtcagccagcctcggagcggctcccccaggccaacggagcccacagacttcctgatgctcttcgagggcagccccagtgggaaaaagaggcctgccagcctgagcacagcccccagcgagaagggagccacctggaacgtcctggatgaccagccccggggcttcaccttgccatccaatgcccggagttccagtgcccttgactcaccagcgggcccgcggaggaaagaatgcaccgtggccctggcccccaacttcactgctaacaacaggagcaacaagggagcagtgggcaactgcgtcaccaccatggtgcacaaccgctacaccccctcggagagggcgcctccgctcaagagctccaaccagactgccccctccctcaacaacatcatcaaggcagccacctgtgagggcagtgagagcagcggctttgggaagctgccgaagaatgtctccagtgccacccactcagcccggaacaatactgggggcagcacgggcttgcccaggcggaaggaggtgacggaggaggaggctgagaggtttatccaccaggtgaaccaggccactgtcaccatccagcgctggtaccggcaccaggtgcagcggcgcggagcaggagctgcccgcctggagcacttgcttcaggccaagcgggaggagcagcggcagcggtcaggcgaggggaccctcttggacctgcaccagcagaaagaggcagccaggaggaaggcccgggaggagaaggcacgccaagccaggcgagcagccattcaggagctgcaacagaaacgagccctgagagcccagaaggcgagcactgccgagcgtgggccacctgagaatcccagggagaccagagtgccaggaatgcggcagcctgctcaggagctgtcccccacaccaggcggcactgcccaccaggccctcaaggccaacaatactggtggtggcctccctgctgcaggccccggagaccgctgcctgcccacctccgactcatccccagaaccacagcagcctccagaggacaggacgcaggacgttcttgcccaggatgcagctggggacaacctggagatgatggccccgagcagggggagcgccaagtccagggggccactggaggagctgctgcacacactgcagctgctggagaaggagccggacgtgctgccccgccccaggacccatcacaggggcagatacgcctgggccagcgaggaggatgacgccagctctctgacagctgacaacttggagaaatttggaaaactcagtgcgttccccgaacctcctgaggatgggacgctgctatcggaggccaagctacaaagcatcatgagcttcttggacgagatggagaagtctgggcaggaccagctggactcccagcaggaggggtgggtgccggaggcggggccggggcccctggagctggggtccgaggtgagcacgtctgtgatgcggctgaagctggaggtggaggagaagaagcaggccatgctgctgctgcagagagcgctggcgcagcagcgagacctcacggcccggcgggtcaaggagacagagaaggcgctgagccggcagctgcagcggcagagggagcactacgaggccaccatccagcggcacttggccttcattgaccagctgattgaggacaagaaggtcctgagtgaaaagtgcgaggctgtggtggccgagctgaagcaggaggaccagagatgcaccgagcgtgtggcccaggcacaggcgcagcacgagctggagattaaaaaactcaaagaattaatgagcgccaccgagaaagcccgccgggagaagtggatcagtgagaaaaccaagaagatcaaggaggtcactgtccgaggtctggagcccgagatccagaagctgattgcaaggcacaagcaggaagtgcggaggctcaagagcctgcacgaggcggagctgctgcagtcggatgagcgggcctcgcagcgctgcctgcgccaggccgaggagctgcgggagcagctggagcgggagaaggaggcgctgggccagcaggagcgcgaacgtgctcggcagcggttccagcagcacctggagcaggagcagtgggcgctgcagcagcaacggcagcggctgtacagtgaggtggctgaggagagggagcggctgggccagcaggcagccaggcagcgggcggagctggaagagctgaggcagcagctggaggagagcagctctgcactgacccgagccctgagggctgagtttgagaagggcagggaggagcaggagcgccggcaccagatggagctgaataccctgaagcagcagctggagctggagaggcaggcgtgggaggccggccgcaccaggaaggaggaggcgtggctgctgaaccgggaacaggagctgagggaagaaatccggaaaggccgggacaaggagattgagctggtcattcaccggctggaggccgacatggcgctggccaaggaggagagtgagaaggctgccgagagccgcatcaagcgcttacgggacaagtacgaggccgagctctccgagctggagcagtcggagcggaagcttcaggagcggtgctcggagctgaagggccagcttggggaggccgagggcgagaatctgcgtctgcagggccttgtgcggcagaaggagcgggcgctggaggatgcgcaggcggtgaacgagcagctttctagcgagcgcagcaacctggcccaggtgatccgccaggagttcgaggaccggctggcagcctctgaggaggagacgcggcaggccaaggccgagctggccacgctgcaggcccgccagcagctggagctggaggaggtgcaccggagggtgaagacagccctcgcgaggaaggaggaggccgtgagcagcctccggacacaacatgaggctgcggtgaagcgggccgaccacctggaggagctgctggagcagcacaggaggcccacgccaagtaccaagtgaccagggatgccgggaacactgtcgaagaacggaaggcagaggacagaggctggacgtgggcccagaggcccacagggacgcccacctgccccccacagaggctggtggttgagatgcccac

SEQ ID NO: 116455 - DNA, 3444 bp, Homo sapiens
  Payload ID: 2722
  Gene Symbol: CEP131
  Gene Name: centrosomal protein 131kDa
  ENST ID: ENST00000575907
  CDS Start-End: 180-3323
cttcattgtcaccgggcctcggggcagtgttgggggtggcggggcgccaggtcgccgacccgaggtttgggcgcgactggttccgcatcccctccccgccggccgaatctgcaggccccgcgcgccaggcaggcttcgcggctgcgcccccggcccgcgcaggacctgccttgtccaccatgaaaggcacccgggccatcggcagcgtcccggagcgcagcccagcaggtgtggacctgagtctgacaggtctccctccgcctgtgtcccggcgtcctggcagtgccgccaccaccaagcccatcgtccgctctgtctccgtggtcacaggcagcgagcagaagaggaaggtgctggaggccacagggcctgggggctcccaggccatcaacaaccttagaagatccaacagcaccacgcaggtcagccagcctcggagcggctcccccaggccaacggagcccacagacttcctgatgctcttcgagggcagccccagtgggaaaaagaggcctgccagcctgagcacagcccccagcgagaagggagccacctggaacgtcctggatgaccagccccggggcttcaccttgccatccaatgcccggagttccagtgcccttgactcaccagcgggcccgcggaggaaagaatgcaccgtggccctggcccccaacttcactgctaacaacaggagcaacaagggagcagtgggcaactgcgtcaccaccatggtgcacaaccgctacaccccctcggagagggcgcctccgctcaagagctccaaccagactgccccctccctcaacaacatcatcaaggcagccacctgtgagggcagtgagagcagcggctttgggaagctgccgaagaatgtctccagtgccacccactcagcccggaacaatactgggggcagcacgggcttgcccaggcggaaggaggtgacggaggaggaggctgagaggtttatccaccaggtgaaccaggccactgtcaccatccagcgctggtaccggcaccaggtgcagcggcgcggagcaggagctgcccgcctggagcacttgcttcaggccaagcgggaggagcagcggcagcggtcaggcgaggggaccctcttggacctgcaccagcagaaagaggcagccaggaggaaggcccgggaggagaaggcacgccaagccaggcgagcagccattcaggagctgcaacagaaacgagccctgagagcccagaaggcgagcactgccgagcgtgggccacctgagaatcccagggagaccagagtgccaggaatgcggcagcctgctcaggagctgtcccccacaccaggcggcactgcccaccaggccctcaaggccaacaatactggtggtggcctccctgctgcaggccccggagaccgctgcctgcccacctccgactcatccccagaaccacagcagcctccagaggacaggacgcaggacgttcttgcccaggatgcagctggggacaacctggagatgatggccccgagcagggggagcgccaagtccagggggccactggaggagctgctgcacacactgcagctgctggagaaggagccggacgtgctgccccgccccaggacccatcacaggggcagatacgcctgggccagcgaggtgaccacggaggatgacgccagctctctgacagctgacaacttggagaaatttggaaaactcagtgcgttccccgaacctcctgaggatgggacgctgctatcggaggccaagctacaaagcatcatgagcttcttggacgagatggagaagtctgggcaggaccagctggactcccagcaggaggggtgggtgccggaggcggggccggggcccctggagctggggtccgaggtgagcacgtctgtgatgcggctgaagctggaggtggaggagaagaagcaggccatgctgctgctgcagagagcgctggcgcagcagcgagacctcacggcccggcgggtcaaggagacagagaaggcgctgagccggcagctgcagcggcagagggagcactacgaggccaccatccagcggcacttggccttcattgaccagctgattgaggacaagaaggtcctgagtgaaaagtgcgaggctgtggtggccgagctgaagcaggaggaccagagatgcaccgagcgtgtggcccaggcacaggcgcagcacgagctggagattaaaaaactcaaagaattaatgagcgccaccgagaaagcccgccgggagaagtggatcagtgagaaaaccaagaagatcaaggaggtcactgtccgaggtctggagcccgagatccagaagctgattgcaaggcacaagcaggaagtgcggaggctcaagagcctgcacgaggcggagctgctgcagtcggatgagcgggcctcgcagcgctgcctgcgccaggccgaggagctgcgggagcagctggagcgggagaaggaggcgctgggccagcaggagcgcgaacgtgctcggcagcggcagcgggcggagctggaagagctgaggcagcagctggaggagagcagctctgcactgacccgagccctgagggctgagtttgagaagggcagggaggagcaggagcgccggcaccagatggagctgaataccctgaagcagcagctggagctggagaggcaggcgtgggaggccggccgcaccaggaaggaggaggcgtggctgctgaaccgggaacaggagctgagggaagaaatccggaaaggccgggacaaggagattgagctggtcattcaccggctggaggccgacatggcgctggccaaggaggagagtgagaaggctgccgagagccgcatcaagcgcttacgggacaagtacgaggccgagctctccgagctggagcagtcggagcggaagcttcaggagcggtgctcggagctgaagggccagcttggggaggccgagggcgagaatctgcgtctgcagggccttgtgcggcagaaggagcgggcgctggaggatgcgcaggcggtgaacgagcagctttctagcgagcgcagcaacctggcccaggtgatccgccaggagttcgaggaccggctggcagcctctgaggaggagacgcggcaggccaaggccgagctggccacgctgcaggcccgccagcagctggagctggaggaggtgcaccggagggtgaagacagccctcgcgaggaaggaggaggccgtgagcagcctccggacacaacatgaggctgcggtgaagcgggccgaccacctggaggagctgctggagcagcacaggaggcccacgccaagtaccaagtgaccagggatgccgggaacactgtcgaagaacggaaggcagaggacagaggctggacgtgggcccagaggcccacagggacgcccacctgccccccacagaggctggtggttgagatgcccac

SEQ ID NO: 116456 - DNA, 1747 bp, Homo sapiens
  Payload ID: 2722
  Gene Symbol: CEP131
  Gene Name: centrosomal protein 131kDa
  ENST ID: ENST00000573053
  CDS Start-End: 1-1575
ctggggtccgaggtgagcacgtctgtgatgcggctgaagctggaggtggaggagaagaagcaggccatgctgctgctgcagagagcgctggcgcagcagcgagacctcacggcccggcgggtcaaggagacagagaaggcgctgagccggcagctgcagcggcagagggagcactacgaggccaccatccagcggcacttggccttcattgaccagctgattgaggacaagaaggtcctgagtgaaaagtgcgaggctgtggtggccgagctgaagcaggaggaccagagatgcaccgagcgtgtggcccaggcacaggcgcagcacgagctggagattaaaaaactcaaagaattaatgagcgccaccgagaaagcccgccgggagaagtggatcagtgagaaaaccaagaagatcaaggaggtcactgtccgaggtctggagcccgagatccagaagctgattgcaaggcacaagcaggaagtgcggaggctcaagagcctgcacgaggcggagctgctgcagtcggatgagcgggcctcgcagcgctgcctgcgccaggccgaggagctgcgggagcagctggagcgggagaaggaggcgctgggccagcaggagcgcgaacgtgctcggcagcggttccagcagcacctggagcaggagcagtgggcgctgcagcagcaacggcagcggctgtacagtgaggtggctgaggagagggagcggctgggccagcaggcagccaggcagcgggcggagctggaagagctgaggcagcagctggaggagagcagctctgcactgacccgagccctgagggctgagtttgagaagggcagggaggagcaggagcgccggcaccagatggagctgaataccctgaagcagcagctggagctggagaggcaggcgtgggaggccggccgcaccaggaaggagcgcatgtccccccaggaggcgtggctgctgaaccgggaacaggagctgagggaagaaatccggaaaggccgggacaaggagattgagctggtcattcaccggctggaggccgacatggcgctggccaaggaggagagtgagaaggctgccgagagccgcatcaagcgcttacgggacaagtacgaggccgagctctccgagctggagcagtcggagcggaagcttcaggagcggtgctcggagctgaagggccagcttggggaggccgagggcgagaatctgcgtctgcagggccttgtgcggcagaaggagcgggcgctggaggatgcgcaggcggtgaacgagcagctttctagcgagcgcagcaacctggcccaggtgatccgccaggagttcgaggaccggctggcagcctctgaggaggagacgcggcaggccaaggccgagctggccacgctgcaggcccgccagcagctggagctggaggaggtgcaccggagggtgaagacagccctcgcgaggaaggaggaggccgtgagcagcctccggacacaacatgaggctgcggtgaagcgggccgaccacctggaggagctgctggagcagcacaggaggcccacgccaagtaccaagtgaccagggatgccgggaacactgtcgaagaacggaaggcagaggacagaggctggacgtgggcccagaggcccacagggacgcccacctgccccccacagaggctggtggttgagatgcccacggctaagcacctgtggctgcattttaacagtaaaggaggccgttgttttca

SEQ ID NO: 116457 - DNA, 619 bp, Homo sapiens
  Payload ID: 2722
  Gene Symbol: CEP131
  Gene Name: centrosomal protein 131kDa
  ENST ID: ENST00000571292
  CDS Start-End: 1-619
tgaagcagcagctggagctggagaggcaggcgtgggaggccggccgcaccaggaaggaggcgtggctgctgaaccgggaacaggagctgagggaagaaatccggaaaggccgggacaaggagattgagctggtcattcaccggctggaggccgacatggcgctggccaaggaggagagtgagaaggctgccgagagccgcatcaagcgcttacgggacaagtacgaggccgagctctccgagctggagcagtcggagcggaagcttcaggagcggtgctcggagctgaagggccagcttggggaggccgagggcgagaatctgcgtctgcagggccttgtgcggcagaaggagcgggcgctggaggatgcgcaggcggtgaacgagcagctttctagcgagcgcagcaacctggcccaggtgatccgccaggagttcgaggaccggctggcagcctctgaggaggagacgcggcaggccaaggccgagctggccacgctgcaggcccgccagcagctggagctggaggaggtgcaccggagggtgaagacagccctcgcgaggaaggaggaggccgtgagcagcctccggacacaacatgaggctgcggtgaagcgggc

SEQ ID NO: 116458 - DNA, 1160 bp, Homo sapiens
  Payload ID: 2722
  Gene Symbol: CEP131
  Gene Name: centrosomal protein 131kDa
  ENST ID: ENST00000570817
  CDS Start-End: 1-923
gggcctcgcagcgctgcctgcgccaggccgaggagctgcgggagcagctggagcgggagaaggaggcgctgggccagcaggagcgcgaacgtgctcggcagcggcagcgggcggagctggaagagctgaggcagcagctggaggagagcagctctgcactgacccgagccctgagggctgagtttgagaagggcagggaggagcaggagcgccggcaccagatggagctgaataccctgaagcagcagctggagctggagaggcaggcgtgggaggccggccgcaccaggaaggaggaggcgtggctgctgaaccgggaacaggagctgagggaagaaatccggaaaggccgggacaaggagattgagctggtcattcaccggctggaggccgacatggcgctggccaaggaggagagtgagaaggctgccgagagccgcatcaagcgcttacgggacaagtacgaggccgagctctccgagctggagcagtcggagcggaagcttcaggagcggtgctcggagctgaagggccagcttggggaggccgagggcgagaatctgcgtctgcagggccttgtgcggcagaaggagcgggcgctggaggatgcgcaggcggtgaacgagcagctttctagcgagcgcagcaacctggcccaggtgatccgccaggagttcgaggaccggctggcagcctctgaggaggagacgcggcaggccaaggccgagctggccacgctgcaggcccgccagcagctggagctggaggaggtgcaccggagggtgaagacagccctcgcgaggaaggaggaggccgtgagcagcctccggacacaacatgaggtgagtccctgtggccagccctgctggacctcggggctgggagcaggcctgaccctgtgggtgtgctgcaggctgcggtgaagcgggccgaccacctggaggagctgctggagcagcacaggaggcccacgccaagtaccaagtgaccagggatgccgggaacactgtcgaagaacggaaggcagaggacagaggctggacgtgggcccagaggcccacagggacgcccacctgccccccacagaggctggtggttgagatgcccacggctaagcacctgtggctgcattttaacagtaaaggaggccgttgttttca

SEQ ID NO: 116459 - DNA, 5562 bp, Homo sapiens
  Payload ID: 2723
  Gene Symbol: CEP135
  Gene Name: centrosomal protein 135kDa
  Uniprot ID: Q66GS9
  ENST ID: ENST00000257287
  CDS Start-End: 125-3547
gacggaaggagctagtgggggactcgaggcctgagggcaatgcggctggaggcggaggcaacggcggctggagctgccggactttaatttttggaagtgaataaaacttgttttagaagacgagatgactacagctgtagagagaaagtatattaatattaggaaaaggctggatcagctgggataccgccagactctgacagtggagtgtttacctttggtagaaaaacttttcagcgacttagttcatacaactgagagccttcggcaatcaaaattatctgctgtgaaagctgaaaaagaaagtgccaattttgattttgttttggaaccctataaacttgaaaatgcaagattgagtagagaaaataatgaattatacctagagttaatgaaactgagagaacattcagaccaacacgttaaagagttgaaaacttcattgaagaaatgtgcacgtgaaacagctgatctgaaatttctgaataaccaatatgctcataaactcaaactgttggagaaagagagcaaagctaagaatgaaagaattcaacaacttcaagaaaagaatttgcatgctgtagtacaaactccaggtggcaagaaaagaagtattgctttcaggcgccagcgtatgcaaattgatgaaccggttcctccctctgaagtcagttcatatccagttcctcaaccagatgacccttacattgcagacctccttcaagtggctgataacaggattcaagaacttcaacaggaagtccaccagctacaagaaaagttagcaatgatggaaagtggggtgagagactatagcaagcagattgagctaagagaacgagagatagaacgactgtcagttgctttggatggtggtcggtcccctgatgtcctttctctggagtctagaaataaaaccaatgaaaagcttattgctcatttaaatattcaggttgactttcttcagcaagctaataaagacctggagaagcgtatacgagagcttatggaaaccaaggaaacagtgacatctgaagtcgttaatttaagtaacaaaaatgaaaaactctgccaagaattaactgaaatagatcagttagcacagcagttggaaagacataaagaagaagtgcttgagactgctgataaagagcttggggaagcaaagaaagagattaaaagaaagctctctgaaatgcaggatcttgaagaaacaatggcaaaacttcagctggaattgaacttatgccagaaagaaaaggagagactgagtgatgaactccttgtaaaatcagacctagaaactgttgttcatcagcttgaacaagaaaagcaaagacttagcaaaaaagttgaaagttttgcagttacagaacgacaacttactctggaggttgagaggatgagactagaacatggaataaaacgtcgagacaggtcaccttctcgtttagatacatttctgaaaggtatagaagaagaacgagattattataagaaagagctagagagactccaacatataatacagcgaagatcttgctctacaagttatagcgcacgtgaaaaaagttcaatatttagaacaccagaaaagggtgattacaattcagaaattcatcagatcacaagagaaagagatgaacttcagcgtatgctagaaagatttgaaaaatatatggaagatatacagtccaatgttaaattattgacagcagaaagagataaactaagtgtcttatataatgaagctcaggaagaattatctgccctaagaaaggaatccacccaaaccacagcaccccataatattgttagtcttatggaaaaggaaaaagaacttgcgttatctgacttaagaagaattatggcagaaaaggaagctttaagagaaaaattagagcatattgaagaagtgagtctttttggaaaatcagaattagagaaaactattgaacatttgacatgtgttaatcatcagcttgaaagcgaaaaatatgaattaaagtctaaagtgttaataatgaaagaaacaatagagtcgttagagaacaaattaaaagtccaagctcaaaaatttagccatgtggctggtgactcatctcatcagaaaacagaggtgaactcacttaggatagtgaatgagcagctacagcggtcagttgatgactatcagcaccgactttccataaaaagaggtgaacttgaatcagcccaagcacaaattaaaatactggaggaaaagatagatgaactaaaccttaagatgacttcacaggatgaggaggctcatgtaatgaaaaagaccattggtgttattgataaagaaaaagactttctccaggagactgtagatgagaagacagaaaagattgcaaatttgcaagaaaacctagctaataaagaaaaagctgttgctcaaatgaagataatgatctcagagtgtgaatcatctgtgaaccagctgaaagaaacattggttaatcgagatcgtgagataaacagcctccggcgccagcttgatgcagctcacaaagaactcgatgaagtaggaagatctagagaaatcgcttttaaggaaaacagaagactgcaagatgacctggctacaatggcaagagaaaatcaagaaatctcattggaattggaagcagcagtgcaagaaaaagaagaaatgaagagcagagttcataaatacataacagaggtgtcacgatgggagagcttaatggctgccaaggaaaaagaaaatcaagatttgttagatagatttcagatgcttcataaccgtgctgaagactgggaggtcaaagcccatcaagctgagggagaaagcagctcagttcgactggaacttctttctattgacactgagaggagacatcttcgagaaagagtggagctattagaaaaagaaattcaagagcacataaatgcccatcatgcttatgaatctcagatctcatcaatggcaaaagccatgtctcgattagaagaagagctgagacatcaagaagatgagaaagcaacagtattaaatgacttgtcatctcttagagaactttgcattaaacttgattcaggcaaagatattatgacccagcaattgaattcgaaaaaccttgagtttgagagggttgtggtggaattagaaaatgtaaagtcagagtcagacctactgaaaaaacaactttcaaatgagagacatacagttaaaaacctcgaatcattgttggctacaaacagagataaagaatttcattctcacttaacctcccacgagaaggatacagaaatccagctacttaaggagaagttaaccctttctgaaagcaaattaactagtcaaagccgggaaaacaccatgcttcgagctaaagtggcacagttacaaacagattatgatgctctgaaaaggcagatctcaactgaaagatacgaacgagaacgagcaatccaagagatgcgtcgacatggtcttgctacaccaccccttagttccactctgaggtctccttcacattctcctgaacatagaaatgtgtaattatcagaaagaataatggctttcaatgagttcctatgtggatttttaaaagaacagaacagtaatgaaatatttgaagtacttgttgctgaaaatcatgaacatggacacaaattctacctctgtcaacttttatttaaatcagtgaatatgttaaaaagtttggtttaaaagaactatatctatatgtatattttcatatatatgacagaacaagaatatgtattaatagtgcctaatgtatctatatttttattattcatgaattaaattactaaaagtatgtttatactgtgaattaatataatgtattcacattattctttaataatctgtttattaataagccatgatatgtgtatgtaaatattcttacagtacttgtttttagttgtcatgcctatgtttagaccatatcttaatgtattcacaaagaattatcaactttgatgctatgctgtcatgcttaactttttcttcttaaaattattcatagatctactgtctgttgtcaaggggaatatattcaggtctagtcttcttataatagcagaggtcttggtaaaataactaccatatataacgtgttattgccatctagaagaactatgatgagaaagatacatttatatattatgtaaaatgttaactatcatcatatggactctatgtaacacaaattcaaaagcaaactaaaagctatatgcagagttttgtataaaacaatagaacagaaatttgggacatttttctaggaaataaaattcctcggtgtattaatctaaggtttcaaagtataaaagtatatggggtaggccgggtgcagtggctcacgcctgtaatcccagcactttgggaggccgaggcgagtggatttcctaaggtcaggagtttgagaccagcctgagcaatgtggtgaaaccccatctctactaaaaatacaaaaattatctgggcttggtggcgggcacctgtaatcccagccacttgggaggctgaggcaggagaattgcttgaacccgggaggtggaggctgcggtgagccaagatcatgccattgcactccagcctgggtgacagagtaacactctgtctcagaaaaaaaaaaaaagaaaaatatatggggtaaatacagtaaaacgttttgttaaattccaatatacattcagtgataccactctttttcttctaagcctgtgtgttataatttaccagttccccaaaatgccatttttaacgccgaactgtgtaatatacatggaaaacagctttttacaattaattttcaaagttgtaattttaaagaatttgggtgtatacctatgttaatgaaacaacagaagtacaaaaaagaatatcagatacaaaaatcaatcgtgaagaaaatctgttcttaatatatttcattatgattgaaaaacataaaaactaacataggaaagtgaatgatcagttacttatgatatattttgtttcctcttgtggtttaataaagtgaagtgtgtgtgtgtgtgtgtgtgtgtatacctgggggtgggcagtgctctttttctaaaactaatatggcttatatatctgaattatgccctttttagtgtgtattaggatgtgggctggtttgcttttctaccacctttgtaattttatgtatcccatctcctttgtgtgaattcatatattatagcaaaatacaagagacatgggactgtttgcaataccatatggaaatcttttaataaatatatgtaaataaaataaaaaatatttgtctccaccttttccccaaaagcaacagcaagacatattttgttagatattttatttttaatgttttctataatttaaaaatgtatagcctgccaaatgttgttttcataaccatgatattgttttgaaaaaattttatcttaaaatactgaatgttctgaccttttatagatgtttttgattttgttttaaataattttaaattatggagcttgacctagatttgccaataaactttctagcctatt

SEQ ID NO: 116460 - DNA, 2092 bp, Homo sapiens
  Payload ID: 2723
  Gene Symbol: CEP135
  Gene Name: centrosomal protein 135kDa
  Uniprot ID: Q66GS9
  ENST ID: ENST00000422247
  CDS Start-End: 235-984
aatcgtccgccgctcccgttaccggggcaaccgcggcgcctcctccgtgtcggccccgatcgtccctccgcgccattttcaaactgctctagcgccggagcccgtgcctggacggaaggagctagtgggggactcgaggcctgagggcaatgcggctggaggcggaggcaacggcggctggagctgccggactttaatttttggaagtgaataaaacttgttttagaagacgagatgactacagctgtagagagaaagtatattaatattaggaaaaggctggatcagctgggataccgccagactctgacagtggagtgtttacctttggtagaaaaacttttcagcgacttagttcatacaactgagagccttcggcaatcaaaattatctgctgtgaaagctgaaaaagaaagtgccaattttgattttgttttggaaccctataaacttgaaaatgcaagattgagtagagaaaataatgaattatacctagagttaatgaaactgagagaacattcagaccaacacgttaaagagttgaaaacttcattgaagaaatgtgcacgtgaaacagctgatctgaaatttctgaataaccaatatgctcataaactcaaactgttggagaaagagagcaaagctaagaatgaaagaattcaacaacttcaagaaaagaatttgcatgctgtagtacaaactccaggtggcaagaaaagaagtattgctttcaggcgccagcgtatgcaaattgatgaaccggttcctccctctgaagtcagttcatatccagttcctcaaccagatgacccttacattgcagacctccttcaagtggctgataacaggattcaagaacttcaacaggaagtccaccagctacaagaaaagttagcaatgatggaaagtggggtgagagactatagcaagcaggtaggatttttatttacttgcatagtagggattgagataggtatgctgtgattgtaaatagaattgggttatatttgaaattgctgatactgagtttttatacagctttcctctttttcatcaggtttgttaatagagttaatagctggaatggcttaggtggctttacttacttagcctgtctcttcaaaaaatttaaaaattagccaagtgtggtggcatgtgcctatggtcccaggtacttgggaggctgaggtgggaggattaatggattgaagagcacttatttactcgattctcttcactattcattgaggtgaatagtagttttttgtttggtttttcttttagctgaatcatctatctccccaaatataattttataaccatattaccgttttcatctcaggagacattttattaagtgtgctatgttttataattgtatttttgtgatttttctactcttattatatattttgtcatattgaacaccagtctcttagaaagttactcttttgtgttgctaatttttttgtttgttttctctataagcacaagtcctcatacaacagttttctgaagaatcaggagaattagtagatgcagagttatattataaccatagcaagctttgtcttttcataatttctattgatgtcttggctaaattttgatttgggtaattataggcttgttttcttaatatgcttcttgaaggttaaattgggtaacatgtttttcattttctgcattgactgcattttttttgagtgatctgcacacacaaatatagatgtaacttaggtgttggtataactaaatctttaaagtgttttgaagattagttggataaaaatggagttaaagaaaattgaccaggcgtggtggctcatgcctgtaatcgcagcactttgggaggccgaggcgggtggatcacttgagatcagaagtttgagaccatcctggccaacatggtgaaacctcatctctactaaaaatacaaaaaattagccgggcgtagtggcgggcgcctgtagtcccagctacttgggaggctgaggcaggagaatggcgtgaacccgggaggcggagcttgcagtgagccgagatcccgccactgcactccagcctgggcgacagagcgagactccgtctc

SEQ ID NO: 116461 - DNA, 4986 bp, Homo sapiens
  Payload ID: 2724
  Gene Symbol: CEP152
  Gene Name: centrosomal protein 152kDa
  Uniprot ID: O94986
  ENST ID: ENST00000325747
  CDS Start-End: 78-3905
gggatctgctagaagttggtcttccgccaggactagagtttcctcgcggtaacagcctccgtggcctccggaggaccatgtcattagactttggcagtgtggcactaccagtgcaaaatgaagatgaagagtatgacgaagaggactatgaaagagagaaagagttgcagcagttactcacagaccttccccatgacatgctggatgacgacctctcctctccagagctccagtattcggactgcagcgaggatggcacagacggacaaccacatcatcctgagcaattggagatgagctggaatgagcaaatgctgcccaaatctcaaagtgtaaatggtcccagttgtcaaggtttggaaccgtataataaagtgacatataaaccttatcagtcttctgcccagaataatggctcaccagcccaggagataacaggaagtgacacattcgaaggcctgcaacaacaatttttaggagctaatgagaactctgcagaaaatatgcagattattcaacttcaggttcttaacaaagcaaaagagagacaactggagaacttaattgaaaagttaaatgaaagtgaacgtcaaattcgatatctgaatcaccagcttgtaataataaaagatgaaaaggatggtttgactctcagccttcgagaatcacagaaactctttcagaatggaaaagaaagagagatacagcttgaagctcaaataaaagcactggagactcagatacaagcattaaaagtcaatgaagaacagatgatcaagaagtccagaacaactgaaatggctctggaaagcttgaagcagcagctggtggaccttcatcattctgaatcacttcaacgagctagagaacagcatgagagcattgttatgggcctcacaaagaagtacgaagagcaagtattgtccttacaaaagaatttggatgccacagtcaccgcacttaaagaacaggaagacatttgctctcgtctgaaagatcacgtgaaacaactggaaaggaatcaagaagcaatcaagttagaaaagactgagatcattaataagttgacaagaagtctagaggagagtcaaaagcagtgtgcccacttgttgcagtccgggtcagtacaagaggtggctcagctacagttccagctgcagcaagcacagaaggcacatgctatgagtgcaaacatgaacaaggctttgcaagaagaattaacagaactaaaagatgaaatttctctctatgaatctgctgcaaaactaggaatacatccaagtgactcagaaggagaattaaatatagaactcactgaatcgtatgtggatttgggtattaaaaaggtcaactggaaaaaatccaaagttaccagcattgtacaagaagaagacccaaatgaagagctttcaaaagatgagttcattctgaagttaaaggcagaagtacagcgtttgctgggtagcaactcaatgaagcgtcatctggtgtctcagttacaaaatgacctcaaagactgtcataagaaaattgaagatctccaccaagtgaagaaggatgaaaaaagcattgaggttgagactaaaacagatacctcagaaaaaccaaagaatcaattatggcctgagtcttctacttctgatgttgtcagagatgatattctgctgcttaaaaatgaaattcaagttttacaacaacaaaatcaggaacttaaagaaactgaaggaaaactgagaaatacaaatcaagacttatgtaatcaaatgagacaaatggtacaagattttgaccatgacaaacaagaagctgtggataggtgtgaaaggacttatcagcagcaccatgaagccatgaaaactcaaatacgtgaaagcctattagcaaagcatgctttggagaagcagcagctctttgaggcttatgagagaactcatttgcaactgaggtctgagttggataagttgaataaggaggtgactgctgtgcaggaatgttacctagaagtgtgcagagagaaggataatctagaattgactctcaggaagaccactgaaaaggagcaacagactcaggagaagatcaaagaaaaactcattcaacagcttgaaaaggagtggcagtctaagctggatcaaactataaaggcaatgaaaaagaagaccttagattgtggcagccaaactgaccaagtaaccaccagtgatgttatttccaagaaagagatggcaattatgatagaagagcagaagtgcacaatccagcaaaacttagaacaagagaaggacatagccatcaagggggctatgaagaaactcgaaattgaattggaactcaaacattgtgaaaatattaccaaacaggtagaaatagctgtgcaaaatgctcatcagcgatggctgggagaactaccagagctggcagagtatcaagcacttgtgaaggcagaacagaaaaagtgggaagaacagcatgaggtctctgtgaacaaaaggatatcatttgctgtttctgaagctaaagagaaatggaagagtgagcttgaaaatatgaggaaaaatatacttcctggaaaggaattggaagagaagattcattctcttcagaaggaacttgagttaaagaacgaagaagtccctgtggtcatcagggctgagttagctaaggctcggagtgaatggaacaaagaaaagcaagaagaaatccacagaatccaagaacaaaatgagcaagattaccggcaatttttagatgatcaccgaaataaaattaatgaggtgcttgcggcagctaaagaagactttatgaaacaaaaaactgaactacttcttcagaaggagacagaattacaaacttgtctagaccagagtcgtagagaatggactatgcaggaagccaagcggatccaactggaaatctatcagtatgaggaagacatcctgactgtacttggggttcttttaagtgatacccaaaaggagcacatcagtgattctgaggacaagcagcttttggaaatcatgtcgacttgttcttcaaaatggatgtctgtgcaatattttgaaaaactaaagggctgcatacagaaagcatttcaagatacacttcctctgcttgtagaaaacgctgacccagaatggaaaaagagaaatatggccgagctctctaaggattctgccagccagggcactggccaaggagaccctggacctgctgctggacaccatgctcagcccttggccttacaagcaacagaagcagaagctgataagaaaaaggtccttgaaattaaggatttatgctgtggacactgcttccaagaacttgaaaaggcaaagcaggaatgtcaagatctgaaaggaaaactggagaaatgctgtaggcatcttcagcatttagaaaggaagcacaaagctgtagtggaaaaaattggagaagagaataataaagttgttgaagaattaatagaagaaaacaacgacatgaagaataaattggaagaattgcaaacactttgtaaaacaccaccaaggtcattgtcagcaggggccattgaaaatgcttgcctgccatgcagtgggggagccttggaagaacttcgtgggcagtacattaaagctgtaaaaaaaattaaatgtgacatgcttcgttatattcaggagagtaaggaacgagctgcagaaatggtaaaagcagaggtactgcgagaacgtcaagaaaccgcccgaaagatgcgcaaatattatttgatttgcctccaacagattttgcaggatgatggaaaagaaggggctgagaaaaagattatgaatgctgctagcaaacttgctacaatggcaaaattactggaaacacctatttctagtaagtcccaaagcaaaactacacagtcaggtatgtcaaagtgagtcgccaaatggtttttctatcttttcttctttagctatttaatattttcagtatgaagaaggcagggaaggtaaggagtgagagttaatttgtgaagttttgtatgttttacttaaactagaagtttacgcaaaaagagtacacagtttccaatttaagtaggcagactgagcatgcccatcagtttcctattgctgcttccatccctcgaaatgatagaaaagattttaaacagcaaataaagaatgagaaaaagaagaaattataagtgggttttaaaaagttgcagtgggccaggcatcatggctcacacctgtaatcccagcactttgggaggctgaggtgggaggatcccttgatcccaggaatttgaggttgcagtaagctatgattgtgccactgtactccagcctgggtgacagagtgaggccctgtctcaaaaaaaaaaaaaaaaagtttgcagtggatagaccagaagctacaagaaatccctgagagaaagaagacagtataggatggaagatggaaacctcagttcaaaaccaccgggagatgactattgcaattaggagcaatatcaaaactgttccacatatgagggtgatatgttccaggagaaatagagggcctaggggatatgaatggggtaattagttggtgttctaaaccaacagcaaccaggtggggttaatcctctctttatttcttcttctcccctcctttccccaacctcaatattgagctgggcaacaacaacaggaacaaagaatctgggagcagggcagtgctccaggtggctagccatatcaagcaggaactgggagccgacttgccttgggaggctgagatgggaggatcacttgagtccgggaggtcaaggctgcagtgagctgtgatcgcaccactgcactccagcctgggaaacagagcagaccctgtctcaaaaaaaaaaaaaaaaaaaaaaaaaaaagtaagagtaaccaacaaaaacatagaacgtataactttaaaactggtaaaggaaaaacttggaaaaaaacattttcaatctaacaaaatcaggaaagaggaaaaaaacct

SEQ ID NO: 116462 - DNA, 5635 bp, Homo sapiens
  Payload ID: 2724
  Gene Symbol: CEP152
  Gene Name: centrosomal protein 152kDa
  Uniprot ID: O94986
  ENST ID: ENST00000380950
  CDS Start-End: 189-5321
ccgggcgagcttctagtcggcgattgaaggatgcgagtgctccttaagggcctccgccccgtgagttcggttgtgactaggaaggagctagtggactagagccagggtaaggggatctgctagaagttggtcttccgccaggactagagtttcctcgcggtaacagcctccgtggcctccggaggaccatgtcattagactttggcagtgtggcactaccagtgcaaaatgaagatgaagagtatgacgaagaggactatgaaagagagaaagagttgcagcagttactcacagaccttccccatgacatgctggatgacgacctctcctctccagagctccagtattcggactgcagcgaggatggcacagacggacaaccacatcatcctgagcaattggagatgagctggaatgagcaaatgctgcccaaatctcaaagtgtaaatggctataatgaaattcagagtttatatgctggagaaaaatgtggtaatgtctgggaagaaaatagaagtaaaactgaagaccgacatcctgtgtaccatcctgaagaaggtggagatgaaggtggaagtggttatagtcctccaagtaaatgtgaacagactgatttatatcaccttcctgaaaactttaggccatataccaatggtcagaagcaggaatttaataaccaagcaaccaatgtaattaaattttcagatcctcaatggaaccattttcagggtcccagttgtcaaggtttggaaccgtataataaagtgacatataaaccttatcagtcttctgcccagaataatggctcaccagcccaggagataacaggaagtgacacattcgaaggcctgcaacaacaatttttaggagctaatgagaactctgcagaaaatatgcagattattcaacttcaggttcttaacaaagcaaaagagagacaactggagaacttaattgaaaagttaaatgaaagtgaacgtcaaattcgatatctgaatcaccagcttgtaataataaaagatgaaaaggatggtttgactctcagccttcgagaatcacagaaactctttcagaatggaaaagaaagagagatacagcttgaagctcaaataaaagcactggagactcagatacaagcattaaaagtcaatgaagaacagatgatcaagaagtccagaacaactgaaatggctctggaaagcttgaagcagcagctggtggaccttcatcattctgaatcacttcaacgagctagagaacagcatgagagcattgttatgggcctcacaaagaagtacgaagagcaagtattgtccttacaaaagaatttggatgccacagtcaccgcacttaaagaacaggaagacatttgctctcgtctgaaagatcacgtgaaacaactggaaaggaatcaagaagcaatcaagttagaaaagactgagatcattaataagttgacaagaagtctagaggagagtcaaaagcagtgtgcccacttgttgcagtccgggtcagtacaagaggtggctcagctacagttccagctgcagcaagcacagaaggcacatgctatgagtgcaaacatgaacaaggctttgcaagaagaattaacagaactaaaagatgaaatttctctctatgaatctgctgcaaaactaggaatacatccaagtgactcagaaggagaattaaatatagaactcactgaatcgtatgtggatttgggtattaaaaaggtcaactggaaaaaatccaaagttaccagcattgtacaagaagaagacccaaatgaagagctttcaaaagatgagttcattctgaagttaaaggcagaagtacagcgtttgctgggtagcaactcaatgaagcgtcatctggtgtctcagttacaaaatgacctcaaagactgtcataagaaaattgaagatctccaccaagtgaagaaggatgaaaaaagcattgaggttgagactaaaacagatacctcagaaaaaccaaagaatcaattatggcctgagtcttctacttctgatgttgtcagagatgatattctgctgcttaaaaatgaaattcaagttttacaacaacaaaatcaggaacttaaagaaactgaaggaaaactgagaaatacaaatcaagacttatgtaatcaaatgagacaaatggtacaagattttgaccatgacaaacaagaagctgtggataggtgtgaaaggacttatcagcagcaccatgaagccatgaaaactcaaatacgtgaaagcctattagcaaagcatgctttggagaagcagcagctctttgaggcttatgagagaactcatttgcaactgaggtctgagttggataagttgaataaggaggtgactgctgtgcaggaatgttacctagaagtgtgcagagagaaggataatctagaattgactctcaggaagaccactgaaaaggagcaacagactcaggagaagatcaaagaaaaactcattcaacagcttgaaaaggagtggcagtctaagctggatcaaactataaaggcaatgaaaaagaagaccttagattgtggcagccaaactgaccaagtaaccaccagtgatgttatttccaagaaagagatggcaattatgatagaagagcagaagtgcacaatccagcaaaacttagaacaagagaaggacatagccatcaagggggctatgaagaaactcgaaattgaattggaactcaaacattgtgaaaatattaccaaacaggtagaaatagctgtgcaaaatgctcatcagcgatggctgggagaactaccagagctggcagagtatcaagcacttgtgaaggcagaacagaaaaagtgggaagaacagcatgaggtctctgtgaacaaaaggatatcatttgctgtttctgaagctaaagagaaatggaagagtgagcttgaaaatatgaggaaaaatatacttcctggaaaggaattggaagagaagattcattctcttcagaaggaacttgagttaaagaacgaagaagtccctgtggtcatcagggctgagttagctaaggctcggagtgaatggaacaaagaaaagcaagaagaaatccacagaatccaagaacaaaatgagcaagattaccggcaatttttagatgatcaccgaaataaaattaatgaggtgcttgcggcagctaaagaagactttatgaaacaaaaaactgaactacttcttcagaaggagacagaattacaaacttgtctagaccagagtcgtagagaatggactatgcaggaagccaagcggatccaactggaaatctatcagtatgaggaagacatcctgactgtacttggggttcttttaagtgatacccaaaaggagcacatcagtgattctgaggacaagcagcttttggaaatcatgtcgacttgttcttcaaaatggatgtctgtgcaatattttgaaaaactaaagggctgcatacagaaagcatttcaagatacacttcctctgcttgtagaaaacgctgacccagaatggaaaaagagaaatatggccgagctctctaaggattctgccagccagggcactggccaaggagaccctggacctgctgctggacaccatgctcagcccttggccttacaagcaacagaagcagaagctgataagaaaaaggtccttgaaattaaggatttatgctgtggacactgcttccaagaacttgaaaaggcaaagcaggaatgtcaagatctgaaaggaaaactggagaaatgctgtaggcatcttcagcatttagaaaggaagcacaaagctgtagtggaaaaaattggagaagagaataataaagttgttgaagaattaatagaagaaaacaacgacatgaagaataaattggaagaattgcaaacactttgtaaaacaccaccaaggtcattgtcagcaggggccattgaaaatgcttgcctgccatgcagtgggggagccttggaagaacttcgtgggcagtacattaaagctgtaaaaaaaattaaatgtgacatgcttcgttatattcaggagagtaaggaacgagctgcagaaatggtaaaagcagaggtactgcgagaacgtcaagaaaccgcccgaaagatgcgcaaatattatttgatttgcctccaacagattttgcaggatgatggaaaagaaggggctgagaaaaagattatgaatgctgctagcaaacttgctacaatggcaaaattactggaaacacctatttctagtaagtcccaaagcaaaactacacagtcagcactgcccctaacttcagagatgctgattgcagttaaaaaatcaaaaagaaatgatgtgaatcagaaaataccatgttgtattgaaagcaaatcaaatagtgtaaacaccatcaccagaactctgtgcgaacaagctcccaagaggagggcagcttgtaacttacaaaggctgttagagaactcagagcatcagagcataaagcatgtgggatccaaagagacacatttggaattccagtttggggatggtagttgcaagcacctaaacagtttgccaaggaatgtttctcctgagtttgttccttgtgaaggtgaaggaggctttggtttgcacaagaagaaagacctactcagtgataatggttctgaatcacttccgcattcagctgcatacccctttcttggaaccttaggaaataaaccctcacctagatgtacccctggtccttctgaatcaggatgcatgcatataacctttcgcgattctaatgaaagacttggtttaaaagtatataaatgcaatccactaatggaaagtgaaaatgctgcatctgagaaaagtcaaggtttggatgttcaggaacctccagtaaaagatggaggggaccttagtgactgcttgggctggccttccagcagtgcaaccttatcctttgacagtcgtgaagcatcatttgtacatggtaggccacaaggaactttggaaataccaagtgaatctgttaaatccaaacagttttcaccatccggttatctttcagatacagaggaaagtaatatgatttgtcaaacaatgaaatgtcagcgttatcaaactccatacctgtcagaagaaaccacgtatttggagccaggaaagatcagtgtgaattgtggacacccatctcgtcataaggctgatagattaaagtcagatttcaaaaaactgagcagtacattaccatcttcagtgtgtcagcagccttcaagaaaattaattgttccgctatctagccaacaagatagtggctttgatagcccatttgttaatctagactaattatggtacagtatttaagaagaatcattaatatattaacaaaaatggaagggaagacctcatactgaaaaaaattgtgagccctgcctcttttgagatgttttaataacatctgttatataagtaaagcattcttctaaaattgcttgagatatttatgttgccttaatattccaaaggcctgatggtgtatgtataatctgcttttgtgtggtgcttatttttggtttctaaaccatctatttttatacttataaattgactcactctgcagtgttaacttatttaaataaacttgcatatggtctgtagaa

SEQ ID NO: 116463 - DNA, 5097 bp, Homo sapiens
  Payload ID: 2724
  Gene Symbol: CEP152
  Gene Name: centrosomal protein 152kDa
  Uniprot ID: O94986
  ENST ID: ENST00000399334
  CDS Start-End: 35-4999
tcgcggtaacagcctccgtggcctccggaggaccatgtcattagactttggcagtgtggcactaccagtgcaaaatgaagatgaagagtatgacgaagaggactatgaaagagagaaagagttgcagcagttactcacagaccttccccatgacatgctggatgacgacctctcctctccagagctccagtattcggactgcagcgaggatggcacagacggacaaccacatcatcctgagcaattggagatgagctggaatgagcaaatgctgcccaaatctcaaagtgtaaatggctataatgaaattcagagtttatatgctggagaaaaatgtggtaatgtctgggaagaaaatagaagtaaaactgaagaccgacatcctgtgtaccatcctgaagaaggtggagatgaaggtggaagtggttatagtcctccaagtaaatgtgaacagactgatttatatcaccttcctgaaaactttaggccatataccaatggtcagaagcaggaatttaataaccaagcaaccaatgtaattaaattttcagatcctcaatggaaccattttcagggtcccagttgtcaaggtttggaaccgtataataaagtgacatataaaccttatcagtcttctgcccagaataatggctcaccagcccaggagataacaggaagtgacacattcgaaggcctgcaacaacaatttttaggagctaatgagaactctgcagaaaatatgcagattattcaacttcaggttcttaacaaagcaaaagagagacaactggagaacttaattgaaaagttaaatgaaagtgaacgtcaaattcgatatctgaatcaccagcttgtaataataaaagatgaaaaggatggtttgactctcagccttcgagaatcacagaaactctttcagaatggaaaagaaagagagatacagcttgaagctcaaataaaagcactggagactcagatacaagcattaaaagtcaatgaagaacagatgatcaagaagtccagaacaactgaaatggctctggaaagcttgaagcagcagctggtggaccttcatcattctgaatcacttcaacgagctagagaacagcatgagagcattgttatgggcctcacaaagaagtacgaagagcaagtattgtccttacaaaagaatttggatgccacagtcaccgcacttaaagaacaggaagacatttgctctcgtctgaaagatcacgtgaaacaactggaaaggaatcaagaagcaatcaagttagaaaagactgagatcattaataagttgacaagaagtctagaggagagtcaaaagcagtgtgcccacttgttgcagtccgggtcagtacaagaggtggctcagctacagttccagctgcagcaagcacagaaggcacatgctatgagtgcaaacatgaacaaggctttgcaagaagaattaacagaactaaaagatgaaatttctctctatgaatctgctgcaaaactaggaatacatccaagtgactcagaaggagaattaaatatagaactcactgaatcgtatgtggatttgggtattaaaaaggtcaactggaaaaaatccaaagttaccagcattgtacaagaagaagacccaaatgaagagctttcaaaagatgagttcattctgaagttaaaggcagaagtacagcgtttgctgggtagcaactcaatgaagcgtcatctggtgtctcagttacaaaatgacctcaaagactgtcataagaaaattgaagatctccaccaagtgaagaaggatgaaaaaagcattgaggttgagactaaaacagatacctcagaaaaaccaaagaatcaattatggcctgagtcttctacttctgatgttgtcagagatgatattctgctgcttaaaaatgaaattcaagttttacaacaacaaaatcaggaacttaaagaaactgaaggaaaactgagaaatacaaatcaagacttatgtaatcaaatgagacaaatggtacaagattttgaccatgacaaacaagaagctgtggataggtgtgaaaggacttatcagcagcaccatgaagccatgaaaactcaaatacgtgaaagcctattagcaaagcatgctttggagaagcagcagctctttgaggcttatgagagaactcatttgcaactgaggtctgagttggataagttgaataaggaggtgactgctgtgcaggaatgttacctagaagtgtgcagagagaaggataatctagaattgactctcaggaagaccactgaaaaggagcaacagactcaggagaagatcaaagaaaaactcattcaacagcttgaaaaggagtggcagtctaagctggatcaaactataaaggcaatgaaaaagaagaccttagattgtggcagccaaactgaccaagtaaccaccagtgatgttatttccaagaaagagatggcaattatgatagaagagcagaagtgcacaatccagcaaaacttagaacaagagaaggacatagccatcaagggggctatgaagaaactcgaaattgaattggaactcaaacattgtgaaaatattaccaaacaggtagaaatagctgtgcaaaatgctcatcagcgatggctgggagaactaccagagctggcagagtatcaagcacttgtgaaggcagaacagaaaaagtgggaagaacagcatgaggtctctgtgaacaaaaggatatcatttgctgtttctgaagctaaagagaaatggaagagtgagcttgaaaatatgaggaaaaatatacttcctggaaaggaattggaagagaagattcattctcttcagaaggaacttgagttaaagaacgaagaagtccctgtggtcatcagggctgagttagctaaggctcggagtgaatggaacaaagaaaagcaagaagaaatccacagaatccaagaacaaaatgagcaagattaccggcaatttttagatgatcaccgaaataaaattaatgaggtgcttgcggcagctaaagaagactttatgaaacaaaaaactgaactacttcttcagaaggagacagaattacaaacttgtctagaccagagtcgtagagaatggactatgcaggaagccaagcggatccaactggaaatctatcagtatgaggaagacatcctgactgtacttggggttcttttaagtgatacccaaaaggagcacatcagtgattctgaggacaagcagcttttggaaatcatgtcgacttgttcttcaaaatggatgtctgtgcaatattttgaaaaactaaagggctgcatacagaaagcatttcaagatacacttcctctgcttgtagaaaacgctgacccagaatggaaaaagagaaatatggccgagctctctaaggattctgccagccagggcactggccaaggagaccctggacctgctgctggacaccatgctcagcccttggccttacaagcaacagaagcagaagctgaagagaataataaagttgttgaagaattaatagaagaaaacaacgacatgaagaataaattggaagaattgcaaacactttgtaaaacaccaccaaggtcattgtcagcaggggccattgaaaatgcttgcctgccatgcagtgggggagccttggaagaacttcgtgggcagtacattaaagctgtaaaaaaaattaaatgtgacatgcttcgttatattcaggagagtaaggaacgagctgcagaaatggtaaaagcagaggtactgcgagaacgtcaagaaaccgcccgaaagatgcgcaaatattatttgatttgcctccaacagattttgcaggatgatggaaaagaaggggctgagaaaaagattatgaatgctgctagcaaacttgctacaatggcaaaattactggaaacacctatttctagtaagtcccaaagcaaaactacacagtcagcactgcccctaacttcagagatgctgattgcagttaaaaaatcaaaaagaaatgatgtgaatcagaaaataccatgttgtattgaaagcaaatcaaatagtgtaaacaccatcaccagaactctgtgcgaacaagctcccaagaggagggcagcttgtaacttacaaaggctgttagagaactcagagcatcagagcataaagcatgtgggatccaaagagacacatttggaattccagtttggggatggtagttgcaagcacctaaacagtttgccaaggaatgtttctcctgagtttgttccttgtgaaggtgaaggaggctttggtttgcacaagaagaaagacctactcagtgataatggttctgaatcacttccgcattcagctgcatacccctttcttggaaccttaggaaataaaccctcacctagatgtacccctggtccttctgaatcaggatgcatgcatataacctttcgcgattctaatgaaagacttggtttaaaagtatataaatgcaatccactaatggaaagtgaaaatgctgcatctgagaaaagtcaaggtttggatgttcaggaacctccagtaaaagatggaggggaccttagtgactgcttgggctggccttccagcagtgcaaccttatcctttgacagtcgtgaagcatcatttgtacatggtaggccacaaggaactttggaaataccaagtgaatctgttaaatccaaacagttttcaccatccggttatctttcagatacagaggaaagtaatatgatttgtcaaacaatgaaatgtcagcgttatcaaactccatacctgtcagaagaaaccacgtatttggagccaggaaagatcagtgtgaattgtggacacccatctcgtcataaggctgatagattaaagtcagatttcaaaaaactgagcagtacattaccatcttcagtgtgtcagcagccttcaagaaaattaattgttccgctatctagccaacaagatagtggctttgatagcccatttgttaatctagactaattatggtacagtatttaagaagaatcattaatatattaacaaaaatggaagggaagacctcatactgaaaaaaattgtgagccctgcctcttttgaga

SEQ ID NO: 116464 - DNA, 1947 bp, Homo sapiens
  Payload ID: 2724
  Gene Symbol: CEP152
  Gene Name: centrosomal protein 152kDa
  ENST ID: ENST00000560322
  CDS Start-End: 194-1947
gcccaccgggcgagcttctagtcggcgattgaaggatgcgagtgctccttaagggcctccgccccgtgagttcggttgtgactaggaaggagctagtggactagagccagggtaaggggatctgctagaagttggtcttccgccaggactagagtttcctcgcggtaacagcctccgtggcctccggaggaccatgtcattagactttggcagtgtggcactaccagtgcaaaatgaagatgaagagtatgacgaagaggactatgaaagagagaaagagttgcagcagttactcacagaccttccccatgacatgctggatgacgacctctcctctccagagctccagtattcggactgcagcgaggatggcacagacggacaaccacatcatcctgagcaattggagatgagctggaatgagcaaatgctgcccaaatctcaaagtgtaaatggctataatgaaattcagagtttatatgctggagaaaaatgtggtaatgtctgggaagaaaatagaagtaaaactgaagaccgacatcctgtgtaccatcctgaagaaggtggagatgaaggtggaagtggttatagtcctccaagtaaatgtgaacagactgatttatatcaccttcctgaaaactttaggccatataccaatggtcagaagcaggaatttaataaccaagcaaccaatgtaattaaattttcagatcctcaatggaaccattttcagggtcccagttgtcaaggtttggaaccgtataataaagtgacatataaaccttatcagtcttctgcccagaataatggctcaccagcccaggagataacaggaagtgacacattcgaaggcctgcaacaacaatttttaggagctaatgagaactctgcagaaaatatgcagattattcaacttcaggttcttaacaaagcaaaagagagacaactggagaacttaattgaaaagttaaatgaaagtgaacgtcaaattcgatatctgaatcaccagcttgtaataataaaagatgaaaaggatggtttgactctcagccttcgagaatcacagaaactctttcagaatggaaaagaaagagagatacagcttgaagctcaaataaaagcactggagactcagatacaagcattaaaagtcaatgaagaacagatgatcaagaagtccagaacaactgaaatggctctggaaagcttgaagcagcagctggtggaccttcatcattctgaatcacttcaacgagctagagaacagcatgagagcattgttatgggcctcacaaagaagtacgaagagcaagtattgtccttacaaaagaatttggatgccacagtcaccgcacttaaagaacaggaagacatttgctctcgtctgaaagatcacgtgaaacaactggaaaggaatcaagaagcaatcaagttagaaaagactgagatcattaataagttgacaagaagtctagaggagagtcaaaagcagtgtgcccacttgttgcagtccgggtcagtacaagaggtggctcagctacagttccagctgcagcaagcacagaaggcacatgctatgagtgcaaacatgaacaaggctttgcaagaagaattaacagaactaaaagatgaaatttctctctatgaatctgctgcaaaactaggaatacatccaagtgactcagaaggagaattaaatatagaactcactgaatcgtatgtggatttgggtattaaaaaggtcaactggaaaaaatccaaagttaccagcattgtacaagaagaagacccaaatgaagagctttcaaaagatgagttcattctgaagttaaaggcagaagtacagcgtttgctgggtagcaactcaatgaagcgtcatctggtgtctcagttacaaaatgacctcaaagactgtcataagaaaattgaagatctccaccaagtgaa

SEQ ID NO: 116465 - DNA, 577 bp, Homo sapiens
  Payload ID: 2724
  Gene Symbol: CEP152
  Gene Name: centrosomal protein 152kDa
  ENST ID: ENST00000561245
  CDS Start-End: 1-195
gcccgaaagatgcgcaaatattatttgatttgcctccaacagattttgcaggatgatggaaaagaaggggctgagaaaaagattatgaatgctgctagcaaacttgctacaatggcaaaattactggaaacacctatttctagtgaagaagctaagtctcagaaagataactcacccaagaggacacaaggataaacctgatacccatggcagtagaaagcctacacttacccactcagatgctcatcaatggaggagagacttatgcctggaggaacttggaaatcaaactcagtacaatagctcacacctgtaatcccagcactttgggaggctaacgtgggcaaatcacttgagcccaggagttcccgaccaacctgggcaacatggtgaaaccccatttctacaaaaaaaatacaaaaattaggtgggcgtgatggcatgcacctgcagtcccagctacttgggaggctgaggcaggaggatacttgagcccaggagttcaatgctgcagtgagccatgatcatgccactgcactccagcctgtgtgacagagcaagaccctgtctctattta

SEQ ID NO: 116466 - DNA, 588 bp, Homo sapiens
  Payload ID: 2724
  Gene Symbol: CEP152
  Gene Name: centrosomal protein 152kDa
  ENST ID: ENST00000558591
  CDS Start-End: 384-588
agccccgggcatcctgggccccgtgcggctttggtcatgtttgtagtgccgtagctgacgccaaacagttcctcaaggtcattcgctcagcctgtggatgcttattgtgtattagcattactcgctccgccctctgggcaacttgaatcaatttgtccaaagtgctgttattagcactgatcacaagatgttgtgatcatttgtttatatgtctattttctttcccttcatcgtgtcctgttaaactttgtaatcttgaacagtgcttggtaaattgtcgaatgaatgaataaggtgtctccaccaggtgttgcaagtctaaaccgggctatgtgctctggctatttccattctagaaggcgagttatgtcagcaagaggaccatgtcattagactttggcagtgtggcactaccagtgcaaaatgaagatgaagagtatgacgaagaggactatgaaagagagaaagagttgcagcagttactcacagaccttccccatgacatgctggatgacgacctctcctctccagagctccagtattcggactgcagcgaggatggcacagacggacaaccacatcatcctg

SEQ ID NO: 116467 - DNA, 5063 bp, Homo sapiens
  Payload ID: 2725
  Gene Symbol: CEP162
  Gene Name: centrosomal protein 162kDa
  Uniprot ID: Q5TB80
  ENST ID: ENST00000257766
  CDS Start-End: 251-4234
ggaattcagaggcagagctttcagatgattcttttgaaaattcagacaaaacagctagacaatctaaaaaagagatgaagaagaaagatacagtgccttggtggataactgaagatgattttaaagatgatgttatctactgaactccgggttattcctcctcattcctcaaagattttagctgctgtttcactgacttcttggaacaaatgtgagctatttgaaaacaaagaagacttctcagcctgttatggaaatagaagaggagtctgctgaaaagattcaatttcttaagagcagtggaacctctctcttaagtactgatagcttagaaacaaatgaactagtagtttctgagctcaaccatagtagtctcggagtgggattggacacattagaagaacaagaggagaaagaacaattttttgccaggcttgagaaaggcttgacatcttccattgattattcgagattaaataaggaattggattctaatgactctacacattttaaagctttacatagtaatcaagccaacgcagaactaactgatgacgaacatgagaatgaatcgaaacatgaagaactggcagaaaattacagtgatgattttgaagatgagtatgttggtgcaccgttgactactaaagatgaagagatgccttccaaagagaattccaaatcagaaaaaataagtgtgcccaaacaggaagaagaaaaaactggcatgcttgctaatgttgtgctgcttgattcattagactctgttgcagaggtcaatcttgatgaacaagataaaataacacctaagccaaggtgcctaccagaaatgactgagaatgaaatgacaggaacaggtgtttcttatggacaaagcagtagtgacgttgaagccctacatcaagcttattgtcatatagcccattcattgggagatgaagacaaacaaaaaattgagagtaacacagtggaagatatcaagagctcagtgaaaggtcatcctcaagaaaatgaagagaattcaaaaaacatctctactatggaatctgatctgcccacagtagaggagctgatgaaacctatcagaatagattcctttgggatcagtggttttgatttacaacctgtcagctctgagaaagtggccgaaagaaaagaaactgaattttttagctctttacccctgaagatgaacccaaatattttgtctcaagactcacaacatgtgaaccttttttttgacaaaaatgatgagaatgtgattttacaaaagaccacaaatgagagtatggaaaacagctgtccacaagtaactgaagtaactgccacagaagaacatgttgataaaatgtaccttaatattttgaggaaaaaaataactgttaattcttcatcattatctcaggatgacaaaattaataaaacttacagatctcaacttagttctgaagaagaaggggctgtaatgggtaaacaggtaccatacaagaaggccagaagtgcacctcctttacttaaaaggaaaccccagagtggattatatgcgtcagttaggagctcaggctatggcaaacccagttcaccactcaagatgttttctactcttgaaaagaaaacttcagaggacattataaaaagcaaaaacttgagatcgatttctacctccaatcaacctaggaaaaaagaaatcttatctggaacaaaactcatcaagcctgcagctttggataaaccagctcacaaaactgaaagttgcctgtctactcgtaagaagtctgaaaatcccacagaaactgattcctgtattcagtttcagactgattccttaggatactgtggtgagaacaaggagaagaaattacttatgtttaaaagagttcaggaagcagaggataaatggaggggtgcgcaagccctaattgagcaaattaaagccacattctcagaaaaggagaaagaactagaaaataagttggaagaactaaagaaacaacaggaaaaagaactcttcaaattgaatcaagataattatattcttcaagccaagttaagcagctttgaagaaacaaacaaaaaacaaaggtggttacattttggagaagcagctgatcctgtcactggagaaaagttgaagcaaatccaaaaagaaatacaagaacaagagacacttcttcaaggatatcaacaggaaaatgaacgattatataatcaagtaaaagatctccaagaacaaaacaagaaaaatgaggagcgaatgtttaaggaaaaccaaagtttattcagtgaggtagcttccttaaaagaacagatgcacaaaagtcgttttctgtctcaagtagttgaagattcagagcccacaagaaatcagaattttacagatctgttagcagaactacggatggcacagaaagaaaaagacagtttattggaagacatcaaaagactgaaacaagacaaacaagctcttgaagtagacttcgaaaaaatgaagaaagagagggaccaagccaaagatcagattgcttatgtcacaggtgagaaattatatgaaataaaaattttagaagaaacacataaacaagaaatcagtcgtctgcaaaaaagattacagtggtatgctgaaaatcaggaacttctggataaagatgcacttcggcttagagaagcaaatgaggaaattgagaagctcaaacttgagattgagaaactgaaagctgaatctgggaatccatctattcggcagaagatacgcttaaaagataaagcagcagatgccaaaaaaattcaggatctggagcgacaagttaaggaaatggaagggattctgaagagaagatatcccaattctttacctgctttaatattggctgcatcagcagctggtgatacagtggataaaaatacagtggaatttatggagaaaaggataaaaaagctagaagctgatctggagggcaaagatgaagatgcaaagaaaagccttcgtaccatggaacaacagtttcagaaaatgaagattcagtatgaacaaagactagagcagcaggagcagctacttgcctgcaaattgaatcaacatgactctcccagaattaaagccctagagaaggaacttgatgacatcaaggaagcccatcagatcactgtaagaaaccttgaagccgaaatagacgttcttaaacatcagaatgctgaattagacgtcaagaaaaatgataaagatgatgaagattttcagtctatagaattccaggtggaacaggctcatgctaaagctaaattagtaagactcaatgaagaactggctgcaaaaaagagagaaatacaagacctctcaaaaactgtggagaggcttcagaaagacagaagaatgatgctatcaaatcagaactcaaagggcagagaggaaatgtctgccaaaagggcaaagaaagatgttttgcactcaagtaaaggaaatgctaactccttccctggaaccctggacagcaagctgtaccaaccacatactttcactgattcccatgtttcagaagttttacaagaaaactacagattaaaaaatgagctagaaggattaatttcagagaagaatgaactgaagatgaaatctgaagcagtgatgaatcaatttgaaaactccatgagaagggtcaaggaagatactgcagcacacattgcatccctcaaagcatctcatcagagagaaatagagaaactcctttgccaaaatgcagtagaaaattcttcttccaaagtagctgaactaaatcgtaaaatagcaactcaagaggtacttataagacatttccaaagtcaagttaatgagctgcagagtaaacaagagtctctcgtagtttctgaagttcgagaagaaattctacagaaagagattacaaaactcttagaagaattgagagaagccaaagaaaaccatacaccagagatgaaacatttcgtgggcttagaaaagaaaattaagcagatggaaatgagacatgcacaaagagaacaggaacttcaacagataatacagcaaacacaccaagtagtagaaactgagcaaaacaaagaagttgaaaaatggaaaagactggcacagttaaagaatcgtgagctggagaagttccgcacagaactagactcaatattagatgttctccgagagctgcaccggcaaggagtggttgtgccagttgcttttgcagatgaaatgaatgcaccagagtattaatagaaattcagatttcataatgaccttattaaaaggcctgaagatggatgggattgtgccactgtcaggacagcttatgaaaaacaagtgttccaatatgtttccagaaagcaaacaaccaaagcaacatttcaaaataaattgcctttaaccaataagaaaaaaaacatataatggtgtattttactaaaaatcattaaccagtctcattttaagtgatttatggacagtttcctttatagcagagaagggctcacttgtatgctagaaatagaaagaaaagaaaattgaacatactccgccacatttttattgataatgtgaggtttttaaaatttttattttagatccagggggtacatgtgcttgttgtaacatgggtgtattgaataatggtgggaattgggcttctagtgtacccatcatccaaatattaaacactgtacccaacaggtaatttttcaacgcttactgccgctcacactctttcccctattggagtccccagtgtctgttatctccatctttatgtctctgtgtacccattgtttagctcctacttttaagtgagaatatatgcaatattttattttttatgtctgatttagttcacataggataatggcctccagctctatccatgttgctgcaaatgacatgatttcattcttttttatagttgcataatactccatttatatatctctctctatatatatctcacgttttctttatccagtcaattgttggtagatacttaggttggttccatgaatttgctattgtaaatattgctgcaataaacatacatgtacagatatctttttta

SEQ ID NO: 116468 - DNA, 5156 bp, Homo sapiens
  Payload ID: 2725
  Gene Symbol: CEP162
  Gene Name: centrosomal protein 162kDa
  Uniprot ID: Q5TB80
  ENST ID: ENST00000403245
  CDS Start-End: 116-4327
gacaactggtggacccgcacagaccttccgggaaagcgcggaattcagaggcagagtgtttccaatgtttgaggtactttagaatgtttactttgggaggtcaaaattgttgactatggctaactgttcccaagaagagctagatgaagagtttgaacagtttatgaaagagctttcagatgattcttttgaaaattcagacaaaacagctagacaatctaaaaaagagatgaagaagaaagatacagtgccttggtggataactgaagatgattttaaagatgatggacttcttggaacaaatgtgagctatttgaaaacaaagaagacttctcagcctgttatggaaatagaagaggagtctgctgaaaagattcaatttcttaagagcagtggaacctctctcttaagtactgatagcttagaaacaaatgaactagtagtttctgagctcaaccatagtagtctcggagtgggattggacacattagaagaacaagaggagaaagaacaattttttgccaggcttgagaaaggcttgacatcttccattgattattcgagattaaataaggaattggattctaatgactctacacattttaaagctttacatagtaatcaagccaacgcagaactaactgatgacgaacatgagaatgaatcgaaacatgaagaactggcagaaaattacagtgatgattttgaagatgagtatgttggtgcaccgttgactactaaagatgaagagatgccttccaaagagaattccaaatcagaaaaaataagtgtgcccaaacaggaagaagaaaaaactggcatgcttgctaatgttgtgctgcttgattcattagactctgttgcagaggtcaatcttgatgaacaagataaaataacacctaagccaaggtgcctaccagaaatgactgagaatgaaatgacaggaacaggtgtttcttatggacaaagcagtagtgacgttgaagccctacatcaagcttattgtcatatagcccattcattgggagatgaagacaaacaaaaaattgagagtaacacagtggaagatatcaagagctcagtgaaaggtcatcctcaagaaaatgaagagaattcaaaaaacatctctactatggaatctgatctgcccacagtagaggagctgatgaaacctatcagaatagattcctttgggatcagtggttttgatttacaacctgtcagctctgagaaagtggccgaaagaaaagaaactgaattttttagctctttacccctgaagatgaacccaaatattttgtctcaagactcacaacatgtgaaccttttttttgacaaaaatgatgagaatgtgattttacaaaagaccacaaatgagagtatggaaaacagctgtccacaagtaactgaagtaactgccacagaagaacatgttgataaaatgtaccttaatattttgaggaaaaaaataactgttaattcttcatcattatctcaggatgacaaaattaataaaacttacagatctcaacttagttctgaagaagaaggggctgtaatgggtaaacaggtaccatacaagaaggccagaagtgcacctcctttacttaaaaggaaaccccagagtggattatatgcgtcagttaggagctcaggctatggcaaacccagttcaccactcaagatgttttctactcttgaaaagaaaacttcagaggacattataaaaagcaaaaacttgagatcgatttctacctccaatcaacctaggaaaaaagaaatcttatctggaacaaaactcatcaagcctgcagctttggataaaccagctcacaaaactgaaagttgcctgtctactcgtaagaagtctgaaaatcccacagaaactgattcctgtattcagtttcagactgattccttaggatactgtggtgagaacaaggagaagaaattacttatgtttaaaagagttcaggaagcagaggataaatggaggggtgcgcaagccctaattgagcaaattaaagccacattctcagaaaaggagaaagaactagaaaataagttggaagaactaaagaaacaacaggaaaaagaactcttcaaattgaatcaagataattatattcttcaagccaagttaagcagctttgaagaaacaaacaaaaaacaaaggtggttacattttggagaagcagctgatcctgtcactggagaaaagttgaagcaaatccaaaaagaaatacaagaacaagagacacttcttcaaggatatcaacaggaaaatgaacgattatataatcaagtaaaagatctccaagaacaaaacaagaaaaatgaggagcgaatgtttaaggaaaaccaaagtttattcagtgaggtagcttccttaaaagaacagatgcacaaaagtcgttttctgtctcaagtagttgaagattcagagcccacaagaaatcagaattttacagatctgttagcagaactacggatggcacagaaagaaaaagacagtttattggaagacatcaaaagactgaaacaagacaaacaagctcttgaagtagacttcgaaaaaatgaagaaagagagggaccaagccaaagatcagattgcttatgtcacaggtgagaaattatatgaaataaaaattttagaagaaacacataaacaagaaatcagtcgtctgcaaaaaagattacagtggtatgctgaaaatcaggaacttctggataaagatgcacttcggcttagagaagcaaatgaggaaattgagaagctcaaacttgagattgagaaactgaaagctgaatctgggaatccatctattcggcagaagatacgcttaaaagataaagcagcagatgccaaaaaaattcaggatctggagcgacaagttaaggaaatggaagggattctgaagagaagatatcccaattctttacctgctttaatattggctgcatcagcagctggtgatacagtggataaaaatacagtggaatttatggagaaaaggataaaaaagctagaagctgatctggagggcaaagatgaagatgcaaagaaaagccttcgtaccatggaacaacagtttcagaaaatgaagattcagtatgaacaaagactagagcagcaggagcagctacttgcctgcaaattgaatcaacatgactctcccagaattaaagccctagagaaggaacttgatgacatcaaggaagcccatcagatcactgtaagaaaccttgaagccgaaatagacgttcttaaacatcagaatgctgaattagacgtcaagaaaaatgataaagatgatgaagattttcagtctatagaattccaggtggaacaggctcatgctaaagctaaattagtaagactcaatgaagaactggctgcaaaaaagagagaaatacaagacctctcaaaaactgtggagaggcttcagaaagacagaagaatgatgctatcaaatcagaactcaaagggcagagaggaaatgtctgccaaaagggcaaagaaagatgttttgcactcaagtaaaggaaatgctaactccttccctggaaccctggacagcaagctgtaccaaccacatactttcactgattcccatgtttcagaagttttacaagaaaactacagattaaaaaatgagctagaaggattaatttcagagaagaatgaactgaagatgaaatctgaagcagtgatgaatcaatttgaaaactccatgagaagggtcaaggaagatactgcagcacacattgcatccctcaaagcatctcatcagagagaaatagagaaactcctttgccaaaatgcagtagaaaattcttcttccaaagtagctgaactaaatcgtaaaatagcaactcaagaggtacttataagacatttccaaagtcaagttaatgagctgcagagtaaacaagagtctctcgtagtttctgaagttcgagaagaaattctacagaaagagattacaaaactcttagaagaattgagagaagccaaagaaaaccatacaccagagatgaaacatttcgtgggcttagaaaagaaaattaagcagatggaaatgagacatgcacaaagagaacaggaacttcaacagataatacagcaaacacaccaagtagtagaaactgagcaaaacaaagaagttgaaaaatggaaaagactggcacagttaaagaatcgtgagctggagaagttccgcacagaactagactcaatattagatgttctccgagagctgcaccggcaaggagtggttgtgccagttgcttttgcagatgaaatgaatgcaccagagtattaatagaaattcagatttcataatgaccttattaaaaggcctgaagatggatgggattgtgccactgtcaggacagcttatgaaaaacaagtgttccaatatgtttccagaaagcaaacaaccaaagcaacatttcaaaataaattgcctttaaccaataagaaaaaaaacatataatggtgtattttactaaaaatcattaaccagtctcattttaagtgatttatggacagtttcctttatagcagagaagggctcacttgtatgctagaaatagaaagaaaagaaaattgaacatactccgccacatttttattgataatgtgaggtttttaaaatttttattttagatccagggggtacatgtgcttgttgtaacatgggtgtattgaataatggtgggaattgggcttctagtgtacccatcatccaaatattaaacactgtacccaacaggtaatttttcaacgcttactgccgctcacactctttcccctattggagtccccagtgtctgttatctccatctttatgtctctgtgtacccattgtttagctcctacttttaagtgagaatatatgcaatattttattttttatgtctgatttagttcacataggataatggcctccagctctatccatgttgctgcaaatgacatgatttcattcttttttatagttgcataatactccatttatatatctctctctatatatatctcacgttttctttatccagtcaattgttggtagatacttaggttggttccatgaatttgctattgtaaatattgctgcaataaacatacatgtacagatatctttttta

SEQ ID NO: 116469 - DNA, 586 bp, Homo sapiens
  Payload ID: 2725
  Gene Symbol: CEP162
  Gene Name: centrosomal protein 162kDa
  ENST ID: ENST00000435955
  CDS Start-End: 98-316
acagaccttccgggaaagcgcggaattcagaggcagagtgtttccaatgtttgaggtactttagaatgtttactttgggaggtcaaaattgttgactatggctaactgttcccaagaagagctagatgaagagtttgaacagtttatgaaagagctttcagatgattcttttgaaaattcagacaaaacagctagacaatctaaaaaagagatgaagaagaaagatacagtgccttggtggataactgaagatgattttaaagatgatggcattattatgaaaaggcaagacgtgattcctgtatcaagagtgtagaaccttctgagggagaattcaacactcctcttgagaagaggaatgcattattaatcttaagacaggacttcttggaacaaatgtgagctatttgaaaacaaagaagacttctcagcctgttatggaaatagaagaggagtctgctgaaaagattcaatttcttaagagcagtggaacctctctcttaagtactgatagcttagaaacaaatgaactagtagtttctgagctcaaccatagtagtctcggagtgggattggacacattaga

SEQ ID NO: 116470 - DNA, 5095 bp, Homo sapiens
  Payload ID: 2725
  Gene Symbol: CEP162
  Gene Name: centrosomal protein 162kDa
  Uniprot ID: Q5TB80
  ENST ID: ENST00000617909
  CDS Start-End: 284-4267
gacaactggtggacccgcacagaccttccgggaaagcgcggaattcagaggcagagctttcagatgattcttttgaaaattcagacaaaacagctagacaatctaaaaaagagatgaagaagaaagatacagtgccttggtggataactgaagatgattttaaagatgatggtaaatgttgctttctttgaacataaatcttcatctgtattaaattgtgtacctaggacttcttggaacaaatgtgagctatttgaaaacaaagaagacttctcagcctgttatggaaatagaagaggagtctgctgaaaagattcaatttcttaagagcagtggaacctctctcttaagtactgatagcttagaaacaaatgaactagtagtttctgagctcaaccatagtagtctcggagtgggattggacacattagaagaacaagaggagaaagaacaattttttgccaggcttgagaaaggcttgacatcttccattgattattcgagattaaataaggaattggattctaatgactctacacattttaaagctttacatagtaatcaagccaacgcagaactaactgatgacgaacatgagaatgaatcgaaacatgaagaactggcagaaaattacagtgatgattttgaagatgagtatgttggtgcaccgttgactactaaagatgaagagatgccttccaaagagaattccaaatcagaaaaaataagtgtgcccaaacaggaagaagaaaaaactggcatgcttgctaatgttgtgctgcttgattcattagactctgttgcagaggtcaatcttgatgaacaagataaaataacacctaagccaaggtgcctaccagaaatgactgagaatgaaatgacaggaacaggtgtttcttatggacaaagcagtagtgacgttgaagccctacatcaagcttattgtcatatagcccattcattgggagatgaagacaaacaaaaaattgagagtaacacagtggaagatatcaagagctcagtgaaaggtcatcctcaagaaaatgaagagaattcaaaaaacatctctactatggaatctgatctgcccacagtagaggagctgatgaaacctatcagaatagattcctttgggatcagtggttttgatttacaacctgtcagctctgagaaagtggccgaaagaaaagaaactgaattttttagctctttacccctgaagatgaacccaaatattttgtctcaagactcacaacatgtgaaccttttttttgacaaaaatgatgagaatgtgattttacaaaagaccacaaatgagagtatggaaaacagctgtccacaagtaactgaagtaactgccacagaagaacatgttgataaaatgtaccttaatattttgaggaaaaaaataactgttaattcttcatcattatctcaggatgacaaaattaataaaacttacagatctcaacttagttctgaagaagaaggggctgtaatgggtaaacaggtaccatacaagaaggccagaagtgcacctcctttacttaaaaggaaaccccagagtggattatatgcgtcagttaggagctcaggctatggcaaacccagttcaccactcaagatgttttctactcttgaaaagaaaacttcagaggacattataaaaagcaaaaacttgagatcgatttctacctccaatcaacctaggaaaaaagaaatcttatctggaacaaaactcatcaagcctgcagctttggataaaccagctcacaaaactgaaagttgcctgtctactcgtaagaagtctgaaaatcccacagaaactgattcctgtattcagtttcagactgattccttaggatactgtggtgagaacaaggagaagaaattacttatgtttaaaagagttcaggaagcagaggataaatggaggggtgcgcaagccctaattgagcaaattaaagccacattctcagaaaaggagaaagaactagaaaataagttggaagaactaaagaaacaacaggaaaaagaactcttcaaattgaatcaagataattatattcttcaagccaagttaagcagctttgaagaaacaaacaaaaaacaaaggtggttacattttggagaagcagctgatcctgtcactggagaaaagttgaagcaaatccaaaaagaaatacaagaacaagagacacttcttcaaggatatcaacaggaaaatgaacgattatataatcaagtaaaagatctccaagaacaaaacaagaaaaatgaggagcgaatgtttaaggaaaaccaaagtttattcagtgaggtagcttccttaaaagaacagatgcacaaaagtcgttttctgtctcaagtagttgaagattcagagcccacaagaaatcagaattttacagatctgttagcagaactacggatggcacagaaagaaaaagacagtttattggaagacatcaaaagactgaaacaagacaaacaagctcttgaagtagacttcgaaaaaatgaagaaagagagggaccaagccaaagatcagattgcttatgtcacaggtgagaaattatatgaaataaaaattttagaagaaacacataaacaagaaatcagtcgtctgcaaaaaagattacagtggtatgctgaaaatcaggaacttctggataaagatgcacttcggcttagagaagcaaatgaggaaattgagaagctcaaacttgagattgagaaactgaaagctgaatctgggaatccatctattcggcagaagatacgcttaaaagataaagcagcagatgccaaaaaaattcaggatctggagcgacaagttaaggaaatggaagggattctgaagagaagatatcccaattctttacctgctttaatattggctgcatcagcagctggtgatacagtggataaaaatacagtggaatttatggagaaaaggataaaaaagctagaagctgatctggagggcaaagatgaagatgcaaagaaaagccttcgtaccatggaacaacagtttcagaaaatgaagattcagtatgaacaaagactagagcagcaggagcagctacttgcctgcaaattgaatcaacatgactctcccagaattaaagccctagagaaggaacttgatgacatcaaggaagcccatcagatcactgtaagaaaccttgaagccgaaatagacgttcttaaacatcagaatgctgaattagacgtcaagaaaaatgataaagatgatgaagattttcagtctatagaattccaggtggaacaggctcatgctaaagctaaattagtaagactcaatgaagaactggctgcaaaaaagagagaaatacaagacctctcaaaaactgtggagaggcttcagaaagacagaagaatgatgctatcaaatcagaactcaaagggcagagaggaaatgtctgccaaaagggcaaagaaagatgttttgcactcaagtaaaggaaatgctaactccttccctggaaccctggacagcaagctgtaccaaccacatactttcactgattcccatgtttcagaagttttacaagaaaactacagattaaaaaatgagctagaaggattaatttcagagaagaatgaactgaagatgaaatctgaagcagtgatgaatcaatttgaaaactccatgagaagggtcaaggaagatactgcagcacacattgcatccctcaaagcatctcatcagagagaaatagagaaactcctttgccaaaatgcagtagaaaattcttcttccaaagtagctgaactaaatcgtaaaatagcaactcaagaggtacttataagacatttccaaagtcaagttaatgagctgcagagtaaacaagagtctctcgtagtttctgaagttcgagaagaaattctacagaaagagattacaaaactcttagaagaattgagagaagccaaagaaaaccatacaccagagatgaaacatttcgtgggcttagaaaagaaaattaagcagatggaaatgagacatgcacaaagagaacaggaacttcaacagataatacagcaaacacaccaagtagtagaaactgagcaaaacaaagaagttgaaaaatggaaaagactggcacagttaaagaatcgtgagctggagaagttccgcacagaactagactcaatattagatgttctccgagagctgcaccggcaaggagtggttgtgccagttgcttttgcagatgaaatgaatgcaccagagtattaatagaaattcagatttcataatgaccttattaaaaggcctgaagatggatgggattgtgccactgtcaggacagcttatgaaaaacaagtgttccaatatgtttccagaaagcaaacaaccaaagcaacatttcaaaataaattgcctttaaccaataagaaaaaaaacatataatggtgtattttactaaaaatcattaaccagtctcattttaagtgatttatggacagtttcctttatagcagagaagggctcacttgtatgctagaaatagaaagaaaagaaaattgaacatactccgccacatttttattgataatgtgaggtttttaaaatttttattttagatccagggggtacatgtgcttgttgtaacatgggtgtattgaataatggtgggaattgggcttctagtgtacccatcatccaaatattaaacactgtacccaacaggtaatttttcaacgcttactgccgctcacactctttcccctattggagtccccagtgtctgttatctccatctttatgtctctgtgtacccattgtttagctcctacttttaagtgagaatatatgcaatattttattttttatgtctgatttagttcacataggataatggcctccagctctatccatgttgctgcaaatgacatgatttcattcttttttatagttgcataatactccatttatatatctctctctatatatatctcacgttttctttatccagtcaattgttggtagatacttaggttggttccatgaatttgctattgtaaatattgctgcaataaacatacatgtacagatatctttttt

SEQ ID NO: 116471 - DNA, 5630 bp, Homo sapiens
  Payload ID: 2726
  Gene Symbol: CEP164
  Gene Name: centrosomal protein 164kDa
  Uniprot ID: Q9UPV0
  ENST ID: ENST00000278935
  CDS Start-End: 148-4530
ttgcgcgctgcagggcaacaccccggcgtccctggaagctgggggagcgggagaaataactttatttggactgagagctggagaatgagaataggacctgagagtatattgggctaaggaggagaggtgtttgagcccagatgagtcatggctggacgacccctccgcataggagatcagctggttctggaagaagattatgatgagacctacattcctagtgagcaagaaattcttgaatttgcccgggagattggtattgatcccatcaaggaaccagaactgatgtggctggcgcgagagggcatcgtggccccactgcctggagagtggaaaccatgccaggacatcacaggtgacatttactatttcaacttcgccaacgggcagtctatgtgggaccatccatgtgacgaacactatcggagcttggtgatccaagagcgggcaaagctgtcaacttctggggccattaagaagaagaaaaaaaaaaaggaaaagaaagacaagaaggacagagacccccccaaaagttcgctggccttgggttcctcattagccccagttcatgttcctcttgggggcctggctcctttacgaggtcttgtggataccccaccctctgctcttcgtggatctcaaagcgtgagcctggggagctcagtggagtctggacgtcagcttggagaactcatgctgccttcacagggtctcaagacctctgcttatacaaagggtctcttgggctccatatatgaggacaagactgctctcagcctcttgggtttaggagaagaaaccaatgaggaggatgaggaggaaagtgacaaccagagtgtccacagctcaagtgagcctcttaggaacctacacctggacattggggcactggggggtgactttgagtatgaggagtctctgagaacaagccagccagaggagaagaaggatgtttctctggattcagatgctgccggtccccctactccctgcaagccctccagcccaggtgcagacagcagtctgagcagtgctgttggcaaagggcgacagggaagtggagcaagacctggtcttccagaaaaagaggaaaatgagaagagtgaacctaagatttgcaggaatctggtgacccccaaggcagaccctacaggcagtgagcctgccaaagcctctgaaaaggaagcaccagaggacacagtagatgcaggagaggagggttccaggagggaagaggcagccaaggagccaaagaagaaggcttctgctctggaagagggcagttcagacgccagccaagaactggaaattagtgaacacatgaaggaaccacagctctcagactccatagcttctgaccccaagtccttccatggcctggacttcggttttcgcagccggatctcggagcacctgctggatgttgatgtgctttccccagtcctgggtggagcttgtcggcaggcccagcaaccactgggaatagaagacaaggatgacagccagtccagccaagatgagctgcagagcaagcagtccaaaggcctggaggagaggttatctcctccacttccacacgaggagcgggcccagagtccccctcgcagcctggccactgaagaagagcctccccagggccccgaggggcagcccgagtggaaggaggcagaggagcttggggaggactctgcagccagcctcagcctgcagctgtccctccagagggagcaggccccaagcccacctgctgcctgtgagaagggcaaggagcagcattcccaggccgaggagctgggccctgggcaggaagaggcagaggatcctgaggagaaggtggcggtcagccccaccccgccagtctctccagaggtgcgatccacagagcctgtggctcccccagagcagctctcagaggctgcactaaaggccatggaagaggcagtggcccaagtactcgagcaagaccagaggcacctgctggaatccaagcaagagaagatgcagcaactgcgggagaagctgtgccaagaggaggaagaggagatcctccggcttcaccagcagaaagagcaatctctcagttccttgagggagcggctgcagaaagccattgaggaggaggaggcccggatgagagaggaggaaagccagaggctatcctggctccgagctcaggtccagtccagcacacaagcagatgaggaccaaatcagggctgagcaagaggcttccctgcagaaactgagagaagagttggagtctcaacagaaggctgagagggccagcttggaacagaaaaataggcaaatgctggagcagctcaaggaagagatagaggcttcggagaagagcgagcaggctgccctgaatgctgcaaaggagaaggctctgcagcagctgagggagcagctggaaggggagaggaaagaagctgtggcaacgctggagaaggagcacagtgctgagctggagcggctctgctcctcattggaggccaagcaccgggaggtggtctccagcctccagaagaagatacaggaagctcaacagaaagaggaggcccagctgcagaagtgccttgggcaagtggagcacagagttcaccagaagtcttatcacgtggctgggtatgagcacgagctcagcagtctcctgcgagagaagcgccaggaagtggaaggggagcatgagaggaggttggacaagatgaaggaggagcaccagcaagtgatggctaaggccagagagcagtatgaagctgaggagaggaagcagcgggctgagcttctggggcacctgaccggagagctggagcgcctgcagagggcccatgaacgagaactggagactgtgaggcaggagcaacacaagcgtcttgaggacttgcggcgccggcacagggagcaggaaaggaagctccaggatttagagttggaccttgaaaccagagctaaagatgtcaaggccagattggctctgctggaggtccaggaggagaccgcccggagggagaagcagcagctgcttgatgtgcagaggcaggttgctctgaagagtgaggaagccacagccacccatcagcagctggaggaggcacagaaggagcacacccacctgttgcagtcaaaccagcagctccgagaaattcttgatgagctgcaggcccgcaagctgaagctggagtcccaagtggatctgctgcaggctcagagccagcaactgcagaaacacttcagcagcctggaggctgaagctcaaaagaagcagcacctgttgagagaagtgacagttgaggaaaataatgcttccccacattttgagccagatctccatattgaggacctgaggaaatcccttggaacaaaccagaccaaagaggtgtcttcttctctctcccagagcaaggaggacttatacttggacagcctgtcctcccacaatgtctggcacctcctctctgctgagggggtagccctccgtagtgccaaggagttccttgtgcagcagacacgctccatgcggaggcggcagacagctctgaaagctgcccagcagcattggcgccatgagctggccagtgcgcaggaggtggccaaagacccaccaggcatcaaggccctggaagatatgcgcaagaacctggagaaggagaccaggcacctggatgagatgaagtcggccatgcggaaaggccacaacctgctgaagaagaaagaggagaagctgaatcagttggagtcctctctttgggaagaggcctcagatgagggcactctgggaggatcccccaccaagaaggcagtaaccttcgacctcagtgacatggacagcctgagcagtgaaagttctgaatctttttccccgcctcaccgtgagtggtggcggcagcagaggatcgactcaaccccgagtctcacctcccgcaagatccacgggcttagccactccctccggcagatcagcagccagctgagcagtgtcctcagcatcctggacagcctcaaccctcagtcgccgccgccgctcctcgcctccatgccagcccagctccctccccgggaccctaagagcacccccacccccacctactatggctccctggccaggttctcagccttatcatctgctacacccacgtccacccaatgggcctgggattcagggcaggggcccaggctcccctcctctgtggctcaaacggtggacgacttcctgttggagaagtggcgcaagtattttccatctggcatcccgctgctcagcaacagccccaccccgctggagagcaggctgggttacatgtctgccagtgagcagctccggctcctacagcactcccattcgcaagtccctgaggcgggcagcaccacctttcagggcataattgaggccaaccggaggtggctggaacgtgtcaagaatgaccccaggttacctctcttctcgtcaacacccaagccaaaagctactttgagcctcctgcagctgggccttgatgagcacaacagagtgaaggtgtatcgcttctgaggccctgagcaggggcttggggcagcccagcctctcctccacccagaccaagtgcctgaggagctgcctgccttcttccatctgagaaagcaccctccttccccctttgacttgcaggagccaccagggaccagggggttgagtggaacagtaaagccacacattctgtgactatataacctatctcaggctaaaatgtgtggactcgtacgagctcttgtcattgacatggcaagctgatggcgtgcggtggctgcggggtatcagggccgggagccctttgggaggaagggaggcgttagaggagctgccttcggaggctcagggagtccctttggagctggttgtttccttggccctgcagcgcactgctcggggctcccaaggaggttgtgtgtatggttcttaattcatcaggacaaagacccccagcatgtgtgtaccctgggacccgatttctctgggcccacatctatctccaatacctcagcctcagatcagaccctttcttttttgtctttcttctcttaatttttaaatgcctcttttcttgagcattccatctctctttttgaccctctcaggactgggcttagctgtccagagccctgccggagggtgctgggggctgtccctctgcaggcactgtgttttcctcaggggctgtcctcagaacacccctcctgctccctggggctcctcagggagccatttcagctggagtctcaggtctcaaaaacaacttctccaggaggccaaaaaaagactgggttggcttctggtcctcatgatggcttttatcctcctgggacactttgggtatattcatgggcattgtttccatctgtcttttctacctgtgccacccctgccctgattccacggctgcctcaggcaggcaggcaaggagctaggccggtgcccggccctggcagcaaggggtctttgtgcagttggagatgctgccgttgtggcagagcgtcctgcagccccgcttccatcagcaggctctggggtgggggctttgcaggggatgctctctgatgtttgttccgttgtttaaataaaatgcacttatttttgtttttttttttgcaagc

SEQ ID NO: 116472 - DNA, 492 bp, Homo sapiens
  Payload ID: 2726
  Gene Symbol: CEP164
  Gene Name: centrosomal protein 164kDa
  ENST ID: ENST00000533570
  CDS Start-End: 128-492
ggactgagggaagaagtgaaaatcggactgccaggcgacagttcctccgtttgaaatctcgccggctcctgagcgggccaccgggcccgggctgggggtctggcgggtgtttgagcccagatgagtcatggctggacgacccctccgcataggagatcagctggttctggaagaagattatgatgagacctacattcctagtgagcaagaaattcttgaatttgcccgggagattggtattgatcccatcaaggaaccagaactgatgtggctggcgcgagagggcatcgtggccccactgcctggagagtggaaaccatgccaggacatcacaggtgacatttactatttcaacttcgccaacgggcagtctatgtgggaccatccatgtgacgaacactatcggagcttggtgatccaagagcgggcaaagctgtcaacttctggggccattaagaagaagaaaaaaaaaaaggaaaagaaagacaagaa

SEQ ID NO: 116473 - DNA, 778 bp, Homo sapiens
  Payload ID: 2726
  Gene Symbol: CEP164
  Gene Name: centrosomal protein 164kDa
  ENST ID: ENST00000525416
  CDS Start-End: 413-778
agctgcgcctcgcccagagcctcgcccggagcctcgcccggagccttccggggtgggggatagttgaggacctcatcgagggaggggttgggcggcggggaagggagcgagcgtggcgggggacccgaggcacgctctcgagccaacgagcgtgatgcgctcgagtgtgggcggggactgagggaagaagtgaaaatcggactgccaggcgacagttcctccgtttgaaatctcgccggctcctgagcgggccaccgggcccgggctgggggtctggcgggagaaataactttatttggactgagagctggagaatgagaataggacctgagagtatattgggctaaggaggagagaaattcttgaatttgcccgggagattggtattgatcccatcaaggaaccagaactgatgtggctggcgcgagagggcatcgtggccccactgcctggagagtggaaaccatgccaggacatcacaggtgacatttactatttcaacttcgccaacgggcagtctatgtgggaccatccatgtgacgaacactatcggagcttggtgatccaagagcgggcaaagctgtcaacttctggggccattaagaagaagaaaaaaaaaaaggaaaagaaagacaagaaggacagagacccccccaaaagttcgctggccttgggttcctcattagccccagttcatgttcctcttgggggcctggctcctttacgaggtcttgtggataccccaccctctgctcttcgtggatctcaaagcgtgagc

SEQ ID NO: 116474 - DNA, 585 bp, Homo sapiens
  Payload ID: 2726
  Gene Symbol: CEP164
  Gene Name: centrosomal protein 164kDa
  ENST ID: ENST00000533153
  CDS Start-End: 112-585
gtttgttgcgcgctgcagggcaacaccccggcgtccctggaagctgggggagcggaaattcttgaatttgcccgggagattggtattgatcccatcaaggaaccagaactgatgtggctggcgcgagagggcatcgtggccccactgcctggagagtggaaaccatgccaggacatcacaggtgacatttactatttcaacttcgccaacgggcagtctatgtgggaccatccatgtgacgaacactatcggagcttggtgatccaagagcgggcaaagctgtcaacttctggggccattaagaagaagaaaaaaaaaaaggaaaagaaagacaagaaggacagagacccccccaaaagttcgctggccttgggttcctcattagccccagttcatgttcctcttgggggcctggctcctttacgaggtcttgtggataccccaccctctgctcttcgtggatctcaaagcgtgagcctggggagctcagtggagtctggacgtcagcttggagaactcatgctgccttcacagggtctcaagacctctgcttatacaaagggtctcttgggctccatatatgag

SEQ ID NO: 116475 - DNA, 585 bp, Homo sapiens
  Payload ID: 2726
  Gene Symbol: CEP164
  Gene Name: centrosomal protein 164kDa
  ENST ID: ENST00000527609
  CDS Start-End: 222-585
gcgctcgagtgtgggcggggactgagggaagaagtgaaaatcggactgccaggcgacagttcctccgtttgaaatctcgccggctcctgagcgggccaccgggcccgggctgggggtctggcgggagaaataactttatttggactgagagctggagaatgagaataggacctgagagtatattgggctaaggaggagaggtgtttgagcccagatgagtcatggctggacgacccctccgcataggagatcagctggttctggaagaagattatgatgagacctacattcctagtgagcaagaaattcttgaatttgcccgggagattggtattgatcccatcaaggaaccagaactgatgtggctggcgcgagagggcatcgtggccccactgcctggagagtggaaaccatgccaggacatcacaggtgacatttactatttcaacttcgccaacgggcagtctatgtgggaccatccatgtgacgaacactatcggagcttggtgatccaagagcgggcaaagctgtcaacttctggggccattaagaagaagaaaaaaaaaaaggaaaagaaagacaaga

SEQ ID NO: 116476 - DNA, 616 bp, Homo sapiens
  Payload ID: 2726
  Gene Symbol: CEP164
  Gene Name: centrosomal protein 164kDa
  ENST ID: ENST00000525734
  CDS Start-End: 270-616
gatcagattcaaggtgacacgcaccagcatacacagaaccacagggctgcccgggcccggactgccccacagaggcggcagatgcacacagaggtcagccacagcaccccacatggagggctgctcacccacagaggtgcagagggtgccacctccaccagccaccttgaaggagaaataactttatttggactgagagctggagaatgagaataggacctgagagtatattgggctaaggaggagaggtgtttgagcccagatgagtcatggctggacgacccctccgcataggagatcagctggttctggaagaagattatgatgagacctacattcctagtgagcaagaaattcttgaatttgcccgggagattggtattgatcccatcaaggaaccagaactgatgtggctggcgcgagagggcatcgtggccccactgcctggagagtggaaaccatgccaggacatcacaggtgacatttactatttcaacttcgccaacgggcagtctatgtgggaccatccatgtgacgaacactatcggagcttggtgatccaagagcgggcaaagctgtcaacttctggggccattaagaagaagaaaaaaaaaaa

SEQ ID NO: 116477 - DNA, 6705 bp, Homo sapiens
  Payload ID: 2727
  Gene Symbol: CEP170B
  Gene Name: centrosomal protein 170B
  Uniprot ID: Q9Y4F5
  ENST ID: ENST00000414716
  CDS Start-End: 229-4893
gtgggctcggcccgggctgccacgagcgtgcgggcctcgccgggcatgtcctaggcggcggccccgcccagcgctcggccgggcgggcgggcgggcgcgagggcagggaccgagccgggccgagctggggaacaagccggggaccaagccggggaccaagccggggactaaggcgagccggagaccgagcccgaacagcagggccagacgggcccagccagcaccaagatgagtgccacgtcctggttcctggtgagcagcagcggcgcccgccaccggctccctcgggagctcatcttcgtggggcgtgaggagtgtgagctcatgctacagtcccgcagcgtggacaagcagcatgccgtcatcaactacgaccaggacagggacgagcactgggtgaaggacctgggcagcctcaatgggacgtttgtgaatgacatgcgcatcccggaccagaagtacgtcacgctgaagctcaacgatgtcatccgcttcggctacgattccaacatgtatgtgctggagcgtgtgcagcaccgagtcccggaggaggcactcaagcatgaaaagtacaccagccagctgcaggtgagcgtgaagggtttggcgcccaagaggagcgaggcactgccggaacacacaccatactgcgaggcctcgaaccccaggccggagaagggggaccggagaccaggaacagaggcagcctcttaccgcacacccctgtatgggcagccctcctggtggggtgaggacgatggtagcacgctgcctgacgcccagcgccagggagagccctacccagagcgccccaagggaccagtgcagcaggacggggagctccacggcttccgcgcccctgctgagcctcagggctgctcgttccggcgggagcccagctacttcgagatccccacgaaggagaccccgcagccgtcgcagccccccgaggtgccggcacacgagatgcccacgaaggatgcagaggcaggtgggggcggagcggcccctgtggtgcagagccacgcctccttcaccatcgagtttgatgactgcagccctggcaagatgaagatcaaggaccatatcaccaagttttccctgcgccagcggcggcccccgggcaaggaggccacacctggcgagatggtgtcggctgagaccaaggtggccgactggctggtgcagaatgacccgagcctgctgcaccgggttggccctggggatgaccgccacagcaccaagagcgacctgcctgtccacacccgcaccctgaagggccacaagcacgaggacggcacgcagagtgactcagaggaccccctggccaaggcggcctcggccgctggggtgcccttggaggccagcggggagcaggtgcggctgcagaggcagatcaagcgggacccccaggagctactacataaccagcaggcctttgtcatcgagttcttcgacgaggacacaccccgaaagaagcgctcccagtccttcacgcacagcccgtccggggaccccaaggccgacaagcgccgtggcccaacgccggccgatagggaccgccccagtgtcccagccccagtccaggcagggggccgcagctcggggccacagagggccggctcgctcaagcgggagaagacagaggaacggctgggcagcccctcgcccgcctcccgaacccctgcccgccccttcggaagcgtggggcgccgctcccgcctggcccaggacttcatggcccagtgtctgcgggagagctccccggccgcccggcccagccccgagaaggttcctccggtgctgcccgctcccctgacaccccatgggaccagccccgtgggccccccgaccccaccgcccgcccccacggacccccagctgaccaaggcacggaaacaggaggaggacgacagcctcagtgacgcagggacatacaccatcgagaccgaggcgcaggacacggaggtggaggaggcccggaagatgatcgaccaggtctttggggtgttggagtcccctgaactctccagggcatcttcggccacctttcgcccagtcatcagaggggacagagatgagtctgatgacgggggcgtggcccagcggatggcgctactgcaggagtttgcctcccggccactgggtgcggccccccaggcggagcaccagggcctcccggtgccgggctcccctgggggtcagaagtgggtgtcccgctgggccagcctggctgacagctactcagacccgggcctcacagaggatggcctgggacgtagaggcggggagccggaggggtccctgcctgtgcgcatgcggcgacggctccctcagctgcccagtgagagggctgacagccctgcgggcccagagagcagcaggaggagtgggcctgggccaccggagctggacagtgagcagcccagccgcctcttcggccaggaggagttggatcctgacagcctcagcgatgccagtgggtcggacgggggccgaggccccgagccaggggtggagccacaggacagcagacgcaggagcccccaggaggggcccacgtggagcaggggtcggcgctcaccaagggcccccggggagccaactcccgcctctttcttcattggggaccagaatggggacgctgtgttatctaggaaaccgcttgcggctccaggggatggggagggcctagggcagacagcccagcccagccccccagcacgggatggcgtctatgtcagtgccaatgggagaatggtcatccagctacggcctggacggtccccagaacccgacggccctgccccagcctttctccggcaagagagcttcactaaggagccagccagtggtcccccagcgcccggcaagcccccccacatctccagccacccgcttctacaggacctggccgctacccgggccgcacgcatggacttccactcccaggacacccacctgatcttgaaggagacggagacggccctggcggccctggaggcccgactcctctctaattctgtggatgccgagtgtgaggggggcagcaccccgaggccgccggaggacgccctgtctggggactcggacgtggacacagccagcaccgtcagcctgcgtagtggcaagagcgggcccagccccacaaccccccagcctctgcgggcacagaaggagatgtcgccatccccgccagctgcacaggacccgggaggcaccgccctggtcagtgcccgtgagcagtcctcagagaggcagcatcacccacttggcccgacggacatgggccgtggagagccggtacggcgctcagccataaggcgtggccacaggccccgagggtccctggattggcccagtgaggagcgtggccctgtcctcgcccacctacccagctcagatgtgatggcctccaaccacgaaacccctgaggccaccggggcaggacggctaggttctcgccggaaaccagcggccccaccgccatccccagctgcccgggaggagcagagccgtagctcagccagctcccagaaggggccgcaggccttgacccgctccaacagcctgtccacccctcgccccacacgggcctcccggctgaggcgggcccggctgggggacgcttcagacactgaggctgcggatggtgagcgggggtccctgggcaaccctgagcccgtgggccggccagctgctgagcaggccaagaagctgtcacgcctggacatcctggccatgccccggaagcgggccggctccttcacagggactagtgaccccgaggcagcccctgcccgcaccagcttctctggccgcagtgtggagttgtgctgtgccagccgcaagcccaccatggccgaagcacgggctgtctccaggaaggctgccaacacagccaccaccacgggtccccgccagcccttcagcagggcccgctcaggcagtgcccgatacacctccaccactcagaccccgagggctggcagctccagccgggctcgttcccgggcccccggcccccgggacacggacgacgatgaggaggagcctgacccttatggtttcatcgtgcagacggcagagattgcggagattgccaggctgagccagacgctggtgaaggacgtggccatcctagcccaggagatccacgatgtggctggggacggtgacacactgggctcctcggagcctgcccacagcgcctccctcagcaacatgcccagcacccccgcctcgaccatctctgcccgggaggagctggtgcagcgcatccccgaggccagcctcaacttccagaaggtgccgcccggctcgctgaactctcgggactttgaccagaacatgaacgacagctgtgaggacgccctggccaacaagacgcggcctcggaaccgagaggaggtgatcttcgataacctgatgctgaacccggtgtcccagctgtcgcaggccatccgtgagaacacagagcaccttgccgagaagatgaagatcctctttcagaacacagggagagcttgggaggacctggaagccaggatcaacgccgagaacgaggtgcccatcctgaagacatctaacaaggaaatcagctccatcctgaaggaactgaggcgggtgcagaaacagctggaagttatcaatgccatcgtggaccccagtgggagcctggacctgctcacaggaaacaggagcttggccagctctgcacagccggggctggggaagggccgcgtggctgcccagagcccaccctcacccgcctcagccgaggccctgctgccagccctgcccctgaggaatttcccacagcgggccagctgtgggcctcccagcctcccggaccccaccttcctccctgatgccgagaggttcctgatctaggccccagacctggccaggccagcctccctgtgcgtgtgcgtctctgccttccgtccgccgcacacccgcctgcctggccgcaggtggttctccctgaagacccccacatgtgccatatccctgtgggcgggtgcctcccacgcccttgccccctcgtcagctcccagccagcaccctactcaccctgtccagccccatggccacccccacccctgcctcgccccctacaggcctctgggcccagctcctggccaggctgctgccaaggtcaagccctcaagggcattaccccgcctcctcttcatcactgttatttttgtctttagctttaaaggaaagagttgttggtgccattgcaggtgccccctccaggcctgactggctccgccaggcactaacctgccataaccctttgtgctggcctgcggccaggcagaggaagagaggtcgactgtggggtcatttggtgccaaacatggaggtgggcaggctcacctgttcctgggactgtctgagatggcagggcacttgccctggtggctcccacctgaccccaggccttttataggcaggagccccactgcttccagcctctggtgccaacacagttgccaaacccattgagcttggggctgccctgtggaggcctcctgggtatggaccaggggcttgttgagagctgagccatgcacacaggtgcagacaccccccaactcccatgcacacggctagtccaggcgcctccacgctgcaccgtgaggactgcagggcatgtccccgtgaggggctatgggcctctgtaggtgggcttccaaggtcctgggtgcagccgggtgcatggcagcccttctggcgggggtgagcgcacgaccaaagtcactggaagccgggtttccggaagctcgcagcttggcctgcaccacacgccctccccttttggcttcacgccatcaggcctcaagtgggcatgggggcagggacgggcccaggaactgttgttttctcaggattctttcagctgggaacatggcaggtgagcagagcttggtgcctctgccgtggcccctgctggggcagcccgtgttgccggagcctctaagccaaagagcccgttggccgtggttggtgggggtggacgtgggggtgtcccacctggaccagactggcgtgggtgagctccacaccctgcctggcaatggtatgagagtcggacctggacagggccagctgctgggggagcggcactggggactggaggctggaagcgggtggtgtgtgtcccctgtttacttttagctgagctggggttgggtgtacgggttctgttcctctgagcctgcggcccacctgatgtttacgtgtgtgtgtgagggggggcgggggtggcaggtgtccccccctggtccccgccccaagagcctgctgtctgtatggaggaggtgctagcccggtccaccgggctgctgcccacccctgcatgccccagttgcccaccccgcctgcccctggacatgaagtggtcacgcttcatccacggctccttcccacccctcggcagtggctgtgcaatgttttaagttcacaagttcctgctcctccccacactgagctcctttgttcctccccctccagcctttgcctgggaactggtccttgtttgccgggcttctcggagggttcactgtacattcgttctcaggtggtcttgtggctgtctttcggaaaatggttattttatatgatttgtcatggaatttgttctaataaatcattcttctatcacatggcagcacgctggagcctgtcaccttg

SEQ ID NO: 116478 - DNA, 6813 bp, Homo sapiens
  Payload ID: 2727
  Gene Symbol: CEP170B
  Gene Name: centrosomal protein 170B
  ENST ID: ENST00000453495
  CDS Start-End: 229-5001
gtgggctcggcccgggctgccacgagcgtgcgggcctcgccgggcatgtcctaggcggcggccccgcccagcgctcggccgggcgggcgggcgggcgcgagggcagggaccgagccgggccgagctggggaacaagccggggaccaagccggggaccaagccggggactaaggcgagccggagaccgagcccgaacagcagggccagacgggcccagccagcaccaagatgagtgccacgtcctggttcctggtgagcagcagcggcgcccgccaccggctccctcgggagctcatcttcgtggggcgtgaggagtgtgagctcatgctacagtcccgcagcgtggacaagcagcatgccgtcatcaactacgaccaggacagggacgagcactgggtgaaggacctgggcagcctcaatgggacgtttgtgaatgacatgcgcatcccggaccagaagtacgtcacgctgaagctcaacgatgtcatccgcttcggctacgattccaacatgtatgtgctggagcgtgtgcagcaccgagtcccggaggaggcactcaagcatgaaaagtacaccagccagctgcaggtgagcgtgaagggtttggcgcccaagaggagcgaggcactgccggaacacacaccatactgcgaggcctcgaaccccaggccggagaagggggaccggagaccaggaacagaggcagcctcttaccgcacacccctgtatgggcagccctcctggtggggtgaggacgatggtagcacgctgcctgacgcccagcgccagggagagccctacccagcagagcgccccaagggaccagtgcagcaggacggggagctccacggcttccgcgcccctgctgagcctcagggctgctcgttccggcgggagcccagctacttcgagatccccacgaaggagaccccgcagccgtcgcagccccccgaggtgccggcacacgagatgcccacgaaggatgcagaggcaggtgggggcggagcggcccctgtggtgcagagccacgcctccttcaccatcgagtttgatgactgcagccctggcaagatgaagatcaaggaccatatcaccaagttttccctgcgccagcggcggcccccgggcaaggaggccacacctggcgagatggtgtcggctgagaccaaggtggccgactggctggtgcagaatgacccgagcctgctgcaccgggttggccctggggatgaccgccacagcaccaagagcgacctgcctgtccacacccgcaccctgaagggccacaagcacgaggacggcacgcagagtgactcagaggaccccctggccaaggcggcctcggccgctggggtgcccttggaggccagcggggagcaggtgcggctgcagaggcagatcaagcgggacccccaggagctactacataaccagcaggcctttgtcatcgagttcttcgacgaggacacaccccgaaagaagcgctcccagtccttcacgcacagcccgtccggggaccccaaggccgacaagcgccgtggcccaacgccggccgatagggaccgccccagtgtcccagccccagtccaggcagggggccgcagctcggggccacagagggccggctcgctcaagcgggagaagacagaggaacggctgggcagcccctcgcccgcctcccgaacccctgcccgccccttcggaagcgtggggcgccgctcccgcctggcccaggacttcatggcccagtgtctgcgggagagctccccggccgcccggcccagccccgagaaggttcctccggtgctgcccgctcccctgacaccccatgggaccagccccgtgggccccccgaccccaccgcccgcccccacggacccccagctgaccaaggcacggaaacaggaggaggacgacagcctcagtgacgcagggacatacaccatcgagaccgaggcgcaggacacggaggtggaggaggcccggaagatgatcgaccaggtctttggggtgttggagtcccctgaactctccagggcatcttcggccacctttcgcccagtcatcagaggggacagagatgagtctgatgacgggggcgtggcccagcggatggcgctactgcaggagtttgcctcccggccactgggtgcggccccccaggcggagcaccagggcctcccggtgccgggctcccctgggggtcagaagtgggtgtcccgctgggccagcctggctgacagctactcagacccgggcctcacagaggatggcctgggacgtagaggcggggagccggaggggtccctgcctgtgcgcatgcggcgacggctccctcagctgcccagtgagagggctgacagccctgcgggcccagagagcagcaggaggagtgggcctgggccaccggagctggacagtgagcagcccagccgcctcttcggccaggaggagttggatcctgacagcctcagcgatgccagtgggtcggacgggggccgaggccccgagccaggggtggagccacaggacagcagacgcaggagcccccaggaggggcccacgtggagcaggggtcggcgctcaccaagggcccccggggagccaactcccgcctctttcttcattggggaccagaatggggacgctgtgttatctaggaaaccgcttgcggctccaggggatggggagggcctagggcagacagcccagcccagccccccagcacgggatggcgtctatgtcagtgccaatgggagaatggtcatccagctacggcctggacggtccccagaacccgacggccctgccccagcctttctccggcaagagagcttcactaaggagccagccagtggtcccccagcgcccggcaagcccccccacatctccagccacccgcttctacaggacctggccgctacccgggccgcacgcatggacttccactcccaggacacccacctgatcttgaaggagacggagacggccctggcggccctggaggcccgactcctctctaattctgtggatgccgagtgtgaggggggcagcaccccgaggccgccggaggacgccctgtctggggactcggacgtggacacagccagcaccgtcagcctgcgtagtggcaagagcgggcccagccccacaaccccccagcctctgcgggcacagaaggagatgtcgccatccccgccagctgcacaggacccgggaggcaccgccctggtcagtgcccgtgagcagtcctcagagaggcagcatcacccacttggcccgacggacatgggccgtggagagccggtacggcgctcagccataaggcgtggccacaggccccgagggtccctggattggcccagtgaggagcgtggccctgtcctcgcccacctacccagctcagatgtgatggcctccaaccacgaaacccctgaggccaccggggcaggacggctaggttctcgccggaaaccagcggccccaccgccatccccagctgcccgggaggagcagagccgtagctcagccagctcccagaaggggccgcaggccttgacccgctccaacagcctgtccacccctcgccccacacgggcctcccggctgaggcgggcccggctgggggacgcttcagacactgaggctgcggatggtgagcgggggtccctgggcaaccctgagcccgtgggccggccagctgctgagcaggccaagaagctgtcacgcctggacatcctggccatgccccggaagcgggccggctccttcacagggactagtgaccccgaggcagcccctgcccgcaccagcttctctggccgcagtgtggagttgtgctgtgccagccgcaagcccaccatggccgaagcacgggctgtctccaggaaggctgccaacacagccaccaccacgggtccccgccagcccttcagcagggcccgctcaggcagtgcccgatacacctccaacacgaggcgccggcagcagggctcggattacacgtccacctctgaggaggagtacggctcccgccacggctcccccaaacacacacgctcccacacctcaacagccactcagaccccgagggctggcagctccagccgggctcgttcccgggcccccggcccccgggacacggacgacgatgaggaggagcctgacccttatggtttcatcgtgcagacggcagagattgcggagattgccaggctgagccagacgctggtgaaggacgtggccatcctagcccaggagatccacgatgtggctggggacggtgacacactgggctcctcggagcctgcccacagcgcctccctcagcaacatgcccagcacccccgcctcgaccatctctgcccgggaggagctggtgcagcgcatccccgaggccagcctcaacttccagaaggtgccgcccggctcgctgaactctcgggactttgaccagaacatgaacgacagctgtgaggacgccctggccaacaagacgcggcctcggaaccgagaggaggtgatcttcgataacctgatgctgaacccggtgtcccagctgtcgcaggccatccgtgagaacacagagcaccttgccgagaagatgaagatcctctttcagaacacagggagagcttgggaggacctggaagccaggatcaacgccgagaacgaggtgcccatcctgaagacatctaacaaggaaatcagctccatcctgaaggaactgaggcgggtgcagaaacagctggaagttatcaatgccatcgtggaccccagtgggagcctggacctgctcacaggaaacaggagcttggccagctctgcacagccggggctggggaagggccgcgtggctgcccagagcccaccctcacccgcctcagccgaggccctgctgccagccctgcccctgaggaatttcccacagcgggccagctgtgggcctcccagcctcccggaccccaccttcctccctgatgccgagaggttcctgatctaggccccagacctggccaggccagcctccctgtgcgtgtgcgtctctgccttccgtccgccgcacacccgcctgcctggccgcaggtggttctccctgaagacccccacatgtgccatatccctgtgggcgggtgcctcccacgcccttgccccctcgtcagctcccagccagcaccctactcaccctgtccagccccatggccacccccacccctgcctcgccccctacaggcctctgggcccagctcctggccaggctgctgccaaggtcaagccctcaagggcattaccccgcctcctcttcatcactgttatttttgtctttagctttaaaggaaagagttgttggtgccattgcaggtgccccctccaggcctgactggctccgccaggcactaacctgccataaccctttgtgctggcctgcggccaggcagaggaagagaggtcgactgtggggtcatttggtgccaaacatggaggtgggcaggctcacctgttcctgggactgtctgagatggcagggcacttgccctggtggctcccacctgaccccaggccttttataggcaggagccccactgcttccagcctctggtgccaacacagttgccaaacccattgagcttggggctgccctgtggaggcctcctgggtatggaccaggggcttgttgagagctgagccatgcacacaggtgcagacaccccccaactcccatgcacacggctagtccaggcgcctccacgctgcaccgtgaggactgcagggcatgtccccgtgaggggctatgggcctctgtaggtgggcttccaaggtcctgggtgcagccgggtgcatggcagcccttctggcgggggtgagcgcacgaccaaagtcactggaagccgggtttccggaagctcgcagcttggcctgcaccacacgccctccccttttggcttcacgccatcaggcctcaagtgggcatgggggcagggacgggcccaggaactgttgttttctcaggattctttcagctgggaacatggcaggtgagcagagcttggtgcctctgccgtggcccctgctggggcagcccgtgttgccggagcctctaagccaaagagcccgttggccgtggttggtgggggtggacgtgggggtgtcccacctggaccagactggcgtgggtgagctccacaccctgcctggcaatggtatgagagtcggacctggacagggccagctgctgggggagcggcactggggactggaggctggaagcgggtggtgtgtgtcccctgtttacttttagctgagctggggttgggtgtacgggttctgttcctctgagcctgcggcccacctgatgtttacgtgtgtgtgtgagggggggcgggggtggcaggtgtccccccctggtccccgccccaagagcctgctgtctgtatggaggaggtgctagcccggtccaccgggctgctgcccacccctgcatgccccagttgcccaccccgcctgcccctggacatgaagtggtcacgcttcatccacggctccttcccacccctcggcagtggctgtgcaatgttttaagttcacaagttcctgctcctccccacactgagctcctttgttcctccccctccagcctttgcctgggaactggtccttgtttgccgggcttctcggagggttcactgtacattcgttctcaggtggtcttgtggctgtctttcggaaaatggttattttatatgatttgtcatggaatttgttctaataaatcattcttctatcacatggcagcacgctggagcctgtcaccttg

SEQ ID NO: 116479 - DNA, 6683 bp, Homo sapiens
  Payload ID: 2727
  Gene Symbol: CEP170B
  Gene Name: centrosomal protein 170B
  Uniprot ID: Q9Y4F5
  ENST ID: ENST00000556508
  CDS Start-End: 340-4899
cccgcgcgcgaggccgccggcggccgctctgccgtgggctcggcccgggctgccacgagcgtgcgggcctcgccgggcatgtcctaggcggcggccccgcccagcgctcggccgggcgggcgggcgggcgcgagggcagggaccgagccgggccgagctggggaacaagccggggaccaagccggggaccaagccggggactaaggcgagccggagaccgagcccgaacagcagtcccgcagcgtggacaagcagcatgccgtcatcaactacgaccaggacagggacgagcactgggtgaaggacctgggcagcctcaatgggacgtttgtgaatgacatgcgcatcccggaccagaagtacgtcacgctgaagctcaacgatgtcatccgcttcggctacgattccaacatgtatgtgctggagcgtgtgcagcaccgagtcccggaggaggcactcaagcatgaaaagtacaccagccagctgcaggtgagcgtgaagggtttggcgcccaagaggagcgaggcactgccggaacacacaccatactgcgaggcctcgaaccccaggccggagaagggggaccggagaccaggaacagaggcagcctcttaccgcacacccctgtatgggcagccctcctggtggggtgaggacgatggtagcacgctgcctgacgcccagcgccagggagagccctacccagagcgccccaagggaccagtgcagcaggacggggagctccacggcttccgcgcccctgctgagcctcagggctgctcgttccggcgggagcccagctacttcgagatccccacgaaggagaccccgcagccgtcgcagccccccgaggtgccggcacacgagatgcccacgaaggatgcagaggcaggtgggggcggagcggcccctgtggtgcagagccacgcctccttcaccatcgagtttgatgactgcagccctggcaagatgaagatcaaggaccatatcaccaagttttccctgcgccagcggcggcccccgggcaaggaggccacacctggcgagatggtgtcggctgagaccaaggtggccgactggctggtgcagaatgacccgagcctgctgcaccgggttggccctggggatgaccgccacagcaccaagagcgacctgcctgtccacacccgcaccctgaagggccacaagcacgaggacggcacgcagagtgactcagaggaccccctggccaaggcggcctcggccgctggggtgcccttggaggccagcggggagcaggtgcggctgcagaggcagatcaagcgggacccccaggagctactacataaccagcaggcctttgtcatcgagttcttcgacgaggacacaccccgaaagaagcgctcccagtccttcacgcacagcccgtccggggaccccaaggccgacaagcgccgtggcccaacgccggccgatagggaccgccccagtgtcccagccccagtccaggcagggggccgcagctcggggccacagagggccggctcgctcaagcgggagaagacagaggaacggctgggcagcccctcgcccgcctcccgaacccctgcccgccccttcggaagcgtggggcgccgctcccgcctggcccaggacttcatggcccagtgtctgcgggagagctccccggccgcccggcccagccccgagaaggttcctccggtgctgcccgctcccctgacaccccatgggaccagccccgtgggccccccgaccccaccgcccgcccccacggacccccagctgaccaaggcacggaaacaggaggaggacgacagcctcagtgacgcagggacatacaccatcgagaccgaggcgcaggacacggaggtggaggaggcccggaagatgatcgaccaggtctttggggtgttggagtcccctgaactctccagggcatcttcggccacctttcgcccagtcatcagaggggacagagatgagtctgatgacgggggcgtggcccagcggatggcgctactgcaggagtttgcctcccggccactgggtgcggccccccaggcggagcaccagggcctcccggtgccgggctcccctgggggtcagaagtgggtgtcccgctgggccagcctggctgacagctactcagacccgggcctcacagaggatggcctgggacgtagaggcggggagccggaggggtccctgcctgtgcgcatgcggcgacggctccctcagctgcccagtgagagggctgacagccctgcgggcccagagagcagcaggaggagtgggcctgggccaccggagctggacagtgagcagcccagccgcctcttcggccaggaggagttggatcctgacagcctcagcgatgccagtgggtcggacgggggccgaggccccgagccaggggtggagccacaggacagcagacgcaggagcccccaggaggggcccacgtggagcaggggtcggcgctcaccaagggcccccggggagccaactcccgcctctttcttcattggggaccagaatggggacgctgtgttatctaggaaaccgcttgcggctccaggggatggggagggcctagggcagacagcccagcccagccccccagcacgggatggcgtctatgtcagtgccaatgggagaatggtcatccagctacggcctggacggtccccagaacccgacggccctgccccagcctttctccggcaagagagcttcactaaggagccagccagtggtcccccagcgcccggcaagcccccccacatctccagccacccgcttctacaggacctggccgctacccgggccgcacgcatggacttccactcccaggacacccacctgatcttgaaggagacggagacggccctggcggccctggaggcccgactcctctctaattctgtggatgccgagtgtgaggggggcagcaccccgaggccgccggaggacgccctgtctggggactcggacgtggacacagccagcaccgtcagcctgcgtagtggcaagagcgggcccagccccacaaccccccagcctctgcgggcacagaaggagatgtcgccatccccgccagctgcacaggacccgggaggcaccgccctggtcagtgcccgtgagcagtcctcagagaggcagcatcacccacttggcccgacggacatgggccgtggagagccggtacggcgctcagccataaggcgtggccacaggccccgagggtccctggattggcccagtgaggagcgtggccctgtcctcgcccacctacccagctcagatgtgatggcctccaaccacgaaacccctgaggccaccggggcaggacggctaggttctcgccggaaaccagcggccccaccgccatccccagctgcccgggaggagcagagccgtagctcagccagctcccagaaggggccgcaggccttgacccgctccaacagcctgtccacccctcgccccacacgggcctcccggctgaggcgggcccggctgggggacgcttcagacactgaggctgcggatggtgagcgggggtccctgggcaaccctgagcccgtgggccggccagctgctgagcaggccaagaagctgtcacgcctggacatcctggccatgccccggaagcgggccggctccttcacagggactagtgaccccgaggcagcccctgcccgcaccagcttctctggccgcagtgtggagttgtgctgtgccagccgcaagcccaccatggccgaagcacgggctgtctccaggaaggctgccaacacagccaccaccacgggtccccgccagcccttcagcagggcccgctcaggcagtgcccgatacacctccaacacgaggcgccggcagcagggctcggattacacgtccacctctgaggaggagtacggctcccgccacggctcccccaaacacacacgctcccacacctcaacagccactcagaccccgagggctggcagctccagccgggctcgttcccgggcccccggcccccgggacacggacgacgatgaggaggagcctgacccttatggtttcatcgtgcagacggcagagattgcggagattgccaggctgagccagacgctggtgaaggacgtggccatcctagcccaggagatccacgatgtggctggggacggtgacacactgggctcctcggagcctgcccacagcgcctccctcagcaacatgcccagcacccccgcctcgaccatctctgcccgggaggagctggtgcagcgcatccccgaggccagcctcaacttccagaaggtgccgcccggctcgctgaactctcgggactttgaccagaacatgaacgacagctgtgaggacgccctggccaacaagacgcggcctcggaaccgagaggaggtgatcttcgataacctgatgctgaacccggtgtcccagctgtcgcaggccatccgtgagaacacagagcaccttgccgagaagatgaagatcctctttcagaacacagggagagcttgggaggacctggaagccaggatcaacgccgagaacgaggtgcccatcctgaagacatctaacaaggaaatcagctccatcctgaaggaactgaggcgggtgcagaaacagctggaagttatcaatgccatcgtggaccccagtgggagcctggacctgctcacaggaaacaggagcttggccagctctgcacagccggggctggggaagggccgcgtggctgcccagagcccaccctcacccgcctcagccgaggccctgctgccagccctgcccctgaggaatttcccacagcgggccagctgtgggcctcccagcctcccggaccccaccttcctccctgatgccgagaggttcctgatctaggccccagacctggccaggccagcctccctgtgcgtgtgcgtctctgccttccgtccgccgcacacccgcctgcctggccgcaggtggttctccctgaagacccccacatgtgccatatccctgtgggcgggtgcctcccacgcccttgccccctcgtcagctcccagccagcaccctactcaccctgtccagccccatggccacccccacccctgcctcgccccctacaggcctctgggcccagctcctggccaggctgctgccaaggtcaagccctcaagggcattaccccgcctcctcttcatcactgttatttttgtctttagctttaaaggaaagagttgttggtgccattgcaggtgccccctccaggcctgactggctccgccaggcactaacctgccataaccctttgtgctggcctgcggccaggcagaggaagagaggtcgactgtggggtcatttggtgccaaacatggaggtgggcaggctcacctgttcctgggactgtctgagatggcagggcacttgccctggtggctcccacctgaccccaggccttttataggcaggagccccactgcttccagcctctggtgccaacacagttgccaaacccattgagcttggggctgccctgtggaggcctcctgggtatggaccaggggcttgttgagagctgagccatgcacacaggtgcagacaccccccaactcccatgcacacggctagtccaggcgcctccacgctgcaccgtgaggactgcagggcatgtccccgtgaggggctatgggcctctgtaggtgggcttccaaggtcctgggtgcagccgggtgcatggcagcccttctggcgggggtgagcgcacgaccaaagtcactggaagccgggtttccggaagctcgcagcttggcctgcaccacacgccctccccttttggcttcacgccatcaggcctcaagtgggcatgggggcagggacgggcccaggaactgttgttttctcaggattctttcagctgggaacatggcaggtgagcagagcttggtgcctctgccgtggcccctgctggggcagcccgtgttgccggagcctctaagccaaagagcccgttggccgtggttggtgggggtggacgtgggggtgtcccacctggaccagactggcgtgggtgagctccacaccctgcctggcaatggtatgagagtcggacctggacagggccagctgctgggggagcggcactggggactggaggctggaagcgggtggtgtgtgtcccctgtttacttttagctgagctggggttgggtgtacgggttctgttcctctgagcctgcggcccacctgatgtttacgtgtgtgtgtgagggggggcgggggtggcaggtgtccccccctggtccccgccccaagagcctgctgtctgtatggaggaggtgctagcccggtccaccgggctgctgcccacccctgcatgccccagttgcccaccccgcctgcccctggacatgaagtggtcacgcttcatccacggctccttcccacccctcggcagtggctgtgcaatgttttaagttcacaagttcctgctcctccccacactgagctcctttgttcctccccctccagcctttgcctgggaactggtccttgtttgccgggcttctcggagggttcactgtacattcgttctcaggtggtcttgtggctgtctttcggaaaatggttattttatatgatttgtcatggaatttgttctaataaatcattcttctatcaca

SEQ ID NO: 116480 - DNA, 5961 bp, Homo sapiens
  Payload ID: 2728
  Gene Symbol: CEP170
  Gene Name: centrosomal protein 170kDa
  ENST ID: ENST00000336415
  CDS Start-End: 1-4676
tacaaggagaaatgagggtccctgaagaagctcttaagcatgagaagtttaccattcagcttcagttgtcccaaaaatcttcagaatcagaattatccaaatctgcaagtgccaaaagcatagattcaaaggtagcagacgctgctactgaagtgcagcacaaaactactgaagcactgaaatccgaggaaaaagccatggatatttctgctatgccccgtggtactccattatatgggcagccgtcatggtggggggatgatgaggtggatgaaaaaagagctttcaagacaaatggcaaacctgaagaaaaaaaccatgaagctggaacatcagggtgcggcatagatgccaagcaagttgaggaacaatctgcagctgcaaatgaagaagtactttttcctttctgtagggaaccaagttattttgaaatccctacaaaagaattccagcaaccatcacaaataacagaaagcactattcatgaaatcccaacaaaagacacgccaagttcccatataacaggtgcagggcatgcttcatttaccattgaatttgatgacagtaccccagggaaggtaactattagagaccatgtgacaaagtttacttctgatcagcgccacaagtccaagaagtcttctcctggaactcaagacttgctggggattcaaacaggaatgatggcacccgaaaacaaagttgctgactggctagcacaaaacaaccctcctcaaatgctatgggaaagaacagaagaggattctaaaagcattaaaagtgatgttccagtgtacttgaaaaggttgaaaggaaataaacatgatgatggtacgcaaagtgattcagagaacgctggggctcacaggcgctgtagcaaacgtgcaactcttgaggaacacttaagacgccaccattcagaacacaaaaagctacagaaggtccaggctactgaaaagcatcaagaccaagctgttgtaagtcaaactgcttttatgattgcattctttgatgaagacaatcccagaaaaagaaggtcgtattcttttactcaaagtgcgggaatcttgtgtcaggaaactacatattcaacaccacatacaaaacttgagaaagcaaagtctccaacagcagatgccaaagtggtttctttgtctttacagactagctctgcgcatcacagaggggggcatggtgttccacatgggaaattgttaaaacagaaatcagaggagccatcggtgtcaatacccttcctacaaactgcattattaagaagttcagggagtcttgggcacagaccaagccaggagatggataaaatgttaaaaaatcaagcaacttctgctacttctgaaaaggataatgatgatgaccaaagtgacaagggtacttataccattgagttagagaatcccaacagtgaggaagtggaagcaagaaaaatgattgacaaggtgtttggagtagatgacaatcaggattataataggcctgttatcaacgaaaaacataaagatctaataaaagattgggctctcagttctgctgcagcagtaatggaagaaagaaaaccactgactacatctggatttcaccactcagaggaaggcacatcttcatctggaagcaaacgttgggtttcacagtgggctagtttggctgccaatcatacaaggcatgatcaagaagaaaggataatggaattttctgcacctcttcctttagagaatgagacagagatcagtgagtctggcatgacagtgagaagtactggctctgcaacttccttggctagccagggagagagaaggagacgaactcttccccagcttccaaatgaagaaaagtctcttgagagccacagagcaaaggttgtaacacagaggtcagagataggagaaaaacaagacacagaacttcaggagaaagaaacacctacacaggtataccagaaagataaacaagatgctgacagacccttgagtaaaatgaacagggcagtaaatggagagactctcaaaactggtggagataataaaaccctacttcacttaggcagctctgctcctggaaaagagaaaagtgaaactgataaggaaacttctttggtaaagcaaacattagcaaaacttcaacaacaagaacaaagggaggaggctcagtggacacctactaaattgtcttccaaaaatgtttcaggtcagacagataaatgtagggaggaaacttttaaacaagaatcacaacctccagaaaaaaattcaggacattctacaagcaaaggagacagagtggcacaaagtgagagcaagagaagaaaagctgaggaaattctgaaaagtcagactccaaagggaggagacaagaaggaatcctccaagtcattagtgcgacaagggagcttcactatagaaaaacccagcccaaacatacccatagaacttattccccatataaataaacagacttcctctactccttcttctttagcattaacatctgcaagtagaatacgagaaagaagtgagtctttggatcctgattctagtatggacacaacccttattctaaaagacacagaagcagtaatggcttttctagaagctaaactacgtgaagataataaaactgatgaaggaccagatactcccagttataatagagacaattctatttcaccagaatctgatgtagatacagctagtacaatcagtctggttactggagaaactgaaagaaagtcaacccaaaagcgaaagagtttcactagcctctataaagataggtgttccacaggttctccttccaaagatgttacaaaatcatcatcttcaggtgctagggaaaaaatggaaaagaaaacaaaaagtcgttccacagatgtgggttcaagagcagatggtcgtaaatttgttcagtccagtgggagaataagacagccctcagtagacttaacagatgatgaccaaacctctagtgtacctcattctgccatctctgatattatgtcatctgatcaagaaacttactcttgtaaacctcatggacggactccacttacctcagctgatgagcatgtacattccaaactggaaggaagtaaagtaacgaaatctaagacttctccggtggtatctggttcatctagtaaatcaaccacccttccaaggccacgacctaccaggacttccctcttgcgcagagcacgacttggtgaagcttcagacagtgaacttgctgatgctgacaaagcatctgttgcttctgaagtatccacaacaagttctacatcaaaacctcccacaggaaggcgtaacatctctcggattgatttattggctcagcctcgtagaacacgacttggctcactgtcagctcgtagtgactctgaagcaacaatttctagaagtagtgcctcttcgaggaccgcagaagccatcattagaagtggagccagactagtaccatcagataaattttctcctagaattagagctaacagtatctctcgactctcagactccaaggtcaaaagtatgacctcagctcatggctctgcttcagtaaattcaagatggaggcgctttcctactgattatgcttccacctcagaagatgaatttggatcaaaccgtaattcccctaaacatacccgtctacgtacttctccagccctgaaaaccactcgcttgcagagcgctggatcagcaatgcctactagttcttcattcaaacaccggattaaagagcaggaagactacatccgagattggactgctcatcgagaagagatagccaggatcagccaagatcttgctctcattgctcgggagatcaacgatgtagcaggagagatagattcagtgacttcatcaggcactgcccctagtaccacagtaagcactgctgccaccacccctggctctgccatagacactagagaagaggtaggagatcttcatggagaaatgcataagttggttgatcgtgtttttgatgaaagcctcaacttccgaaagattcctccattagttcattccaaaacaccagaaggaaacaacggtcgatctggtgatccaagacctcaagcagcagagcctcccgatcacttaacaattacaaggcggagaacctggagcagggatgaagtcatgggagataatctgctgctgtcatccgtctttcagttctctaagaagataagacaatctatagataagacagctggaaagatcagaatattatttaaagacaaagatcggaattgggatgacatagaaagcaaattaagagccgaaagtgaagtccctattgtgaaaacctcaagcatggagatttcttctatcttacaggaactgaaaagagtagaaaagcagctgcaagcaatcaatgctatgattgatcctgatggaactttggaggctctgaacaacatgggatttcccagtgctatgttgccatctccaccgaaacagaagtccagccctgtgaataaccaccacagcccgggtcagacaccaacacttggccaaccagaagctagggctcttcatcctgctgctgtttcagccgcagctgaatttgagaatgctgaatctgaggctgatttcagtatacatttcaatagattcaaccccgatggggaagaggaagatgttacagtacaagaatgactttctcttgattgttgaaaaatcattacctgtggaatggctaggaatattggaagcagcatagtgttgatgtacgcaaaacaagacagcttggtcagctacaatcttggaatccctgtcttcttaattttatttatttatttttgacgtataatgtagtatatcaatcctttcaaactatttagataaccacttgatgcacaaataggaaaaagcagattgtggcagtgtcgccttttgtggttttatgattttcaaattgaatttaatgattacaccctttcccttcatagatcttttttcttttttttaagccatgctgtgacctacaagcaaactaaatagccaacatttctgaacccctaagtctcctgtgccaagctgctccctgaaatggacttcttcatctgtacagatttgttaaaccattctatttgcttcttaataataggatttatattagtactcattaccattggacacaatgacataagtactctccacagtaaagcagacctttcacaacagtcactctgtgtcctaaaattttccaacatagatgtgatttatataactttgttgatacgtaaattgtcttggggtttacggaaattaactattatgtttgcactaagatttgctgggagtggtaggtggacatatctatatatcaataaggactaaccgtcttttttgtacataggagattgataatactgtatttgttttaagcccacagtgttttactccactttcaaaaagatcaatttggcactttttttcattttttttaatggaaataagatttggtctctcattttaggttaaatgataactagaaagattaaactagacagatagtttaggtggagtatatttttaaaactcagaacatgtatattggtcctgtgttaccaagtttatatgtgacagttgaaaaagaaattcccttgaaatgatcatgaggttaaaattttcttcattaggggacttggagaaccagtagtcgtaagattagttgatagtttcactcccaagcaatgaattgcttctgtgtgtttccctgtaggactcaatagtaaatgctgtctgtcttacacatttataaggaccctgcaagacgacgacaaaggcctttggcctgtgctactaaacaagaagcctatgaaaaatttcttctttaaacttgttttttctctttccagtaagttcacatttggataattttaaaaagaaaagtaattacctttgtgtttccagaacactataattggggtgtatctta

SEQ ID NO: 116481 - DNA, 6828 bp, Homo sapiens
  Payload ID: 2728
  Gene Symbol: CEP170
  Gene Name: centrosomal protein 170kDa
  Uniprot ID: Q5SW79
  ENST ID: ENST00000366542
  CDS Start-End: 53-4807
cacggtaaggggatgacgtagctttgccaaagacttagaagctaagcagaaaatgagcttaacatcctggtttttggtgagcagtggaggcactcgccacaggctgccacgagaaatgatttttgttggaagagatgactgtgagctcatgttgcagtctcgtagtgtggataagcaacacgctgtcatcaactatgatgcgtctacggatgagcatttagtgaaggatttgggcagcctcaatgggacttttgtgaatgatgtaaggattccggaacagacttatatcaccttgaaacttgaagataagctgagatttggatatgatacaaatcttttcactgtagtacaaggagaaatgagggtccctgaagaagctcttaagcatgagaagtttaccattcagcttcagttgtcccaaaaatcttcagaatcagaattatccaaatctgcaagtgccaaaagcatagattcaaaggtagcagacgctgctactgaagtgcagcacaaaactactgaagcactgaaatccgaggaaaaagccatggatatttctgctatgccccgtggtactccattatatgggcagccgtcatggtggggggatgatgaggtggatgaaaaaagagctttcaagacaaatggcaaacctgaagaaaaaaaccatgaagctggaacatcagggtgcggcatagatgccaagcaagttgaggaacaatctgcagctgcaaatgaagaagtactttttcctttctgtagggaaccaagttattttgaaatccctacaaaagaattccagcaaccatcacaaataacagaaagcactattcatgaaatcccaacaaaagacacgccaagttcccatataacaggtgcagggcatgcttcatttaccattgaatttgatgacagtaccccagggaaggtaactattagagaccatgtgacaaagtttacttctgatcagcgccacaagtccaagaagtcttctcctggaactcaagacttgctggggattcaaacaggaatgatggcacccgaaaacaaagttgctgactggctagcacaaaacaaccctcctcaaatgctatgggaaagaacagaagaggattctaaaagcattaaaagtgatgttccagtgtacttgaaaaggttgaaaggaaataaacatgatgatggtacgcaaagtgattcagagaacgctggggctcacaggcgctgtagcaaacgtgcaactcttgaggaacacttaagacgccaccattcagaacacaaaaagctacagaaggtccaggctactgaaaagcatcaagaccaagctgttactagctctgcgcatcacagaggggggcatggtgttccacatgggaaattgttaaaacagaaatcagaggagccatcggtgtcaatacccttcctacaaactgcattattaagaagttcagggagtcttgggcacagaccaagccaggagatggataaaatgttaaaaaatcaagcaacttctgctacttctgaaaaggataatgatgatgaccaaagtgacaagggtacttataccattgagttagagaatcccaacagtgaggaagtggaagcaagaaaaatgattgacaaggtgtttggagtagatgacaatcaggattataataggcctgttatcaacgaaaaacataaagatctaataaaagattgggctctcagttctgctgcagcagtaatggaagaaagaaaaccactgactacatctggatttcaccactcagaggaaggcacatcttcatctggaagcaaacgttgggtttcacagtgggctagtttggctgccaatcatacaaggcatgatcaagaagaaaggataatggaattttctgcacctcttcctttagagaatgagacagagatcagtgagtctggcatgacagtgagaagtactggctctgcaacttccttggctagccagggagagagaaggagacgaactcttccccagcttccaaatgaagaaaagtctcttgagagccacagagcaaaggttgtaacacagaggtcagagataggagaaaaacaagacacagaacttcaggagaaagaaacacctacacaggtataccagaaagataaacaagatgctgacagacccttgagtaaaatgaacagggcagtaaatggagagactctcaaaactggtggagataataaaaccctacttcacttaggcagctctgctcctggaaaagagaaaagtgaaactgataaggaaacttctttggtaaagcaaacattagcaaaacttcaacaacaagaacaaagggaggaggctcagtggacacctactaaattgtcttccaaaaatgtttcaggtcagacagataaatgtagggaggaaacttttaaacaagaatcacaacctccagaaaaaaattcaggacattctacaagcaaaggagacagagtggcacaaagtgagagcaagagaagaaaagctgaggaaattctgaaaagtcagactccaaagggaggagacaagaaggaatcctccaagtcattagtgcgacaagggagcttcactatagaaaaacccagcccaaacatacccatagaacttattccccatataaataaacagacttcctctactccttcttctttagcattaacatctgcaagtagaatacgagaaagaagtgagtctttggatcctgattctagtatggacacaacccttattctaaaagacacagaagcagtaatggcttttctagaagctaaactacgtgaagataataaaactgatgaaggaccagatactcccagttataatagagacaattctatttcaccagaatctgatgtagatacagctagtacaatcagtctggttactggagaaactgaaagaaagtcaacccaaaagcgaaagagtttcactagcctctataaagataggtgttccacaggttctccttccaaagatgttacaaaatcatcatcttcaggtgctagggaaaaaatggaaaagaaaacaaaaagtcgttccacagatgtgggttcaagagcagatggtcgtaaatttgttcagtccagtgggagaataagacagccctcagtagacttaacagatgatgaccaaacctctagtgtacctcattctgccatctctgatattatgtcatctgatcaagaaacttactcttgtaaacctcatggacggactccacttacctcagctgatgagcatgtacattccaaactggaaggaagtaaagtaacgaaatctaagacttctccggtggtatctggttcatctagtaaatcaaccacccttccaaggccacgacctaccaggacttccctcttgcgcagagcacgacttggtgaagcttcagacagtgaacttgctgatgctgacaaagcatctgttgcttctgaagtatccacaacaagttctacatcaaaacctcccacaggaaggcgtaacatctctcggattgatttattggctcagcctcgtagaacacgacttggctcactgtcagctcgtagtgactctgaagcaacaatttctagaagtagtgcctcttcgaggaccgcagaagccatcattagaagtggagccagactagtaccatcagataaattttctcctagaattagagctaacagtatctctcgactctcagactccaaggtcaaaagtatgacctcagctcatggctctgcttcagtaaattcaagatggaggcgctttcctactgattatgcttccacctcagaagatgaatttggatcaaaccgtaattcccctaaacatacccgtctacgtacttctccagccctgaaaaccactcgcttgcagagcgctggatcagcaatgcctactagttcttcattcaaacaccggattaaagagcaggaagactacatccgagattggactgctcatcgagaagagatagccaggatcagccaagatcttgctctcattgctcgggagatcaacgatgtagcaggagagatagattcagtgacttcatcaggcactgcccctagtaccacagtaagcactgctgccaccacccctggctctgccatagacactagagaagagttggttgatcgtgtttttgatgaaagcctcaacttccgaaagattcctccattagttcattccaaaacaccagaaggaaacaacggtcgatctggtgatccaagacctcaagcagcagagcctcccgatcacttaacaattacaaggcggagaacctggagcagggatgaagtcatgggagataatctgctgctgtcatccgtctttcagttctctaagaagataagacaatctatagataagacagctggaaagatcagaatattatttaaagacaaagatcggaattgggatgacatagaaagcaaattaagagccgaaagtgaagtccctattgtgaaaacctcaagcatggagatttcttctatcttacaggaactgaaaagagtagaaaagcagctgcaagcaatcaatgctatgattgatcctgatggaactttggaggctctgaacaacatgggatttcccagtgctatgttgccatctccaccgaaacagaagtccagccctgtgaataaccaccacagcccgggtcagacaccaacacttggccaaccagaagctagggctcttcatcctgctgctgtttcagccgcagctgaatttgagaatgctgaatctgaggctgatttcagtatacatttcaatagattcaaccccgatggggaagaggaagatgttacagtacaagaatgactttctcttgattgttgaaaaatcattacctgtggaatggctaggaatattggaagcagcatagtgttgatgtacgcaaaacaagacagcttggtcagctacaatcttggaatccctgtcttcttaattttatttatttatttttgacgtataatgtagtatatcaatcctttcaaactatttagataaccacttgatgcacaaataggaaaaagcagattgtggcagtgtcgccttttgtggttttatgattttcaaattgaatttaatgattacaccctttcccttcatagatcttttttcttttttttaagccatgctgtgacctacaagcaaactaaatagccaacatttctgaacccctaagtctcctgtgccaagctgctccctgaaatggacttcttcatctgtacagatttgttaaaccattctatttgcttcttaataataggatttatattagtactcattaccattggacacaatgacataagtactctccacagtaaagcagacctttcacaacagtcactctgtgtcctaaaattttccaacatagatgtgatttatataactttgttgatacgtaaattgtcttggggtttacggaaattaactattatgtttgcactaagatttgctgggagtggtaggtggacatatctatatatcaataaggactaaccgtcttttttgtacataggagattgataatactgtatttgttttaagcccacagtgttttactccactttcaaaaagatcaatttggcactttttttcattttttttaatggaaataagatttggtctctcattttaggttaaatgataactagaaagattaaactagacagatagtttaggtggagtatatttttaaaactcagaacatgtatattggtcctgtgttaccaagtttatatgtgacagttgaaaaagaaattcccttgaaatgatcatgaggttaaaattttcttcattaggggacttggagaaccagtagtcgtaagattagttgatagtttcactcccaagcaatgaattgcttctgtgtgtttccctgtaggactcaatagtaaatgctgtctgtcttacacatttataaggaccctgcaagacgacgacaaaggcctttggcctgtgctactaaacaagaagcctatgaaaaatttcttctttaaacttgttttttctctttccagtaagttcacatttggataattttaaaaagaaaagtaattacctttgtgtttccagaacactataattggggtgtatcttaattcagttaaatattattagtagacctggattttcccccttgaccccatcagtctataaaggttaaactgcaacttttatgaaatggtctttaatatttccacaataatcctgtgctatatttgttttaagaaacaaagtaactctatacacttcaagactttacaggattttttaaatcctgtattgttggatcaattaataaagatgcaaaaaaactttatagagatgtaaaaacaaaactataatggatctcctatttttctttaaatacaaaaaaaaaaaggtaaatgaactattctccttgtaaagctaaattccccattctgtctaataaaggaagactgaaaaaaggttttaaagaacataaatggaaagatacaaatgctttgaaggaataaacgaaatgttaaaacagggtcaatccatttgaagaaaaagttggacaaaataatcagcattgctccctcttttatttaatatttgggtactgattatatccacatggaagtagaaggtaaggagtttaggaaaatactagaatctactctgcttacattcttgtttaagtgtttacacagtttggttcaattataaacatttggccttttactatgttatttttattttgtatgaatacattatcctccttatttatttttgttacatttattacttatgttattttgttatgcatttacaactccatttttaaataaagtgtttctggaacttta

SEQ ID NO: 116482 - DNA, 6727 bp, Homo sapiens
  Payload ID: 2728
  Gene Symbol: CEP170
  Gene Name: centrosomal protein 170kDa
  Uniprot ID: Q5SW79
  ENST ID: ENST00000366543
  CDS Start-End: 324-4706
ttggaactgggcaggaggggatagggtccggctcctcgccctttcccgaggcgcctgcgcactaggcagtcggtctttgccgttaccgctatgtgtggggcgtgtgtggaataacgttattgcccagcggagctgagggccccggagctcgaccgcagcggcagcgacgacaacagcggcgacgacgacgacgacgaggtggggggaggacggcgtgcgagagactcacgggacgcgacgcgccccgcctcccccgtccggtccctctctccacggtaaggggatgacgtagctttgccaaagacttagaagctaagcagaaaatgagcttaacatcctggtttttggtgagcagtggaggcactcgccacaggctgccacgagaaatgatttttgttggaagagatgactgtgagctcatgttgcagtctcgtagtgtggataagcaacacgctgtcatcaactatgatgcgtctacggatgagcatttagtgaaggatttgggcagcctcaatgggacttttgtgaatgatgtaaggattccggaacagacttatatcaccttgaaacttgaagataagctgagatttggatatgatacaaatcttttcactgtagtacaaggagaaatgagggtccctgaagaagctcttaagcatgagaagtttaccattcagcttcagttgtcccaaaaatcttcagaatcagaattatccaaatctgcaagtgccaaaagcatagattcaaaggtagcagacgctgctactgaagtgcagcacaaaactactgaagcactgaaatccgaggaaaaagccatggatatttctgctatgccccgtggtactccattatatgggcagccgtcatggtggggggatgatgaggtggatgaaaaaagagctttcaagacaaatggcaaacctgaagaaaaaaaccatgaagctggaacatcagggtgcggcatagatgccaagcaagttgaggaacaatctgcagctgcaaatgaagaagtactttttcctttctgtagggaaccaagttattttgaaatccctacaaaagaattccagcaaccatcacaaataacagaaagcactattcatgaaatcccaacaaaagacacgccaagttcccatataacaggtgcagggcatgcttcatttaccattgaatttgatgacagtaccccagggaaggtaactattagagaccatgtgacaaagtttacttctgatcagcgccacaagtccaagaagtcttctcctggaactcaagacttgctggggattcaaacaggaatgatggcacccgaaaacaaagttgctgactggctagcacaaaacaaccctcctcaaatgctatgggaaagaacagaagaggattctaaaagcattaaaagtgatgttccagtgtacttgaaaaggttgaaaggaaataaacatgatgatggtacgcaaagtgattcagagaacgctggggctcacaggcgctgtagcaaacgtgcaactcttgaggaacacttaagacgccaccattcagaacacaaaaagctacagaaggtccaggctactgaaaagcatcaagaccaagctgttgtgtttggagtagatgacaatcaggattataataggcctgttatcaacgaaaaacataaagatctaataaaagattgggctctcagttctgctgcagcagtaatggaagaaagaaaaccactgactacatctggatttcaccactcagaggaaggcacatcttcatctggaagcaaacgttgggtttcacagtgggctagtttggctgccaatcatacaaggcatgatcaagaagaaaggataatggaattttctgcacctcttcctttagagaatgagacagagatcagtgagtctggcatgacagtgagaagtactggctctgcaacttccttggctagccagggagagagaaggagacgaactcttccccagcttccaaatgaagaaaagtctcttgagagccacagagcaaaggttgtaacacagaggtcagagataggagaaaaacaagacacagaacttcaggagaaagaaacacctacacaggtataccagaaagataaacaagatgctgacagacccttgagtaaaatgaacagggcagtaaatggagagactctcaaaactggtggagataataaaaccctacttcacttaggcagctctgctcctggaaaagagaaaagtgaaactgataaggaaacttctttggtaaagcaaacattagcaaaacttcaacaacaagaacaaagggaggaggctcagtggacacctactaaattgtcttccaaaaatgtttcaggtcagacagataaatgtagggaggaaacttttaaacaagaatcacaacctccagaaaaaaattcaggacattctacaagcaaaggagacagagtggcacaaagtgagagcaagagaagaaaagctgaggaaattctgaaaagtcagactccaaagggaggagacaagaaggaatcctccaagtcattagtgcgacaagggagcttcactatagaaaaacccagcccaaacatacccatagaacttattccccatataaataaacagacttcctctactccttcttctttagcattaacatctgcaagtagaatacgagaaagaagtgagtctttggatcctgattctagtatggacacaacccttattctaaaagacacagaagcagtaatggcttttctagaagctaaactacgtgaagataataaaactgatgaaggaccagatactcccagttataatagagacaattctatttcaccagaatctgatgtagatacagctagtacaatcagtctggttactggagaaactgaaagaaagtcaacccaaaagcgaaagagtttcactagcctctataaagataggtgttccacaggttctccttccaaagatgttacaaaatcatcatcttcaggtgctagggaaaaaatggaaaagaaaacaaaaagtcgttccacagatgtgggttcaagagcagatggtcgtaaatttgttcagtccagtgggagaataagacagccctcagtagacttaacagatgatgaccaaacctctagtgtacctcattctgccatctctgatattatgtcatctgatcaagaaacttactcttgtaaacctcatggacggactccacttacctcagctgatgagcatgtacattccaaactggaaggaagtaaagtaacgaaatctaagacttctccggtggtatctggttcatctagtaaatcaaccacccttccaaggccacgacctaccaggacttccctcttgcgcagagcacgacttggtgaagcttcagacagtgaacttgctgatgctgacaaagcatctgttgcttctgaagtatccacaacaagttctacatcaaaacctcccacaggaaggcgtaacatctctcggattgatttattggctcagcctcgtagaacacgacttggctcactgtcagctcgtagtgactctgaagcaacaatttctagaagtagtgcctcttcgaggaccgcagaagccatcattagaagtggagccagactagtaccatcagataaattttctcctagaattagagctaacagtatctctcgactctcagactccaaggtcaaaagtatgacctcagctcatggctctgcttcagccctgaaaaccactcgcttgcagagcgctggatcagcaatgcctactagttcttcattcaaacaccggattaaagagcaggaagactacatccgagattggactgctcatcgagaagagatagccaggatcagccaagatcttgctctcattgctcgggagatcaacgatgtagcaggagagatagattcagtgacttcatcaggcactgcccctagtaccacagtaagcactgctgccaccacccctggctctgccatagacactagagaagaggtaggagatcttcatggagaaatgcataagttggttgatcgtgtttttgatgaaagcctcaacttccgaaagattcctccattagttcattccaaaacaccagaaggaaacaacggtcgatctggtgatccaagacctcaagcagcagagcctcccgatcacttaacaattacaaggcggagaacctggagcagggatgaagtcatgggagataatctgctgctgtcatccgtctttcagttctctaagaagataagacaatctatagataagacagctggaaagatcagaatattatttaaagacaaagatcggaattgggatgacatagaaagcaaattaagagccgaaagtgaagtccctattgtgaaaacctcaagcatggagatttcttctatcttacaggaactgaaaagagtagaaaagcagctgcaagcaatcaatgctatgattgatcctgatggaactttggaggctctgaacaacatgggatttcccagtgctatgttgccatctccaccgaaacagaagtccagccctgtgaataaccaccacagcccgggtcagacaccaacacttggccaaccagaagctagggctcttcatcctgctgctgtttcagccgcagctgaatttgagaatgctgaatctgaggctgatttcagtatacatttcaatagattcaaccccgatggggaagaggaagatgttacagtacaagaatgactttctcttgattgttgaaaaatcattacctgtggaatggctaggaatattggaagcagcatagtgttgatgtacgcaaaacaagacagcttggtcagctacaatcttggaatccctgtcttcttaattttatttatttatttttgacgtataatgtagtatatcaatcctttcaaactatttagataaccacttgatgcacaaataggaaaaagcagattgtggcagtgtcgccttttgtggttttatgattttcaaattgaatttaatgattacaccctttcccttcatagatcttttttcttttttttaagccatgctgtgacctacaagcaaactaaatagccaacatttctgaacccctaagtctcctgtgccaagctgctccctgaaatggacttcttcatctgtacagatttgttaaaccattctatttgcttcttaataataggatttatattagtactcattaccattggacacaatgacataagtactctccacagtaaagcagacctttcacaacagtcactctgtgtcctaaaattttccaacatagatgtgatttatataactttgttgatacgtaaattgtcttggggtttacggaaattaactattatgtttgcactaagatttgctgggagtggtaggtggacatatctatatatcaataaggactaaccgtcttttttgtacataggagattgataatactgtatttgttttaagcccacagtgttttactccactttcaaaaagatcaatttggcactttttttcattttttttaatggaaataagatttggtctctcattttaggttaaatgataactagaaagattaaactagacagatagtttaggtggagtatatttttaaaactcagaacatgtatattggtcctgtgttaccaagtttatatgtgacagttgaaaaagaaattcccttgaaatgatcatgaggttaaaattttcttcattaggggacttggagaaccagtagtcgtaagattagttgatagtttcactcccaagcaatgaattgcttctgtgtgtttccctgtaggactcaatagtaaatgctgtctgtcttacacatttataaggaccctgcaagacgacgacaaaggcctttggcctgtgctactaaacaagaagcctatgaaaaatttcttctttaaacttgttttttctctttccagtaagttcacatttggataattttaaaaagaaaagtaattacctttgtgtttccagaacactataattggggtgtatcttaattcagttaaatattattagtagacctggattttcccccttgaccccatcagtctataaaggttaaactgcaacttttatgaaatggtctttaatatttccacaataatcctgtgctatatttgttttaagaaacaaagtaactctatacacttcaagactttacaggattttttaaatcctgtattgttggatcaattaataaagatgcaaaaaaactttatagagatgtaaaaacaaaactataatggatctcctatttttctttaaatacaaaaaaaaaaaggtaaatgaactattctccttgtaaagctaaattccccattctgtctaataaaggaagactgaaaaaaggttttaaagaacataaatggaaagatacaaatgctttgaaggaataaacgaaatgttaaaacagggtcaatccatttgaagaaaaagttggacaaaataatcagcattgctccctcttttatttaatatttgggtactgattatatccacatggaagtagaaggtaaggagtttaggaaaatactagaatctactctgcttacattcttgtttaagtgtttacacagtttggttcaattataaacatttggccttttactatgttatttttattttgtatgaatacattatcctccttatttatttttgttacatttattacttatgttattttgttatgcatttacaactccatttttaaataaagtgtttctggaacttta

SEQ ID NO: 116483 - DNA, 6805 bp, Homo sapiens
  Payload ID: 2728
  Gene Symbol: CEP170
  Gene Name: centrosomal protein 170kDa
  Uniprot ID: Q5SW79
  ENST ID: ENST00000366544
  CDS Start-End: 324-4784
ttggaactgggcaggaggggatagggtccggctcctcgccctttcccgaggcgcctgcgcactaggcagtcggtctttgccgttaccgctatgtgtggggcgtgtgtggaataacgttattgcccagcggagctgagggccccggagctcgaccgcagcggcagcgacgacaacagcggcgacgacgacgacgacgaggtggggggaggacggcgtgcgagagactcacgggacgcgacgcgccccgcctcccccgtccggtccctctctccacggtaaggggatgacgtagctttgccaaagacttagaagctaagcagaaaatgagcttaacatcctggtttttggtgagcagtggaggcactcgccacaggctgccacgagaaatgatttttgttggaagagatgactgtgagctcatgttgcagtctcgtagtgtggataagcaacacgctgtcatcaactatgatgcgtctacggatgagcatttagtgaaggatttgggcagcctcaatgggacttttgtgaatgatgtaaggattccggaacagacttatatcaccttgaaacttgaagataagctgagatttggatatgatacaaatcttttcactgtagtacaaggagaaatgagggtccctgaagaagctcttaagcatgagaagtttaccattcagcttcagttgtcccaaaaatcttcagaatcagaattatccaaatctgcaagtgccaaaagcatagattcaaaggtagcagacgctgctactgaagtgcagcacaaaactactgaagcactgaaatccgaggaaaaagccatggatatttctgctatgccccgtggtactccattatatgggcagccgtcatggtggggggatgatgaggtggatgaaaaaagagctttcaagacaaatggcaaacctgaagaaaaaaaccatgaagctggaacatcagggtgcggcatagatgccaagcaagttgaggaacaatctgcagctgcaaatgaagaagtactttttcctttctgtagggaaccaagttattttgaaatccctacaaaagaattccagcaaccatcacaaataacagaaagcactattcatgaaatcccaacaaaagacacgccaagttcccatataacaggtgcagggcatgcttcatttaccattgaatttgatgacagtaccccagggaaggtaactattagagaccatgtgacaaagtttacttctgatcagcgccacaagtccaagaagtcttctcctggaactcaagacttgctggggattcaaacaggaatgatggcacccgaaaacaaagttgctgactggctagcacaaaacaaccctcctcaaatgctatgggaaagaacagaagaggattctaaaagcattaaaagtgatgttccagtgtacttgaaaaggttgaaaggaaataaacatgatgatggtacgcaaagtgattcagagaacgctggggctcacaggcgctgtagcaaacgtgcaactcttgaggaacacttaagacgccaccattcagaacacaaaaagctacagaaggtccaggctactgaaaagcatcaagaccaagctgttgtgtttggagtagatgacaatcaggattataataggcctgttatcaacgaaaaacataaagatctaataaaagattgggctctcagttctgctgcagcagtaatggaagaaagaaaaccactgactacatctggatttcaccactcagaggaaggcacatcttcatctggaagcaaacgttgggtttcacagtgggctagtttggctgccaatcatacaaggcatgatcaagaagaaaggataatggaattttctgcacctcttcctttagagaatgagacagagatcagtgagtctggcatgacagtgagaagtactggctctgcaacttccttggctagccagggagagagaaggagacgaactcttccccagcttccaaatgaagaaaagtctcttgagagccacagagcaaaggttgtaacacagaggtcagagataggagaaaaacaagacacagaacttcaggagaaagaaacacctacacaggtataccagaaagataaacaagatgctgacagacccttgagtaaaatgaacagggcagtaaatggagagactctcaaaactggtggagataataaaaccctacttcacttaggcagctctgctcctggaaaagagaaaagtgaaactgataaggaaacttctttggtaaagcaaacattagcaaaacttcaacaacaagaacaaagggaggaggctcagtggacacctactaaattgtcttccaaaaatgtttcaggtcagacagataaatgtagggaggaaacttttaaacaagaatcacaacctccagaaaaaaattcaggacattctacaagcaaaggagacagagtggcacaaagtgagagcaagagaagaaaagctgaggaaattctgaaaagtcagactccaaagggaggagacaagaaggaatcctccaagtcattagtgcgacaagggagcttcactatagaaaaacccagcccaaacatacccatagaacttattccccatataaataaacagacttcctctactccttcttctttagcattaacatctgcaagtagaatacgagaaagaagtgagtctttggatcctgattctagtatggacacaacccttattctaaaagacacagaagcagtaatggcttttctagaagctaaactacgtgaagataataaaactgatgaaggaccagatactcccagttataatagagacaattctatttcaccagaatctgatgtagatacagctagtacaatcagtctggttactggagaaactgaaagaaagtcaacccaaaagcgaaagagtttcactagcctctataaagataggtgttccacaggttctccttccaaagatgttacaaaatcatcatcttcaggtgctagggaaaaaatggaaaagaaaacaaaaagtcgttccacagatgtgggttcaagagcagatggtcgtaaatttgttcagtccagtgggagaataagacagccctcagtagacttaacagatgatgaccaaacctctagtgtacctcattctgccatctctgatattatgtcatctgatcaagaaacttactcttgtaaacctcatggacggactccacttacctcagctgatgagcatgtacattccaaactggaaggaagtaaagtaacgaaatctaagacttctccggtggtatctggttcatctagtaaatcaaccacccttccaaggccacgacctaccaggacttccctcttgcgcagagcacgacttggtgaagcttcagacagtgaacttgctgatgctgacaaagcatctgttgcttctgaagtatccacaacaagttctacatcaaaacctcccacaggaaggcgtaacatctctcggattgatttattggctcagcctcgtagaacacgacttggctcactgtcagctcgtagtgactctgaagcaacaatttctagaagtagtgcctcttcgaggaccgcagaagccatcattagaagtggagccagactagtaccatcagataaattttctcctagaattagagctaacagtatctctcgactctcagactccaaggtcaaaagtatgacctcagctcatggctctgcttcagtaaattcaagatggaggcgctttcctactgattatgcttccacctcagaagatgaatttggatcaaaccgtaattcccctaaacatacccgtctacgtacttctccagccctgaaaaccactcgcttgcagagcgctggatcagcaatgcctactagttcttcattcaaacaccggattaaagagcaggaagactacatccgagattggactgctcatcgagaagagatagccaggatcagccaagatcttgctctcattgctcgggagatcaacgatgtagcaggagagatagattcagtgacttcatcaggcactgcccctagtaccacagtaagcactgctgccaccacccctggctctgccatagacactagagaagagttggttgatcgtgtttttgatgaaagcctcaacttccgaaagattcctccattagttcattccaaaacaccagaaggaaacaacggtcgatctggtgatccaagacctcaagcagcagagcctcccgatcacttaacaattacaaggcggagaacctggagcagggatgaagtcatgggagataatctgctgctgtcatccgtctttcagttctctaagaagataagacaatctatagataagacagctggaaagatcagaatattatttaaagacaaagatcggaattgggatgacatagaaagcaaattaagagccgaaagtgaagtccctattgtgaaaacctcaagcatggagatttcttctatcttacaggaactgaaaagagtagaaaagcagctgcaagcaatcaatgctatgattgatcctgatggaactttggaggctctgaacaacatgggatttcccagtgctatgttgccatctccaccgaaacagaagtccagccctgtgaataaccaccacagcccgggtcagacaccaacacttggccaaccagaagctagggctcttcatcctgctgctgtttcagccgcagctgaatttgagaatgctgaatctgaggctgatttcagtatacatttcaatagattcaaccccgatggggaagaggaagatgttacagtacaagaatgactttctcttgattgttgaaaaatcattacctgtggaatggctaggaatattggaagcagcatagtgttgatgtacgcaaaacaagacagcttggtcagctacaatcttggaatccctgtcttcttaattttatttatttatttttgacgtataatgtagtatatcaatcctttcaaactatttagataaccacttgatgcacaaataggaaaaagcagattgtggcagtgtcgccttttgtggttttatgattttcaaattgaatttaatgattacaccctttcccttcatagatcttttttcttttttttaagccatgctgtgacctacaagcaaactaaatagccaacatttctgaacccctaagtctcctgtgccaagctgctccctgaaatggacttcttcatctgtacagatttgttaaaccattctatttgcttcttaataataggatttatattagtactcattaccattggacacaatgacataagtactctccacagtaaagcagacctttcacaacagtcactctgtgtcctaaaattttccaacatagatgtgatttatataactttgttgatacgtaaattgtcttggggtttacggaaattaactattatgtttgcactaagatttgctgggagtggtaggtggacatatctatatatcaataaggactaaccgtcttttttgtacataggagattgataatactgtatttgttttaagcccacagtgttttactccactttcaaaaagatcaatttggcactttttttcattttttttaatggaaataagatttggtctctcattttaggttaaatgataactagaaagattaaactagacagatagtttaggtggagtatatttttaaaactcagaacatgtatattggtcctgtgttaccaagtttatatgtgacagttgaaaaagaaattcccttgaaatgatcatgaggttaaaattttcttcattaggggacttggagaaccagtagtcgtaagattagttgatagtttcactcccaagcaatgaattgcttctgtgtgtttccctgtaggactcaatagtaaatgctgtctgtcttacacatttataaggaccctgcaagacgacgacaaaggcctttggcctgtgctactaaacaagaagcctatgaaaaatttcttctttaaacttgttttttctctttccagtaagttcacatttggataattttaaaaagaaaagtaattacctttgtgtttccagaacactataattggggtgtatcttaattcagttaaatattattagtagacctggattttcccccttgaccccatcagtctataaaggttaaactgcaacttttatgaaatggtctttaatatttccacaataatcctgtgctatatttgttttaagaaacaaagtaactctatacacttcaagactttacaggattttttaaatcctgtattgttggatcaattaataaagatgcaaaaaaactttatagagatgtaaaaacaaaactataatggatctcctatttttctttaaatacaaaaaaaaaaaggtaaatgaactattctccttgtaaagctaaattccccattctgtctaataaaggaagactgaaaaaaggttttaaagaacataaatggaaagatacaaatgctttgaaggaataaacgaaatgttaaaacagggtcaatccatttgaagaaaaagttggacaaaataatcagcattgctccctcttttatttaatatttgggtactgattatatccacatggaagtagaaggtaaggagtttaggaaaatactagaatctactctgcttacattcttgtttaagtgtttacacagtttggttcaattataaacatttggccttttactatgttatttttattttgtatgaatacattatcctccttatttatttttgttacatttattacttatgttattttgttatgcatttacaactccatttttaaataaagtgtttctggaacttta

SEQ ID NO: 116484 - DNA, 789 bp, Homo sapiens
  Payload ID: 2728
  Gene Symbol: CEP170
  Gene Name: centrosomal protein 170kDa
  ENST ID: ENST00000413359
  CDS Start-End: 1-789
acacgacttggctcactgtcagctcgtagtgactctgaagcaacaatttctagaagtagtgcctcttcgaggaccgcagaagccatcattagaagtggagccagactagtaccatcagataaattttctcctagaattagagctaacagtatctctcgactctcagactccaaggtcaaaagtatgacctcagctcatggctctgcttcagccctgaaaaccactcgcttgcagagcgctggatcagcaatgcctactagttcttcattcaaacaccggattaaagagcaggaagactacatccgagattggactgctcatcgagaagagatagccaggatcagccaagatcttgctctcattgctcgggagatcaacgatgtagcaggagagatagattcagtgacttcatcaggcactgcccctagtaccacattggttgatcgtgtttttgatgaaagcctcaacttccgaaagattcctccattagttcattccaaaacaccagaaggaaacaacggtcgatctggtgatccaagacctcaagcagcagagcctcccgatcacttaacaattacaaggcggagaacctggagcagggatgaagtcatgggagataatctgctgctgtcatccgtctttcagttctctaagaagataagacaatctatagataagacagctggaaagatcagaatattatttaaagacaaagatcggaattgggatgacatagaaagcaaattaagagccgaaagtgaagtccctattgtgaaaacctcaagcatg

SEQ ID NO: 116485 - DNA, 3031 bp, Homo sapiens
  Payload ID: 2728
  Gene Symbol: CEP170
  Gene Name: centrosomal protein 170kDa
  ENST ID: ENST00000481987
  CDS Start-End: 513-1475
attcatattttcactcaagtaagaaatatttgcaattgaaaagtactccagttaaacatcgatggatagagcttgcttagttgtttatcattagcgaaatttttcatctgaatgtttactcaccacactatggaaaacatggtcttccaattgtttttgattcttcattgtttttaattcaccgaagtgtaatgtttctatctctaaggagtagtagacttatggtttttgtgaggtatgtgtacgtcagttattgaaaattgtgccgtgtgtgcgctctcatggtgttttgaagtcatgacttttattttacctcctttaaatgataacataataattctttttttaataattaaactaatttagtaaattcaagatggaggcgctttcctactgattatgcttccacctcagaagatgaatttggatcaaaccgtaattcccctaaacatacccgtctacgtacttctccagccctgaaaaccactcgcttgcagagcgctggatcagcaatgcctactagttcttcattcaaacaccggattaaagagcaggaagactacatccgagattggactgctcatcgagaagagatagccaggatcagccaagatcttgctctcattgctcgggagatcaacgatgtagcaggagagatagattcagtgacttcatcaggcactgcccctagtaccacagtaagcactgctgccaccacccctggctctgccatagacactagagaagaggtaggagatcttcatggagaaatgcataagttggttgatcgtgtttttgatgaaagcctcaacttccgaaagattcctccattagttcattccaaaacaccagaaggaaacaacggtcgatctggtgatccaagacctcaagcagcagagcctcccgatcacttaacaattacaaggcggagaacctggagcagggatgaagtcatgggagataatctgctgctgtcatccgtctttcagttctctaagaagataagacaatctatagataagacagctggaaagatcagaatattatttaaagacaaagatcggaattgggatgacatagaaagcaaattaagagccgaaagtgaagtccctattgtgaaaacctcaagcatggagatttcttctatcttacaggaactgaaaagagtagaaaagcagctgcaagcaatcaatgctatgattgatcctgatggaactttggaggctctgaacaacatgggatttcccagtgctatgttgccatctccaccgaaacagaagtccagccctgtgaataaccaccacagcccgggtcagacaccaacacttggccaaccagaagctagggctcttcatcctgctgctgtttcagccgcagctgaatttgagaatgctgaatctgaggctgatttcagtatacatttcaatagattcaaccccgatggggaagaggaagatgttacagtacaagaatgactttctcttgattgttgaaaaatcattacctgtggaatggctaggaatattggaagcagcatagtgttgatgtacgcaaaacaagacagcttggtcagctacaatcttggaatccctgtcttcttaattttatttatttatttttgacgtataatgtagtatatcaatcctttcaaactatttagataaccacttgatgcacaaataggaaaaagcagattgtggcagtgtcgccttttgtggttttatgattttcaaattgaatttaatgattacaccctttcccttcatagatcttttttcttttttttaagccatgctgtgacctacaagcaaactaaatagccaacatttctgaacccctaagtctcctgtgccaagctgctccctgaaatggacttcttcatctgtacagatttgttaaaccattctatttgcttcttaataataggatttatattagtactcattaccattggacacaatgacataagtactctccacagtaaagcagacctttcacaacagtcactctgtgtcctaaaattttccaacatagatgtgatttatataactttgttgatacgtaaattgtcttggggtttacggaaattaactattatgtttgcactaagatttgctgggagtggtaggtggacatatctatatatcaataaggactaaccgtcttttttgtacataggagattgataatactgtatttgttttaagcccacagtgttttactccactttcaaaaagatcaatttggcactttttttcattttttttaatggaaataagatttggtctctcattttaggttaaatgataactagaaagattaaactagacagatagtttaggtggagtatatttttaaaactcagaacatgtatattggtcctgtgttaccaagtttatatgtgacagttgaaaaagaaattcccttgaaatgatcatgaggttaaaattttcttcattaggggacttggagaaccagtagtcgtaagattagttgatagtttcactcccaagcaatgaattgcttctgtgtgtttccctgtaggactcaatagtaaatgctgtctgtcttacacatttataaggaccctgcaagacgacgacaaaggcctttggcctgtgctactaaacaagaagcctatgaaaaatttcttctttaaacttgttttttctctttccagtaagttcacatttggataattttaaaaagaaaagtaattacctttgtgtttccagaacactataattggggtgtatcttaattcagttaaatattattagtagacctggattttcccccttgaccccatcagtctataaaggttaaactgcaacttttatgaaatggtctttaatatttccacaataatcctgtgctatatttgttttaagaaacaaagtaactctatacacttcaagactttacaggattttttaaatcctgtattgttggatcaattaataaagatgcaaaaaaactttatagagatgtaaaaacaaaactataatggatctcctatttttctttaaat

SEQ ID NO: 116486 - DNA, 741 bp, Homo sapiens
  Payload ID: 2728
  Gene Symbol: CEP170
  Gene Name: centrosomal protein 170kDa
  ENST ID: ENST00000464936
  CDS Start-End: 215-741
agtgtgggaggccagctgttacaacggacatgaagatgtgtgattattttcagtaggcagacatctaataaattcaagatggaggcgctttcctactgattatgcttccacctcagaagatgaatttggatcaaaccgtaattcccctaaacatacccgtctacgtacttctccagccctgaaaaccactcgcttgcagagcgctggatcagcaatgcctactagttcttcattcaaacaccggattaaagagcaggaagactacatccgagattggactgctcatcgagaagagatagccaggatcagccaagatcttgctctcattgctcgggagatcaacgatgtagcaggagagatagattcagtgacttcatcaggcactgcccctagtaccacattggttgatcgtgtttttgatgaaagcctcaacttccgaaagattcctccattagttcattccaaaacaccagaaggaaacaacggtcgatctggtgatccaagacctcaagcagcagagcctcccgatcacttaacaattacaaggcggagaacctggagcagggatgaagtcatgggagataatctgctgctgtcatccgtctttcagttctctaagaagataagacaatctatagataagacagctggaaagatcagaatattatttaaagacaaagatcggaattgggatgacatagaaagcaaattaagagccgaaagtgaagtccctattgtgaa

SEQ ID NO: 116487 - DNA, 561 bp, Homo sapiens
  Payload ID: 2728
  Gene Symbol: CEP170
  Gene Name: centrosomal protein 170kDa
  ENST ID: ENST00000522191
  CDS Start-End: 162-561
gtcatgcaccctgcctggcgactgcaccccgtggaggctctggctctgtagtaaacccgggggaggagagagtggcttcctgtcggcttcattgtcctaggattcagatgtagggttttggatgacgtagctttgccaaagacttagaagctaagcagaaaatgagcttaacatcctggtttttggtgagcagtggaggcactcgccacaggctgccacgagaaatgatttttgttggaagagatgactgtgagctcatgttgcagtctcgtagtgtggataagcaacacgctgtcatcaactatgatgcgtctacggatgagcatttagtgaaggatttgggcagcctcaatgggacttttgtgaatgatgtaaggattccggaacagacttatatcaccttgaaacttgaagataagctgagatttggatatgatacaaatcttttcactgtagtacaaggagaaatgagggtccctgaagaagctcttaagcatgagaagtttaccattcagcttcagttgtcccaaaaatcttcagaatcagaattatccaaatctg

SEQ ID NO: 116488 - DNA, 593 bp, Homo sapiens
  Payload ID: 2728
  Gene Symbol: CEP170
  Gene Name: centrosomal protein 170kDa
  ENST ID: ENST00000523424
  CDS Start-End: 261-593
atgtgctccctgagtaggctgtgactatcactgaacttgattctcaccgtgattaatctagttcttgcctttgtgatgtaaaagtagtaatcctcctaaaatggacctttactttcataaagtaacttactacatgaggaaagatgtcctaacatgtgcttttcataaaaacgaagtgttgcagtgttttccctactacctaatggtagctacttaacggatgacgtagctttgccaaagacttagaagctaagcagaaaatgagcttaacatcctggtttttggtgagcagtggaggcactcgccacaggctgccacgagaaatgatttttgttggaagagatgactgtgagctcatgttgcagtctcgtagtgtggataagcaacacgctgtcatcaactatgatgcgtctacggatgagcatttagtgaaggatttgggcagcctcaatgggacttttgtgaatgatgtaaggattccggaacagacttatatcaccttgaaacttgaagataagctgagatttggatatgatacaaatcttttcactgtagtacaaggagaaatgagggtccctgaagaagctcttaag

SEQ ID NO: 116489 - DNA, 608 bp, Homo sapiens
  Payload ID: 2728
  Gene Symbol: CEP170
  Gene Name: centrosomal protein 170kDa
  ENST ID: ENST00000522995
  CDS Start-End: 344-608
gtgtggcgcctgcgcagtaagggatcgttggaactgggcaggaggggatagggtccggctcctcgccctttcccgaggcgcctgcgcactaggcagtcggtctttgccgttaccgctatgtgtggggcgtgtgtggaataacgttattgcccagcggagctgagggccccggagctcgaccgcagcggcagcgacgacaacagcggcgacgacgacgacgacgaggtggggggaggacggcgtgcgagagactcacgggacgcgacgcgccccgcctcccccgtccggtccctctctccacggatgacgtagctttgccaaagacttagaagctaagcagaaaatgagcttaacatcctggtttttggtgagcagtggaggcactcgccacaggctgccacgagaaatgatttttgttggaagagatgactgtgagctcatgttgcagtctcgtagtgtggataagcaacacgctgtcatcaactatgatgcgtctacggatgagcatttagtgaaggatttgggcagcctcaatgggacttttgtgaatgatgtaaggattccggaacagacttatatcaccttgaaacttgaagataagctgagat

SEQ ID NO: 116490 - DNA, 642 bp, Homo sapiens
  Payload ID: 2728
  Gene Symbol: CEP170
  Gene Name: centrosomal protein 170kDa
  ENST ID: ENST00000461671
  CDS Start-End: 1-358
aaagcatcaagaccaagctgttactagctctgcgcatcacagaggggggcatggtgttccacatgggaaattgttaaaacagaaatcagaggagccatcggtgtcaatacccttcctacaaactgcattattaagaagttcagggagtcttgggcacagaccaagccaggagatggataaaatgttaaaaaatcaagcaacttctgctacttctgaaaaggataatgatgatgaccaaagtgacaagggtacttataccattgagttagagaatcccaacagtgaggaagtggaagcaagaaaaatgattgacaaggtgacagcctcttctttttataagctcctttatcagacgtaacctcctcaaaagcaaagactgtcatacagattttgtaatcccctgcagtggctagccaagtagcctgtggagagtgtttggagtagatgacaatcaggattataataggcctgttatcaacgaaaaacataaagatctaataaaagattgggctctcagttctgctgcagcagtaatggaagaaagaaaaccactgactacatctggatttcaccactcagaggaaggcacatcttcatctggaagcaaacgttgggtttcacagtgggctagtttggctgcca

SEQ ID NO: 116491 - DNA, 616 bp, Homo sapiens
  Payload ID: 2728
  Gene Symbol: CEP170
  Gene Name: centrosomal protein 170kDa
  ENST ID: ENST00000522895
  CDS Start-End: 1-520
tgatggtacgcaaagtgattcagagaacgctggggctcacaggcgctgtagcaaacgtgcaactcttgaggaacacttaagacgccaccattcagaacacaaaaagctacagaaggtccaggctactgaaaagcatcaagaccaagctgttgtgtttggagtagatgacaatcaggattataataggcctgttatcaacgaaaaacataaagatctaataaaagattgggctctcagttctgctgcagcagtaatggaagaaagaaaaccactgactacatctggatttcaccactcagaggaaggcacatcttcatctggaagcaaacgttgggtttcacagtgggctagtttggctgccaatcatacaaggcatgatcaagaagaaaggataatggaattttctgcacctcttcctttagagaatggtattctctttctctctttcattctttatcccttttttcttctctttctccatttctctctctttctcttactcttctctgcttttttgtgaatcatatatcagttgttattataaaaaacaagccaaatctatatagtaagaagtaagttaaacctaaataaacatattcacatattctcatgctga

SEQ ID NO: 116492 - DNA, 609 bp, Homo sapiens
  Payload ID: 2728
  Gene Symbol: CEP170
  Gene Name: centrosomal protein 170kDa
  ENST ID: ENST00000492145
  CDS Start-End: 300-609
tgaagatgtgtgattattttcagtaggcagacatctaagtaagccctaagtcttgagttaagagtggaggggaagttgatatgaaatttcatctttttatttttgattggtttacatctaccacaccatctcctacaagaccctaaaggaacataaattcaagatggaggcgctttcctactgattatgcttccacctcagaagatgaatttggatcaaaccgtaattcccctaaacatacccgtctacgtacttctccagccctgaaaaccactcgcttgcagagcgctggatcagcaatgcctactagttcttcattcaaacaccggattaaagagcaggaagactacatccgagattggactgctcatcgagaagagatagccaggatcagccaagatcttgctctcattgctcgggagatcaacgatgtagcaggagagatagattcagtgacttcatcaggcactgcccctagtaccacattggttgatcgtgtttttgatgaaagcctcaacttccgaaagattcctccattagttcattccaaaacaccagaaggaaacaacggtcgatctggtgatccaagacctcaagcagcagagcctc

SEQ ID NO: 116493 - DNA, 1070 bp, Homo sapiens
  Payload ID: 2728
  Gene Symbol: CEP170
  Gene Name: centrosomal protein 170kDa
  ENST ID: ENST00000490813
  CDS Start-End: 85-966
aacggacatgaagatgtgtgattattttcagtaggcagacatctaaccctgaaaaccactcgcttgcagagcgctggatcagcaatgcctactagttcttcattcaaacaccggattaaagagcaggaagactacatccgagattggactgctcatcgagaagagatagccaggatcagccaagatcttgctctcattgctcgggagatcaacgatgtagcaggagagatagattcagtgacttcatcaggcactgcccctagtaccacattggttgatcgtgtttttgatgaaagcctcaacttccgaaagattcctccattagttcattccaaaacaccagaaggaaacaacggtcgatctggtgatccaagacctcaagcagcagagcctcccgatcacttaacaattacaaggcggagaacctggagcagggatgaagtcatgggagataatctgctgctgtcatccgtctttcagttctctaagaagataagacaatctatagataagacagctggaaagatcagaatattatttaaagacaaagatcggaattgggatgacatagaaagcaaattaagagccgaaagtgaagtccctattgtgaaaacctcaagcatggagatttcttctatcttacaggaactgaaaagagtagaaaagcagctgcaagcaatcaatgctatgattgatcctgatggaactttggaggctctgaacaacatgggatttcccagtgctatgttgccatctccaccgaaacagaagtccagccctgtgaataaccaccacagcccgggtcagacaccaacacttggccaaccagaagctagggctcttcatcctgctgctgtttcagccgcagctgaatttgagaatgctgaatctgaggctgatttcagtatacatttcaatagattcaaccccgatggggaagaggaagatgttacagtacaagaatgactttctcttgattgttgaaaaatcattacctgtggaatggctaggaatattggaagcagcatagtgttgatgtacgcaaaacaagacagcttggtcagctacaa

SEQ ID NO: 116494 - DNA, 6804 bp, Homo sapiens
  Payload ID: 2728
  Gene Symbol: CEP170
  Gene Name: centrosomal protein 170kDa
  Uniprot ID: Q5SW79
  ENST ID: ENST00000450306
  CDS Start-End: 324-4784
ttggaactgggcaggaggggatagggtccggctcctcgccctttcccgaggcgcctgcgcactaggcagtcggtctttgccgttaccgctatgtgtggggcgtgtgtggaataacgttattgcccagcggagctgagggccccggagctcgaccgcagcggcagcgacgacaacagcggcgacgacgacgacgacgaggtggggggaggacggcgtgcgagagactcacgggacgcgacgcgccccgcctcccccgtccggtccctctctccacggtaaggggatgacgtagctttgccaaagacttagaagctaagcagaaaatgagcttaacatcctggtttttggtgagcagtggaggcactcgccacaggctgccacgagaaatgatttttgttggaagagatgactgtgagctcatgttgcagtctcgtagtgtggataagcaacacgctgtcatcaactatgatgcgtctacggatgagcatttagtgaaggatttgggcagcctcaatgggacttttgtgaatgatgtaaggattccggaacagacttatatcaccttgaaacttgaagataagctgagatttggatatgatacaaatcttttcactgtagtacaaggagaaatgagggtccctgaagaagctcttaagcatgagaagtttaccattcagcttcagttgtcccaaaaatcttcagaatcagaattatccaaatctgcaagtgccaaaagcatagattcaaaggtagcagacgctgctactgaagtgcagcacaaaactactgaagcactgaaatccgaggaaaaagccatggatatttctgctatgccccgtggtactccattatatgggcagccgtcatggtggggggatgatgaggtggatgaaaaaagagctttcaagacaaatggcaaacctgaagaaaaaaaccatgaagctggaacatcagggtgcggcatagatgccaagcaagttgaggaacaatctgcagctgcaaatgaagaagtactttttcctttctgtagggaaccaagttattttgaaatccctacaaaagaattccagcaaccatcacaaataacagaaagcactattcatgaaatcccaacaaaagacacgccaagttcccatataacaggtgcagggcatgcttcatttaccattgaatttgatgacagtaccccagggaaggtaactattagagaccatgtgacaaagtttacttctgatcagcgccacaagtccaagaagtcttctcctggaactcaagacttgctggggattcaaacaggaatgatggcacccgaaaacaaagttgctgactggctagcacaaaacaaccctcctcaaatgctatgggaaagaacagaagaggattctaaaagcattaaaagtgatgttccagtgtacttgaaaaggttgaaaggaaataaacatgatgatggtacgcaaagtgattcagagaacgctggggctcacaggcgctgtagcaaacgtgcaactcttgaggaacacttaagacgccaccattcagaacacaaaaagctacagaaggtccaggctactgaaaagcatcaagaccaagctgttgtgtttggagtagatgacaatcaggattataataggcctgttatcaacgaaaaacataaagatctaataaaagattgggctctcagttctgctgcagcagtaatggaagaaagaaaaccactgactacatctggatttcaccactcagaggaaggcacatcttcatctggaagcaaacgttgggtttcacagtgggctagtttggctgccaatcatacaaggcatgatcaagaagaaaggataatggaattttctgcacctcttcctttagagaatgagacagagatcagtgagtctggcatgacagtgagaagtactggctctgcaacttccttggctagccagggagagagaaggagacgaactcttccccagcttccaaatgaagaaaagtctcttgagagccacagagcaaaggttgtaacacagaggtcagagataggagaaaaacaagacacagaacttcaggagaaagaaacacctacacaggtataccagaaagataaacaagatgctgacagacccttgagtaaaatgaacagggcagtaaatggagagactctcaaaactggtggagataataaaaccctacttcacttaggcagctctgctcctggaaaagagaaaagtgaaactgataaggaaacttctttggtaaagcaaacattagcaaaacttcaacaacaagaacaaagggaggaggctcagtggacacctactaaattgtcttccaaaaatgtttcaggtcagacagataaatgtagggaggaaacttttaaacaagaatcacaacctccagaaaaaaattcaggacattctacaagcaaaggagacagagtggcacaaagtgagagcaagagaagaaaagctgaggaaattctgaaaagtcagactccaaagggaggagacaagaaggaatcctccaagtcattagtgcgacaagggagcttcactatagaaaaacccagcccaaacatacccatagaacttattccccatataaataaacagacttcctctactccttcttctttagcattaacatctgcaagtagaatacgagaaagaagtgagtctttggatcctgattctagtatggacacaacccttattctaaaagacacagaagcagtaatggcttttctagaagctaaactacgtgaagataataaaactgatgaaggaccagatactcccagttataatagagacaattctatttcaccagaatctgatgtagatacagctagtacaatcagtctggttactggagaaactgaaagaaagtcaacccaaaagcgaaagagtttcactagcctctataaagataggtgttccacaggttctccttccaaagatgttacaaaatcatcatcttcaggtgctagggaaaaaatggaaaagaaaacaaaaagtcgttccacagatgtgggttcaagagcagatggtcgtaaatttgttcagtccagtgggagaataagacagccctcagtagacttaacagatgatgaccaaacctctagtgtacctcattctgccatctctgatattatgtcatctgatcaagaaacttactcttgtaaacctcatggacggactccacttacctcagctgatgagcatgtacattccaaactggaaggaagtaaagtaacgaaatctaagacttctccggtggtatctggttcatctagtaaatcaaccacccttccaaggccacgacctaccaggacttccctcttgcgcagagcacgacttggtgaagcttcagacagtgaacttgctgatgctgacaaagcatctgttgcttctgaagtatccacaacaagttctacatcaaaacctcccacaggaaggcgtaacatctctcggattgatttattggctcagcctcgtagaacacgacttggctcactgtcagctcgtagtgactctgaagcaacaatttctagaagtagtgcctcttcgaggaccgcagaagccatcattagaagtggagccagactagtaccatcagataaattttctcctagaattagagctaacagtatctctcgactctcagactccaaggtcaaaagtatgacctcagctcatggctctgcttcagtaaattcaagatggaggcgctttcctactgattatgcttccacctcagaagatgaatttggatcaaaccgtaattcccctaaacatacccgtctacgtacttctccagccctgaaaaccactcgcttgcagagcgctggatcagcaatgcctactagttcttcattcaaacaccggattaaagagcaggaagactacatccgagattggactgctcatcgagaagagatagccaggatcagccaagatcttgctctcattgctcgggagatcaacgatgtagcaggagagatagattcagtgacttcatcaggcactgcccctagtaccacagtaagcactgctgccaccacccctggctctgccatagacactagagaagagttggttgatcgtgtttttgatgaaagcctcaacttccgaaagattcctccattagttcattccaaaacaccagaaggaaacaacggtcgatctggtgatccaagacctcaagcagcagagcctcccgatcacttaacaattacaaggcggagaacctggagcagggatgaagtcatgggagataatctgctgctgtcatccgtctttcagttctctaagaagataagacaatctatagataagacagctggaaagatcagaatattatttaaagacaaagatcggaattgggatgacatagaaagcaaattaagagccgaaagtgaagtccctattgtgaaaacctcaagcatggagatttcttctatcttacaggaactgaaaagagtagaaaagcagctgcaagcaatcaatgctatgattgatcctgatggaactttggaggctctgaacaacatgggatttcccagtgctatgttgccatctccaccgaaacagaagtccagccctgtgaataaccaccacagcccgggtcagacaccaacacttggccaaccagaagctagggctcttcatcctgctgctgtttcagccgcagctgaatttgagaatgctgaatctgaggctgatttcagtatacatttcaatagattcaaccccgatggggaagaggaagatgttacagtacaagaatgactttctcttgattgttgaaaaatcattacctgtggaatggctaggaatattggaagcagcatagtgttgatgtacgcaaaacaagacagcttggtcagctacaatcttggaatccctgtcttcttaattttatttatttatttttgacgtataatgtagtatatcaatcctttcaaactatttagataaccacttgatgcacaaataggaaaaagcagattgtggcagtgtcgccttttgtggttttatgattttcaaattgaatttaatgattacaccctttcccttcatagatcttttttcttttttttaagccatgctgtgacctacaagcaaactaaatagccaacatttctgaacccctaagtctcctgtgccaagctgctccctgaaatggacttcttcatctgtacagatttgttaaaccattctatttgcttcttaataataggatttatattagtactcattaccattggacacaatgacataagtactctccacagtaaagcagacctttcacaacagtcactctgtgtcctaaaattttccaacatagatgtgatttatataactttgttgatacgtaaattgtcttggggtttacggaaattaactattatgtttgcactaagatttgctgggagtggtaggtggacatatctatatatcaataaggactaaccgtcttttttgtacataggagattgataatactgtatttgttttaagcccacagtgttttactccactttcaaaaagatcaatttggcactttttttcattttttttaatggaaataagatttggtctctcattttaggttaaatgataactagaaagattaaactagacagatagtttaggtggagtatatttttaaaactcagaacatgtatattggtcctgtgttaccaagtttatatgtgacagttgaaaaagaaattcccttgaaatgatcatgaggttaaaattttcttcattaggggacttggagaaccagtagtcgtaagattagttgatagtttcactcccaagcaatgaattgcttctgtgtgtttccctgtaggactcaatagtaaatgctgtctgtcttacacatttataaggaccctgcaagacgacgacaaaggcctttggcctgtgctactaaacaagaagcctatgaaaaatttcttctttaaacttgttttttctctttccagtaagttcacatttggataattttaaaaagaaaagtaattacctttgtgtttccagaacactataattggggtgtatcttaattcagttaaatattattagtagacctggattttcccccttgaccccatcagtctataaaggttaaactgcaacttttatgaaatggtctttaatatttccacaataatcctgtgctatatttgttttaagaaacaaagtaactctatacacttcaagactttacaggattttttaaatcctgtattgttggatcaattaataaagatgcaaaaaaactttatagagatgtaaaaacaaaactataatggatctcctatttttctttaaatacaaaaaaaaaaaggtaaatgaactattctccttgtaaagctaaattccccattctgtctaataaaggaagactgaaaaaaggttttaaagaacataaatggaaagatacaaatgctttgaaggaataaacgaaatgttaaaacagggtcaatccatttgaagaaaaagttggacaaaataatcagcattgctccctcttttatttaatatttgggtactgattatatccacatggaagtagaaggtaaggagtttaggaaaatactagaatctactctgcttacattcttgtttaagtgtttacacagtttggttcaattataaacatttggccttttactatgttatttttattttgtatgaatacattatcctccttatttatttttgttacatttattacttatgttattttgttatgcatttacaactccatttttaaataaagtgtttctggaacttt

SEQ ID NO: 116495 - DNA, 6828 bp, Homo sapiens
  Payload ID: 2728
  Gene Symbol: CEP170
  Gene Name: centrosomal protein 170kDa
  Uniprot ID: Q5SW79
  ENST ID: ENST00000612450
  CDS Start-End: 54-4808
ccacggtaaggggatgacgtagctttgccaaagacttagaagctaagcagaaaatgagcttaacatcctggtttttggtgagcagtggaggcactcgccacaggctgccacgagaaatgatttttgttggaagagatgactgtgagctcatgttgcagtctcgtagtgtggataagcaacacgctgtcatcaactatgatgcgtctacggatgagcatttagtgaaggatttgggcagcctcaatgggacttttgtgaatgatgtaaggattccggaacagacttatatcaccttgaaacttgaagataagctgagatttggatatgatacaaatcttttcactgtagtacaaggagaaatgagggtccctgaagaagctcttaagcatgagaagtttaccattcagcttcagttgtcccaaaaatcttcagaatcagaattatccaaatctgcaagtgccaaaagcatagattcaaaggtagcagacgctgctactgaagtgcagcacaaaactactgaagcactgaaatccgaggaaaaagccatggatatttctgctatgccccgtggtactccattatatgggcagccgtcatggtggggggatgatgaggtggatgaaaaaagagctttcaagacaaatggcaaacctgaagaaaaaaaccatgaagctggaacatcagggtgcggcatagatgccaagcaagttgaggaacaatctgcagctgcaaatgaagaagtactttttcctttctgtagggaaccaagttattttgaaatccctacaaaagaattccagcaaccatcacaaataacagaaagcactattcatgaaatcccaacaaaagacacgccaagttcccatataacaggtgcagggcatgcttcatttaccattgaatttgatgacagtaccccagggaaggtaactattagagaccatgtgacaaagtttacttctgatcagcgccacaagtccaagaagtcttctcctggaactcaagacttgctggggattcaaacaggaatgatggcacccgaaaacaaagttgctgactggctagcacaaaacaaccctcctcaaatgctatgggaaagaacagaagaggattctaaaagcattaaaagtgatgttccagtgtacttgaaaaggttgaaaggaaataaacatgatgatggtacgcaaagtgattcagagaacgctggggctcacaggcgctgtagcaaacgtgcaactcttgaggaacacttaagacgccaccattcagaacacaaaaagctacagaaggtccaggctactgaaaagcatcaagaccaagctgttactagctctgcgcatcacagaggggggcatggtgttccacatgggaaattgttaaaacagaaatcagaggagccatcggtgtcaatacccttcctacaaactgcattattaagaagttcagggagtcttgggcacagaccaagccaggagatggataaaatgttaaaaaatcaagcaacttctgctacttctgaaaaggataatgatgatgaccaaagtgacaagggtacttataccattgagttagagaatcccaacagtgaggaagtggaagcaagaaaaatgattgacaaggtgtttggagtagatgacaatcaggattataataggcctgttatcaacgaaaaacataaagatctaataaaagattgggctctcagttctgctgcagcagtaatggaagaaagaaaaccactgactacatctggatttcaccactcagaggaaggcacatcttcatctggaagcaaacgttgggtttcacagtgggctagtttggctgccaatcatacaaggcatgatcaagaagaaaggataatggaattttctgcacctcttcctttagagaatgagacagagatcagtgagtctggcatgacagtgagaagtactggctctgcaacttccttggctagccagggagagagaaggagacgaactcttccccagcttccaaatgaagaaaagtctcttgagagccacagagcaaaggttgtaacacagaggtcagagataggagaaaaacaagacacagaacttcaggagaaagaaacacctacacaggtataccagaaagataaacaagatgctgacagacccttgagtaaaatgaacagggcagtaaatggagagactctcaaaactggtggagataataaaaccctacttcacttaggcagctctgctcctggaaaagagaaaagtgaaactgataaggaaacttctttggtaaagcaaacattagcaaaacttcaacaacaagaacaaagggaggaggctcagtggacacctactaaattgtcttccaaaaatgtttcaggtcagacagataaatgtagggaggaaacttttaaacaagaatcacaacctccagaaaaaaattcaggacattctacaagcaaaggagacagagtggcacaaagtgagagcaagagaagaaaagctgaggaaattctgaaaagtcagactccaaagggaggagacaagaaggaatcctccaagtcattagtgcgacaagggagcttcactatagaaaaacccagcccaaacatacccatagaacttattccccatataaataaacagacttcctctactccttcttctttagcattaacatctgcaagtagaatacgagaaagaagtgagtctttggatcctgattctagtatggacacaacccttattctaaaagacacagaagcagtaatggcttttctagaagctaaactacgtgaagataataaaactgatgaaggaccagatactcccagttataatagagacaattctatttcaccagaatctgatgtagatacagctagtacaatcagtctggttactggagaaactgaaagaaagtcaacccaaaagcgaaagagtttcactagcctctataaagataggtgttccacaggttctccttccaaagatgttacaaaatcatcatcttcaggtgctagggaaaaaatggaaaagaaaacaaaaagtcgttccacagatgtgggttcaagagcagatggtcgtaaatttgttcagtccagtgggagaataagacagccctcagtagacttaacagatgatgaccaaacctctagtgtacctcattctgccatctctgatattatgtcatctgatcaagaaacttactcttgtaaacctcatggacggactccacttacctcagctgatgagcatgtacattccaaactggaaggaagtaaagtaacgaaatctaagacttctccggtggtatctggttcatctagtaaatcaaccacccttccaaggccacgacctaccaggacttccctcttgcgcagagcacgacttggtgaagcttcagacagtgaacttgctgatgctgacaaagcatctgttgcttctgaagtatccacaacaagttctacatcaaaacctcccacaggaaggcgtaacatctctcggattgatttattggctcagcctcgtagaacacgacttggctcactgtcagctcgtagtgactctgaagcaacaatttctagaagtagtgcctcttcgaggaccgcagaagccatcattagaagtggagccagactagtaccatcagataaattttctcctagaattagagctaacagtatctctcgactctcagactccaaggtcaaaagtatgacctcagctcatggctctgcttcagtaaattcaagatggaggcgctttcctactgattatgcttccacctcagaagatgaatttggatcaaaccgtaattcccctaaacatacccgtctacgtacttctccagccctgaaaaccactcgcttgcagagcgctggatcagcaatgcctactagttcttcattcaaacaccggattaaagagcaggaagactacatccgagattggactgctcatcgagaagagatagccaggatcagccaagatcttgctctcattgctcgggagatcaacgatgtagcaggagagatagattcagtgacttcatcaggcactgcccctagtaccacagtaagcactgctgccaccacccctggctctgccatagacactagagaagagttggttgatcgtgtttttgatgaaagcctcaacttccgaaagattcctccattagttcattccaaaacaccagaaggaaacaacggtcgatctggtgatccaagacctcaagcagcagagcctcccgatcacttaacaattacaaggcggagaacctggagcagggatgaagtcatgggagataatctgctgctgtcatccgtctttcagttctctaagaagataagacaatctatagataagacagctggaaagatcagaatattatttaaagacaaagatcggaattgggatgacatagaaagcaaattaagagccgaaagtgaagtccctattgtgaaaacctcaagcatggagatttcttctatcttacaggaactgaaaagagtagaaaagcagctgcaagcaatcaatgctatgattgatcctgatggaactttggaggctctgaacaacatgggatttcccagtgctatgttgccatctccaccgaaacagaagtccagccctgtgaataaccaccacagcccgggtcagacaccaacacttggccaaccagaagctagggctcttcatcctgctgctgtttcagccgcagctgaatttgagaatgctgaatctgaggctgatttcagtatacatttcaatagattcaaccccgatggggaagaggaagatgttacagtacaagaatgactttctcttgattgttgaaaaatcattacctgtggaatggctaggaatattggaagcagcatagtgttgatgtacgcaaaacaagacagcttggtcagctacaatcttggaatccctgtcttcttaattttatttatttatttttgacgtataatgtagtatatcaatcctttcaaactatttagataaccacttgatgcacaaataggaaaaagcagattgtggcagtgtcgccttttgtggttttatgattttcaaattgaatttaatgattacaccctttcccttcatagatcttttttcttttttttaagccatgctgtgacctacaagcaaactaaatagccaacatttctgaacccctaagtctcctgtgccaagctgctccctgaaatggacttcttcatctgtacagatttgttaaaccattctatttgcttcttaataataggatttatattagtactcattaccattggacacaatgacataagtactctccacagtaaagcagacctttcacaacagtcactctgtgtcctaaaattttccaacatagatgtgatttatataactttgttgatacgtaaattgtcttggggtttacggaaattaactattatgtttgcactaagatttgctgggagtggtaggtggacatatctatatatcaataaggactaaccgtcttttttgtacataggagattgataatactgtatttgttttaagcccacagtgttttactccactttcaaaaagatcaatttggcactttttttcattttttttaatggaaataagatttggtctctcattttaggttaaatgataactagaaagattaaactagacagatagtttaggtggagtatatttttaaaactcagaacatgtatattggtcctgtgttaccaagtttatatgtgacagttgaaaaagaaattcccttgaaatgatcatgaggttaaaattttcttcattaggggacttggagaaccagtagtcgtaagattagttgatagtttcactcccaagcaatgaattgcttctgtgtgtttccctgtaggactcaatagtaaatgctgtctgtcttacacatttataaggaccctgcaagacgacgacaaaggcctttggcctgtgctactaaacaagaagcctatgaaaaatttcttctttaaacttgttttttctctttccagtaagttcacatttggataattttaaaaagaaaagtaattacctttgtgtttccagaacactataattggggtgtatcttaattcagttaaatattattagtagacctggattttcccccttgaccccatcagtctataaaggttaaactgcaacttttatgaaatggtctttaatatttccacaataatcctgtgctatatttgttttaagaaacaaagtaactctatacacttcaagactttacaggattttttaaatcctgtattgttggatcaattaataaagatgcaaaaaaactttatagagatgtaaaaacaaaactataatggatctcctatttttctttaaatacaaaaaaaaaaaggtaaatgaactattctccttgtaaagctaaattccccattctgtctaataaaggaagactgaaaaaaggttttaaagaacataaatggaaagatacaaatgctttgaaggaataaacgaaatgttaaaacagggtcaatccatttgaagaaaaagttggacaaaataatcagcattgctccctcttttatttaatatttgggtactgattatatccacatggaagtagaaggtaaggagtttaggaaaatactagaatctactctgcttacattcttgtttaagtgtttacacagtttggttcaattataaacatttggccttttactatgttatttttattttgtatgaatacattatcctccttatttatttttgttacatttattacttatgttattttgttatgcatttacaactccatttttaaataaagtgtttctggaacttt

SEQ ID NO: 116496 - DNA, 6457 bp, Homo sapiens
  Payload ID: 2728
  Gene Symbol: CEP170
  Gene Name: centrosomal protein 170kDa
  Uniprot ID: Q5SW79
  ENST ID: ENST00000621831
  CDS Start-End: 54-4436
ccacggtaaggggatgacgtagctttgccaaagacttagaagctaagcagaaaatgagcttaacatcctggtttttggtgagcagtggaggcactcgccacaggctgccacgagaaatgatttttgttggaagagatgactgtgagctcatgttgcagtctcgtagtgtggataagcaacacgctgtcatcaactatgatgcgtctacggatgagcatttagtgaaggatttgggcagcctcaatgggacttttgtgaatgatgtaaggattccggaacagacttatatcaccttgaaacttgaagataagctgagatttggatatgatacaaatcttttcactgtagtacaaggagaaatgagggtccctgaagaagctcttaagcatgagaagtttaccattcagcttcagttgtcccaaaaatcttcagaatcagaattatccaaatctgcaagtgccaaaagcatagattcaaaggtagcagacgctgctactgaagtgcagcacaaaactactgaagcactgaaatccgaggaaaaagccatggatatttctgctatgccccgtggtactccattatatgggcagccgtcatggtggggggatgatgaggtggatgaaaaaagagctttcaagacaaatggcaaacctgaagaaaaaaaccatgaagctggaacatcagggtgcggcatagatgccaagcaagttgaggaacaatctgcagctgcaaatgaagaagtactttttcctttctgtagggaaccaagttattttgaaatccctacaaaagaattccagcaaccatcacaaataacagaaagcactattcatgaaatcccaacaaaagacacgccaagttcccatataacaggtgcagggcatgcttcatttaccattgaatttgatgacagtaccccagggaaggtaactattagagaccatgtgacaaagtttacttctgatcagcgccacaagtccaagaagtcttctcctggaactcaagacttgctggggattcaaacaggaatgatggcacccgaaaacaaagttgctgactggctagcacaaaacaaccctcctcaaatgctatgggaaagaacagaagaggattctaaaagcattaaaagtgatgttccagtgtacttgaaaaggttgaaaggaaataaacatgatgatggtacgcaaagtgattcagagaacgctggggctcacaggcgctgtagcaaacgtgcaactcttgaggaacacttaagacgccaccattcagaacacaaaaagctacagaaggtccaggctactgaaaagcatcaagaccaagctgttgtgtttggagtagatgacaatcaggattataataggcctgttatcaacgaaaaacataaagatctaataaaagattgggctctcagttctgctgcagcagtaatggaagaaagaaaaccactgactacatctggatttcaccactcagaggaaggcacatcttcatctggaagcaaacgttgggtttcacagtgggctagtttggctgccaatcatacaaggcatgatcaagaagaaaggataatggaattttctgcacctcttcctttagagaatgagacagagatcagtgagtctggcatgacagtgagaagtactggctctgcaacttccttggctagccagggagagagaaggagacgaactcttccccagcttccaaatgaagaaaagtctcttgagagccacagagcaaaggttgtaacacagaggtcagagataggagaaaaacaagacacagaacttcaggagaaagaaacacctacacaggtataccagaaagataaacaagatgctgacagacccttgagtaaaatgaacagggcagtaaatggagagactctcaaaactggtggagataataaaaccctacttcacttaggcagctctgctcctggaaaagagaaaagtgaaactgataaggaaacttctttggtaaagcaaacattagcaaaacttcaacaacaagaacaaagggaggaggctcagtggacacctactaaattgtcttccaaaaatgtttcaggtcagacagataaatgtagggaggaaacttttaaacaagaatcacaacctccagaaaaaaattcaggacattctacaagcaaaggagacagagtggcacaaagtgagagcaagagaagaaaagctgaggaaattctgaaaagtcagactccaaagggaggagacaagaaggaatcctccaagtcattagtgcgacaagggagcttcactatagaaaaacccagcccaaacatacccatagaacttattccccatataaataaacagacttcctctactccttcttctttagcattaacatctgcaagtagaatacgagaaagaagtgagtctttggatcctgattctagtatggacacaacccttattctaaaagacacagaagcagtaatggcttttctagaagctaaactacgtgaagataataaaactgatgaaggaccagatactcccagttataatagagacaattctatttcaccagaatctgatgtagatacagctagtacaatcagtctggttactggagaaactgaaagaaagtcaacccaaaagcgaaagagtttcactagcctctataaagataggtgttccacaggttctccttccaaagatgttacaaaatcatcatcttcaggtgctagggaaaaaatggaaaagaaaacaaaaagtcgttccacagatgtgggttcaagagcagatggtcgtaaatttgttcagtccagtgggagaataagacagccctcagtagacttaacagatgatgaccaaacctctagtgtacctcattctgccatctctgatattatgtcatctgatcaagaaacttactcttgtaaacctcatggacggactccacttacctcagctgatgagcatgtacattccaaactggaaggaagtaaagtaacgaaatctaagacttctccggtggtatctggttcatctagtaaatcaaccacccttccaaggccacgacctaccaggacttccctcttgcgcagagcacgacttggtgaagcttcagacagtgaacttgctgatgctgacaaagcatctgttgcttctgaagtatccacaacaagttctacatcaaaacctcccacaggaaggcgtaacatctctcggattgatttattggctcagcctcgtagaacacgacttggctcactgtcagctcgtagtgactctgaagcaacaatttctagaagtagtgcctcttcgaggaccgcagaagccatcattagaagtggagccagactagtaccatcagataaattttctcctagaattagagctaacagtatctctcgactctcagactccaaggtcaaaagtatgacctcagctcatggctctgcttcagccctgaaaaccactcgcttgcagagcgctggatcagcaatgcctactagttcttcattcaaacaccggattaaagagcaggaagactacatccgagattggactgctcatcgagaagagatagccaggatcagccaagatcttgctctcattgctcgggagatcaacgatgtagcaggagagatagattcagtgacttcatcaggcactgcccctagtaccacagtaagcactgctgccaccacccctggctctgccatagacactagagaagaggtaggagatcttcatggagaaatgcataagttggttgatcgtgtttttgatgaaagcctcaacttccgaaagattcctccattagttcattccaaaacaccagaaggaaacaacggtcgatctggtgatccaagacctcaagcagcagagcctcccgatcacttaacaattacaaggcggagaacctggagcagggatgaagtcatgggagataatctgctgctgtcatccgtctttcagttctctaagaagataagacaatctatagataagacagctggaaagatcagaatattatttaaagacaaagatcggaattgggatgacatagaaagcaaattaagagccgaaagtgaagtccctattgtgaaaacctcaagcatggagatttcttctatcttacaggaactgaaaagagtagaaaagcagctgcaagcaatcaatgctatgattgatcctgatggaactttggaggctctgaacaacatgggatttcccagtgctatgttgccatctccaccgaaacagaagtccagccctgtgaataaccaccacagcccgggtcagacaccaacacttggccaaccagaagctagggctcttcatcctgctgctgtttcagccgcagctgaatttgagaatgctgaatctgaggctgatttcagtatacatttcaatagattcaaccccgatggggaagaggaagatgttacagtacaagaatgactttctcttgattgttgaaaaatcattacctgtggaatggctaggaatattggaagcagcatagtgttgatgtacgcaaaacaagacagcttggtcagctacaatcttggaatccctgtcttcttaattttatttatttatttttgacgtataatgtagtatatcaatcctttcaaactatttagataaccacttgatgcacaaataggaaaaagcagattgtggcagtgtcgccttttgtggttttatgattttcaaattgaatttaatgattacaccctttcccttcatagatcttttttcttttttttaagccatgctgtgacctacaagcaaactaaatagccaacatttctgaacccctaagtctcctgtgccaagctgctccctgaaatggacttcttcatctgtacagatttgttaaaccattctatttgcttcttaataataggatttatattagtactcattaccattggacacaatgacataagtactctccacagtaaagcagacctttcacaacagtcactctgtgtcctaaaattttccaacatagatgtgatttatataactttgttgatacgtaaattgtcttggggtttacggaaattaactattatgtttgcactaagatttgctgggagtggtaggtggacatatctatatatcaataaggactaaccgtcttttttgtacataggagattgataatactgtatttgttttaagcccacagtgttttactccactttcaaaaagatcaatttggcactttttttcattttttttaatggaaataagatttggtctctcattttaggttaaatgataactagaaagattaaactagacagatagtttaggtggagtatatttttaaaactcagaacatgtatattggtcctgtgttaccaagtttatatgtgacagttgaaaaagaaattcccttgaaatgatcatgaggttaaaattttcttcattaggggacttggagaaccagtagtcgtaagattagttgatagtttcactcccaagcaatgaattgcttctgtgtgtttccctgtaggactcaatagtaaatgctgtctgtcttacacatttataaggaccctgcaagacgacgacaaaggcctttggcctgtgctactaaacaagaagcctatgaaaaatttcttctttaaacttgttttttctctttccagtaagttcacatttggataattttaaaaagaaaagtaattacctttgtgtttccagaacactataattggggtgtatcttaattcagttaaatattattagtagacctggattttcccccttgaccccatcagtctataaaggttaaactgcaacttttatgaaatggtctttaatatttccacaataatcctgtgctatatttgttttaagaaacaaagtaactctatacacttcaagactttacaggattttttaaatcctgtattgttggatcaattaataaagatgcaaaaaaactttatagagatgtaaaaacaaaactataatggatctcctatttttctttaaatacaaaaaaaaaaaggtaaatgaactattctccttgtaaagctaaattccccattctgtctaataaaggaagactgaaaaaaggttttaaagaacataaatggaaagatacaaatgctttgaaggaataaacgaaatgttaaaacagggtcaatccatttgaagaaaaagttggacaaaataatcagcattgctccctcttttatttaatatttgggtactgattatatccacatggaagtagaaggtaaggagtttaggaaaatactagaatctactctgcttacattcttgtttaagtgtttacacagtttggttcaattataaacatttggccttttactatgttatttttattttgtatgaatacattatcctccttatttatttttgttacatttattacttatgttattttgttatgcatttacaactccatttttaaataaagtgtttctggaacttta

SEQ ID NO: 116497 - DNA, 7764 bp, Homo sapiens
  Payload ID: 2729
  Gene Symbol: CEP192
  Gene Name: centrosomal protein 192kDa
  ENST ID: ENST00000325971
  CDS Start-End: 1296-7484
agtgccctgggacacctcttcagtccgtggactttcccgctgcacactgccctccgaagtcggggacgcgggctcgtgagatggaagattttcgaggtatagcagaagaatcatttccaagctttctcaccaattcattatttggtaacagtgggattttggaaaatgtcactctttcttcaaatcttggcttgcctgttgctgtttctacacttgctagggatagatccagcactgataacaggtatcctgatatccaggcatcttacttagtagaagggagattttcagttccatccgggtcatctcccggaagccagagtgatgctgaaccaagagagaggttacagcttagcttccaggatgatgattctatctctaggaaaaagagctatgtggaaagtcaacgtttgtcaaatgctctcagcaaacagtcagctttacaaatggagacagcaggaccagaagaggagccagccggagctacagaatccttgcagggccaagatctcttcaacagggcttcaccactggaacaagcacaagactcacctattgattttcatttacagtcatggatgaataataaggaacccaagattgttgtgcttgatgctggaaaacattttgaagacaagactctaaagagtgacctaagccacactagcttattagaaaatgagaaacttatcttaccgacaagcttggaagattcttctgatgatgatattgatgatgaaatgttttatgatgatcatttggaggcttattttgaacaactggcaattccaggaatgatatatgaagacctagaaggaccagaacctccagaaaaaggttttaagttacctacaaatggtcttagacaggcaaatgaaaacggtagcttaaactgcaagtttcaatcagaaaataacagctctctgatttccctcgactcacactcttctgaaacaactcacaaagagtctgaggaaagccaagttatttgtctacctgggactagtaattctataggtactggagatagtagaaggtacacagatggtatgttaccattttcctctggtacttggggaactgagaaagaaatagaaaatttgaagggtattgttccagatcttaacagtgaatgtgcaagtaaagatgttctggtgaagaccctcagggctattgatgtgaaacttaactctgataattttcatgatgcaaatgccaatagaggtggttttgatctgactgaccctgtaaaacagggggcagagtgtcctcaccaaaataagacagttttgcacatggatggatgtttagacactgagactcctacggtgtccattcaagaaaatgtggatgtagcctctttgaagcccattagtgacagtggaattaatttcactgatgccatttggtcaccaacttgtgaaaggcgaacatgtgaatgtcacgagtccatcgaaaagaataaagacaaaacagatctcccacagagtgtggtctatcaaaatgaagagggtaggtgggtcacagaccttgcctattacacatcttttaatagcaaacaaaatttaaatgtgtctctaagtgatgagatgaatgaagacttcagatctggttctgaagcatttgatttgattgcacaagatgaagaagaatttaataaagagcatcaatttatacagccatcatttggctattttattagatcaccagagaagagagaacctattgccttaataagaaaatctgatgtatcaagaggtaatttggaaaaagaaatggctcatcttaaccatgatctatattcaggagatttaaatgaacagtcccaggcacagctaagtgaaggatcaattacacttcaggttgaagcagtagagagtacttcacaagtggatgaaaatgatgtgacgttaacggctgataaaggcaaaacagaggacactttcttcatgagcaacaaaccccaaagatacaaagacaagctaccagatagtggtgattctatgcttaggatcagcaccattgcttcagccattgcagaggcatcagttaatactgatccttcccaacttgctgcaatgatcaaggcactttcaaataaaaccagagacaagacttttcaggaagatgagaaacaaaaggactattctcatgtgcgtcatttcttacctaatgatttagaaaaaagtaatggatccaatgcacttgatatggagaaataccttaaaaaaacagaagttagtagatatgaaagtgcattggaaaacttttcaagggctagtatgtctgatacttgggatttatctttgcccaaagaacaaactactcaagacattcatccggtggacttaagtgctactagtgtaagtgtgagggcaccagaagaaaacacagcagctattgtttatgttgaaaatggagagagtgagaatcaagagtcatttagaaccataaactcctcaaattcagttacaaatagagagaataacagtgcagtagttgatgtgaagacatgttccattgacaacaaattacaagatgttggtaacgatgaaaaagctacctcaatttccactccatctgatagttattcatcagtgaggaaccccagaataacatccctttgtctgttaaaagactgtgaagaaatacgagataacagagaaaatcagaggcaaaatgagtgtgtcagtgaaataagcaacagtgagaagcatgtgacttttgaaaaccatcgcatagtctcacctaaaaatagtgatttgaaaaatacctctcctgagcatggtggacgtggctcagaggatgagcaggagagcttcagaccttccacgtcaccactgagtcattcttctcctagtgaaatttctggaacgagttcatcagggtgtgcgttagagtcctttggttcagcagctcagcagcagcagcctccctgtgagcaggagttgtctcccttggtgtgctcgcctgctggggtgagcaggctgacgtatgtgtctgaaccagagagctcctatcctaccacagccacagatgatgccctggaggaccgcaagagtgatatcaccagcgagttgagtaccacaattattcaaggcagtccagccgcattggaggaacgggctatggaaaaattgagagaaaaagttccatttcagaatagaggaaaaggaacattatcatctattatccagaataactctgatacaagaaaagcaactgaaactacttctctgagtagcaagcctgaatatgtaaaacctgactttagatggagtaaagatccttcctccaaaagtggaaatctgttggaaaccagtgaggtaggttggacatcaaaccctgaggaattggacccgatcaggctggctctcctgggcaagtcaggtctgagctgtcaggtggggtcagccacatcacaccctgtgtcctgccaggagcctatagatgaagatcaaagaataagtcctaaagataagtcaactgctggccgtgagttcagtggccaggtttctcatcagaccacctctgaaaaccagtgtactcctattcccagcagcacagttcacagctctgtggctgacatgcagaacatgcctgctgctgtgcacgcactcttgacacaaccctctctcagcgctgctccttttgctcagcggtatttgggaacactcccttcaactggaagcaccaccttgcctcagtgccatgctggcaatgccacagtctgtggcttctcaggaggccttccctatccagctgttgcaggagagcctgtgcagaactctgtggctgtgggaatttgtctaggatcaaatatcggctctggatggatgggtacctcttccctctgtaacccatattctaataccttaaatcagaacctgctaagcacaacaaaaccttttcctgtgccgtctgttggtacaaactgtggaattgaaccatgggattcaggagtgacatcaggattggggagtgtccgagtgcccgaggagttgaagcttcctcatgcttgctgtgtcgggatcgcttcccagaccctcctcagtgtgcttaatccaactgaccgctggctgcaagtcagcattggggtcctcagcattagtgttaatggtgaaaaggtggatctttcaacatatcgttgtttagttttcaagaataaagccatcataagacctcatgccacagaagagataaaagtgctttttataccatccagtcctggggttttcagatgcacattcagtgttgcttcttggccatgttcgacagatgctgagaccatcgtacaggcagaagctttggccagcaccgtcactctcactgccattgccgagagtcctgttattgaggtagaaacagaaaagaaagacgttcttgattttggtgacttgacttatggaggctggaaagccctcccactaaaattgataaaccgaacgcatgccactgtgccaattagactgattattaatgctaacgctgtagcctggcgctgtttcacgttttccaaggaatccgtccgagctcctgtggaagttgctccttgcgctgatgtggtcactcggctagcaggcccttctgtggtcaaccacatgatgcctgctagttatgatggacaggatccagaatttctgatgatttgggttcttttccatagtccaaagaaacagatcagctcttcagatattctggactcagcagaagaattctcggcaaaagttgatatcgaagttgacagcccaaaccctacgcccgttcttagaagtgtgagtctccgagcaagagcaggaatagctaggatccatgctcccagggacttgcagacgatgcatttcttggccaaagtggcttcctcaagaaagcagcacttacctttgaaaaatgctgggaacattgaagtttatttggatatcaaggtcccagaacaaggaagtcacttttcagtggatccaaagaatctactccttaaacctggagaagaacatgaggttattgtttcatttactccaaaggatcctgaagcctgcgaggaaaggatcttgaaaatatttgtgcagccatttggacctcagtatgaggtagtgttaaaaggcgaagtcatttcttcaggaagtaaacctctgtcacctggaccttgcttagatattccatcgattttgtccaacaaacaatttctggcttggggaggagtccctctaggtagaacacagcttcagaaactagctttaagaaataattctgcatctacaactcaacatttacgactgcttattagaggacaagatcaggactgctttcagcttcagaacacttttggttcagaacagcgattgaccagtaactgtgagatcagaattcacccaaaggaagacattttcatctctgtattatttgcacctactcgattatcttgcatgttggctagactagaaatcaaacaacttggaaatcgatcacaaccaggcattaagttcacaatacctttgtctggatatggaggaacaagcaatcttattttggaaggcgttaaaaaattatctgacagttacatggtaacagtgaatggcttagtacctggcaaagaaagtaaaattgttttttctgtccgcaacactggctcccgagcagcttttgttaaagcagtaggttttaaggattctcagaaaaaagttttgctggatcctaaagtattgaggatttttccagataaatttgtactcaaggaaagaacacaagaaaatgttactttaatatataatccatcagacagaggaatcaataataaaactgcaacagaactatcaactgtatacttatttggtggagatgaaatttcaagacagcagtatcgcagggccctgttacataaaccagagatgataaaacagatacttccagaacatagtgtgcttcaaaacattaattttgttgaagcatttcaagatgagctattagtaactgaagtatatgatcttccccaacgacctaatgatgttcagctcttttatggaagcatgtgtaaaattatactttcagtaattggagaattcagagattgcatttctagcagagaattccttcagccttcttccaaagctagcttggaatctacaagcgacttgggagcttctgggaaacatggtggcaacgtctctttggatgttttaccagtcaaaggtcctcagggttctcctcttctctcacgggcggctcgcccgcctctggatcagctggcctccgaagagccgtggactgtcctacccgagcacttgattctggtagctccttctccttgtgacatggcaaaaactggacgtttccagattgtgaataactctgtgaggttactgagatttgagctgtgctggccagcgcattgcctcacagtcacgccgcagcatggatgtgtcgcgccagagagtaaactacaaattcttgtgagtcctaattcctccttatccacaaaacagtcaatgttcccgtggagtggtttgatctatatacactgtgacgatggacagaagaaaattgtgaaagttcaaattcgagaagatttaactcaagtggaacttttaactcgtttgacctccaaaccatttggaattctttccccagtatctgagccttcagttagtcatttggtcaaaccaatgacaaaaccgccttccacaaaagttgaaataagaaacaagagtattacttttcctacaacagaacctggtgaaacttcagagagctgtctagaactcgagaatcatggcaccacagacgtgaaatggcatctgtcatctttagcgccaccttatgtcaagggagttgatgaaagtggagatgtttttagagctacctatgcagcattcagatgttctcctatttctggtctgctggaaagccatgggatccaaaaagtctccatcacatttttgcccagaggtaggggggattatgcccagttttgggatgttgaatgtcaccctcttaaggagcctcacatgaaacacacgttgagattccaactctctggacaaagcatcgaagcagaaaatgagcctgaaaacgcatgcctttccacggattccctcattaaaatagatcatttagttaagccccgaagacaagctgtgtcagaggcttctgctcgcatacctgagcagcttgatgtgactgctcgtggagtttatgccccagaggatgtgtacaggttccggccgactagtgtgggggaatcacggacacttaaagtcaatctgcgaaataattcttttattacacactcactgaagtttttgagtcccagagagccattctatgtcaaacattccaagtactctttgagagcccagcattacatcaacatgcccgtgcagttcaaaccgaagtccgcaggcaaatttgaagctttgcttgtcattcaaacagatgaaggcaagagtattgctattcgactaattggtgaagctcttggaaaaaattaactagaatacatttttgtgtaaagtaaattacataagttgtattttgttaactttatctttctacactacaattatgcttttgtatatatattttgtatgatggatatctataattgtagattttgtttttacaagctaatactgaagactcgactgaaatattatgtatctagcccatagtattgtacttaacttttacaggtgagaagagagttctgtgtttgcattgattatgatattctgaataaatatggaatatattttaatgtggtatatccag

SEQ ID NO: 116498 - DNA, 3286 bp, Homo sapiens
  Payload ID: 2729
  Gene Symbol: CEP192
  Gene Name: centrosomal protein 192kDa
  ENST ID: ENST00000430049
  CDS Start-End: 375-1655
ctggggttttcagatgcacattcagtgttgcttcttggccatgttcgacagatgctgagaccatcgtacaggcagaagctttggccagcaccgtcactctcactgccattgccgagagtcctgttattgaggtagaaacagaaaagaaagacgttcttgattttggtgacttgacttatggaggctggaaagccctcccactaaaattgataaaccgaacgcatgccactgtgccaattagactgattattaatgctaacgctgtagcctggcgctgtttcacgttttccaaggaatccgtccgagctcctgtggaagttgctccttgcgctgatgtggtcactcggctagcaggcccttctgtggtcaaccacatgatgcctgctagttatgatggacaggatccagaatttctgatgatttgggttcttttccatagtccaaagaaacagatcagctcttcagatattctggactcagcagaagaattctcggcaaaagttgatatcgaagttgacagcccaaaccctacgcccgttcttagaagtgtgagtctccgagcaagagcaggaatagctaggatccatgctcccagggacttgcagacgatgcatttcttggccaaagtggcttcctcaagaaagcagcacttacctttgaaaaatgctgggaacattgaagtttatttggatatcaaggtcccagaacaaggaagtcacttttcagtggatccaaagaatctactccttaaacctggagaagaacatgaggttattgtttcatttactccaaaggatcctgaagcctgcgaggaaaggatcttgaaaatatttgtgcagccatttggacctcagtatgaggtagtgttaaaaggcgaagtcatttcttcaggaagtaaacctctgtcacctggaccttgcttagatattccatcgattttgtccaacaaacaatttctggcttggggaggagtccctctaggtagaacacagcttcagaaactagctttaagaaataattctgcatctacaactcaacatttacgactgcttattagaggacaagatcaggactgctttcagcttcagaacacttttggttcagaacagcgattgaccagtaactgtgagatcagaattcacccaaaggaagacattttcatctctgtattatttgcacctactcgattatcttgcatgttggctagactagaaatcaaacaacttggaaatcgatcacaaccaggcattaagttcacaatacctttgtctggatatggaggaacaagcaatcttattttggaaggcgttaaaaaattatctgacagttacatggtaacagtgaatggcttagtacctggcaaagaaagtaaaattgttttttctgtccgcaacactggctcccgagcagcttttgttaaagcagtaggttttaaggattctcagaaaaaagttttgctggatcctaaagtattgaggatttttccagataaatttgtactcaaggaaagaacacaagaaaatgttactttaatatataatccatcagacagaggaatcaataataaaactgcaacagaactatcaactgtatacttatttggtggagatgaaatttcaagacagcagtatcgcaggcagggccctgttacataaaccagagatgataaaacagatacttccagaacatagtgtgcttcaaaacattaattttgttgaagcatttcaagatgagctattagtaactgaagtatatgatcttccccaacgacctaatgatgttcagctcttttatggaagcatgtgtaaaattatactttcagtaattggagaattcagagattgcatttctagcagagaattccttcagccttcttccaaagctagcttggaatctacaagcgacttgggagcttctgggaaacatggtggcaacgtctctttggatgttttaccagtcaaaggtcctcagggttctcctcttctctcacgggcggctcgcccgcctctggatcagctggcctccgaagagccgtggactgtcctacccgagcacttgattctggtagctccttctccttgtgacatggcaaaaactggacgtttccagattgtgaataactctgtgaggttactgagatttgagctgtgctggccagcgcattgcctcacagtcacgccgcagcatggatgtgtcgcgccagagagtaaactacaaattcttgtgagtcctaattcctccttatccacaaaacagtcaatgttcccgtggagtggtttgatctatatacactgtgacgatggacagaagaaaattgtgaaagttcaaattcgagaagatttaactcaagtggaacttttaactcgtttgacctccaaaccatttggaattctttccccagtatctgagccttcagttagtcatttggtcaaaccaatgacaaaaccgccttccacaaaagttgaaataagaaacaagagtattacttttcctacaacagaacctggtgaaacttcagagagctgtctagaactcgagaatcatggcaccacagacgtgaaatggcatctgtcatctttagcgccaccttatgtcaagggagttgatgaaagtggagatgtttttagagctacctatgcagcattcagatgttctcctatttctggtctgctggaaagccatgggatccaaaaacaggcagcttgatgtgactgctcgtggagtttatgccccagaggatgtgtacaggttccggccgactagtgtgggggaatcacggacacttaaagtcaatctgcgaaataattcttttattacacactcactgaagtttttgagtcccagagagccattctatgtcaaacattccaagtactctttgagagcccagcattacatcaacatgcccgtgcagttcaaaccgaagtccgcaggcaaatttgaagctttgcttgtcattcaaacagatgaaggcaagagtattgctattcgactaattggtgaagctcttggaaaaaattaactagaatacatttttgtgtaaagtaaattacataagttgtattttgttaactttatctttctacactacaattatgcttttgtatatatattttgtatgatggatatctataattgtagattttgtttttacaagctaatactgaagactcgactgaaatattatgtatctagcccatagtattgtacttaacttttacaggtgagaagagagttctgtgtttgcattgattatgatattctgaataaatatggaatatatttt

SEQ ID NO: 116499 - DNA, 6548 bp, Homo sapiens
  Payload ID: 2729
  Gene Symbol: CEP192
  Gene Name: centrosomal protein 192kDa
  ENST ID: ENST00000510237
  CDS Start-End: 1-5796
aagacagttttgcacatggatggatgtttagacactgagactcctacggtgtccattcaagaaaatgtggatgtagcctctttgaagcccattagtgacagtggaattaatttcactgatgccatttggtcaccaacttgtgaaaggcgaacatgtgaatgtcacgagtccatcgaaaagaataaagacaaaacagatctcccacagagtgtggtctatcaaaatgaagagggtaggtgggtcacagaccttgcctattacacatcttttaatagcaaacaaaatttaaatgtgtctctaagtgatgagatgaatgaagacttcagatctggttctgaagcatttgatttgattgcacaagatgaagaagaatttaataaagagcatcaatttatacaggaagaaaacatagatgctcataatacttcggttgcactgggcgatacgtcctggggagctacaattaattacagtctgttgaggaaatcacgtagcacatcagatttggataaagatgatgccagttatttacgtctgtctttaggagagttctttgctcaaagatctgaagctcttggttgccttggtggtggtaacaatgtgaaaagaccatcatttggctattttattagatcaccagagaagagagaacctattgccttaataagaaaatctgatgtatcaagaggtaatttggaaaaagaaatggctcatcttaaccatgatctatattcaggagatttaaatgaacagtcccaggcacagctaagtgaaggatcaattacacttcaggttgaagcagtagagagtacttcacaagtggatgaaaatgatgtgacgttaacggctgataaaggcaaaacagaggacactttcttcatgagcaacaaaccccaaagatacaaagacaagctaccagatagtggtgattctatgcttaggatcagcaccattgcttcagccattgcagaggcatcagttaatactgatccttcccaacttgctgcaatgatcaaggcactttcaaataaaaccagagacaagacttttcaggaagatgagaaacaaaaggactattctcatgtgcgtcatttcttacctaatgatttagaaaaaagtaatggatccaatgcacttgatatggagaaataccttaaaaaaacagaagttagtagatatgaaagtgcattggaaaacttttcaagggctagtatgtctgatacttgggatttatctttgcccaaagaacaaactactcaagacattcatccggtggacttaagtgctactagtgtaagtgtgagggcaccagaagaaaacacagcagctattgtttatgttgaaaatggagagagtgagaatcaagagtcatttagaaccataaactcctcaaattcagttacaaatagagagaataacagtgcagtagttgatgtgaagacatgttccattgacaacaaattacaagatgttggtaacgatgaaaaagctacctcaatttccactccatctgatagttattcatcagtgaggaaccccagaataacatccctttgtctgttaaaagactgtgaagaaatacgagataacagagaaaatcagaggcaaaatgagtgtgtcagtgaaataagcaacagtgagaagcatgtgacttttgaaaaccatcgcatagtctcacctaaaaatagtgatttgaaaaatacctctcctgagcatggtggacgtggctcagaggatgagcaggagagcttcagaccttccacgtcaccactgagtcattcttctcctagtgaaatttctggaacgagttcatcagggtgtgcgttagagtcctttggttcagcagctcagcagcagcagcctccctgtgagcaggagttgtctcccttggtgtgctcgcctgctggggtgagcaggctgacgtatgtgtctgaaccagagagctcctatcctaccacagccacagatgatgccctggaggaccgcaagagtgatatcaccagcgagttgagtaccacaattattcaaggcagtccagccgcattggaggaacgggctatggaaaaattgagagaaaaagttccatttcagaatagaggaaaaggaacattatcatctattatccagaataactctgatacaagaaaagcaactgaaactacttctctgagtagcaagcctgaatatgtaaaacctgactttagatggagtaaagatccttcctccaaaagtggaaatctgttggaaaccagtgaggtaggttggacatcaaaccctgaggaattggacccgatcaggctggctctcctgggcaagtcaggtctgagctgtcaggtggggtcagccacatcacaccctgtgtcctgccaggagcctatagatgaagatcaaagaataagtcctaaagataagtcaactgctggccgtgagttcagtggccaggtttctcatcagaccacctctgaaaaccagtgtactcctattcccagcagcacagttcacagctctgtggctgacatgcagaacatgcctgctgctgtgcacgcactcttgacacaaccctctctcagcgctgctccttttgctcagcggtatttgggaacactcccttcaactggaagcaccaccttgcctcagtgccatgctggcaatgccacagtctgtggcttctcaggaggccttccctatccagctgttgcaggagagcctgtgcagaactctgtggctgtgggaatttgtctaggatcaaatatcggctctggatggatgggtacctcttccctctgtaacccatattctaataccttaaatcagaacctgctaagcacaacaaaaccttttcctgtgccgtctgttggtacaaactgtggaattgaaccatgggattcaggagtgacatcaggattggggagtgtccgagtgcccgaggagttgaagcttcctcatgcttgctgtgtcgggatcgcttcccagaccctcctcagtgtgcttaatccaactgaccgctggctgcaagtcagcattggggtcctcagcattagtgttaatggtgaaaaggtggatctttcaacatatcgttgtttagttttcaagaataaagccatcataagacctcatgccacagaagagataaaagtgctttttataccatccagtcctggggttttcagatgcacattcagtgttgcttcttggccatgttcgacagatgctgagaccatcgtacaggcagaagctttggccagcaccgtcactctcactgccattgccgagagtcctgttattgaggtagaaacagaaaagaaagacgttcttgattttggtgacttgacttatggaggctggaaagccctcccactaaaattgataaaccgaacgcatgccactgtgccaattagactgattattaatgctaacgctgtagcctggcgctgtttcacgttttccaaggaatccgtccgagctcctgtggaagttgctccttgcgctgatgtggtcactcggctagcaggcccttctgtggtcaaccacatgatgcctgctagttatgatggacaggatccagaatttctgatgatttgggttcttttccatagtccaaagaaacagatcagctcttcagatattctggactcagcagaagaattctcggcaaaagttgatatcgaagttgacagcccaaaccctacgcccgttcttagaagtgtgagtctccgagcaagagcaggaatagctaggatccatgctcccagggacttgcagacgatgcatttcttggccaaagtggcttcctcaagaaagcagcacttacctttgaaaaatgctgggaacattgaagtttatttggatatcaaggtcccagaacaaggaagtcacttttcagtggatccaaagaatctactccttaaacctggagaagaacatgaggttattgtttcatttactccaaaggatcctgaagcctgcgaggaaaggatcttgaaaatatttgtgcagccatttggacctcagtatgaggtagtgttaaaaggcgaagtcatttcttcaggaagtaaacctctgtcacctggaccttgcttagatattccatcgattttgtccaacaaacaatttctggcttggggaggagtccctctaggtagaacacagcttcagaaactagctttaagaaataattctgcatctacaactcaacatttacgactgcttattagaggacaagatcaggactgctttcagcttcagaacacttttggttcagaacagcgattgaccagtaactgtgagatcagaattcacccaaaggaagacattttcatctctgtattatttgcacctactcgattatcttgcatgttggctagactagaaatcaaacaacttggaaatcgatcacaaccaggcattaagttcacaatacctttgtctggatatggaggaacaagcaatcttattttggaaggcgttaaaaaattatctgacagttacatggtaacagtgaatggcttagtacctggcaaagaaagtaaaattgttttttctgtccgcaacactggctcccgagcagcttttgttaaagcagtaggttttaaggattctcagaaaaaagttttgctggatcctaaagtattgaggatttttccagataaatttgtactcaaggaaagaacacaagaaaatgttactttaatatataatccatcagacagaggaatcaataataaaactgcaacagaactatcaactgtatacttatttggtggagatgaaatttcaagacagcagtatcgcagggccctgttacataaaccagagatgataaaacagatacttccagaacatagtgtgcttcaaaacattaattttgttgaagcatttcaagatgagctattagtaactgaagtatatgatcttccccaacgacctaatgatgttcagctcttttatggaagcatgtgtaaaattatactttcagtaattggagaattcagagattgcatttctagcagagaattccttcagccttcttccaaagctagcttggaatctacaagcgacttgggagcttctgggaaacatggtggcaacgtctctttggatgttttaccagtcaaaggtcctcagggttctcctcttctctcacgggcggctcgcccgcctctggatcagctggcctccgaagagccgtggactgtcctacccgagcacttgattctggtagctccttctccttgtgacatggcaaaaactggacgtttccagattgtgaataactctgtgaggttactgagatttgagctgtgctggccagcgcattgcctcacagtcacgccgcagcatggatgtgtcgcgccagagagtaaactacaaattcttgtgagtcctaattcctccttatccacaaaacagtcaatgttcccgtggagtggtttgatctatatacactgtgacgatggacagaagaaaattgtgaaagttcaaattcgagaagatttaactcaagtggaacttttaactcgtttgacctccaaaccatttggaattctttccccagtatctgagccttcagttagtcatttggtcaaaccaatgacaaaaccgccttccacaaaagttgaaataagaaacaagagtattacttttcctacaacagaacctggtgaaacttcagagagctgtctagaactcgagaatcatggcaccacagacgtgaaatggcatctgtcatctttagcgccaccttatgtcaagagatggagcctcaccacactgcccaggctggtctcgatctcctgacctcaagcaatcttcccacctcagcctcccaaagtgctgggattacagggagttgatgaaagtggagatgtttttagagctacctatgcagcattcagatgttctcctatttctggtctgctggaaagccatgggatccaaaaacaggcagcttgatgtgactgctcgtggagtttatgccccagaggatgtgtacaggttccggccgactagtgtgggggaatcacggacacttaaagtcaatctgcgaaataattcttttattacacactcactgaagtttttgagtcccagagagccattctatgtcaaacattccaagtactctttgagagcccagcattacatcaacatgcccgtgcagttcaaaccgaagtccgcaggcaaatttgaagctttgcttgtcattcaaacagatgaaggcaagagtattgctattcgactaattggtgaagctcttggaaaaaattaactagaatacatttttgtgtaaagtaaattacataagttgtattttgttaactttatctttctacactacaattatgcttttgtatatatattttgtatgatggatatctataattgtagattttgtttttacaagctaatactgaagactcgactgaaatattatgtatctagcccatagtattgtacttaacttttacaggtgagaagagagttctgtgtttgcattgattatgatattctgaataaatatggaatatattttaatgtggtatatccag

SEQ ID NO: 116500 - DNA, 8635 bp, Homo sapiens
  Payload ID: 2729
  Gene Symbol: CEP192
  Gene Name: centrosomal protein 192kDa
  ENST ID: ENST00000513432
  CDS Start-End: 1-1223
caaatgctctcagcaaacagtcagctttacaaatggagacagcaggaccagaagaggagccagccggagctacagaatccttgcagggccaagatctcttcaacagggcttcaccactggaacaagcacaagactcacctattgattttcatttacagtcatggatgaataataaggaacccaagattgttgtgcttgatgctggaaaacattttgaagacaagactctaaagagtgacctaagccacactagcttattagaaaatgagaaacttatcttaccgacaagcttggaagattcttctgatgatgatattgatgatgaaatgttttatgatgatcatttggaggcttattttgaacaactggcaattccaggaatgatatatgaagacctagaaggaccagaacctccagaaaaaggttttaagttacctacaaatggtcttagacaggcaaatgaaaacggtagcttaaactgcaagtttcaatcagaaaataacagctctctgatttccctcgactcacactcttctgaaacaactcacaaagagtctgaggaaagccaagttatttgtctacctgggactagtaattctataggtactggagatagtagaaggtacacagatggtatgttaccattttcctctggtacttggggaactgagaaagaaatagaaaatttgaagggtattgttccagatcttaacagtgaatgtgcaagtaaagatgttctggtgaagaccctcagggctattgatgtgaaacttaactctgataattttcatgatgcaaatgccaatagaggtggttttgatctgactgaccctgtaaaacagggggcagagtgtcctcaccaaaataagacagttttgcacatggatggatgtttagacactgagactcctacggtgtccattcaagaaaatgtggatgtagcctctttgaagcccattagtgacagtggaattaatttcactgatgccatttggtcaccaacttgtgaaaggcgaacatgtgaatgtcacgagtccatcgaaaagaataaagacaaaacagatctcccacagagtgtggtctatcaaaatgaagagggtaggtgggtcacagaccttgcctattacacatcttttaatagcaaacaaaatttaaatgtgtctctaagtgatgagatgaatgaagacttcagatctggttccatcatttggctattttattagatcaccagagaagagagaacctattgccttaataagaaaatctgatgtatcaagaggtaatttggaaaaagaaatggctcatcttaaccatgatctatattcaggagatttaaatgaacagtcccaggcacagctaagtgaaggatcaattacacttcaggttgaagcagtagagagtacttcacaagtggatgaaaatgatgtgacgttaacggctgataaaggcaaaacagaggacactttcttcatgagcaacaaaccccaaagatacaaagacaagctaccagatagtggtgattctatgcttaggatcagcaccattgcttcagccattgcagaggcatcagttaatactgatccttcccaacttgctgcaatgatcaaggcactttcaaataaaaccagagacaagacttttcaggaagatgagaaacaaaaggactattctcatgtgcgtcatttcttacctaatgatttagaaaaaagtaatggatccaatgcacttgatatggagaaataccttaaaaaaacagaagttagtagatatgaaagtgcattggaaaacttttcaagggctagtatgtctgatacttgggatttatctttgcccaaagaacaaactactcaagacattcatccggtggacttaagtgctactagtgtaagtgtgagggcaccagaagaaaacacagcagctattgtttatgttgaaaatggagagagtgagaatcaagagtcatttagaaccataaactcctcaaattcagttacaaatagagagaataacagtgcagtagttgatgtgaagacatgttccattgacaacaaattacaagatgttggtaacgatgaaaaagctacctcaatttccactccatctgatagttattcatcagtgaggaaccccagaataacatccctttgtctgttaaaagactgtgaagaaatacgagataacagagaaaatcagaggcaaaatgagtgtgtcagtgaaataagcaacagtgagaagcatgtgacttttgaaaaccatcgcatagtctcacctaaaaatagtgatttgaaaaatacctctcctgagcatggtggacgtggctcagaggatgagcaggagagcttcagaccttccacgtcaccactgagtcattcttctcctagtgaaatttctggaacgagttcatcagggtgtgcgttagagtcctttggttcagcagctcagcagcagcagcctccctgtgagcaggagttgtctcccttggtgtgctcgcctgctggggtgagcaggctgacgtatgtgtctgaaccagagagctcctatcctaccacagccacagatgatgccctggaggaccgcaagagtgatatcaccagcgagttgagtaccacaattattcaaggcagtccagccgcattggaggaacgggctatggaaaaattgagagaaaaagttccatttcagaatagaggaaaaggaacattatcatctattatccagaataactctgatacaagaaaagcaactgaaactacttctctgagtagcaagcctgaatatgtaaaacctgactttagatggagtaaagatccttcctccaaaagtggaaatctgttggaaaccagtgaggtaggttggacatcaaaccctgaggaattggacccgatcaggctggctctcctgggcaagtcaggtctgagctgtcaggtggggtcagccacatcacaccctgtgtcctgccaggagcctatagatgaagatcaaagaataagtcctaaagataagtcaactgctggccgtgagttcagtggccaggtttctcatcagaccacctctgaaaaccagtgtactcctattcccagcagcacagttcacagctctgtggctgacatgcagaacatgcctgctgctgtgcacgcactcttgacacaaccctctctcagcgctgctccttttgctcagcggtatttgggaacactcccttcaactggaagcaccaccttgcctcagtgccatgctggcaatgccacagtctgtggcttctcaggaggccttccctatccagctgttgcaggagagcctgtgcagaactctgtggctgtgggaatttgtctaggatcaaatatcggctctggatggatgggtacctcttccctctgtaacccatattctaataccttaaatcagaacctgctaagcacaacaaaaccttttcctgtgccgtctgttggtacaaactgtggaattgaaccatgggattcaggagtgacatcaggattggggagtgtccgagtgcccgaggagttgaagcttcctcatgcttgctgtgtcgggatcgcttcccagaccctcctcagtgtgcttaatccaactgaccgctggctgcaagtcagcattggggtcctcagcattagtgttaatggtgaaaaggtagctttctatgtctttctcatttaacctaacagttgcattgtgattaggtgcttgatttcccccatctctagtgctaggttctcccttcacgcctttattaatgcacacagtcattgccatggtatctttctctcagaccccttttgttgtagtgcttgtagagtgtaaagtgaaacagttttgcattttccatcatttattatttatattttattgttatttattggtaaattcctataaatttgcttttagtgctattatttaaatcatcaaaagttctgagtttcttgtttctacttgtcagttttgttaaaggtgattgaatataagtaaccatgacttgtaaaaaaaaaaaaagaaagcagttactcttggagcttatgccttcatttggcaagggaagtctttttaactagtttatctgatgattttcttacatgagcttttgaaatacctggaaatgcagttttaatatgaacttttaagacagatgtctcttacatgatcaattacagttgctataattctagactctaaatcttctctcctggttacagtgaccatttgaacattggtgagtggagaggggggatatatggtcagcagctgttttgaaatgtcccagttttacgactgttacttgtgaatcagtattggtggatgcttccctcgtgcctcttagtggccatcgtctgcctggtaaaataagatcgcctccccctacgccgtcttggcttttcccctctacttccagtccttaggttagatgaaaagtaggtgattgaaggagaggattgagggtggaaggtgggctgtgaagactttttgggggcatcctggagtctgtgaatgaagcagtgttgtctatggaagtggggagtagaaaagaagatccccattgacagtgaggagggagggtggctggagttgtcactgcagtcgaggcggagtcagggctgtgggacctcagcggttagcctgactcttcttccccccagcccccacccactgctgtgttgtgtgtgctagagagacttacagggctgtgaaagagtgacctttgtcagtgtcctttttaagacaagtgagtgtaagggtcaatgtgcttgcttggaggtggactggggagacagccttggtgcagcaagaacattcaactcaggaagcatttgactcgttgtacttcagagaccataaatgacaaggttttgacatttttgaagagataataaatgttttaatttggcagtttgagtgattgggaaaaggaatcttaaactaggtgattctacttgattttcagtgtgaagccattaataacgaactttatggctcttttttgaaggtggatctttcaacatatcgttgtttagttttcaagaataaagccatcataagacctcatgccacagaagagataaaagtgctttttataccatccagtcctggggttttcagatgcacattcagtgttgcttcttggccatgttcgacagatgctgagaccatcgtacaggcagaagctttggccagcaccgtcactctcactgccattgccgagagtcctgttattgaggtagaaacagaaaagaaagacgttcttgattttggtgacttgacttatggaggctggaaagccctcccactaaaattgataaaccgaacgcatgccactgtgccaattagactgattattaatgctaacgctgtagcctggcgctgtttcacgttttccaaggaatccgtccgagctcctgtggaagttgctccttgcgctgatgtggtcactcggctagcaggcccttctgtggtcaaccacatgatgcctgctagttatgatggacaggatccagaatttctgatgatttgggttcttttccatagtccaaagaaacagatcagctcttcagatattctggactcagcagaagaattctcggcaaaagttgatatcgaagttgacagcccaaaccctacgcccgttcttagaagtgtgagtctccgagcaagagcaggaatagctaggatccatgctcccagggacttgcagacgatgcatttcttggccaaagtggcttcctcaagaaagcagcacttacctttgaaaaatgctgggaacattgaagtttatttggatatcaaggtcccagaacaaggaagtcacttttcagtggatccaaagaatctactccttaaacctggagaagaacatgaggttattgtttcatttactccaaaggatcctgaagcctgcgaggaaaggatcttgaaaatatttgtgcagccatttggacctcagtatgaggtagtgttaaaaggcgaagtcatttcttcaggaagtaaacctctgtcacctggaccttgcttagatattccatcgattttgtccaacaaacaatttctggcttggggaggagtccctctaggtagaacacagcttcagaaactagctttaagaaataattctgcatctacaactcaacatttacgactgcttattagaggacaagatcaggactgctttcagcttcagaacacttttggttcagaacagcgattgaccagtaactgtgagatcagaattcacccaaaggaagacattttcatctctgtattatttgcacctactcgattatcttgcatgttggctagactagaaatcaaacaacttggaaatcgatcacaaccaggcattaagttcacaatacctttgtctggatatggaggaacaagcaatcttattttggaaggcgttaaaaaattatctgacagttacatggtaacagtgaatggcttagtacctggcaaagaaagtaaaattgttttttctgtccgcaacactggctcccgagcagcttttgttaaagcagtaggttttaaggattctcagaaaaaagttttgctggatcctaaagtattgaggatttttccagataaatttgtactcaaggaaagaacacaagaaaatgttactttaatatataatccatcagacagaggaatcaataataaaactgcaacagaactatcaactgtatacttatttggtggagatgaaatttcaagacagcagtatcgcagggccctgttacataaaccagagatgataaaacagatacttccagaacatagtgtgcttcaaaacattaattttgttgaagcatttcaagatgagctattagtaactgaagtatatgatcttccccaacgacctaatgatgttcagctcttttatggaagcatgtgtaaaattatactttcagtaattggagaattcagagattgcatttctagcagagaattccttcagccttcttccaaagctagcttggaatctacaagcgacttgggagcttctgggaaacatggtggcaacgtctctttggatgttttaccagtcaaaggtcctcagggttctcctcttctctcacgggcggctcgcccgcctctggatcagctggcctccgaagagccgtggactgtcctacccgagcacttgattctggtagctccttctccttgtgacatggcaaaaactggacgtttccagattgtgaataactctgtgaggttactgagatttgagctgtgctggccagcgcattgcctcacagtcacgccgcagcatggatgtgtcgcgccagagagtaaactacaaattcttgtgagtcctaattcctccttatccacaaaacagtcaatgttcccgtggagtggtttgatctatatacactgtgacgatggacagaagaaaattgtgaaagttcaaattcgagaagatttaactcaagtggaacttttaactcgtttgacctccaaaccatttggaattctttccccagtatctgagccttcagttagtcatttggtcaaaccaatgacaaaaccgccttccacaaaagttgaaataagaaacaagagtattacttttcctacaacagaacctggtgaaacttcagagagctgtctagaactcgagaatcatggcaccacagacgtgaaatggcatctgtcatctttagcgccaccttatgtcaagggagttgatgaaagtggagatgtttttagagctacctatgcagcattcagatgttctcctatttctggtctgctggaaagccatgggatccaaaaagtctccatcacatttttgcccagaggtaggggggattatgcccagttttgggatgttgaatgtcaccctcttaaggagcctcacatgaaacacacgttgagattccaactctctggacaaagcatcgaagcagaaaatgagcctgaaaacgcatgcctttccacggattccctcattaaaatagatcatttagttaagccccgaagacaagctgtgtcagaggcttctgctcgcatacctgagcagcttgatgtgactgctcgtggagtttatgccccagaggatgtgtacaggttccggccgactagtgtgggggaatcacggacacttaaagtcaatctgcgaaataattcttttattacacactcactgaagtttttgagtcccagagagccattctatgtcaaacattccaagtactctttgagagcccagcattacatcaacatgcccgtgcagttcaaaccgaagtccgcaggcaaatttgaagctttgcttgtcattcaaacagatgaaggcaagagtattgctattcgactaattggtgaagctcttggaaaaaattaactagaatacatttttgtgtaaagtaaattacataagttgtattttgttaactttatctttctacactacaattatgcttttgtatatatattttgtatgatggatatctataattgtagattttgtttttacaagctaatactgaagactcgactgaaatattatgtatctagcccatagtattgtacttaacttttacaggtgagaagagagttctgtgtttgcattgattatgatattctgaataaatatggaatatattttaatgtggtatatccagaa

SEQ ID NO: 116501 - DNA, 7960 bp, Homo sapiens
  Payload ID: 2729
  Gene Symbol: CEP192
  Gene Name: centrosomal protein 192kDa
  Uniprot ID: Q8TEP8
  ENST ID: ENST00000506447
  CDS Start-End: 81-7694
agtgccctgggacacctcttcagtccgtggactttcccgctgcacactgccctccgaagtcggggacgcgggctcgtgagatggaagattttcgaggtatagcagaagaatcatttccaagctttctcaccaattcattatttggtaacagtgggattttggaaaatgtcactctttcttcaaatcttggcttgcctgttgctgtttctacacttgctagggatagatccagcactgataacaggtatcctgatatccaggcatcttacttagtagaagggagattttcagttccatccgggtcatctcccggaagccagagtgatgctgaaccaagagagaggttacagcttagcttccaggatgatgattctatctctaggaaaaagagctatgtggaaagtcaacgtttgtcaaatgctctcagcaaacagtcagctttacaaatggagacagcaggaccagaagaggagccagccggagctacagaatccttgcagggccaagatctcttcaacagggcttcaccactggaacaagcacaagactcacctattgattttcatttacagtcatggatgaataataaggaacccaagattgttgtgcttgatgctggaaaacattttgaagacaagactctaaagagtgacctaagccacactagcttattagaaaatgagaaacttatcttaccgacaagcttggaagattcttctgatgatgatattgatgatgaaatgttttatgatgatcatttggaggcttattttgaacaactggcaattccaggaatgatatatgaagacctagaaggaccagaacctccagaaaaaggttttaagttacctacaaatggtcttagacaggcaaatgaaaacggtagcttaaactgcaagtttcaatcagaaaataacagctctctgatttccctcgactcacactcttctgaaacaactcacaaagagtctgaggaaagccaagttatttgtctacctgggactagtaattctataggtactggagatagtagaaggtacacagatggtatgttaccattttcctctggtacttggggaactgagaaagaaatagaaaatttgaagggtattgttccagatcttaacagtgaatgtgcaagtaaagatgttctggtgaagaccctcagggctattgatgtgaaacttaactctgataattttcatgatgcaaatgccaatagaggtggttttgatctgactgaccctgtaaaacagggggcagagtgtcctcaccaaaataagacagttttgcacatggatggatgtttagacactgagactcctacggtgtccattcaagaaaatgtggatgtagcctctttgaagcccattagtgacagtggaattaatttcactgatgccatttggtcaccaacttgtgaaaggcgaacatgtgaatgtcacgagtccatcgaaaagaataaagacaaaacagatctcccacagagtgtggtctatcaaaatgaagagggtaggtgggtcacagaccttgcctattacacatcttttaatagcaaacaaaatttaaatgtgtctctaagtgatgagatgaatgaagacttcagatctggttctgaagcatttgatttgattgcacaagatgaagaagaatttaataaagagcatcaatttatacaggaagaaaacatagatgctcataatacttcggttgcactgggcgatacgtcctggggagctacaattaattacagtctgttgaggaaatcacgtagcacatcagatttggataaagatgatgccagttatttacgtctgtctttaggagagttctttgctcaaagatctgaagctcttggttgccttggtggtggtaacaatgtgaaaagaccatcatttggctattttattagatcaccagagaagagagaacctattgccttaataagaaaatctgatgtatcaagaggtaatttggaaaaagaaatggctcatcttaaccatgatctatattcaggagatttaaatgaacagtcccaggcacagctaagtgaaggatcaattacacttcaggttgaagcagtagagagtacttcacaagtggatgaaaatgatgtgacgttaacggctgataaaggcaaaacagaggacactttcttcatgagcaacaaaccccaaagatacaaagacaagctaccagatagtggtgattctatgcttaggatcagcaccattgcttcagccattgcagaggcatcagttaatactgatccttcccaacttgctgcaatgatcaaggcactttcaaataaaaccagagacaagacttttcaggaagatgagaaacaaaaggactattctcatgtgcgtcatttcttacctaatgatttagaaaaaagtaatggatccaatgcacttgatatggagaaataccttaaaaaaacagaagttagtagatatgaaagtgcattggaaaacttttcaagggctagtatgtctgatacttgggatttatctttgcccaaagaacaaactactcaagacattcatccggtggacttaagtgctactagtgtaagtgtgagggcaccagaagaaaacacagcagctattgtttatgttgaaaatggagagagtgagaatcaagagtcatttagaaccataaactcctcaaattcagttacaaatagagagaataacagtgcagtagttgatgtgaagacatgttccattgacaacaaattacaagatgttggtaacgatgaaaaagctacctcaatttccactccatctgatagttattcatcagtgaggaaccccagaataacatccctttgtctgttaaaagactgtgaagaaatacgagataacagagaaaatcagaggcaaaatgagtgtgtcagtgaaataagcaacagtgagaagcatgtgacttttgaaaaccatcgcatagtctcacctaaaaatagtgatttgaaaaatacctctcctgagcatggtggacgtggctcagaggatgagcaggagagcttcagaccttccacgtcaccactgagtcattcttctcctagtgaaatttctggaacgagttcatcagggtgtgcgttagagtcctttggttcagcagctcagcagcagcagcctccctgtgagcaggagttgtctcccttggtgtgctcgcctgctggggtgagcaggctgacgtatgtgtctgaaccagagagctcctatcctaccacagccacagatgatgccctggaggaccgcaagagtgatatcaccagcgagttgagtaccacaattattcaaggcagtccagccgcattggaggaacgggctatggaaaaattgagagaaaaagttccatttcagaatagaggaaaaggaacattatcatctattatccagaataactctgatacaagaaaagcaactgaaactacttctctgagtagcaagcctgaatatgtaaaacctgactttagatggagtaaagatccttcctccaaaagtggaaatctgttggaaaccagtgaggtaggttggacatcaaaccctgaggaattggacccgatcaggctggctctcctgggcaagtcaggtctgagctgtcaggtggggtcagccacatcacaccctgtgtcctgccaggagcctatagatgaagatcaaagaataagtcctaaagataagtcaactgctggccgtgagttcagtggccaggtttctcatcagaccacctctgaaaaccagtgtactcctattcccagcagcacagttcacagctctgtggctgacatgcagaacatgcctgctgctgtgcacgcactcttgacacaaccctctctcagcgctgctccttttgctcagcggtatttgggaacactcccttcaactggaagcaccaccttgcctcagtgccatgctggcaatgccacagtctgtggcttctcaggaggccttccctatccagctgttgcaggagagcctgtgcagaactctgtggctgtgggaatttgtctaggatcaaatatcggctctggatggatgggtacctcttccctctgtaacccatattctaataccttaaatcagaacctgctaagcacaacaaaaccttttcctgtgccgtctgttggtacaaactgtggaattgaaccatgggattcaggagtgacatcaggattggggagtgtccgagtgcccgaggagttgaagcttcctcatgcttgctgtgtcgggatcgcttcccagaccctcctcagtgtgcttaatccaactgaccgctggctgcaagtcagcattggggtcctcagcattagtgttaatggtgaaaaggtggatctttcaacatatcgttgtttagttttcaagaataaagccatcataagacctcatgccacagaagagataaaagtgctttttataccatccagtcctggggttttcagatgcacattcagtgttgcttcttggccatgttcgacagatgctgagaccatcgtacaggcagaagctttggccagcaccgtcactctcactgccattgccgagagtcctgttattgaggtagaaacagaaaagaaagacgttcttgattttggtgacttgacttatggaggctggaaagccctcccactaaaattgataaaccgaacgcatgccactgtgccaattagactgattattaatgctaacgctgtagcctggcgctgtttcacgttttccaaggaatccgtccgagctcctgtggaagttgctccttgcgctgatgtggtcactcggctagcaggcccttctgtggtcaaccacatgatgcctgctagttatgatggacaggatccagaatttctgatgatttgggttcttttccatagtccaaagaaacagatcagctcttcagatattctggactcagcagaagaattctcggcaaaagttgatatcgaagttgacagcccaaaccctacgcccgttcttagaagtgtgagtctccgagcaagagcaggaatagctaggatccatgctcccagggacttgcagacgatgcatttcttggccaaagtggcttcctcaagaaagcagcacttacctttgaaaaatgctgggaacattgaagtttatttggatatcaaggtcccagaacaaggaagtcacttttcagtggatccaaagaatctactccttaaacctggagaagaacatgaggttattgtttcatttactccaaaggatcctgaagcctgcgaggaaaggatcttgaaaatatttgtgcagccatttggacctcagtatgaggtagtgttaaaaggcgaagtcatttcttcaggaagtaaacctctgtcacctggaccttgcttagatattccatcgattttgtccaacaaacaatttctggcttggggaggagtccctctaggtagaacacagcttcagaaactagctttaagaaataattctgcatctacaactcaacatttacgactgcttattagaggacaagatcaggactgctttcagcttcagaacacttttggttcagaacagcgattgaccagtaactgtgagatcagaattcacccaaaggaagacattttcatctctgtattatttgcacctactcgattatcttgcatgttggctagactagaaatcaaacaacttggaaatcgatcacaaccaggcattaagttcacaatacctttgtctggatatggaggaacaagcaatcttattttggaaggcgttaaaaaattatctgacagttacatggtaacagtgaatggcttagtacctggcaaagaaagtaaaattgttttttctgtccgcaacactggctcccgagcagcttttgttaaagcagtaggttttaaggattctcagaaaaaagttttgctggatcctaaagtattgaggatttttccagataaatttgtactcaaggaaagaacacaagaaaatgttactttaatatataatccatcagacagaggaatcaataataaaactgcaacagaactatcaactgtatacttatttggtggagatgaaatttcaagacagcagtatcgcagggccctgttacataaaccagagatgataaaacagatacttccagaacatagtgtgcttcaaaacattaattttgttgaagcatttcaagatgagctattagtaactgaagtatatgatcttccccaacgacctaatgatgttcagctcttttatggaagcatgtgtaaaattatactttcagtaattggagaattcagagattgcatttctagcagagaattccttcagccttcttccaaagctagcttggaatctacaagcgacttgggagcttctgggaaacatggtggcaacgtctctttggatgttttaccagtcaaaggtcctcagggttctcctcttctctcacgggcggctcgcccgcctctggatcagctggcctccgaagagccgtggactgtcctacccgagcacttgattctggtagctccttctccttgtgacatggcaaaaactggacgtttccagattgtgaataactctgtgaggttactgagatttgagctgtgctggccagcgcattgcctcacagtcacgccgcagcatggatgtgtcgcgccagagagtaaactacaaattcttgtgagtcctaattcctccttatccacaaaacagtcaatgttcccgtggagtggtttgatctatatacactgtgacgatggacagaagaaaattgtgaaagttcaaattcgagaagatttaactcaagtggaacttttaactcgtttgacctccaaaccatttggaattctttccccagtatctgagccttcagttagtcatttggtcaaaccaatgacaaaaccgccttccacaaaagttgaaataagaaacaagagtattacttttcctacaacagaacctggtgaaacttcagagagctgtctagaactcgagaatcatggcaccacagacgtgaaatggcatctgtcatctttagcgccaccttatgtcaagggagttgatgaaagtggagatgtttttagagctacctatgcagcattcagatgttctcctatttctggtctgctggaaagccatgggatccaaaaagtctccatcacatttttgcccagaggtaggggggattatgcccagttttgggatgttgaatgtcaccctcttaaggagcctcacatgaaacacacgttgagattccaactctctggacaaagcatcgaagcagaaaatgagcctgaaaacgcatgcctttccacggattccctcattaaaatagatcatttagttaagccccgaagacaagctgtgtcagaggcttctgctcgcatacctgagcagcttgatgtgactgctcgtggagtttatgccccagaggatgtgtacaggttccggccgactagtgtgggggaatcacggacacttaaagtcaatctgcgaaataattcttttattacacactcactgaagtttttgagtcccagagagccattctatgtcaaacattccaagtactctttgagagcccagcattacatcaacatgcccgtgcagttcaaaccgaagtccgcaggcaaatttgaagctttgcttgtcattcaaacagatgaaggcaagagtattgctattcgactaattggtgaagctcttggaaaaaattaactagaatacatttttgtgtaaagtaaattacataagttgtattttgttaactttatctttctacactacaattatgcttttgtatatatattttgtatgatggatatctataattgtagattttgtttttacaagctaatactgaagactcgactgaaatattatgtatctagcccatagtattgtacttaacttttacaggtgagaagagagttctgtgtttgcattgattatgatattctgaataaatatggaatatattttaa

SEQ ID NO: 116502 - DNA, 3793 bp, Homo sapiens
  Payload ID: 2729
  Gene Symbol: CEP192
  Gene Name: centrosomal protein 192kDa
  ENST ID: ENST00000589596
  CDS Start-End: 81-3793
agtgccctgggacacctcttcagtccgtggactttcccgctgcacactgccctccgaagtcggggacgcgggctcgtgagatggaagattttcgaggtatagcagaagaatcatttccaagctttctcaccaattcattatttggtaacagtgggattttggaaaatgtcactctttcttcaaatcttggcttgcctgttgctgtttctacacttgctagggatagatccagcactgataacaggtatcctgatatccaggcatcttacttagtagaagggagattttcagttccatccgggtcatctcccggaagccagagtgatgctgaaccaagagagaggttacagcttagcttccaggatgatgattctatctctaggaaaaagagctatgtggaaagtcaacgtttgtcaaatgctctcagcaaacagtcagctttacaaatggagacagcaggaccagaagaggagccagccggagctacagaatccttgcagggccaagatctcttcaacagggcttcaccactggaacaagcacaagactcacctattgattttcatttacagtcatggatgaataataaggaacccaagattgttgtgcttgatgctggaaaacattttgaagacaagactctaaagagtgacctaagccacactagcttattagaaaatgagaaacttatcttaccgacaagcttggaagattcttctgatgatgatattgatgatgaaatgttttatgatgatcatttggaggcttattttgaacaactggcaattccaggaatgatatatgaagacctagaaggaccagaacctccagaaaaaggttttaagttacctacaaatggtcttagacaggcaaatgaaaacggtagcttaaactgcaagtttcaatcagaaaataacagctctctgatttccctcgactcacactcttctgaaacaactcacaaagagtctgaggaaagccaagttatttgtctacctgggactagtaattctataggtactggagatagtagaaggtacacagatggagagttctttgctcaaagatctgaagctcttggttgccttggtggtggtaacaatgtgaaaagaccatcatttggctattttattagatcaccagagaagagagaacctattgccttaataagaaaatctgatgtatcaagaggtaatttggaaaaagaaatggctcatcttaaccatgatctatattcaggagatttaaatgaacagtcccaggcacagctaagtgaaggatcaattacacttcaggttgaagcagtagagagtacttcacaagtggatgaaaatgatgtgacgttaacggctgataaaggcaaaacagaggacactttcttcatgagcaacaaaccccaaagatacaaagacaagctaccagatagtggtgattctatgcttaggatcagcaccattgcttcagccattgcagaggcatcagttaatactgatccttcccaacttgctgcaatgatcaaggcactttcaaataaaaccagagacaagacttttcaggaagatgagaaacaaaaggactattctcatgtgcgtcatttcttacctaatgatttagaaaaaagtaatggatccaatgcacttgatatggagaaataccttaaaaaaacagaagttagtagatatgaaagtgcattggaaaacttttcaagggctagtatgtctgatacttgggatttatctttgcccaaagaacaaactactcaagacattcatccggtggacttaagtgctactagtgtaagtgtgagggcaccagaagaaaacacagcagctattgtttatgttgaaaatggagagagtgagaatcaagagtcatttagaaccataaactcctcaaattcagttacaaatagagagaataacagtgcagtagttgatgtgaagacatgttccattgacaacaaattacaagatgttggtaacgatgaaaaagctacctcaatttccactccatctgatagttattcatcagtgaggaaccccagaataacatccctttgtctgttaaaagactgtgaagaaatacgagataacagagaaaatcagaggcaaaatgagtgtgtcagtgaaataagcaacagtgagaagcatgtgacttttgaaaaccatcgcatagtctcacctaaaaatagtgatttgaaaaatacctctcctgagcatggtggacgtggctcagaggatgagcaggagagcttcagaccttccacgtcaccactgagtcattcttctcctagtgaaatttctggaacgagttcatcagggtgtgcgttagagtcctttggttcagcagctcagcagcagcagcctccctgtgagcaggagttgtctcccttggtgtgctcgcctgctggggtgagcaggctgacgtatgtgtctgaaccagagagctcctatcctaccacagccacagatgatgccctggaggaccgcaagagtgatatcaccagcgagttgagtaccacaattattcaaggcagtccagccgcattggaggaacgggctatggaaaaattgagagaaaaagttccatttcagaatagaggaaaaggaacattatcatctattatccagaataactctgatacaagaaaagcaactgaaactacttctctgagtagcaagcctgaatatgtaaaacctgactttagatggagtaaagatccttcctccaaaagtggaaatctgttggaaaccagtgaggtaggttggacatcaaaccctgaggaattggacccgatcaggctggctctcctgggcaagtcaggtctgagctgtcaggtggggtcagccacatcacaccctgtgtcctgccaggagcctatagatgaagatcaaagaataagtcctaaagataagtcaactgctggccgtgagttcagtggccaggtttctcatcagaccacctctgaaaaccagtgtactcctattcccagcagcacagttcacagctctgtggctgacatgcagaacatgcctgctgctgtgcacgcactcttgacacaaccctctctcagcgctgctccttttgctcagcggtatttgggaacactcccttcaactggaagcaccaccttgcctcagtgccatgctggcaatgccacagtctgtggcttctcaggaggccttccctatccagctgttgcaggagagcctgtgcagaactctgtggctgtgggaatttgtctaggatcaaatatcggctctggatggatgggtacctcttccctctgtaacccatattctaataccttaaatcagaacctgctaagcacaacaaaaccttttcctgtgccgtctgttggtacaaactgtggaattgaaccatgggattcaggagtgacatcaggattggggagtgtccgagtgcccgaggagttgaagcttcctcatgcttgctgtgtcgggatcgcttcccagaccctcctcagtgtgcttaatccaactgaccgctggctgcaagtcagcattggggtcctcagcattagtgttaatggtgaaaaggtggatctttcaacatatcgttgtttagttttcaagaataaagccatcataagacctcatgccacagaagagataaaagtgctttttataccatccagtcctggggttttcagatgcacattcagtgttgcttcttggccatgttcgacagatgctgagaccatcgtacaggcagaagctttggccagcaccgtcactctcactgccattgccgagagtcctgttattgaggt

SEQ ID NO: 116503 - DNA, 6455 bp, Homo sapiens
  Payload ID: 2729
  Gene Symbol: CEP192
  Gene Name: centrosomal protein 192kDa
  ENST ID: ENST00000511820
  CDS Start-End: 1-6230
agggggcagagtgtcctcaccaaaataagacagttttgcacatggatggatgtttagacactgagactcctacggtgtccattcaagaaaatgtggatgtagcctctttgaagcccattagtgacagtggaattaatttcactgatgccatttggtcaccaacttgtgaaaggcgaacatgtgaatgtcacgagtccatcgaaaagaataaagacaaaacagatctcccacagagtgtggtctatcaaaatgaagagggtaggtgggtcacagaccttgcctattacacatcttttaatagcaaacaaaatttaaatgtgtctctaagtgatgagatgaatgaagacttcagatctggttctgaagcatttgatttgattgcacaagatgaagaagaatttaataaagagcatcaatttatacagccatcatttggctattttattagatcaccagagaagagagaacctattgccttaataagaaaatctgatgtatcaagaggtaatttggaaaaagaaatggctcatcttaaccatgatctatattcaggagatttaaatgaacagtcccaggcacagctaagtgaaggatcaattacacttcaggttgaagcagtagagagtacttcacaagtggatgaaaatgatgtgacgttaacggctgataaaggcaaaacagaggacactttcttcatgagcaacaaaccccaaagatacaaagacaagctaccagatagtggtgattctatgcttaggatcagcaccattgcttcagccattgcagaggcatcagttaatactgatccttcccaacttgctgcaatgatcaaggcactttcaaataaaaccagagacaagacttttcaggaagatgagaaacaaaaggactattctcatgtgcgtcatttcttacctaatgatttagaaaaaagtaatggatccaatgcacttgatatggagaaataccttaaaaaaacagaagttagtagatatgaaagtgcattggaaaacttttcaagggctagtatgtctgatacttgggatttatctttgcccaaagaacaaactactcaagacattcatccggtggacttaagtgctactagtgtaagtgtgagggcaccagaagaaaacacagcagctattgtttatgttgaaaatggagagagtgagaatcaagagtcatttagaaccataaactcctcaaattcagttacaaatagagagaataacagtgcagtagttgatgtgaagacatgttccattgacaacaaattacaagatgttggtaacgatgaaaaagctacctcaatttccactccatctgatagttattcatcagtgaggaaccccagaataacatccctttgtctgttaaaagactgtgaagaaatacgagataacagagaaaatcagaggcaaaatgagtgtgtcagtgaaataagcaacagtgagaagcatgtgacttttgaaaaccatcgcatagtctcacctaaaaatagtgatttgaaaaatacctctcctgagcatggtggacgtggctcagaggatgagcaggagagcttcagaccttccacgtcaccactgagtcattcttctcctagtgaaatttctggaacgagttcatcagggtgtgcgttagagtcctttggttcagcagctcagcagcagcagcctccctgtgagcaggagttgtctcccttggtgtgctcgcctgctggggtgagcaggctgacgtatgtgtctgaaccagagagctcctatcctaccacagccacagatgatgccctggaggaccgcaagagtgatatcaccagcgagttgagtaccacaattattcaaggcagtccagccgcattggaggaacgggctatggaaaaattgagagaaaaagttccatttcagaatagaggaaaaggaacattatcatctattatccagaataactctgatacaagaaaagcaactgaaactacttctctgagtagcaagcctgaatatgtaaaacctgactttagatggagtaaagatccttcctccaaaagtggaaatctgttggaaaccagtgaggtaggttggacatcaaaccctgaggaattggacccgatcaggctggctctcctgggcaagtcaggtctgagctgtcaggtggggtcagccacatcacaccctgtgtcctgccaggagcctatagatgaagatcaaagaataagtcctaaagataagtcaactgctggccgtgagttcagtggccaggtttctcatcagaccacctctgaaaaccagtgtactcctattcccagcagcacagttcacagctctgtggctgacatgcagaacatgcctgctgctgtgcacgcactcttgacacaaccctctctcagcgctgctccttttgctcagcggtatttgggaacactcccttcaactggaagcaccaccttgcctcagtgccatgctggcaatgccacagtctgtggcttctcaggaggccttccctatccagctgttgcaggagagcctgtgcagaactctgtggctgtgggaatttgtctaggatcaaatatcggctctggatggatgggtacctcttccctctgtaacccatattctaataccttaaatcagaacctgctaagcacaacaaaaccttttcctgtgccgtctgttggtacaaactgtggaattgaaccatgggattcaggagtgacatcaggattggggagtgtccgagtgcccgaggagttgaagcttcctcatgcttgctgtgtcgggatcgcttcccagaccctcctcagtgtgcttaatccaactgaccgctggctgcaagtcagcattggggtcctcagcattagtgttaatggtgaaaaggtggatctttcaacatatcgttgtttagttttcaagaataaagccatcataagacctcatgccacagaagagataaaagtgctttttataccatccagtcctggggttttcagatgcacattcagtgttgcttcttggccatgttcgacagatgctgagaccatcgtacaggcagaagctttggccagcaccgtcactctcactgccattgccgagagtcctgttattgaggtagaaacagaaaagaaagacgttcttgattttggtgacttgacttatggaggctggaaagccctcccactaaaattgataaaccgaacgcatgccactgtgccaattagactgattattaatgctaacgctgtagcctggcgctgtttcacgttttccaaggaatccgtccgagctcctgtggaagttgctccttgcgctgatgtggtcactcggctagcaggcccttctgtggtcaaccacatgatgcctgctagttatgatggacaggatccagaatttctgatgatttgggttcttttccatagtccaaagaaacagatcagctcttcagatattctggactcagcagaagaattctcggcaaaagttgatatcgaagttgacagcccaaaccctacgcccgttcttagaagtgtgagtctccgagcaagagcaggaatagctaggatccatgctcccagggacttgcagacgatgcatttcttggccaaagtggcttcctcaagaaagcagcacttacctttgaaaaatgctgggaacattgaagtttatttggatatcaaggtcccagaacaaggaagtcacttttcagtggatccaaagaatctactccttaaacctggagaagaacatgaggttattgtttcatttactccaaaggatcctgaagcctgcgaggaaaggatcttgaaaatatttgtgcagccatttggacctcagtatgaggtagtgttaaaaggcgaagtcatttcttcaggaagtaaacctctgtcacctggaccttgcttagatattccatcgattttgtccaacaaacaatttctggcttggggaggagtccctctaggtagaacacagcttcagaaactagctttaagaaataattctgcatctacaactcaacatttacgactgcttattagaggacaagatcaggactgctttcagcttcagaacacttttggttcagaacagcgattgaccagtaactgtgagatcagaattcacccaaaggaagacattttcatctctgtattatttgcacctactcgattatcttgcatgttggctagactagaaatcaaacaacttggaaatcgatcacaaccaggcattaagttcacaatacctttgtctggatatggaggaacaagcaatcttattttggaaggcgttaaaaaattatctgacagttacatggtaacagtgaatggcttagtacctggcaaagaaagtaaaattgttttttctgtccgcaacactggctcccgagcagcttttgttaaagcagtaggttttaaggattctcagaaaaaagttttgctggatcctaaagtattgaggatttttccagataaatttgtactcaaggaaagaacacaagaaaatgttactttaatatataatccatcagacagaggaatcaataataaaactgcaacagaactatcaactgtatacttatttggtggagatgaaatttcaagacagcagtatcgcagggccctgttacataaaccagagatgataaaacagatacttccagaacatagtgtgcttcaaaacattaattttgttgaagcatttcaagatgagctattagtaactgaagtatatgatcttccccaacgacctaatgatgttcagctcttttatggaagcatgtgtaaaattatactttcagtaattggagaattcagagattgcatttctagcagagaattccttcagccttcttccaaagctagcttggaatctacaagcgacttgggagcttctgggaaacatggtggcaacgtctctttggatgttttaccagtcaaaggtcctcagggttctcctcttctctcacgggcggctcgcccgcctctggatcagctggcctccgaagagccgtggactgtcctacccgagcacttgattctggtagctccttctccttgtgacatggcaaaaactggacgtttccagattgtgaataactctgtgaggttactgagatttgagctgtgctggccagcgcattgcctcacagtcacgccgcagcatggatgtgtcgcgccagagagtaaactacaaattcttgtgagtcctaattcctccttatccacaaaacagtcaatgttcccgtggagtggtttgatctatatacactgtgacgatggacagaagaaaattgtgaaagttcaaattcgagaagatttaactcaagtggaacttttaactcgtttgacctccaaaccatttggaattctttccccagtatctgagccttcagttagtcatttggtcaaaccaatgacaaaaccgccttccacaaaagttgaaataagaaacaagagtattacttttcctacaacagaacctggtgaaacttcagagagctgtctagaactcgagaatcatggcaccacagacgtgaaatggcatctgtcatctttagcgccaccttatgtcaagggagttgatgaaagtggagatgtttttagagctacctatgcagcattcagatgttctcctatttctggtctgctggaaagccatgggatccaaaaagtctccatcacatttttgcccagaggtaggggggattatgcccagttttgggatgttgaatgtcaccctcttaaggagcctcacatgaaacacacgttgagattccaactctctggacaaagcatcgaagcagaaaatgagcctgaaaacgcatgcctttccacggattccctcattaaaatagatcatttagttaagccccgaagacaagctgtgtcagaggcttctgctcgcatacctgagcagcttgatgtgactgctcgtggagtttatgccccagaggatgtgtacaggttccggccgactagtgtgggggaatcacggacacttaaagtcaatctgcgaaataattcttttattacacactcactgaagtttttgagtcccagagagccattctatgtcaaacattccaagtactctttgagagcccagcattacatcaacatgcccgtgcagttcaaaccgaagtccgcaggcaaatttgaagctttgcttgtcattcaaacagatgaaggcaagagtattgctattcgactaattggtgaagctcttggaaaaaattaactagaatacatttttgtgtaaagtaaattacataagttgtattttgttaactttatctttctacactacaattatgcttttgtatatatattttgtatgatggatatctataattgtagattttgtttttacaagctaatactgaagactcgactgaaatattatgtatctagcccatagtattgtacttaacttttacaggtgagaagagagttctgtgtttgc

SEQ ID NO: 116504 - DNA, 3284 bp, Homo sapiens
  Payload ID: 2729
  Gene Symbol: CEP192
  Gene Name: centrosomal protein 192kDa
  ENST ID: ENST00000589993
  CDS Start-End: 1-2702
ctggggttttcagatgcacattcagtgttgcttcttggccatgttcgacagatgctgagaccatcgtacaggcagaagctttggccagcaccgtcactctcactgccattgccgagagtcctgttattgaggtagaaacagaaaagaaagacgttcttgattttggtgacttgacttatggaggctggaaagccctcccactaaaattgataaaccgaacgcatgccactgtgccaattagactgattattaatgctaacgctgtagcctggcgctgtttcacgttttccaaggaatccgtccgagctcctgtggaagttgctccttgcgctgatgtggtcactcggctagcaggcccttctgtggtcaaccacatgatgcctgctagttatgatggacaggatccagaatttctgatgatttgggttcttttccatagtccaaagaaacagatcagctcttcagatattctggactcagcagaagaattctcggcaaaagttgatatcgaagttgacagcccaaaccctacgcccgttcttagaagtgtgagtctccgagcaagagcaggaatagctaggatccatgctcccagggacttgcagacgatgcatttcttggccaaagtggcttcctcaagaaagcagcacttacctttgaaaaatgctgggaacattgaagtttatttggatatcaaggtcccagaacaaggaagtcacttttcagtggatccaaagaatctactccttaaacctggagaagaacatgaggttattgtttcatttactccaaaggatcctgaagcctgcgaggaaaggatcttgaaaatatttgtgcagccatttggacctcagtatgaggtagtgttaaaaggcgaagtcatttcttcaggaagtaaacctctgtcacctggaccttgcttagatattccatcgattttgtccaacaaacaatttctggcttggggaggagtccctctaggtagaacacagcttcagaaactagctttaagaaataattctgcatctacaactcaacatttacgactgcttattagaggacaagatcaggactgctttcagcttcagaacacttttggttcagaacagcgattgaccagtaactgtgagatcagaattcacccaaaggaagacattttcatctctgtattatttgcacctactcgattatcttgcatgttggctagactagaaatcaaacaacttggaaatcgatcacaaccaggcattaagttcacaatacctttgtctggatatggaggaacaagcaatcttattttggaaggcgttaaaaaattatctgacagttacatggtaacagtgaatggcttagtacctggcaaagaaagtaaaattgttttttctgtccgcaacactggctcccgagcagcttttgttaaagcagtaggttttaaggattctcagaaaaaagttttgctggatcctaaagtattgaggatttttccagataaatttgtactcaaggaaagaacacaagaaaatgttactttaatatataatccatcagacagaggaatcaataataaaactgcaacagaactatcaactgtatacttatttggtggagatgaaatttcaagacagcagtatcgcagggccctgttacataaaccagagatgataaaacagatacttccagaacatagtgtgcttcaaaacattaattttgttgaagcatttcaagatgagctattagtaactgaagtatatgatcttccccaacgacctaatgatgttcagctcttttatggaagcatgtgtaaaattatactttcagtaattggagaattcagagattgcatttctagcagagaattccttcagccttcttccaaagctagcttggaatctacaagcgacttgggagcttctgggaaacatggtggcaacgtctctttggatgttttaccagtcaaaggtcctcagggttctcctcttctctcacgggcggctcgcccgcctctggatcagctggcctccgaagagccgtggactgtcctacccgagcacttgattctggtagctccttctccttgtgacatggcaaaaactggacgtttccagattgtgaataactctgtgaggttactgagatttgagctgtgctggccagcgcattgcctcacagtcacgccgcagcatggatgtgtcgcgccagagagtaaactacaaattcttgtgagtcctaattcctccttatccacaaaacagtcaatgttcccgtggagtggtttgatctatatacactgtgacgatggacagaagaaaattgtgaaagttcaaattcgagaagatttaactcaagtggaacttttaactcgtttgacctccaaaccatttggaattctttccccagtatctgagccttcagttagtcatttggtcaaaccaatgacaaaaccgccttccacaaaagttgaaataagaaacaagagtattacttttcctacaacagaacctggtgaaacttcagagagctgtctagaactcgagaatcatggcaccacagacgtgaaatggcatctgtcatctttagcgccaccttatgtcaagggagttgatgaaagtggagatgtttttagagctacctatgcagcattcagatgttctcctatttctggtctgctggaaagccatgggatccaaaaacaggcagcttgatgtgactgctcgtggagtttatgccccagaggatgtgtacaggttccggccgactagtgtgggggaatcacggacacttaaagtcaatctgcgaaataattcttttattacacactcactgaagtttttgagtcccagagagccattctatgtcaaacattccaagtactctttgagagcccagcattacatcaacatgcccgtgcagttcaaaccgaagtccgcaggcaaatttgaagctttgcttgtcattcaaacagatgaaggcaagagtattgctattcgactaattggtgaagctcttggaaaaaattaactagaatacatttttgtgtaaagtaaattacataagttgtattttgttaactttatctttctacactacaattatgcttttgtatatatattttgtatgatggatatctataattgtagattttgtttttacaagctaatactgaagactcgactgaaatattatgtatctagcccatagtattgtacttaacttttacaggtgagaagagagttctgtgtttgcattgattatgatattctgaataaatatggaatatattttaa

SEQ ID NO: 116505 - DNA, 573 bp, Homo sapiens
  Payload ID: 2729
  Gene Symbol: CEP192
  Gene Name: centrosomal protein 192kDa
  ENST ID: ENST00000508150
  CDS Start-End: 1-144
aacactggctcccgagcagcttttgttaaagcagtaggttttaaggattctcagaaaaaagttttgctggatcctaaagtattgaggatttttccagataaatttgtactcaaggaaagaacacaagaaggccctgttacataaaccagagatgataaaacagatacttccagaacatagtgtgcttcaaaacattaattttgttgaagcatttcaagatgagctattagtaactgaagtatatgatcttccccaacgacctaatgatgttcagctcttttatggaagcatgtgtaaaattatactttcagtaattggagaattcagagattgcatttctagcagagaattccttcagccttcttccaaagctagcttggaatctacaagcgacttgggagcttctgggaaacatggtggcaacgtctctttggatgttttaccagtcaaaggtcctcagggttctcctcttctctcacgggcggctcgcccgcctctggatcagctggcctccgaagagccgtggactgtcctacccgagcacttgattctggtagctccttctccttgtga

SEQ ID NO: 116506 - DNA, 491 bp, Homo sapiens
  Payload ID: 2729
  Gene Symbol: CEP192
  Gene Name: centrosomal protein 192kDa
  ENST ID: ENST00000585938
  CDS Start-End: 1-220
tcctgtgccgtctgttggtacaaactgtggaattgaaccatgggattcaggagtgacatcaggattggggagtgtccgagtgcccgaggagttgaagcttcctcatgcttgctgtgtcgggatcgcttcccagaccctcctcagtgtgcttaatccaactgaccgctggctgcaagtcagcattggggtcctcagcattagtgttaatggtgaaaagtgaccatttgaacattggtgagtggagaggggggatatatggtcagcagctgttttgaaatgtcccagttttacgactgttacttgtgaatcagtattggtggatgcttccctcgtgcctcttagtggccatcgtctgcctggtggatctttcaacatatcgttgtttagttttcaagaataaagccatcataagacctcatgccacagaagagataaaagtgctttttataccatccagtcctggggttttcagatgcacattcagtgttgct

SEQ ID NO: 116507 - DNA, 706 bp, Homo sapiens
  Payload ID: 2729
  Gene Symbol: CEP192
  Gene Name: centrosomal protein 192kDa
  ENST ID: ENST00000507064
  CDS Start-End: 66-278
ctcttcagtccgtggactttcccgctgcacactgccctccgaagtcggggacgcgggctcgtgagatggaagattttcgaggtatagcagaagaatcatttccaagctttctcaccaattcattatttggtaacagtgggattttggaaaatgtcactctttcttcaaatcttggcttgcctgttgctgtttctacacttgctagggatagatccagcactgataacagaatatggcaacacagattctcaaaagacatctatgaattacatttctagctacacaaggagactactgaactgtctcttgatatctcatgagtttctggtccatcttaggttaggtgtctgttccaaatacagtcacctgtgactagagttttgggtcattggatctatttagaggtatcctgatatccaggcatcttacttagtagaagggagattttcagttccatccgggtcatctcccggaagccagagtgatgctgaaccaagagagaggttacagcttagcttccaggatgatgattctatctctaggaaaaagagctatgtggaaagtcaacgtttgtcaaatgctctcagcaaacagtcagctttacaaatggagacagcaggaccagaagaggagccagccggagctacagaatccttgcagggccaagatctcttcaacagggcttcaccactggaacaagcacaag

SEQ ID NO: 116508 - DNA, 1172 bp, Homo sapiens
  Payload ID: 2730
  Gene Symbol: CEP19
  Gene Name: centrosomal protein 19kDa
  ENST ID: ENST00000399942
  CDS Start-End: 296-682
gtcgctgtggaaaccgctaggccagcgctcgccgggacctggaatccctgtacgccgaggtgggagccggtggaccggtcccccagccggcccccacctccgcttcccggtgtttgagggttcgggcctcccgccggggagttcacccctcgggctcgtcagtagggctgtggctgtcgcctcttcctgcagcgccaggctccgcccggtctcacagtcggcttaggggctttgcgtgcactgcggttgggtggaaaaacccactcctggttgtttagacgttggcctgcagacgatgtcatttctgtattcctctaaggattgcaccagagctgctgaacaattaaagaataatccgcgacacaagagttacctagaacaagtatccctgaggcagctagagaagctattcagttttttacgaggttacttgtcggggcagagtctggcagaaacaatggaacaaattcaacgggaaacaaccattgatcctgaggaagacctgaacaaactagatgacaaggagcttgccaaaagaaagagcatcatggatgaactttttgagaaaaatcagaagaagaaggatgatccaaattttgtttatgacattgaggttgaatttccacaggacgatcaactgcagtcctgtggctgggacacagagtcagctgatgagttctgataccaaacactcaaaacatgcattgggctagcagaatatccatgtttattaccagactggttctggaagaagctgtaaagaatactaaatatgttgggttataggggattgaccatgttacttttcaaaaccaggacatttaaagcatctactatgtaggtgcatgaggagtatgggaaaaacagaataaaggaatctgcctttaaggagcttacaatcatgccgggtgcggtggctcacgcctgtaatcccagcactttgggaggctgaggcgggtggatcacctaaggtcaggagttcgagaccagcctagccaacatggtgaaacctcgcctctactaaaaatacaaaaattagccaggcgtggtggcgggtgcctgtaatcccggctactcaggaggctgaggcaggagattcgcttgaacctgggaggctgaggttgcagtgagccgagatcgcgccattgtactccagcctgggcgatgagcaa

SEQ ID NO: 116509 - DNA, 2201 bp, Homo sapiens
  Payload ID: 2730
  Gene Symbol: CEP19
  Gene Name: centrosomal protein 19kDa
  Uniprot ID: Q96LK0
  ENST ID: ENST00000409690
  CDS Start-End: 424-927
gggcgggcgaggagctgcgcacgcgcggggacgcgcgcccggcctgtcgctgtggaaaccgctaggccagcgctcgccgggacctggaatccctgtacgccgaggtgggagccggtggaccggtcccccagccggcccccacctccgcttcccggtgtttgagggttcgggcctcccgccggggagttcacccctcgggctcgtcagtagggctgtggctgtcgcctcttcctgcagcgccaggctccgcccggtctcacagtcggcttaggggctttgcgtgcactgcggttgggtggaaaaacccactcctggttgtttagacgttggcctgcagacgatgtcatttctgtattcctctaaggcaggaagtcattatgcaacttacacatattcatcagatttcctctgacttacccggacatgtacatgggaatgatgtgcactgccaagaaatgtgggattaggtttcagcctccagctattatcttaatctatgagagtgaaatcaaggggaaaattcgccagcgcattatgccagttcgaaacttttcaaagttttcagattgcaccagagctgctgaacaattaaagaataatccgcgacacaagagttacctagaacaagtatccctgaggcagctagagaagctattcagttttttacgaggttacttgtcggggcagagtctggcagaaacaatggaacaaattcaacgggaaacaaccattgatcctgaggaagacctgaacaaactagatgacaaggagcttgccaaaagaaagagcatcatggatgaactttttgagaaaaatcagaagaagaaggatgatccaaattttgtttatgacattgaggttgaatttccacaggacgatcaactgcagtcctgtggctgggacacagagtcagctgatgagttctgataccaaacactcaaaacatgcattgggctagcagaatatccatgtttattaccagactggttctggaagaagctgtaaagaatactaaatatgttgggttataggggattgaccatgttacttttcaaaaccaggacatttaaagcatctactatgtaggtgcatgaggagtatgggaaaaacagaataaaggaatctgcctttaaggagcttacaatcatgccgggtgcggtggctcacgcctgtaatcccagcactttgggaggctgaggcgggtggatcacctaaggtcaggagttcgagaccagcctagccaacatggtgaaacctcgcctctactaaaaatacaaaaattagccaggcgtggtggcgggtgcctgtaatcccggctactcaggaggctgaggcaggagattcgcttgaacctgggaggctgaggttgcagtgagccgagatcgcgccattgtactccagcctgggcgatgagcaaaactccatctcaaaaaaaaaaaaaaaaaaaagcttacaatctgactggaagatgtcaaaacctgtgaaaagctaattagcagtattaagcaacacaaacattagtgccaaatgcatgataaaggctaaagaaggccagagcatatattactgtagagtagaatagtaagggaagactttgtcctttagtaaagagataggaggtggcctggcccttgaaatagtagtgtttaggtagatgcttgtgtaggattcctgataagagcaactgaaaagaaggagaggggaagtagtaaagggacaagaaacaattttttttttgaggaaccataagcaaattatagtttgacaagacaagattgggggacatatatggttaccagggaattacctcttatgtgttatatctttatattatttatctctggaaaagagtaccctgcaaaattccctacagctgcaagcagatgtcacttgatggacagagggggaattctgcccctccggtatcgggaaatacatactaaagacattgcgaaacgctgaacctcttcccataaataaaaggtttgtttgtaaaatgggaaatccacccataataaatgaacaataggcactgccagtttaggcctgttcatgaatggatctgcaagacagcatcttcgtttaacaacattatctgtgatttgatacatttatccttattacaatattgtttagttggtagaaattctatgttttctacaaggaaattgatgtttattaaataaaactgaaaataatta

SEQ ID NO: 116510 - DNA, 1419 bp, Homo sapiens
  Payload ID: 2731
  Gene Symbol: CEP250
  Gene Name: centrosomal protein 250kDa
  ENST ID: ENST00000397524
  CDS Start-End: 326-1345
gttactttcccggcccctcgttgacaccgttcacaggtggctgttggtctttagtaagggtgctgtcttccctgtctgatccttagcaaaagtaggaaggtagagttgttggcagaaatcctgggataagagaatagtttcctggaagatctgtgcctccaaccagcagagagggattgagcttcattgaactcaacagagccaacatttcatagcaccatgttcaagaggaggttgaagtggcatggcaatggttagagaccctgctgggcgtgaacaccctctggctacctagggacctgtgggcctaccacctggtgccctcatggagacaagaagccctgggttgaacaacatgaagccccagtcactgcagctggtactggaagagcaggtgctggcactacagcagcagatggcagagaatcaggcagcctcctggcggaagctgaagaactcccaggaggcccagcagagacaagcaacccttgtgaggaagctgcaggccaaggtgctgcagtaccgaagctggtgccaagagctggagaagcggctagaagccactggaggaccaatcccccagaggtgggaaaatgtggaggagccaaacctggatgagctgctggtccgattggaggaggagcaacagaggtgtgagagtctagcagaggtgaacacccagcttcgactgcacatggaaaaagctgacgtggtgaataaagcccttagggaagatgtggaaaaactgacagtggactggagccgggcccgggatgagctaatgaggaaggagagccagtggcagatggagcaggagttcttcaagggctacctgaaaggggagcacggtcgccttctcagtctatggcgggaggttgtgacattccgacgccacttcctggaaatgaagtcagctactgacagagatctgatggagctaaaagctgagcatgtgaggctttcagggtctctgttgacctgttgtctgcgcttgactgtgggagcacagtctcgggaacccaacggatctggaagaatggatgggcgggagccggcccagctgctgctgctactagccaagacccaggagctggagaaggaagcccatgaaaggagccaggagttaatacagctgaagagtcaaggggatctggagaaggctgaacttcaggaccgggtgaccgagctctctgctctgttgacccagtctcagaagcaaaatgaagattatgaaaagatgataaaggctctgagagagacagtggagatcctggtacatgatcctttgctctggaaaggagttgggcgtgggcttgtaggttccttgtgctttatggacagatagtgcaggataccagttacatattccatgatgaaatcctctaaagctaaaaaataaattttggctgaatctgaaaa

SEQ ID NO: 116511 - DNA, 15703 bp, Homo sapiens
  Payload ID: 2731
  Gene Symbol: CEP250
  Gene Name: centrosomal protein 250kDa
  Uniprot ID: Q9BV73
  ENST ID: ENST00000397527
  CDS Start-End: 721-8049
cgttcgggcagcggcctcttgttacccgggaggaacccgaggcccagagaggggctgggacgcgtcgttagggcccggggcccgcttgcctcagcttcttgctgccgccagcacgctaagctccagtcggcgccgaaggagagcttcccgaccctcgtgtccagtagccgcaatcccaggctgggagggtgaggcgccgcgctctgccgcccccccgcccctcgctccctgtgtcctggcggatttgcacgtaatctatccgaaagcccagtcccacccgccacccgactctggagctcccattcttcaggaccctgctgaagtatcgcttctcagccgccttctccaggcgcagctgcattcgcttctcggtttttgcactcgctgtgcaccgagttactttcccggcccctcgttgacaccgttcacaggtggctgttggtctttagtaagggtgctgtcttccctgtctgatccttagcaaaagtaggaaggtagagttgttggcagaaatcctgggataagagaatagtttcctggaagatctgtgcctccaaccagcagagagggattgagcttcattgaactcaacagagccaacatttcatagcaccatgttcaagaggaggttgaagtggcatggcaatggttagagaccctgctgggcgtgaacaccctctggctacctagggacctgtgggcctaccacctggtgccctcatggagacaagaagccctgggttgaacaacatgaagccccagtcactgcagctggtactggaagagcaggtgctggcactacagcagcagatggcagagaatcaggcagcctcctggcggaagctgaagaactcccaggaggcccagcagagacaagcaacccttgtgaggaagctgcaggccaaggtgctgcagtaccgaagctggtgccaagagctggagaagcggctagaagccactggaggaccaatcccccagaggtgggaaaatgtggaggagccaaacctggatgagctgctggtccgattggaggaggagcaacagaggtgtgagagtctagcagaggtgaacacccagcttcgactgcacatggaaaaagctgacgtggtgaataaagcccttagggaagatgtggaaaaactgacagtggactggagccgggcccgggatgagctaatgaggaaggagagccagtggcagatggagcaggagttcttcaagggctacctgaaaggggagcacggtcgccttctcagtctatggcgggaggttgtgacattccgacgccacttcctggaaatgaagtcagctactgacagagatctgatggagctaaaagctgagcatgtgaggctttcagggtctctgttgacctgttgtctgcgcttgactgtgggagcacagtctcgggaacccaacggatctggaagaatggatgggcgggagccggcccagctgctgctgctactagccaagacccaggagctggagaaggaagcccatgaaaggagccaggagttaatacagctgaagagtcaaggggatctggagaaggctgaacttcaggaccgggtgaccgagctctctgctctgttgacccagtctcagaagcaaaatgaagattatgaaaagatgataaaggctctgagagagacagtggagatcctggagacaaatcacacagaattaatggaacatgaagcatctcttagtaggaatgcgcaagaggagaagttgtctttacagcaggtgatcaaggatataacccaggtcatggtggaagaaggggacaatatagcccaaggctctggtcatgagaactctttggaattggactctagtatcttctcccagtttgattaccaggatgcagacaaggctcttactctggtgcgttcagtgctgactcggagacgccaggctgtgcaggacctaaggcagcagcttgcaggctgtcaagaggctgtgaacttgttgcaacagcagcatgatcagtgggaggaagagggcaaagccttgagacagcggctgcagaagctcactggggagcgggacactctggcagggcagactgtggacctccagggagaggtggactctctcagcaaggagcgagagctgctgcagaaggccagggaagagctgcggcagcagctggaggtgctagagcaggaggcatggcgcctgcgaagggtaaatgtggagcttcagctgcagggggactctgcccagggccagaaggaggaacagcaggaggagctgcacctggctgtccgggagagggagcgtcttcaggagatgctgatgggcctggaagccaaacagtcagaatcactcagtgaactgatcactcttcgggaagccctggagtcaagtcacctggaaggggagttactgaggcaagagcaaacggaagtgaccgcagcgctggctagggcagagcagtcaattgcagagctgtcgagttctgaaaacaccctgaagacagaagtagctgatcttcgggctgcagctgtcaagctcagtgccttaaatgaggctttggcgttagataaagttgggctgaaccagcagcttctccagttagaggaggagaaccagtctgtgtgcagcagaatggaggccgcagagcaggcgagaaatgctttgcaggtcgacctggcggaggcagagaagaggagggaagccctgtgggaaaagaacactcacctggaggctcagctgcagaaagctgaggaggctggggctgagctgcaggcagatctcagggacatccaagaagagaaggaagaaattcaaaagaaactaagtgagtcacgtcaccagcaggaggcagccacgactcagctggagcagctacatcaggaggcaaagcgacaggaagaagtgcttgccagggcagtccaggagaaggaggccctagtacgagagaaagcggctctagaggtgcggctgcaggccgtggagcgtgaccggcaggacctcgctgaacaactacaggggctcagctcagccaaggagctactggagagcagtctgtttgaagcccaacaacaaaattctgtgatagaggtcaccaaggggcagctggaggtccagattcaaactgtcactcaagccaaggaagtaatccaaggggaagtgaggtgcctgaagctggaactggacactgaacggagtcaggcagagcaggagcgggatgctgcagccagacagctggcccaggctgagcaagaagggaagactgccttggagcagcagaaggcagcccatgagaaagaggtgaaccagctccgggagaaatgggagaaggagcgctcctggcaccagcaggagctggcaaaggctctggagagcttagaaagggaaaaaatggagctggaaatgaggctaaaggagcagcagacagaaatggaggccatccaggcccagagggaagaagaacggacccaggcagagagtgccctatgccagatgcagctggaaacagagaaggagagagtatccctcctggagacactgctgcagacgcagaaggagctagcagatgccagccaacaactggaacgactgaggcaggacatgaaagtccagaaattaaaggagcaggagaccactgggatactacagacccagctccaggaggctcaacgggagctgaaggaggcagcccggcagcacagagatgaccttgctgccctccaagaagagagcagctccctgctgcaggataagatggacctgcagaagcaggtggaggacttgaagtctcagctggtggcccaggatgactcccagaggctggtggagcaggaggttcaggagaagctgagagagacccaggagtataaccgaattcagaaggagctggagagagagaaagccagcctgactctctcactgatggaaaaggaacagagactccttgttttacaagaagctgactctattcgacaacaagagctgagtgccctgcgccaggacatgcaggaggcccagggagaacagaaagagctcagtgctcagatggaattactaaggcaagaggtgaaggaaaaggaggctgactttctggcccaggaagcacagctgctggaggagctggaggcgtctcatatcacggagcagcagctgcgagcctccttgtgggcccaggaagccaaggcagcccaactacagctgcgactgcgcagcacagagagccagctagaagcgctggccgcagagcagcagcccgggaaccaggcccaggcccaggcccagctggccagcctctactctgccctgcagcaggccctggggtctgtttgtgagagcaggcctgagctgagtggtgggggagactctgctccttccgtctggggccttgagccagaccagaatggagctaggagcctctttaagagagggcccctgctgactgctctctccgctgaggcagtagcatctgccctccacaagcttcatcaagacctgtggaagactcaacagacccgggatgttctgagggatcaggtccagaaactggaagagcgtctaactgatactgaggctgagaagagccaggtccacacagagttgcaggatctgcagagacagctctcccagaatcaggaagagaaatctaagtgggaaggaaagcagaactccctagaatctgagctgatggaactacatgaaactatggcatccttacagagtcgcctgcggagagcagagctacagcgaatggaagcccagggtgagcgagagttacttcaggcagccaaggagaacctgacagcccaggtggaacacctgcaagcagctgtcgtagaagccagggctcaggcaagtgctgctggcatcctggaagaagacctgagaacggctcgctcagcactgaagctgaaaaatgaggaagtagagagtgagcgtgagagagcccaggctctgcaagagcagggcgaactgaaggtggcccaagggaaggctctgcaagagaatttggccctcctgacccagaccctagctgaaagagaagaggaggtggagactctgcggggacaaatccaggaactggagaagcaacgggaaatgcagaaggctgctttggaattgctgtctctggacctgaagaagaggaaccaagaggtagatctgcagcaagaacagattcaggagctagagaagtgtaggtctgttttagagcatctgcccatggccgtccaggagcgagagcagaagctgactgtgcagagggagcagatcagagagctcgagaaggatcgggagactcagaggaacgtcttggagcatcagcttctagaacttgagaagaaagaccaaatgattgagtcccagagaggacaggttcaggacctgaaaaagcagttggttactctggaatgcctggccctggaactggaggaaaaccatcacaagatggagtgccagcaaaaactgatcaaggagctggagggccagagggaaacccagagagtggctttgacccaccttacgctggacctagaagaaaggagccaggagctgcaggcacaaagcagccagatccatgacctggagagccacagcaccgttctggcaagagagctgcaggagagggaccaggaggtgaagtctcagcgagaacagatcgaggagctgcagaggcagaaagagcatctgactcaggatctcgagaggagagaccaggagctgatgctgcagaaggagaggattcaggttctcgaggatcagaggacccggcagaccaagatcctggaggaggacctggaacagatcaagctgtccttgagagagcgaggccgggagctgaccactcagaggcagctgatgcaggaacgggcagaggaagggaagggcccaagtaaagcacagcgcgggagcctagagcacatgaagctgatcctgcgtgataaggagaaggaggtggaatgtcagcaggagcatatccatgaactccaggagctcaaagaccagctggagcagcagctccagggcctgcacaggaaggtaggtgagaccagcctcctcctgtcccagcgagagcaggaaatagtggtcctgcagcagcaactgcaggaagccagggaacaaggggagctgaaggagcagtcacttcagagtcaactggatgaggcccagagagccctagcccagagggaccaggaactggaggctctgcagcaagaacagcagcaggcccagggacaggaggagagggtgaaggaaaaggcagacgccctccagggagctctggagcaagcccatatgacactgaaggagcgtcatggagagcttcaggaccacaaggaacaggcacgaaggctggaggaagagctggcagtggagggacggcgggtccaggccctggaggaggtgctgggagacctaagggctgagtctcgggaacaggagaaagctctgttggccctccagcagcagtgtgctgagcaggcacaggagcatgaggtggagaccagggccctgcaggacagctggctgcaggcccaggcagtgctcaaggaacgggaccaggagctggaagctctgcgggcagaaagtcagtcctcccggcatcaggaggaggctgcccgggcccgggctgaggctctgcaggaggcccttggcaaggctcatgctgccctgcaggggaaagagcagcatctcctcgagcaggcagaattgagccgcagtctggaggccagcactgcaaccctgcaagcctccctggatgcctgccaggcacacagtcggcagctggaggaggctctgaggatacaagaaggtgagatccaggaccaggatctccgataccaggaggatgtgcagcagctgcagcaggcacttgcccagagggatgaagagctgagacatcagcaggaacgggagcagctgctggagaagtctctggcccagagggtccaagagaatatgatccaagagaagcagaatctggggcaagagagagaagaggaggagataaggggccttcatcagagtgtaagggagctacagctgactctagcccaaaaggaacaggagattctggagctgagggagacccagcaaaggaacaacctggaagccttaccccacagccacaaaacctccccaatggaggaacaatctctaaaacttgattctttagagcccaggctgcagcgggagctggagcggctacaggcagccctgagacagacagaagccagggagattgagtggagggagaaggcccaggacttggcactctccctagcgcagaccaaggccagtgtcagcagtctgcaggaggtagccatgttcctacaagcctctgtcctggagcgggactcagaacagcaaaggctgcaggatgaactggagctcaccagacgggctctggagaaggagcggctacacagcccaggtgcaaccagcacagcagaactggggtccagaggggagcagggtgtgcagctgggagaggtctcaggagtggaggctgagcctagtcctgatggaatggagaagcagtcatggagacaaaggcttgaacacctgcagcaagcagtggcccggctggagattgacaggagcaggctgcagcgccacaatgtccagctgcggagtaccttggagcaggtggagcgagaacggaggaagctgaagagggaggccatgcgtgcggcccaggcagggtccctagagatcagcaaggccacggcttcttcacccacacagcaggatgggagaggacagaagaactcagatgccaagtgtgtggctgaactgcagaaagaggtggtcctgctgcaagctcagctgactttggagcggaagcagaagcaggactacatcacccgctcagcacagaccagccgtgagctagcaggcctgcaccacagcctctcacactcacttcttgccgtggcccaggcccctgaggccactgtcctggaggcagagacccgcaggctggatgagtccctgactcaaagtctgacatccccagggccagtcctgctacaccccagccccagcactacccaagccgcctccaggtagcagccacagccaggagcacacagacagaagactgtgtcatgggtcatggcccctccgcacacctacaggtttgccaaaggaaaagcctggctctgttaggcacccaggagccccaggtcggcgggtgttcccaggaagaggaagtaaatctgcaaccctggggaggaccccaactcacctgggaatgaggcaaattgcatttgcttgctccctatggaatcacccagaggggtgccttgccctggctgagggacatgtactgcctctcatctagaatttattttcctagcacttcaccacctccttcatcttctccttcaacaataaaccctgggatctttgcattcattttctgctgctgtctccacttgtgcagctgggtggcagcaccacatcaagggagtttatctgggaagaacttgccaaagattcctgttgaggtagcatgcatttattgtacaccatgcactgtgatagggaagggttacagagaacacacaagacaaagcccctgtccacagacagcctacagtccagttgatgagaacaggctaacactcatttatgagtcagaggcaattctgtgtactgactagaagaactgtagaaattccaggggctgaggaagggaggcacgaactggcccttgaaagatggagtggggttggaggtgttgccaagcacacagtgagaagactggtctgactgtggcagggggttggggctgagcttgggtgggttgagcggggagattttggagggttaaaagaagttctggggcctcaaaaacacagcgttgacctttagctaaagtcagagtctctgagttcagaagctccacatggcctcattcctcttctactctgggtgaatgtccttgagatgtcgcttcctgggcatatcagctggaactgatctggtcgcctgtagtccaaccatgtgtcaagccaatcagaaggatggactatggcggaacttctcacccatggactggtcctagtggaggctggacagaacccagctcacaggcttaagacctattgctggcaacctcctcaaagcctaaaaattgtttaatttttttaagagacagggttttgtcctgtcttccaagctggagtgcagtggcacaatcacatcttactgcagcctgaaactcctgggctcaagtgatcctcccacctcaacctctcaaagtgctgggattaccggtgtgagccaccatgcccaaccagaacagttttccttaaagaagcaggccattaccttcctctggcactcccaccataatctggaattcctctttactaagcctggggatggaactgagacctagccaagaatctgggaggggtaagagcagcacccactcacccagacctcctaatttggggctcagccccattatgtctcattgcaccacacagagtggaaatggggctgttcacagcgactagagctttgttccagaaacctacacatgcagctcagcaacagatgcttagtgaaaacttctgaaaccccagaaacagatctggggccccagaaatgctgtcctggtccctatttccagtcagattccctgtagcttaaaatccttacctggcttttaggccatttatttctttttcctttttttttttttgagacagagttttgctcttgttgcccaggctggagtgcagtgacgtaatctcggctcaccagtggcaacatccacctcctgggttcaagcaattctcctgcctcggcctcctgtgtatctgggattatagacacgtgccaccatgcccggctaattttgtatttttagtagagacagggtttctccatgttgatcaggctggtctcgaactcccgacctcaggtgatccacccacctcggcctcccaaaatgttgggattacgggcatgagccaccgcgcccggccctttaggccatttttatgctaggagttgtcagagacaagacttctcttggttgttcacttgttacatcctccagccctggttctcaggctcgggctgacagagggtccctgttttttaccttagagtttcttctcagcatcattttctgtaggtcatgagccagggccttaggccccacataccttctgggcctcagagaggttccagcagctgaaagacatcttagaggctgccaagcagggtctttattcaggactagactaatctgtatttgctcttctctttccatccaaccctcaagagccccccagctccattatagacctcggcctagggtctcccctccccaccagatattcagagcagggctggccttcagttcaagtgtagactgtgctcttgccctcacactcgagcttgtggatgatcttccactccggctttctaaagtacactttccttgcccagtagcaggattgcctctgtggagtgtcccaccaataatggtgacaactgctgttttcatcagctccagacccaaagagacctgaagtggggaagtgtgaaggaaggaatatgtgtcatccaggggggacccaactttgcctaagggcatgaggccggagcctcctttcctgaccttgtcacatgtggcagggtataaccagaatggtgaatccagcagacgggaggagtccctggcagtccagccagttctcgtggatgtacttgaggaaggtgcaattggccaccagaacatgcaggagtagaggttagagctcagccacagagattatcttcttgcagaaaacttttttcccccttcctaatcttgtctgctttgatagaagctggtactggctggaaaggcctgaaagcaggaggggacaagagtcgtcagaggctgggcaatgttcttgtttccggggagtgctgaggtccggcgggtgctgcccctgttctctcaaggatcccacgtgctttgtgtgttagagcagtgaccatcacctcccaacccaaggacctttgctgctctgcttcccacatgggactgccagcaccctgaaggcagaaaaactgaatgtacccgttaaaggaggagaagctggtggtgtatgttgagataaggagggtggggagtgtacagttacaggctgcacagggagggcaagatcaatgttgacaccaaagtgccaaaggctgtctgcgccaggtctggggcccccactggtcataccgcctgataaaaccattgcagtccacactaggtctggaggcttcgacacccacagcatgtgggtgttctcatgcaggccatgagtattcggggtgctttaagtgcaggggagttctgttgtccacgttattcttaaagcccagaataggccctgttttattctacagagataggaaggcactggggctcacagagtggtgctgcttcccaccctcacccttctgcccccacctgagcacagtgtggtgctcagtgatggttatcctatattccaaatacgcatggcccaggactggcagagtcggagctcggggtctagctgtgacctggggatcggttggagtagcttcttgaccagccggaattgggttaggtgtcctagcattggtgcctatggagaagaacacagactgtttatcactcacccctggttccagtaccaaggaaaggctggagccattgcaactggaggcccagcggaggaagggatcaagaagaggatgcagcccagagcccaggaccgagcatccaccggcctctggagatggcgtggtctccagttgcatcggggcttcagggcccatctgaagtgctgatcaaaccaggcagacacaccatgctggtgaaggcaggctttgtagatgcggggctgaattgagcagccacagaacctctgcagctctggggccagtggcagaacttctagaagtacctgtggggtgggaaaccccagccacaaaagcagtgagctgacttccaggcctgaggctttgcctgcaggcctcatctcagcccatgggacagattcctggtttttttagtttggccttggggtagatgataccttcagctgtccaccctgcaatacctcacctcctgccttctgacccagtactctgcagagcgggggaatggggccaggggacaggggcagggaagaggaagaagcaagagctgccagtgtgctccaaaccaagagagccctccacatgattctgggcacagctgaggaggagtgcaagctcaactctgctcaccacacttaagaagcaggcaagggaggatgaagggcaaaaacatggggtcctgaggcccttttactccctctaccctgctggaggtgaggatgagaggtgagacttcgttggactgtgctcctggccagttgatctcacccaactcattacatcagtagcctggtcacagggtggacactctgacctcttcttagcctttcattggcaatactaccagctctatatatgcccttatagggcctgaaccttggctcaggtggatgggcttggaggtaaaataattgaatgggtcaggggtaggaggagagatgagtctctgccaaggctgtgtgatgtgtcatctgagagagtgggtaacccctattcccagcacatggccatttatttagagccagggagggggacgagaattcatattcaaatgtgattctttcttaattactaccagttgttcaggtgagggaatcagggaaggccagattaataatccacacattgcccttgcacctcctgtcttggtttcctatcaaaacctctcccgtatctatgaacattccagccctgcaggtcagattgctggccaggagtagtctcacattctagctgactgatggcctcggcttctgctgttgtatgtggtttgatgattcatgctggagcctttggctataactctcttccctgtataagggccatctgaagtttgtctgcctgactccattacctggtgaatgagattggctagctgctgctcctgccccagctattcagtcatttggcaaatactcatttaaacaaagctccacagggatctctgagaaggagctcacctctaggcacacagaacctggacacagatgaaagtttgcagaatgacccagttgtgcagaagagacccactggctgctctcagtgaggccagggagagtcaaacagagcatcttggacaaagagagggcttgaaggccctttcaaagtgtcaagccagttggatgcacgggttgtgtggagtccaggggtacatccagaagcaatggcaggtgttatccattcattcaggttagacctctgagcagacggcagaaacgtcagccacaggtgagcataagctcaaacccccccattgaaggctacattcttgtcccacagggcagagcacatggcaagtggcatgctgactcagacaccgggcactgagaaaagtgggaagccatggtcacagactctacattcccctctcctgttggcctccatcccttcctcaaccgtccgcagaacacctccttccagcaccttagctcctgcctccctctggacctattcagtcctcaagggtgccctgctaaaggctgggctgaaagctaagaggagaggtggcattcaatgtgtcctgtgtcctccctggggttgattaaggggtcgatgcccaatagagtccttcatcttggtgttcagcccagggtccagctgccaagggaaggcttggcaatcaagggtgatggagataagaatgaaaaggggcaccaccctgtgccaaagctggcatgttgtatatctgagagaggagctgcctattcacagtgtagggttgtcaagctggaggcagggagagaaaagcaagagctttttggttcctcttgaggatagaatctataggaaaatgtaagagggttaaaaataaatttcccatgcatccaaacttttttctttggtagactttcttgtcatctatttaaaatgaaacaagtgcatgtacgtggttaagacattttagctaggaatgatggtgcgtgcctgtagtcccagctacttgggaggctgaggcaggaggatcgcttgaacctggaaggtcaaggctgcagtgagccgagatcataccactgcactccagcctgagtgataaaagtgagaccctgtctcaaaaaaaaaaaaaaaattaaagaagttaaacagtgccgggcttgggggctcacgcctgtaatcccagcactttgggaggcccaggcaggcagattgcttgggctcaggaattcaagaccatcctaagcgaaaaaatataaaaattagctcagtgtgatgatgtgcctgtagtcccagctactcgggaggctgaggtgggaggatcacctgagcccagggaggtcaaggttgcagtgaaccatgatcatgtcactgcactcactccagcctgggcaacagagcaagactgtctcaaaaaaaaaaaaaaaggaaattaaataaaaagaagatagcagtttcccacctcattcttctcaaactcctcttcagaggcagcgggttttgttttttttttaactatgtttttctactggctcactttattcctctaaaatagtaacttgtctatgtggtgccataacgggtccagtatctggacacgaggccgcactacctacacctttggggattctcggatcctgactctgagctacctcattcctagacacctggtgcaccacaatgtgtcagggatgtcggtttatgtgggatatttgcattttgttaggttgtgtgtggtagttgagcagccaagggggtagcatgcggtggatatttgttttagatacacagtaactggaaactcatttactgaggctatttggttaccctgaactactgtttctaccaaaaaggcaggataaatgctccctcaacacacacctttaattaccaattttcagagtaaggggttgaggtaatagccaccgccagttttccctttctctttgagtatcattatgagctcaaagttttttatatattcactatgattcaatcatgacagttgctatttttgatgctcaaattgccgcaaatctaatgtccaagtgttcttgtacttgtctaggcctagaatcttttagtgaagaaaaagtatttagaagacaaaaatcaggctgagtgcagtggctcacgcctgtaatcctagcacttgtgggaggctgaggcaggcggattgcctgagctcaggagttggagaccagcctgggcaacatggtgaaaccccgtctctactaaaatacaaaaaattagccgggggtggcggtgtgcaccttgtagtcccagctactcaggaggctgaggcaggagaattgcttgaacccaggaggcagaggttgcagtgagctgagatcgcgtcactgcactccagcctgggtggcagagcaagactccgtctcaaaaaaaaaaaaaatacgaaaaacaaaaaacataatctggattgcagggctgatcgttgctaatggagtgttatggctgttcagatgacagagggagaaaatgtactttgtaaactgttagttcaatgaggttatgattgcacaacaatgtgaacatacttaatgccactgaactttattgccattgataacttttaaatggtaaattttgtgtattattttgtcacaataaaaagtttgaaaatcga

SEQ ID NO: 116512 - DNA, 918 bp, Homo sapiens
  Payload ID: 2731
  Gene Symbol: CEP250
  Gene Name: centrosomal protein 250kDa
  ENST ID: ENST00000425525
  CDS Start-End: 1-417
atcacggagcagcagctgcgagcctccttgtgggcccaggaagccaaggcagcccaactacagctgcgactgcgcagcacagagagccagctagaagcgctggccgcagagcagcagcccgggaaccaggcccaggcccaggcccagctggccagcctctactctgccctgcagcaggccctggggtctgtttgtgagagcaggcctgagctgagtggtgggggagactctgctccttccgtctggggccttgagccagaccagaatggagctaggagcctctttaagagagggcccctgctgactgctctctccgctgaggcagtagcatctgccctccacaagcttcatcaagacctgtggaagactcaacagacccggagaaatctaagtgggaaggaaagcagaactccctagaatctgagctgatggaactacatgaaactatggcatccttacagagtcgcctgcggagagcagagctacagcgaatggaagcccagggtgagcgagagttacttcaggcagccaaggagaacctgacagcccaggtggaacacctgcaagcagctgtcgtagaagccagggctcaggcaagtgctgctggcatcctggaagaagacctgagaacggctcgctcagcactgaagctgaaaaatgaggaagtagagagtgagcgtgagagagcccaggctctgcaagagcagggcgaactgaaggtggcccaagggaaggctctgcaagagaatttggccctcctgacccagaccctagctgaaagagaagaggaggtggagactctgcggggacaaatccaggaactggagaagcaacgggaaatgcagaaggctgctttggaattgctgtctctggacctgaagaagaggaaccaagaggtagatctgcagcaagaacaga

SEQ ID NO: 116513 - DNA, 2648 bp, Homo sapiens
  Payload ID: 2731
  Gene Symbol: CEP250
  Gene Name: centrosomal protein 250kDa
  ENST ID: ENST00000422671
  CDS Start-End: 1-2634
ctcgagaaggatcgggagactcagaggaacgtcttggagcatcagcttctagaacttgagaagaaagaccaaatgattgagtcccagagaggacaggttcaggacctgaaaaagcagttggttactctggaatgcctggccctggaactggaggaaaaccatcacaagatggagtgccagcaaaaactgatcaaggagctggagggccagagggaaacccagagagtggctttgacccaccttacgctggacctagaagaaaggagccaggagctgcaggcacaaagcagccagatccatgacctggagagccacagcaccgttctggcaagagagctgcaggagagggaccaggaggtgaagtctcagcgagaacagatcgaggagctgcagaggcagaaagagcatctgactcaggatctcgagaggagagaccaggagctgatgctgcagaaggagaggattcaggttctcgaggatcagaggacccggcagaccaagatcctggaggaggacctggaacagatcaagctgtccttgagagagcgaggccgggagctgaccactcagaggcagctgatgcaggaacgggcagaggaagggaagggcccaagtaaagcacagcgcgggagcctagagcacatgaagctgatcctgcgtgataaggagaaggaggtggaatgtcagcaggagcatatccatgaactccaggagctcaaagaccagctggagcagcagctccagggcctgcacaggaaggtaggtgagaccagcctcctcctgtcccagcgagagcaggaaatagtggtcctgcagcagcaactgcaggaagccagggaacaaggggagctgaaggagcagtcacttcagagtcaactggatgaggcccagagagccctagcccagagggaccaggaactggaggctctgcagcaagaacagcagcaggcccagggacaggaggagagggtgaaggaaaaggcagacgccctccagggagctctggagcaagcccatatgacactgaaggagcgtcatggagagcttcaggaccacaaggaacaggcacgaaggctggaggaagagctggcagtggagggacggcgggtccaggccctggaggaggtgctgggagacctaagggctgagtctcgggaacaggagaaagctctgttggccctccagcagcagtgtgctgagcaggcacaggagcatgaggtggagaccagggccctgcaggacagctggctgcaggcccaggcagtgctcaaggaacgggaccaggagctggaagctctgcgggcagaaagtcagtcctcccggcatcaggaggaggctgcccgggcccgggctgaggctctgcaggaggcccttggcaaggctcatgctgccctgcaggggaaagagcagcatctcctcgagcaggcagaattgagccgcagtctggaggccagcactgcaaccctgcaagcctccctggatgcctgccaggcacacagtcggcagctggaggaggctctgaggatacaagaaggtgagatccaggaccaggatctccgataccaggaggatgtgcagcagctgcagcaggcacttgcccagagggatgaagagctgagacatcagcaggaacgggagcagctgctggagaagtctctggcccagagggtccaagagaatatgatccaagagaagcagaatctggggcaagagagagaagaggaggagataaggggccttcatcagagtgtaagggagctacagctgactctagcccaaaaggaacaggagattctggagctgagggagacccagcaaaggaacaacctggaagccttaccccacagccacaaaacctccccaatggaggaacaatctctaaaacttgattctttagagcccaggctgcagcgggagctggagcggctacaggcagccctgagacagacagaagccagggagattgagtggagggagaaggcccaggacttggcactctccctagcgcagaccaaggccagtgtcagcagtctgcaggaggtagccatgttcctacaagcctctgtcctggagcgggactcagaacagcaaaggctgcaggatgaactggagctcaccagacgggctctggagaaggagcggctacacagcccaggtgcaaccagcacagcagaactggggtccagaggggagcagggtgtgcagctgggagaggtctcaggagtggaggctgagcctagtcctgatggaatggagaagcagtcatggagacaaaggcttgaacacctgcagcaagcagtggcccggctggagattgacaggagcaggctgcagcgccacaatgtccagctgcggagtaccttggagcaggtggtcctgctgcaagctcagctgactttggagcggaagcagaagcaggactacatcacccgctcagcacagaccagccgtgagctagcaggcctgcaccacagcctctcacactcacttcttgccgtggcccaggcccctgaggccactgtcctggaggcagagacccgcaggctggatgagtccctgactcaaagtctgacatccccagggccagtcctgctacaccccagccccagcactacccaagccgcctccaggtagcagccacagccagg

SEQ ID NO: 116514 - DNA, 868 bp, Homo sapiens
  Payload ID: 2731
  Gene Symbol: CEP250
  Gene Name: centrosomal protein 250kDa
  ENST ID: ENST00000446710
  CDS Start-End: 377-868
cgcagggccttagcagcggctgccgcagctcaatcgcggagcaactagccgggcgtctgcgggagccgagcgtggtgaggttcacaggtggctgttggtctttagtaagggtgctgtcttccctgtctgatccttagcaaaagtaggaaggtagagttgttggcagaaatcctgggataagagaatagtttcctggaagatctgtgcctccaaccagcagagagggattgagcttcattgaactcaacagagccaacatttcatagcaccatgttcaagaggaggttgaagtggcatggcaatggttagagaccctgctgggcgtgaacaccctctggctacctagggacctgtgggcctaccacctggtgccctcatggagacaagaagccctgggttgaacaacatgaagccccagtcactgcagctggtactggaagagcaggtgctggcactacagcagcagatggcagagaatcaggcagcctcctggcggaagctgaagaactcccaggaggcccagcagagacaagcaacccttgtgaggaagctgcaggccaaggtgctgcagtaccgaagctggtgccaagagctggagaagcggctagaagccactggaggaccaatcccccagaggtgggaaaatgtggaggagccaaacctggatgagctgctggtccgattggaggaggagcaacagaggtgtgagagtctagcagaggtgaacacccagcttcgactgcacatggaaaaagctgacgtggtgaataaagcccttagggaagatgtggaaaaactgacagtggactggagccgggcccgggatgagctaatgaggaaggagagccagtggcagatggagcaggag

SEQ ID NO: 116515 - DNA, 629 bp, Homo sapiens
  Payload ID: 2731
  Gene Symbol: CEP250
  Gene Name: centrosomal protein 250kDa
  ENST ID: ENST00000425096
  CDS Start-End: 1-629
aggaggaacagcaggaggagctgcacctggctgtccgggagagggagcgtctggttgctgggaagatgagagcaatgttttggaaaacgccagcatagaacctggcatatgtcaggagatgctgatgggcctggaagccaaacagtcagaatcactcagtgaactgatcactcttcgggaagccctggagtcaagtcacctggaaggggagttactgaggcaagagcaaacggaagtgaccgcagcgctggctagggcagagcagtcaattgcagagctgtcgagttctgaaaacaccctgaagacagaagtagctgatcttcgggctgcagctgtcaagctcagtgccttaaatgaggctttggcgttagataaagttgggctgaaccagcagcttctccagttagaggaggagaaccagtctgtgtgcagcagaatggaggccgcagagcaggcgagaaatgctttgcaggtcgacctggcggaggcagagaagaggagggaagccctgtgggaaaagaacactcacctggaggctcagctgcagaaagctgaggaggctggggctgagctgcaggcagatctcagggacatccaagaagagaaggaagaaattcaaaagaaactaa
